United States Patent Application Publication US 2011/0182862 A1 - sequence listing, part 3

SEQ ID NO: 2970 - DNA, 1929 bp, Muscodor strobelii
  misc_feature: SGI cDNA ID NO. 560636
  misc_feature: Encodes the peptide sequence at SEQ ID NO 2971
atggcctcgaacagcggagtactagatgccctagatcagccacactctacatacgtcaaggtcacaaacggcaatgctaagtgtgatatgtgtgaccagcgcaatgtttctgccatgcagaaatgcgccagatgcggattgacgacttgtcagagatgccatgtcaacaagaaatacgatcgtcggcatgttctcgagggagtggataatctggattggtcgcatccttataaaccgcctcgtaagcaaagagtccgtcgagaccctgctcagagagacggcgccattattgcacgggcccgtgcaagaaaggcaccaaaagcccctcgtgaaccacgccagtcgggtaatggccttgttcgagagccgtctcattggattgagtatcatgccagaatagatgctatgatcgaggaggtcaaaggcgctgcaaagaagggcaatgccagcacggatagcgccagactcaaccacaacatcaatgaagctgacggtttcgatacagctccggaaggcagcccctattcctccaaacttggtcaattcgtgggatcgggcaaaaatgctgtgcctctcaatacttctaccaatgaaatttccgagacctcaagccgagatgactctcggtctctaagtccacactcggatgtcatgtcgagaactcgcaagcccttgcccacactcaaaacggccggcaaacgccgcatgccgaataaaacatctttggctcatcgtcgaccgggcactgaaacgacagttctgcaggacaaaaagggtgcagtaaattcgatgatgggacctccaggcttcccaaagaggttgccgatgggtcaaatcgagtctggccgtctctcacagcgcatgtccggtcaggtagcccctccttcggcctcgtgtatgcgcccaactcctgagttcaacatgcctgacgctcctagcatgagtttgcagagcacacagtcacaaggagacaacaacagagctttcgtagataccgctctcccacttccctcgcgacgcgtgacgtttacggataatatcccagacattgtcgaagtcgaagatgatcctcacgaccccgaaaattatctggtcaagccggtaactcgagaactactacccggtgcgatccctgctgctagcaccgggaatcgacttgtgttcaagcccaccatcgccaactatcgactcatgtcggatcactatgcagccttgggaaatgacaaactttccgcacagtatgcccaatttgcttcgcaggcgttgcgcctacaaaactccgcgaggcgccaaaccaaacgggagatacgcgatgagaaggcattggatgaggagaatccgcattaccagcagattatgggactacccagcgcatcgcaagctcgaggcgacgcggcgtatcgatcaacccaatacgtccagaagccgaatgaatatatcaagtctgctgagcccgagtcaaagaacttgggatacgccgctcgaaatgatccaggccacgacattgaaatgatagagaccttagaagacaaggcggctgcggttggacattacactttacctgatgatctgactcaccagcgggagattctagccctagttttcgagggcgcgagacagactatcggagagcagcctagcaatactgaagagactaccattctaggatccaacgaagcttcaccagcgcagtacctgcagctcgtgcgagagacacagggtcaagtagctgcccaagactcttgggctcataagtacccgactgagttccaacgagaatggcaactcattgagagacttgtttacacatggcacagcgatgctcatattcatcaagagaaatgcgtgaagggcagaaaagcagcactcaagatgctggaaactggggagtactggcttgaaggcatgcgccagtcactgactgattaa

SEQ ID NO: 2971 - protein, 642 aa, Muscodor strobelii
  misc_feature: SGI Peptide ID NO. 560636
  misc_feature (18)..(71): NCBI GI: 255932393 Blast Desc: Pc12g09260 [Penicillium chrysogenum Wisconsin 54-1255] gi|211582372|emb|CAP80553.1| Pc12g09260 [Penicillium chrysogenum Wisconsin 54-1255]
MASNSGVLDALDQPHSTYVKVTNGNAKCDMCDQRNVSAMQKCARCGLTTCQRCHVNKKYDRRHVLEGVDNLDWSHPYKPPRKQRVRRDPAQRDGAIIARARARKAPKAPREPRQSGNGLVREPSHWIEYHARIDAMIEEVKGAAKKGNASTDSARLNHNINEADGFDTAPEGSPYSSKLGQFVGSGKNAVPLNTSTNEISETSSRDDSRSLSPHSDVMSRTRKPLPTLKTAGKRRMPNKTSLAHRRPGTETTVLQDKKGAVNSMMGPPGFPKRLPMGQIESGRLSQRMSGQVAPPSASCMRPTPEFNMPDAPSMSLQSTQSQGDNNRAFVDTALPLPSRRVTFTDNIPDIVEVEDDPHDPENYLVKPVTRELLPGAIPAASTGNRLVFKPTIANYRLMSDHYAALGNDKLSAQYAQFASQALRLQNSARRQTKREIRDEKALDEENPHYQQIMGLPSASQARGDAAYRSTQYVQKPNEYIKSAEPESKNLGYAARNDPGHDIEMIETLEDKAAAVGHYTLPDDLTHQREILALVFEGARQTIGEQPSNTEETTILGSNEASPAQYLQLVRETQGQVAAQDSWAHKYPTEFQREWQLIERLVYTWHSDAHIHQEKCVKGRKAALKMLETGEYWLEGMRQSLTD

SEQ ID NO: 2972 - DNA, 831 bp, Muscodor strobelii
  misc_feature: SGI cDNA ID NO. 560637
  misc_feature: Encodes the peptide sequence at SEQ ID NO 2973
atgttaatctcgtcggctctgtccgggtgcgactcgtcgcaaggtccggtcactcgtctgcagtcatccctgctggcctctccgcccgcaagcccgccctcaaccgccaatagcgcctttggccgacttgtcaactcatgccatgcgcttcaatccattctatctgcacccgctaccgcgcctactacatctacttcgcctccctccgaacctcttactccgcccatgagctatgcgccgctaccgcctatcaagatgcgcctgcgatcacgcaggcaggatgccgccggcgaggctatcccacgaaagaagatagctaagcgccagtacgcgccccctcgcggtcccaacaagcggcgtcgcgctctcgatgatgacatgggccgggacgacggcaacgacaacgacttcgacagcgagtcggatgtcgcacaccagtccgacggagaagagcaggaggacctagacgacagtaccttcagaccaagcacacccaagcgcgctcgcattgcgcccgaagccatcccactcggccttgaaccttcagatttccacagtatctacaaacctctagaggaggatcaggacagaggcactgacgttgatgttgagcctgatggtgagcgctggagtgtcgaggatgatcgcatcctggtggagcttgttctcgataagctgaagctctccaagtcagactggcaggagtgcgcgcggagcttgggcaaggatcgaaatagtctaggtcggcggtggaagagtctcatgatacatggggatgtcgggctcaagtcgaggactcgacggagtaggatacacggaacctggaggtga

SEQ ID NO: 2973 - protein, 276 aa, Muscodor strobelii
  misc_feature: SGI Peptide ID NO. 560637
  misc_feature (207)..(255): Pfam Id: PF00249 Pfam Desc: Myb-like DNA-binding domain
  misc_feature (1)..(276): NCBI GI: 171687957 Blast Desc: protein product [Podospora anserina] gi|170943940|emb|CAP69592.1| protein product [Podospora anserina]
  misc_feature (1)..(261): NCBI GI: 116180244 Blast Desc: CHGG_00750 [Chaetomium globosum CBS 148.51] gi|88185047|gb|EAQ92515.1| CHGG_00750 [Chaetomium globosum CBS 148.51]
  misc_feature (1)..(276): NCBI GI: 39941674 Blast Desc: MGG_05748 [Magnaporthe grisea 70-15] gi|145022454|gb|EDK06474.1| MGG_05748 [Magnaporthe grisea 70-15]
  misc_feature (1)..(276): NCBI GI: 156057875 Blast Desc: SS1G_04669 [Sclerotinia sclerotiorum 1980] gi|154702454|gb|EDO02193.1| SS1G_04669 [Sclerotinia sclerotiorum 1980]
  misc_feature (56)..(276): NCBI GI: 85111410 Blast Desc: NCU09329 [Neurospora crassa OR74A] gi|28925673|gb|EAA34687.1| [Neurospora crassa OR74A]
  misc_feature (1)..(275): NCBI GI: 256735045 Blast Desc: NECHADRAFT_74494 [Nectria haematococca mpVI 77-13-4]
  misc_feature (1)..(275): NCBI GI: 154323400 Blast Desc: BC1G_00099 [Botryotinia fuckeliana B05.10] gi|150842328|gb|EDN17521.1| BC1G_00099 [Botryotinia fuckeliana B05.10]
  misc_feature (1)..(265): NCBI GI: 46108784 Blast Desc: FG01274.1 [Gibberella zeae PH-1]
  misc_feature (1)..(276): NCBI GI: 258571790 Blast Desc: [Uncinocarpus reesii 1704] gi|237904968|gb|EEP79369.1| [Uncinocarpus reesii 1704]
  misc_feature (1)..(276): NCBI GI: 240109213 Blast Desc: CPC735_027180 [Coccidioides posadasii C735 delta SOWgp]
MLISSALSGCDSSQGPVTRLQSSLLASPPASPPSTANSAFGRLVNSCHALQSILSAPATAPTTSTSPPSEPLTPPMSYAPLPPIKMRLRSRRQDAAGEAIPRKKIAKRQYAPPRGPNKRRRALDDDMGRDDGNDNDFDSESDVAHQSDGEEQEDLDDSTFRPSTPKRARIAPEAIPLGLEPSDFHSIYKPLEEDQDRGTDVDVEPDGERWSVEDDRILVELVLDKLKLSKSDWQECARSLGKDRNSLGRRWKSLMIHGDVGLKSRTRRSRIHGTWR

SEQ ID NO: 2974 - DNA, 2022 bp, Muscodor strobelii
  misc_feature: SGI cDNA ID NO. 560638
  misc_feature: Encodes the peptide sequence at SEQ ID NO 2975
atgtttgttcgtctgtttgttgcagcccttgccggcctggctcttgaagccactgctagcccagttgctggacgtgtcgtccctcgtagccatgttcttcatgaaagacatgcagaccattgggagcaaaggtggactaaaagggccaaggttccgcaggacgccatgattcccatgcgtatcggtttgactcaatcaaatctggatgctggacacgagaagctcatggacatcagcaaccctgacagctctaactacgggcagcatatgagctctgatgaaattatcgacttcttcgcaccagcaaagtcgacaattgatgcggtttacggctggcttacagaagcaggcatatctaaagaccgtatttctctgtcggtcaacaaacagtgggttcagtttgacgccaaaaccggcgaggtcgaggaactgatttttgccgactactatatctgggaacatgtcgatggatcgtctgacatgtccactgaggcctatcacgtgcccgctgccattcaggagcacgtggattatatcactccaggcactagattgagatcgagacatggacagtcccagaagaggaacatgaagcgtgacttccgatttgatgtcaacccaagaccgttcatcacaaagcttcctggcttcccccaccccaactcgacaacttgctcgatctacgtcacggccaattgtactcgggcccaatataacattccagatgccacgactgcttatccaggcaatgagctcggcatcttcgagagtttggacgatcactacagcaaacacgatctcgacgtgtactttgcaactctatatcccgagctggatattcctactggtacttatcccgaagagcgtctcattgatggtgcaattggtgccatcgagactccttctcccatctactctctagaagttggtctggagtcgatgcttgacttcgattcggcttggcccctcatctggccccaaaagacggttctttaccagacagacgatgagtactacgaatacacaggcaacttcagtggattctggaacaccttccttgacgctattgacggttcatactgcaactacgccgcgtatggtgagaagggcaattgcaatgtgcccgagtgcgtggaccctgcataccccgataaccacccaggcggctacaccggcaagttgcagtgtggaaaatacaaaccaactaatgtcatttctgtctcttacggagctgacgaggcctacatacctgacttctacatgaaacgacagtgcaatgagtggatgaagctcgtattgcaaggctctaccgttgtcatgtcttctggcgattcaggtgtcggtgactcccaatactgcccgaacaagactgatggttctcttgccttctcacccgatttcgcatcgtcctgcccctatatcctatcgattggtagcactgagtgggatcggtactcaaacaagacagctgagaagccatatgagaagctgaacgaggtcgccactgcacgcttcccaagtggtggcggtttcagcaacgtgttcaagcaaccctcttaccaggccggcgcagtttctaaataccttgggaccgtcgccaagacactcccatttactggatacagtcaatttgtagctaacggcgacttctcgcatgtcaaatctggagtgtacaataagcttggtcgtgcgtaccccgatgtggccgctgttggcgacagacaggtcgtcctgggaggtggcgattggtatttgattggtggcacctcgctcagcgcccctgtctggggtgccgtactgaccttggtgaacgaaattcgtctcaaggcacacaaacccaccatcggcttcatccaccctatcctgtatgcccatcccgaggtcttcaacgacgttaccgtgggcaccaatgcgggttgtaatacaacgggctttgttgcatccaagggctgggatccagtcacaggattgggatctcccaacttccaaaagttggtgaaggtgctgacagaaggatactag

SEQ ID NO: 2975 - protein, 673 aa, Muscodor strobelii
  misc_feature: SGI Peptide ID NO. 560638
  misc_feature (42)..(185): Pfam Id: PF09286 Pfam Desc: Pro-kumamolisin, activation domain
  misc_feature (29)..(669): NCBI GI: 212545945 Blast Desc: alkaline serine protease AorO, [Penicillium marneffei ATCC 18224] gi|210064646|gb|EEA18741.1| alkaline serine protease AorO, [Penicillium marneffei ATCC 18224]
  misc_feature (17)..(669): NCBI GI: 159124483 Blast Desc: alkaline serine protease AorO, [Aspergillus fumigatus A1163]
  misc_feature (1)..(669): NCBI GI: 145243152 Blast Desc: An11g01110 [Aspergillus niger] gi|134078789|emb|CAK45848.1| protein product [Aspergillus niger]
  misc_feature (17)..(669): NCBI GI: 70992131 Blast Desc: alkaline serine protease AorO [Aspergillus fumigatus Af293] gi|74628146|sp|Q70DX9.1|SED1_ASPFU RecName: Full=Tripeptidyl-peptidase sed1; AltName: Full=Sedolisin-A; AorO,
  misc_feature (28)..(669): NCBI GI: 119471296 Blast Desc: protease S8 tripeptidyl peptidase I (cln2) [Neosartorya fischeri NRRL 181] gi|119406297|gb|EAW16248.1| protease S8 tripeptidyl peptidase I (cln2) [Neosartorya fischeri
  misc_feature (29)..(669): NCBI GI: 242824804 Blast Desc: alkaline serine protease AorO, [Talaromyces stipitatus ATCC 10500] gi|218713253|gb|EED12678.1| alkaline serine protease AorO, [Talaromyces stipitatus ATCC 10500]
  misc_feature (31)..(669): NCBI GI: 169772733 Blast Desc: [Aspergillus oryzae RIB40] gi|83768696|dbj|BAE58833.1| protein product [Aspergillus oryzae]
  misc_feature (31)..(669): NCBI GI: 238490642 Blast Desc: alkaline serine protease AorO, [Aspergillus flavus NRRL3357] gi|220696971|gb|EED53312.1| alkaline serine protease AorO, [Aspergillus flavus NRRL3357]
  misc_feature (10)..(669): NCBI GI: 255946523 Blast Desc: Pc20g15570 [Penicillium chrysogenum Wisconsin 54-1255] gi|211588764|emb|CAP86886.1| Pc20g15570 [Penicillium chrysogenum Wisconsin 54-1255]
  misc_feature (5)..(669): NCBI GI: 115388337 Blast Desc: ATEG_02496 [Aspergillus terreus NIH2624] gi|114195758|gb|EAU37458.1| ATEG_02496 [Aspergillus terreus NIH2624]
  misc_feature (55)..(671): SWISSPROT Homolog: EC 3.4.14.9 Tripeptidyl-peptidase I
MFVRLFVAALAGLALEATASPVAGRVVPRSHVLHERHADHWEQRWTKRAKVPQDAMIPMRIGLTQSNLDAGHEKLMDISNPDSSNYGQHMSSDEIIDFFAPAKSTIDAVYGWLTEAGISKDRISLSVNKQWVQFDAKTGEVEELIFADYYIWEHVDGSSDMSTEAYHVPAAIQEHVDYITPGTRLRSRHGQSQKRNMKRDFRFDVNPRPFITKLPGFPHPNSTTCSIYVTANCTRAQYNIPDATTAYPGNELGIFESLDDHYSKHDLDVYFATLYPELDIPTGTYPEERLIDGAIGAIETPSPIYSLEVGLESMLDFDSAWPLIWPQKTVLYQTDDEYYEYTGNFSGFWNTFLDAIDGSYCNYAAYGEKGNCNVPECVDPAYPDNHPGGYTGKLQCGKYKPTNVISVSYGADEAYIPDFYMKRQCNEWMKLVLQGSTVVMSSGDSGVGDSQYCPNKTDGSLAFSPDFASSCPYILSIGSTEWDRYSNKTAEKPYEKLNEVATARFPSGGGFSNVFKQPSYQAGAVSKYLGTVAKTLPFTGYSQFVANGDFSHVKSGVYNKLGRAYPDVAAVGDRQVVLGGGDWYLIGGTSLSAPVWGAVLTLVNEIRLKAHKPTIGFIHPILYAHPEVFNDVTVGTNAGCNTTGFVASKGWDPVTGLGSPNFQKLVKVLTEGY

SEQ ID NO: 2976 - DNA, 2470 bp, Muscodor strobelii
  misc_feature: SGI EST ID NO. CUFF.7365.0
  misc_feature: Variant of the nucleotide sequence at SEQ ID NO 2974
ctttcaaccaccaaaaaggaaggtcgccaagccattgctcgtcagcgccatcctgtcggactgtagctctcggggtagcttattagcagctagatctaatgagctgaagtcccgttgaaccaccaatcggaatccgtcatggacgaatacgacacgatatcgggttggcgttccttgcctctcgaagatgatggcgatcctaccattatcagtccctttgcccgcaagcgactatatagtcgctgggattcccttcgagaaccatggctgtgaagtgtctgtcagttgcaccccagacttcccaccatgtttgttcgtctgtttgttgcagcccttgccggcctggctcttgaagccactgctagcccagttgctggacgtgtcgtccctcgtagccatgttcttcatgaaagacatgcagaccattgggagcaaaggtggactaaaagggccaaggttccgcaggacgccatgattcccatgcgtatcggtttgactcaatcaaatctggatgctggacacgagaagctcatggacatcagcaaccctgacagctctaactacgggcagcatatgagctctgatgaaattatcgacttcttcgcaccagcaaagtcgacaattgatgcggtttacggctggcttacagaagcaggcatatctaaagaccgtatttctctgtcggtcaacaaacagtgggttcagtttgacgccaaaaccggcgaggtcgaggaactgatttttgccgactactatatctgggaacatgtcgatggatcgtctgacatgtccactgaggcctatcacgtgcccgctgccattcaggagcacgtggattatatcactccaggcactagattgagatcgagacatggacagtcccagaagaggaacatgaagcgtgacttccgatttgatgtcaacccaagaccgttcatcacaaagcttcctggcttcccccaccccaactcgacaacttgctcgatctacgtcacggccaattgtactcgggcccaatataacattccagatgccacgactgcttatccaggcaatgagctcggcatcttcgagagtttggacgatcactacagcaaacacgatctcgacgtgtactttgcaactctatatcccgagctggatattcctactggtacttatcccgaagagcgtctcattgatggtgcaattggtgccatcgagactccttctcccatctactctctagaagttggtctggagtcgatgcttgacttcgattcggcttggcccctcatctggccccaaaagacggttctttaccagacagacgatgagtactacgaatacacaggcaacttcagtggattctggaacaccttccttgacgctattgacggttcatactgcaactacgccgcgtatggtgagaagggcaattgcaatgtgcccgagtgcgtggaccctgcataccccgataaccacccaggcggctacaccggcaagttgcagtgtggaaaatacaaaccaactaatgtcatttctgtctcttacggagctgacgaggcctacatacctgacttctacatgaaacgacagtgcaatgagtggatgaagctcgtattgcaaggctctaccgttgtcatgtcttctggcgattcaggtgtcggtgactcccaatactgcccgaacaagactgatggttctcttgccttctcacccgatttcgcatcgtcctgcccctatatcctatcgattggtagcactgagtgggatcggtactcaaacaagacagctgagaagccatatgagaagctgaacgaggtcgccactgcacgcttcccaagtggtggcggtttcagcaacgtgttcaagcaaccctcttaccaggccggcgcagtttctaaataccttgggaccgtcgccaagacactcccatttactggatacagtcaatttgtagctaacggcgacttctcgcatgtcaaatctggagtgtacaataagcttggtcgtgcgtaccccgatgtggccgctgttggcgacagacaggtcgtcctgggaggtggcgattggtatttgattggtggcacctcgctcagcgcccctgtctggggtgccgtactgaccttggtgaacgaaattcgtctcaaggcacacaaacccaccatcggcttcatccaccctatcctgtatgcccatcccgaggtcttcaacgacgttaccgtgggcaccaatgcgggttgtaatacaacgggctttgttgcatccaagggctgggatccagtcacaggattgggatctcccaacttccaaaagttggtgaaggtgctgacagaaggatactaggtgttgagacttgaagctagatctaaagctaccggctctaattacattacattaccgtagtttagatagattctcgttttaaatctttgtagaatatcgcaatgaggccattactcaaagcaagtatatactgtcgttgctc

SEQ ID NO: 2977 - DNA, 585 bp, Muscodor strobelii
  misc_feature: SGI cDNA ID NO. 560639
  misc_feature: Encodes the peptide sequence at SEQ ID NO 2978
atggagttcgacgacacgtgggtggtcacggccctgcaaggtcttctccccgagcaaaccgtccaactcctccacgaccacgtgctgcaccccacgagcaccttgcgcaccatatcctcctacacgctctacagcctccaacgcacagtgcttctcctgcagcccatcttcgcccccatcgtcgagcgaggtctgcgcgccctgcaagactcccctgacctcgtcgtccttggcttcatcctcgccctcttcgtcttcgccatccagttcctcttctggatacataggaccatgctgtacatgacgcgcctggccatacgtgcagtcatgtggacgctattcggtctggccctcatggccatgtggcagcgcgggcccgaggctgtcatccgtgacgccgtggtggtggtcagcaagatggctgggtacgccgccgtcgtcaaggatatttggttgagcgagtatcagaagtacgagacccagacgcgcaccgcggccgcgaccggctatggttcgtctggacagatgccgatgggcggtggaaggagtgctggttacggtggtaggggaaatggcagatattga

SEQ ID NO: 2978 - protein, 194 aa, Muscodor strobelii
  misc_feature: SGI Peptide ID NO. 560639
  misc_feature (5)..(174): NCBI GI: 145611448 Blast Desc: MGG_00381 [Magnaporthe grisea 70-15] gi|145018728|gb|EDK03007.1| MGG_00381 [Magnaporthe grisea 70-15]
  misc_feature (6)..(175): NCBI GI: 256735292 Blast Desc: NECHADRAFT_74972 [Nectria haematococca mpVI 77-13-4]
  misc_feature (4)..(163): NCBI GI: 261357579 Blast Desc: conserved [Verticillium albo-atrum VaMs.102]
  misc_feature (12)..(172): NCBI GI: 46106355 Blast Desc: FG00419.1 [Gibberella zeae PH-1]
  misc_feature (7)..(170): NCBI GI: 38567176 Blast Desc: [Neurospora crassa]
  misc_feature (3)..(163): NCBI GI: 171684357 Blast Desc: protein product [Podospora anserina] gi|170942139|emb|CAP67791.1| protein product [Podospora anserina]
  misc_feature (59)..(170): NCBI GI: 164427826 Blast Desc: NCU02659 [Neurospora crassa OR74A] gi|157071900|gb|EAA36196.2| [Neurospora crassa OR74A]
MEFDDTWVVTALQGLLPEQTVQLLHDHVLHPTSTLRTISSYTLYSLQRTVLLLQPIFAPIVERGLRALQDSPDLVVLGFILALFVFAIQFLFWIHRTMLYMTRLAIRAVMWTLFGLALMAMWQRGPEAVIRDAVVVVSKMAGYAAVVKDIWLSEYQKYETQTRTAAATGYGSSGQMPMGGGRSAGYGGRGNGRY

SEQ ID NO: 2979 - DNA, 2506 bp, Muscodor strobelii
  misc_feature: SGI EST ID NO. CUFF.7532.0
  misc_feature: Variant of the nucleotide sequence at SEQ ID NO 2977
cagcgccgaacgcgtctggcgctgtggggcatctgcagaccctgggcccctcccatgttgccatccatcgacgtgttgtcaactccaccatttcacacctttcctgatcaacacaccatatccagagccatcgccattttcctcccatccgacttgtcgcattacatatcgccgttggtcatctcctgctcaccttgaaatcacaccaatgcctctctagccggcgcagaggctaatctcagtcctcacggcatcgctctcgcctgcacatcgccgcctcgctagacctgatccttggttgagacacgatggagttcgacgacacgtgggtggtcacggccctgcaaggtcttctccccgagcaaaccgtccaactcctccacgaccacgtgctgcaccccacgagcaccttgcgcaccatatcctcctacacgctctacagcctccaacgcacagtgcttctcctgcagcccatcttcgcccccatcgtcgagcgaggtctgcgcgccctgcaagactcccctgacctcgtcgtccttggcttcatcctcgccctcttcgtcttcgccatccagttcctcttctggatacataggaccatgctgtacatgacgcgcctggccatacgtgcagtcatgtggacgctattcggtctggccctcatggccatgtggcagcgcgggcccgaggctgtcatccgtgacgccgtggtggtggtcagcaagatggctgggtacgccgccgtcgtcaaggatatttggttgagcgagtatcagaagtacgagacccagacgcgcaccgcggccgcgaccggctatggttcgtctggacagatgccgatgggcggtggaaggagtgctggttacggtggtaggggaaatggcagatattgatattggacagatggttgttattgatttttacgtatagctcacgacaggttacgatgtttcacgaccagcatttgtttcgttacatgcctaggcacaagacagcacggcatgctctggcttgaaggcttttgttagagtaccacgcttgactggtaattcagatatggagacacgacatccttccagaatatggacaaattgattcaaatgccatccaacgccgccgctgcactatgcaccaaactcccgactccttgaccaacctaatgcaaatgccacactgcttttactctagaccaaacatgactcggaaccgacagctcgtgattcgtgatctgtaatctcgtccgtcggctgaccccttattcctccatctcctcgaactcgccgtccttgacctccctcggctcctgagcctcgtggtactggatgcagtcgtcgatgtagcttaggatggcccccacgctgtcctcatcttgcacatcgagcttgaggtagctgatcatgctgaagctctcgatcaggctggccacggccttgttgagcctgcggaagccagcgccgcgcatcagggcatctttgtcctgcacattggccgactcgtcctcctccagctcctccactttggtcttgccctcggccgctctcctggcggcatcggccgggtcgtcgtctagcagggccccgtcggggttgatgaagcgcttcatgtcctttttgcggacctgatccttgaccagatccatcttggacaggatgttgatgtgggggacctcgagcatgatcatggccgacatggcgctcagggtgccggagaagaacttggcgcggtcgacgacgaaggtggcctcgaggaggtaggcggcgcacatgcggatgtcgagggagccggagcgggtgaggtagcgcaccagggcaggcaggatggggacgtgggtgtagagctcgatctggcccggcatgtcgatgatgatgagatactcctccgtcagcgggtcgagggcgtcgctgaggaagtcgaggttctccatgaggaactcgaagcagtagatcagccccccgttgggccccaggcccatctcctccatcacatcctccagcgagatcaggtccttgatgtccagatccggcgtgtgctcgaaggtctcggcagccgggtcgaggttgacgtagaaggccgaccggcggttgagctgcaggtgtgtgatgagcgacgcgcagaaagtcgactatccattttacatgtgattagtaccaagctgaaggccagcgagcgagtggatgtgaggcatgtggatgtcatgaggcgcgtgaacgtgggcaacaaaccttgcctgcgccggcagggcccatcaccatgacgccgaatttactcatgatggcgggagctatccgtcgagggcgcacctagacggtcttaaaaagagtgaggcagggataaggaatgtggtcgccgatgatggaatgtagattgcgtgtatcctacgcggtgccggcacgggtgcacaaacacaggtagcttcaagcgtgtcgccgcgtgcaccactcatgcctgtcctcattttttttcttccttgccttatgtttagaggggtcaatagaggggcccggca

SEQ ID NO: 2980 - DNA, 915 bp, Muscodor strobelii
  misc_feature: SGI cDNA ID NO. 560640
  misc_feature: Encodes the peptide sequence at SEQ ID NO 2981
atgagtaaattcggcgtcatggtgatgggccctgccggcgcaggcaagtcgactttctgcgcgtcgctcatcacacacctgcagctcaaccgccggtcggccttctacgtcaacctcgacccggctgccgagaccttcgagcacacgccggatctggacatcaaggacctgatctcgctggaggatgtgatggaggagatgggcctggggcccaacggggggctgatctactgcttcgagttcctcatggagaacctcgacttcctcagcgacgccctcgacccgctgacggaggagtatctcatcatcatcgacatgccgggccagatcgagctctacacccacgtccccatcctgcctgccctggtgcgctacctcacccgctccggctccctcgacatccgcatgtgcgccgcctacctcctcgaggccaccttcgtcgtcgaccgcgccaagttcttctccggcaccctgagcgccatgtcggccatgatcatgctcgaggtcccccacatcaacatcctgtccaagatggatctggtcaaggatcaggtccgcaaaaaggacatgaagcgcttcatcaaccccgacggggccctgctagacgacgacccggccgatgccgccaggagagcggccgagggcaagaccaaagtggaggagctggaggaggacgagtcggccaatgtgcaggacaaagatgccctgatgcgcggcgctggcttccgcaggctcaacaaggccgtggccagcctgatcgagagcttcagcatgatcagctacctcaagctcgatgtgcaagatgaggacagcgtgggggccatcctaagctacatcgacgactgcatccagtaccacgaggctcaggagccgagggaggtcaaggacggcgagttcgaggagatggaggaataa

SEQ ID NO: 2981 - protein, 304 aa, Muscodor strobelii
  misc_feature: SGI Peptide ID NO. 560640
  misc_feature (8)..(285): Pfam Id: PF03029 Pfam Desc: Conserved ATP binding protein
  misc_feature (8)..(197): Pfam Id: PF03029 Pfam Desc: Conserved ATP binding protein
  misc_feature (242)..(285): Pfam Id: PF03029 Pfam Desc: Conserved ATP binding protein
  misc_feature (1)..(304): NCBI GI: 164427828 Blast Desc: NCU02658 [Neurospora crassa OR74A] gi|38567175|emb|CAE76468.1| conserved [Neurospora crassa] gi|157071901|gb|EAA36195.2| NCU02658 [Neurospora crassa OR74A]
  misc_feature (1)..(296): NCBI GI: 145611444 Blast Desc: conserved [Magnaporthe grisea 70-15] gi|145018727|gb|EDK03006.1| conserved [Magnaporthe grisea 70-15]
  misc_feature (1)..(304): NCBI GI: 261357578 Blast Desc: transcription factor FET5 [Verticillium albo-atrum VaMs.102]
  misc_feature (1)..(303): NCBI GI: 256734567 Blast Desc: [Nectria haematococca mpVI 77-13-4]
  misc_feature (1)..(298): NCBI GI: 46106369 Blast Desc: FG00420.1 [Gibberella zeae PH-1] gi|126232412|sp|Q4IQT8.1|GPN3_GIBZE RecName: Full=GPN-loop GTPase 3 homolog FG00420
  misc_feature (1)..(303): NCBI GI: 154315128 Blast Desc: BC1G_04603 [Botryotinia fuckeliana B05.10] gi|150847566|gb|EDN22759.1| BC1G_04603 [Botryotinia fuckeliana B05.10]
  misc_feature (1)..(296): NCBI GI: 156052857 Blast Desc: SS1G_06596 [Sclerotinia sclerotiorum 1980] gi|154704374|gb|EDO04113.1| SS1G_06596 [Sclerotinia sclerotiorum 1980]
  misc_feature (7)..(303): NCBI GI: 171684359 Blast Desc: protein product [Podospora anserina] gi|170942140|emb|CAP67792.1| protein product [Podospora anserina]
  misc_feature (1)..(298): NCBI GI: 242768059 Blast Desc: ATP binding protein, [Talaromyces stipitatus ATCC 10500] gi|218724689|gb|EED24106.1| ATP binding protein, [Talaromyces stipitatus ATCC 10500]
  misc_feature (1)..(296): NCBI GI: 119495859 Blast Desc: ATP binding protein, [Neosartorya fischeri NRRL 181] gi|119412868|gb|EAW22809.1| ATP binding protein, [Neosartorya fischeri NRRL 181]
MSKFGVMVMGPAGAGKSTFCASLITHLQLNRRSAFYVNLDPAAETFEHTPDLDIKDLISLEDVMEEMGLGPNGGLIYCFEFLMENLDFLSDALDPLTEEYLIIIDMPGQIELYTHVPILPALVRYLTRSGSLDIRMCAAYLLEATFVVDRAKFFSGTLSAMSAMIMLEVPHINILSKMDLVKDQVRKKDMKRFINPDGALLDDDPADAARRAAEGKTKVEELEEDESANVQDKDALMRGAGFRRLNKAVASLIESFSMISYLKLDVQDEDSVGAILSYIDDCIQYHEAQEPREVKDGEFEEMEE

SEQ ID NO: 2982 - DNA, 2521 bp, Muscodor strobelii
  misc_feature: SGI EST ID NO. CUFF.7533.1
  misc_feature: Variant of the nucleotide sequence at SEQ ID NO 2980
tgccgggcccctctattgacccctctaaacataaggcaaggaagaaaaaaaatgaggacaggcatgagtggtgcacgcggcgacacgcttgaagctacctgtgtttgtgcacccgtgccggcaccgcgtaggatacacgcaatctacattccatcatcggcgaccacattccttatccctgcctcactctttttaagaccgtctaggtgcgccctcgacggatagctcccgccatcatgagtaaattcggcgtcatggtgatgggccctgccggcgcaggcaagtcgactttctgcgcgtcgctcatcacacacctgcagctcaaccgccggtcggccttctacgtcaacctcgacccggctgccgagaccttcgagcacacgccggatctggacatcaaggacctgatctcgctggaggatgtgatggaggagatgggcctggggcccaacggggggctgatctactgcttcgagttcctcatggagaacctcgacttcctcagcgacgccctcgacccgctgacggaggagtatctcatcatcatcgacatgccgggccagatcgagctctacacccacgtccccatcctgcctgccctggtgcgctacctcacccgctccggctccctcgacatccgcatgtgcgccgcctacctcctcgaggccaccttcgtcgtcgaccgcgccaagttcttctccggcaccctgagcgccatgtcggccatgatcatgctcgaggtcccccacatcaacatcctgtccaagatggatctggtcaaggatcaggtccgcaaaaaggacatgaagcgcttcatcaaccccgacggggccctgctagacgacgacccggccgatgccgccaggagagcggccgagggcaagaccaaagtggaggagctggaggaggacgagtcggccaatgtgcaggacaaagatgccctgatgcgcggcgctggcttccgcaggctcaacaaggccgtggccagcctgatcgagagcttcagcatgatcagctacctcaagctcgatgtgcaagatgaggacagcgtgggggccatcctaagctacatcgacgactgcatccagtaccacgaggctcaggagccgagggaggtcaaggacggcgagttcgaggagatggaggaataaggggtcagccgacggacgagattacagatcacgaatcacgagctgtcggttccgagtcatgtttggtctagagtaaaagcagtgtggcatttgcattaggttggtcaaggagtcgggagtttggtgcatagtgcagcggcggcgttggatggcatttgaatcaatttgtccatattctggaaggatgtcgtgtctccatatctgaattaccagtcaagcgtggtactctaacaaaagccttcaagccagagcatgccgtgctgtcttgtgcctaggcatgtaacgaaacaaatgctggtcgtgaaacatcgtaacctgtcgtgagctatacgtaaaaatcaataacaaccatctgtccaatatcaatatctgccatttcccctaccaccgtaaccagcactccttccaccgcccatcggcatctgtccagacgaaccatagccggtcgcggccgcggtgcgcgtctgggtctcgtacttctgatactcgctcaaccaaatatccttgacgacggcggcgtacccagccatcttgctgaccaccaccacggcgtcacggatgacagcctcgggcccgcgctgccacatggccatgagggccagaccgaatagcgtccacatgactgcacgtatggccaggcgcgtcatgtacagcatggtcctatgtatccagaagaggaactggatggcgaagacgaagagggcgaggatgaagccaaggacgacgaggtcaggggagtcttgcagggcgcgcagacctcgctcgacgatgggggcgaagatgggctgcaggagaagcactgtgcgttggaggctgtagagcgtgtaggaggatatggtgcgcaaggtgctcgtggggtgcagcacgtggtcgtggaggagttggacggtttgctcggggagaagacctgttggattgttagcttgattgccaggtttgggagggcgcacgacggcgtcgatgaggagcgccatgcgattcttctgtattgtgcagatgggtagaattgaaagagagtttaccttgcagggccgtgaccacccacgtgtcgtcgaactccatcgtgtctcaaccaaggatcaggtctagcgaggcggcgatgtgcaggcgagagcgatgccgtgaggactgagattagcctctgcgccggctagagaggcattggtgtgatttcaaggtgagcaggagatgaccaacggcgatatgtaatgcgacaagtcggatgggaggaaaatggcgatggctctggatatggtgtgttgatcaggaaaggtgtgaaatggtggagttgacaacacgtcgatggatggcaacatgggaggggcccagggtctgcagatgccccacagcgccagacgcgttcggcgctg

SEQ ID NO: 2983 - DNA, 1209 bp, Muscodor strobelii
  misc_feature: SGI cDNA ID NO. 560641
  misc_feature: Reduced expression when VOC is produced
  misc_feature: Encodes the peptide sequence at SEQ ID NO 2984
atgccttccaccaacggaaccaccaacggcaccaccagccacttcagccagccgaagaatgccggcgctttcctcttcacctccgagtccgtcggtgagggtcaccccgacaagatctgcgatcaggtatccgatgccatcctcgacgcctgcttgaaggccgatcccctctccaaggtcgcctgcgagacggccaccaagacgggcatgatcatggtcttcggcgagatcaccaccaaggccaacatcgactaccagaacgtcatccgcgacgccatcaaggagatcggctacgactcgtccgacaagggcttcgactacaagacctgctccgtcctggtcggcatcgagcagcagtctcccgacatcgcccagggtctccacctcgacgagaggctcgagaacctcggcgccggtgaccagggtatcatgttcggctatgccaccgacgagacccccgagctgcaccccctgtctcacctcctcgcccacaggctgaacaaggccatgtccgacgcccgccgcgacggtaccgccgcctggttgcgccccgacaccaagacccaggtcaccatggagtacaagcacgagggcggtgccgtagtacccctccgcgtccacaccattgtcatctccgcccagcacagccccgatatcaccaccgaggagctccgcaagcagctcaagtccaagatcatcctgcccaccatccccagccagtacattgacgacgagaccgtcctccaccttcaaccttccggtcaattcatcatcggtggccctcagggtgatgccggtgtcactggccgtaagatcatcgtcgatacctacggtggttggggtgcccacggtggtggtgctttctccggaaaggacttcagcaaggtcgatcggtctgctgcctacctggcacgatgggtcgccaagtctctcgtccacgccaagctcgcccgccgtgtcctggtccagctttcttacgctatcggtgttgctgagccttgctccatctacgtcgactcgtacggcacttcggacaagtcttccgacgagctcgtcgagatcgtcaaggccaacttcgatatgcgacctggccctatcgctaagcagcttgacctcgtcaagcctctgtacaaccagaccgctaagttcggtcacttcggtaccaaccctgacttcacttgggaacagcccaaggagctcaagttttaa

SEQ ID NO: 2984 - protein, 402 aa, Muscodor strobelii
  misc_feature: SGI Peptide ID NO. 560641
  misc_feature (258)..(396): Pfam Id: PF02773 Pfam Desc: S-adenosylmethionine synthetase, C-terminal domain
  misc_feature (134)..(256): Pfam Id: PF02772 Pfam Desc: S-adenosylmethionine synthetase, central domain
  misc_feature (22)..(121): Pfam Id: PF00438 Pfam Desc: S-adenosylmethionine synthetase, N-terminal domain
  misc_feature (4)..(402): NCBI GI: 116192255 Blast Desc: CHGG_05845 [Chaetomium globosum CBS 148.51] gi|88181758|gb|EAQ89226.1| CHGG_05845 [Chaetomium globosum CBS 148.51]
  misc_feature (1)..(402): NCBI GI: 256735291 Blast Desc: [Nectria haematococca mpVI 77-13-4]
  misc_feature (3)..(402): NCBI GI: 85118386 Blast Desc: S-adenosylmethionine synthetase [Neurospora crassa OR74A] gi|1346521|sp|P48466.1|METK_NEUCR RecName: Full=S-adenosylmethionine synthetase; Short=AdoMet synthetase;
  misc_feature (8)..(402): NCBI GI: 46106383 Blast Desc: METK_NEUCR S-adenosylmethionine synthetase (Methionine adenosyltransferase) (AdoMet synthetase) [Gibberella zeae PH-1]
  misc_feature (1)..(402): NCBI GI: 154315126 Blast Desc: S-adenosylmethionine synthetase [Botryotinia fuckeliana B05.10] gi|150847565|gb|EDN22758.1| S-adenosylmethionine synthetase [Botryotinia fuckeliana B05.10]
  misc_feature (18)..(402): NCBI GI: 169781656 Blast Desc: [Aspergillus oryzae RIB40] gi|238498450|ref|XP_002380460.1| S-adenosylmethionine synthetase [Aspergillus flavus NRRL3357] gi|83774033|dbj|BAE64158.1| protein
  misc_feature (20)..(402): NCBI GI: 145239481 Blast Desc: An08g02700 [Aspergillus niger] gi|134076898|emb|CAK45307.1| protein product [Aspergillus niger]
  misc_feature (21)..(402): NCBI GI: 121701871 Blast Desc: S-adenosylmethionine synthetase [Aspergillus clavatus NRRL 1] gi|119397343|gb|EAW07774.1| S-adenosylmethionine synthetase [Aspergillus clavatus NRRL 1]
  misc_feature (19)..(402): NCBI GI: 258570155 Blast Desc: methionine adenosyltransferase [Uncinocarpus reesii 1704] gi|237904151|gb|EEP78552.1| methionine adenosyltransferase [Uncinocarpus reesii 1704]
  misc_feature (20)..(402): NCBI GI: 255940042 Blast Desc: Pc16g04380 [Penicillium chrysogenum Wisconsin 54-1255] gi|211585413|emb|CAP93108.1| Pc16g04380 [Penicillium chrysogenum Wisconsin 54-1255]
  misc_feature (20)..(402): SWISSPROT Homolog: EC 2.5.1.6 Methionine adenosyltransferase
  misc_feature: Useful for introducing or modulating the production of volatile compounds
MPSTNGTTNGTTSHFSQPKNAGAFLFTSESVGEGHPDKICDQVSDAILDACLKADPLSKVACETATKTGMIMVFGEITTKANIDYQNVIRDAIKEIGYDSSDKGFDYKTCSVLVGIEQQSPDIAQGLHLDERLENLGAGDQGIMFGYATDETPELHPLSHLLAHRLNKAMSDARRDGTAAWLRPDTKTQVTMEYKHEGGAVVPLRVHTIVISAQHSPDITTEELRKQLKSKIILPTIPSQYIDDETVLHLQPSGQFIIGGPQGDAGVTGRKIIVDTYGGWGAHGGGAFSGKDFSKVDRSAAYLARWVAKSLVHAKLARRVLVQLSYAIGVAEPCSIYVDSYGTSDKSSDELVEIVKANFDMRPGPIAKQLDLVKPLYNQTAKFGHFGTNPDFTWEQPKELKF

SEQ ID NO: 2985 - DNA, 1868 bp, Muscodor strobelii
  misc_feature: SGI EST ID NO. CUFF.7432.0
  misc_feature: Variant of the nucleotide sequence at SEQ ID NO 2983
ctcgttcccaacagttaaaaacttcccgcggcgccttctctttttctcccgcacttctcctcattccactcacaaacacacatctccttctctaccctctgcctatccttttcctgtttctcttgcttatccatcctgtaatccgtcacaatgccttccaccaacggaaccaccaacggcaccaccagccacttcagccagccgaagaatgccggcgctttcctcttcacctccgagtccgtcggtgagggtcaccccgacaagatctgcgatcaggtatccgatgccatcctcgacgcctgcttgaaggccgatcccctctccaaggtcgcctgcgagacggccaccaagacgggcatgatcatggtcttcggcgagatcaccaccaaggccaacatcgactaccagaacgtcatccgcgacgccatcaaggagatcggctacgactcgtccgacaagggcttcgactacaagacctgctccgtcctggtcggcatcgagcagcagtctcccgacatcgcccagggtctccacctcgacgagaggctcgagaacctcggcgccggtgaccagggtatcatgttcggctatgccaccgacgagacccccgagctgcaccccctgtctcacctcctcgcccacaggctgaacaaggccatgtccgacgcccgccgcgacggtaccgccgcctggttgcgccccgacaccaagacccaggtcaccatggagtacaagcacgagggcggtgccgtagtacccctccgcgtccacaccattgtcatctccgcccagcacagccccgatatcaccaccgaggagctccgcaagcagctcaagtccaagatcatcctgcccaccatccccagccagtacattgacgacgagaccgtcctccaccttcaaccttccggtcaattcatcatcggtggccctcagggtgatgccggtgtcactggccgtaagatcatcgtcgatacctacggtggttggggtgcccacggtggtggtgctttctccggaaaggacttcagcaaggtcgatcggtctgctgcctacctggcacgatgggtcgccaagtctctcgtccacgccaagctcgcccgccgtgtcctggtccagctttcttacgctatcggtgttgctgagccttgctccatctacgtcgactcgtacggcacttcggacaagtcttccgacgagctcgtcgagatcgtcaaggccaacttcgatatgcgacctggccctatcgctaagcagcttgacctcgtcaagcctctgtacaaccagaccgctaagttcggtcacttcggtaccaaccctgacttcacttgggaacagcccaaggagctcaagttttaagtacttgtttaattacatttccgtgagagtttgactctcagattccgcggaagaatcaacttctttctgcattgcgagcggcgttgttgggtttagagacattaaaattccctcatcggaacagtgtcatgaaaaattgggcacggtagcattggcgtcaacggtttcaacatacccaatttctcatttcagatggtggaatgtcatacagcattgtcaagggatatcaacataaaggaaccattaaaatccaatatatgggcagggagaataagataccccaaagcatcagggctttcggatcgtaggctcgatatcttcacatcaatctcaacaccgaggtgtaagatggttacatagaatcaatttcaaagaaagttaaacgatcaaccgcgcttttacaaggcaatcgtgaaaccacaagtgagagacgattgattacacaatttttcagaggaattaatcaaccaagtccaatatgaatatggacgtactttgcggtacgcccg

SEQ ID NO: 2986 - DNA, 765 bp, Muscodor strobelii
  misc_feature: SGI cDNA ID NO. 560642
  misc_feature: Encodes the peptide sequence at SEQ ID NO 2987
atggcgccccgaacaaatgtcaagctcgtgccttgggatcacgagtcggaagctcatgttgcacgagctgttgcgcaacgcgaagcctgcgggtggggagcatcggaggttccttcgtgggttgagaagagttccaagggcttaagattcatgtactggattgtccttgcagatgaggatccagaccgagctgaactgctcaagaaccacataaacaaatatccagatgaatccgtaccacttcaagatactagcaatggctcagatcttctactccacgagcctttagcggatttcatccccgttggccacgtagcactcaagaaagaagccactcccgatttatcgggtcaggctgaaaactatctacctccagatgccaaattctattggatcacaagtctatacgtcacagacgcactccaaggccgcggtttgggacgctcagctatgtcccagctggaatatcttgtggcacggtcaagttcaaaagagactctcctgatactcgatacgataccaacagactttcaattgagcgattggtcatacaagtatttcatggaaccaaaggggctcccgatgccgaagcagtcgaatcaacagtggtacgaacagcaaggctatgagatttttgcgactttaccggaccatcgtttcgtacaactaccaaacgatgtgtcaactcatgtcactgtgctactactcaagaaagtcattactggtggaaaaaatgcaatggcagttgaaaatgagagtacgtag

SEQ ID NO: 2987 - protein, 254 aa, Muscodor strobelii
  misc_feature: SGI Peptide ID NO. 560642
  misc_feature (5)..(241): NCBI GI: 261352252 Blast Desc: conserved [Verticillium albo-atrum VaMs.102]
  misc_feature (4)..(241): NCBI GI: 154321501 Blast Desc: BC1G_01625 [Botryotinia fuckeliana B05.10] gi|150852163|gb|EDN27355.1| BC1G_01625 [Botryotinia fuckeliana B05.10]
  misc_feature (7)..(239): NCBI GI: 145613660 Blast Desc: MGG_01454 [Magnaporthe grisea 70-15] gi|145020710|gb|EDK04839.1| MGG_01454 [Magnaporthe grisea 70-15]
  misc_feature (1)..(244): NCBI GI: 255942189 Blast Desc: Pc18g00160 [Penicillium chrysogenum Wisconsin 54-1255] gi|211586596|emb|CAP94240.1| Pc18g00160 [Penicillium chrysogenum Wisconsin 54-1255]
  misc_feature (6)..(217): NCBI GI: 46129282 Blast Desc: FG08826.1 [Gibberella zeae PH-1]
  misc_feature (4)..(173): NCBI GI: 156053986 Blast Desc: SS1G_05841 [Sclerotinia sclerotiorum 1980] gi|154703621|gb|EDO03360.1| SS1G_05841 [Sclerotinia sclerotiorum 1980]
  misc_feature (9)..(218): NCBI GI: 256733674 Blast Desc: NECHADRAFT_78022 [Nectria haematococca mpVI 77-13-4]
  misc_feature (1)..(211): NCBI GI: 256728813 Blast Desc: NECHADRAFT_86153 [Nectria haematococca mpVI 77-13-4]
  misc_feature (5)..(213): NCBI GI: 156033029 Blast Desc: SS1G_13590 [Sclerotinia sclerotiorum 1980] gi|154698993|gb|EDN98731.1| SS1G_13590 [Sclerotinia sclerotiorum 1980]
  misc_feature (1)..(218): NCBI GI: 238485282 Blast Desc: conserved [Aspergillus flavus NRRL3357] gi|220698758|gb|EED55097.1| conserved [Aspergillus flavus NRRL3357]
MAPRTNVKLVPWDHESEAHVARAVAQREACGWGASEVPSWVEKSSKGLRFMYWIVLADEDPDRAELLKNHINKYPDESVPLQDTSNGSDLLLHEPLADFIPVGHVALKKEATPDLSGQAENYLPPDAKFYWITSLYVTDALQGRGLGRSAMSQLEYLVARSSSKETLLILDTIPTDFQLSDWSYKYFMEPKGLPMPKQSNQQWYEQQGYEIFATLPDHRFVQLPNDVSTHVTVLLLKKVITGGKNAMAVENEST

SEQ ID NO: 2988 - DNA, 1817 bp, Muscodor strobelii
  misc_feature: SGI EST ID NO. CUFF.7375.0
  misc_feature: Variant of the nucleotide sequence at SEQ ID NO 2986
ttttgatataaagtctaagttgaaagtcacctaatgtcgagtttgtagcaacttgatctgatcattcgagctttttgcataactgcctcgcaacgtaccattcacgatcagtaattcttgtatgagcacactatcagcaattgcgcattggtatcgagacaatatggcgccccgaacaaatgtcaagctcgtgccttgggatcacgagtcggaagctcatgttgcacgagctgttgcgcaacgcgaagcctgcgggtggggagcatcggaggttccttcgtgggttgagaagagttccaagggcttaagattcatgtactggattgtccttgcagatgaggatccagaccgagctgaactgctcaagaaccacataaacaaatatccagatgaatccgtaccacttcaagatactagcaatggctcagatcttctactccacgagcctttagcggatttcatccccgttggccacgtagcactcaagaaagaagccactcccgatttatcgggtcaggctgaaaactatctacctccagatgccaaattctattggatcacaagtctatacgtcacagacgcactccaaggccgcggtttgggacgctcagctatgtcccagctggaatatcttgtggcacggtcaagttcaaaagagactctcctgatactcgatacgataccaacagactttcaattgagcgattggtcatacaagtatttcatggaaccaaaggggctcccgatgccgaagcagtcgaatcaacagtggtacgaacagcaaggctatgagatttttgcgactttaccggaccatcgtttcgtacaactaccaaacgatgtgtcaactcatgtcactgtgctactactcaagaaagtcattactggtggaaaaaatgcaatggcagttgaaaatgagagtacgtagacttcggtacagtttttatcttgtactcaagcttctgctatttcagacagagcggttcgcaaaatctgtgtacagtacataacaaatccacacgcgtgaacaattgaattgcaaatcttgaactctcaacatgaacactcgcagatccgcagccgtctcttctcatccttcagaccagcacatctctatactcaaacaatacacagaaagatacttggcaggtggtcatgaggacacaacacagctcctcttatctgtaactgatcaaggagtcagatcattcccgagcagtacatccgtgattacgctgcagttgcgtggtcctcaatattgccagcgtctcctgctctcgatgagcatgtgcagttatatgtgctcttgtattcattcatagtcatgccctgtatatcagacaagaatgaccgcgcagctttaggcttagcataatgcccagagtctgcaaaactgctcacccgaaccatgccatggatcataacaaccgccacgactttcgtggcagaaatttcagcaagctcgtcgtcagtgtcagatgacaggacgcgccatcgtcgacaatggaaatcattcatgacgtccctaaggtgaacgatgggatgatcattggcaaaagtgtcatagagatgcatgtctttgaaatacggtaggatgtgcgcgtcgaaaaacttctgcacctggccaaagtcatactcgctgtcgacgaatagagcaccgacatatgattctactatgtctggcaagcattttggcggccgcctctcgctcacccagaaattgcgttggtattcattgcgtctgaagccagctttttcggccgcatcctcggctagtgtgcgagcctggtcgatggacgtgacgtattcagtgatcg

SEQ ID NO: 2989 - DNA, 4689 bp, Muscodor strobelii
  misc_feature: SGI cDNA ID NO. 560643
  misc_feature: Encodes the peptide sequence at SEQ ID NO 2990
atgacttgcgtcggtatcaccctccaggcgcatacatcaaggggcacggccggcgtatcattacattctctgtctacagcctcggcttccagccacagcagcgaactccaagacttcaccgatgacttgaccgatactctccctaagaatgaggacatcgcggagtctgaagatgaagagtctgataatgagaacgctagtcccatcgatgatctacccagccaagatgtggcaatattccgcgaatggcttcgaaaccagagggcagcgattcacgaaagaattcgtgcttcaggcactactgccgtcagttcacctgatggtcaaaatgatcaacctatgagagatgcacccatcatcaacagtccaagagagtaccagaccgagctcttcgaaagagcaaagcagaagaacatcattgcggttctcgacaccggaaccggcaagaccctgatcgctgccttattactccgttactatgtcgagaaagagctggatgacagatatgccggaaagccacacaagctggctttcttcttggttgacaaggttgcattggttcaccagcagtatagagtgctaaggacaaatctcgacgtcgacatggatgctttctccggcgattctaacagtcctaaatacacacagaccttttgggatcaagcgcgggagaacaaaaccgttgtcgtctgtactgcagcaattcttgcccactgtttgcaacacgcttttattcaaatggagcagataagcttacttatctttgacgaagctcatcatgcaaagaagaaccatcattatgcaagaatagtcaaggacttctatgctcctctcgacaaatccttccagccaccacgaatactcggactgactgcttcacccgttgatgcgaagaccgaagtctctcatgccgctgcacatctagaagggcttctacattgcgagattgcgacagtggccgaccctgaagctttcaagagatcatgtatcaataaagctgtggaacatcaactcgagtatcctagagcttgtgaaccttttccgacgccgctgtggcagactttgcatggactcattggcgacaaccgggattttgataagctgttactatactcgaacgaatgcaccgtcgtgttaggacgctggtgtgctgatcgattgtggcaaatatacttgaccaagcatgccgcagatacaatggctgcccgagtggagcgccatttccgcaacattatgtcaccagagtcgatagctatcctagatgcaaaacagcgagctgttcacaacgcctatcaggcggtagaacagcaccagtttgcggatgtcgtaaacaactgctttcacctctccggtaaagtgaggactttgattggttatctcaaggagcatttcgaaccaaaaagggacaaatgtgtcattttcgcagatcagcgtagaacagtgaccttacttgctgatctgttgaaccagtccgggctgtgcctacgagatttcagagccggaaaacttattggctcaagtggcaatgcttctggcgatatcggaatgtctttggctgaacaaaagtcaaacatcagtcgatttcgacatggagaaataaactgccttgtagcgacaagcgccggggaagaaggaatcgacattcctgactgcaatatagtggtcagatttgatctctccaaaacagcgattcaacatatccaatcgcgaggtcgcgcacgacgtccagattcaaaactcttgcacatggtcgagattggaaacgcagaacatcaagagtccatcatacagcttcaagattccgaatacaagttgcgcgaattctgtagtacactgcccgaagatcgtctcgtgctcgggtctgattacaacatggactaccacttgtctcgagagaagcatctgaggaagtaccgcgttccatcgactggcgcaacgttgacgtatcaaggaagcctgacaatattggccaacttcgtttcgtctcttcctcacccacctgatactccatgtcctactgcggattatatcatatctagccctggcgatggctttcgctgcgaagtggtcctccctgacacttcgccagtgagacatgcacttggatgcattgcatccacaaagcaggtcgcgaaatgctctgcagccttcgatatgtgtctcctattgataaaaggcaaacactttgacgaaaatctccgatctacgtttgtcaaacgccttccggccatgcgcaacgctcaacttgccatcagctccaagaagcgcactagctatcctatgaaattgaagcctgatgcgtggtcgaacccagatgggtctaatacattcttcattactgtgctgaagttatctgaccctggtgcgctcgggcgaccatctgttccaattgcactgataacaagggtaccactgccacgagttgcagattttcctgtgttcttcggctaccagagggcctcgaacgttgaatgtttaccactacctggtggcatcatgctttctcctgatctagtggattcattgaaccacttcactcttcggatctttaatgatgttttcagcaaggaatatgcatttgaacctaccaagatgtcatatttctttgcgcctctcgcacaggttcatgaatgggattggttaagcgagactgcccatctcagactggttgactgggaatgcgttgcaagagtacagaacagcatagatgaagaaagttacgagaactatgtgtcggatacgttttgcaacagatttgtcacagatccccatgatggttcgcggaagtttttcacggcgcaggcacggccggatttacagcccacggatcttcagccgtgtggagttccaacaggtaaacagatcaagaaggctcagcaacagggaagtgtcgtcgacatctggaacttcagtgttagtctctgggcgaagtcacgtaccagagtaagcagaaatgacaacttaccggtcttcgaagcagagtatgtacctcatcgacgaaacttgctcgacaaatccgccgaaggagaggaaatccagcgaaagtgtttcattgtgtttcaaaccctgaagctatcggcactgccaactgatctcgctgcgatggccttcaccctaccggcaatcatctatcgtctcgagtctaatcttattgtgctggaattttgcaagtctataggacttgaattacgtccggacttagctcttgaagcaatgactaaagacagcgacaacactgaggagcattcagagcagcctatcaatctgcggaaaggaatgggaaataattacgagcggcttgagttccttggggattgtttcctgaaaatgagcacaactattgctattttctcgcagcgacccgatcgtgacgagtttgaataccatgtggatcgtatgattttgatctgcaacaagaacctttttaatacggcactagacctaaaagtccaagaatcgatccgaagcaaggcttttagtcgaagaacatggtatccagaggggctggagctgctcaagggaaagcagaacacaagccggctaggcaagaaaggcgtgggcagtgatggccatagtcttggggacaagtctattgccgatgtgtgtgaggctctaattggtgcagcgtacatgacaacctacaaccagcagagcttcgacatggctatacaagcggtcacgaagtttgttaaccataaagatcacaaggcggcatgctggggagattactactccctatatcaaataccagaatggcaaaagtgtgagagtcgaccggtacaggttgagcttgcgcgccaagtcgagacaaaattgggctacaagttcaagtatcctcgcctcttgcgtagtgctttcacacacccatcctacggattcctctacgagaatattccacattaccaacgtctcgagttccttggcgacgcattgattgatatggtctgcgtcgactacctcttccatcggtttcccgaagccgatccgcaatggctgacggagcacaaaatggcaatggtctcaaatcagttccttggtaccctatgcgtgtctcttgatctccagcaacatctgcttgcgatgaacactgacctacagaggtcgatcactgaatacgtcacgtccatcgaccaggctcgcacactagccgaggatgcggccgaaaaagctggcttcagacgcaatgaataccaacgcaatttctgggtgagcgagaggcggccgccaaaatgcttgccagacatagtagaatcatatgtcggtgctctattcgtcgacagcgagtatgactttggccaggtgcagaagtttttcgacgcgcacatcctaccgtatttcaaagacatgcatctctatgacacttttgccaatgatcatcccatcgttcaccttagggacgtcatgaatgatttccattgtcgacgatggcgcgtcctgtcatctgacactgacgacgagcttgctgaaatttctgccacgaaagtcgtggcggttgttatgatccatggcatggttcgggtgagcagttttgcagactctgggcattatgctaagcctaaagctgcgcggtcattcttgtctgatatacagggcatgactatgaatgaatacaagagcacatataactgcacatgctcatcgagagcaggagacgctggcaatattgaggaccacgcaactgcagcgtaa

SEQ ID NO: 2990 - protein, 1562 aa, Muscodor strobelii
  misc_feature: SGI Peptide ID NO. 560643
  misc_feature (124)..(301): Pfam Id: PF00270 Pfam Desc: DEAD/DEAH box helicase
  misc_feature (492)..(577): Pfam Id: PF00271 Pfam Desc: Helicase conserved C-terminal domain
  misc_feature (120)..(296): Pfam Id: PF04851 Pfam Desc: Type III restriction enzyme, res subunit
  misc_feature (1302)..(1428): Pfam Id: PF00636 Pfam Desc: RNase3 domain
  misc_feature (1098)..(1214): Pfam Id: PF00636 Pfam Desc: RNase3 domain
  misc_feature (685)..(733): Pfam Id: PF03368 Pfam Desc: Double stranded RNA binding domain
  misc_feature (45)..(1545): NCBI GI: 85105148 Blast Desc: NCU08270 [Neurospora crassa OR74A] gi|74616659|sp|Q7S8J7.1|DCL1_NEUCR RecName: Full=Dicer-like protein 1; Includes: RecName: Full=Endoribonuclease dcl-1; dcl-1
  misc_feature (119)..(1545): NCBI GI: 158706455 Blast Desc: NCU08270 [Neurospora crassa OR74A] gi|74616659|sp|Q7S8J7.1|DCL1_NEUCR RecName: Full=Dicer-like protein 1; Includes: RecName: Full=Endoribonuclease dcl-1; dcl-1
  misc_feature (119)..(1545): NCBI GI: 171690380 Blast Desc: protein product [Podospora anserina] gi|170945138|emb|CAP71249.1| protein product [Podospora anserina]
  misc_feature (119)..(1556): NCBI GI: 154301554 Blast Desc: BC1G_10104 [Botryotinia fuckeliana B05.10] gi|150855766|gb|EDN30958.1| BC1G_10104 [Botryotinia fuckeliana B05.10]
  misc_feature (55)..(1558): NCBI GI: 158706447 Blast Desc: BC1G_10104 [Botryotinia fuckeliana B05.10] gi|150855766|gb|EDN30958.1| BC1G_10104 [Botryotinia fuckeliana B05.10]
  misc_feature (55)..(1561): NCBI GI: 121807817 Blast Desc: DCL1_CRYPA RecName: Full=Dicer-like protein 1; Includes: RecName: Full=Endoribonuclease DCL-1; Includes: RecName: Full=ATP-dependent helicase DCL-1 dicer-like protein 1
  misc_feature (58)..(1545): NCBI GI: 261352325 Blast Desc: RNase3 domain-containing protein [Verticillium albo-atrum VaMs.102]
  misc_feature (119)..(1545): NCBI GI: 116196272 Blast Desc: CHGG_04734 [Chaetomium globosum CBS 148.51] gi|88180647|gb|EAQ88115.1| CHGG_04734 [Chaetomium globosum CBS 148.51]
  misc_feature (123)..(1550): NCBI GI: 158706453 Blast Desc: CHGG_04734 [Chaetomium globosum CBS 148.51] gi|88180647|gb|EAQ88115.1| CHGG_04734 [Chaetomium globosum CBS 148.51]
  misc_feature (123)..(1561): NCBI GI: 158706457 Blast Desc: CHGG_04734 [Chaetomium globosum CBS 148.51] gi|88180647|gb|EAQ88115.1| CHGG_04734 [Chaetomium globosum CBS 148.51]
MTCVGITLQAHTSRGTAGVSLHSLSTASASSHSSELQDFTDDLTDTLPKNEDIAESEDEESDNENASPIDDLPSQDVAIFREWLRNQRAAIHERIRASGTTAVSSPDGQNDQPMRDAPIINSPREYQTELFERAKQKNIIAVLDTGTGKTLIAALLLRYYVEKELDDRYAGKPHKLAFFLVDKVALVHQQYRVLRTNLDVDMDAFSGDSNSPKYTQTFWDQARENKTVVVCTAAILAHCLQHAFIQMEQISLLIFDEAHHAKKNHHYARIVKDFYAPLDKSFQPPRILGLTASPVDAKTEVSHAAAHLEGLLHCEIATVADPEAFKRSCINKAVEHQLEYPRACEPFPTPLWQTLHGLIGDNRDFDKLLLYSNECTVVLGRWCADRLWQIYLTKHAADTMAARVERHFRNIMSPESIAILDAKQRAVHNAYQAVEQHQFADVVNNCFHLSGKVRTLIGYLKEHFEPKRDKCVIFADQRRTVTLLADLLNQSGLCLRDFRAGKLIGSSGNASGDIGMSLAEQKSNISRFRHGEINCLVATSAGEEGIDIPDCNIVVRFDLSKTAIQHIQSRGRARRPDSKLLHMVEIGNAEHQESIIQLQDSEYKLREFCSTLPEDRLVLGSDYNMDYHLSREKHLRKYRVPSTGATLTYQGSLTILANFVSSLPHPPDTPCPTADYIISSPGDGFRCEVVLPDTSPVRHALGCIASTKQVAKCSAAFDMCLLLIKGKHFDENLRSTFVKRLPAMRNAQLAISSKKRTSYPMKLKPDAWSNPDGSNTFFITVLKLSDPGALGRPSVPIALITRVPLPRVADFPVFFGYQRASNVECLPLPGGIMLSPDLVDSLNHFTLRIFNDVFSKEYAFEPTKMSYFFAPLAQVHEWDWLSETAHLRLVDWECVARVQNSIDEESYENYVSDTFCNRFVTDPHDGSRKFFTAQARPDLQPTDLQPCGVPTGKQIKKAQQQGSVVDIWNFSVSLWAKSRTRVSRNDNLPVFEAEYVPHRRNLLDKSAEGEEIQRKCFIVFQTLKLSALPTDLAAMAFTLPAIIYRLESNLIVLEFCKSIGLELRPDLALEAMTKDSDNTEEHSEQPINLRKGMGNNYERLEFLGDCFLKMSTTIAIFSQRPDRDEFEYHVDRMILICNKNLFNTALDLKVQESIRSKAFSRRTWYPEGLELLKGKQNTSRLGKKGVGSDGHSLGDKSIADVCEALIGAAYMTTYNQQSFDMAIQAVTKFVNHKDHKAACWGDYYSLYQIPEWQKCESRPVQVELARQVETKLGYKFKYPRLLRSAFTHPSYGFLYENIPHYQRLEFLGDALIDMVCVDYLFHRFPEADPQWLTEHKMAMVSNQFLGTLCVSLDLQQHLLAMNTDLQRSITEYVTSIDQARTLAEDAAEKAGFRRNEYQRNFWVSERRPPKCLPDIVESYVGALFVDSEYDFGQVQKFFDAHILPYFKDMHLYDTFANDHPIVHLRDVMNDFHCRRWRVLSSDTDDELAEISATKVVAVVMIHGMVRVSSFADSGHYAKPKAARSFLSDIQGMTMNEYKSTYNCTCSSRAGDAGNIEDHATAA

SEQ ID NO: 2991 - DNA, 590 bp, Muscodor strobelii
  misc_feature: SGI EST ID NO. CUFF.7397.0
  misc_feature: Variant of the nucleotide sequence at SEQ ID NO 2989
gccggcgtatcattacattctctgtctacagcctcggcttccagccacagcagcgaactccaagacttcaccgatgacttgaccgatactctccctaagaatgaggacatcgcggagtctgaagatgaagagtctgataatgagaacgctagtcccatcgatgatctacccagccaagatgtggcaatattccgcgaatggcttcgaaaccagagggcagcgattcacgaaagaattcgtgcttcaggcactactgccgtcagttcacctgatggtcaaaatgatcaacctatgagagatgcacccatcatcaacagtccaagagagtaccagaccgagctcttcgaaagagcaaagcagaagaacatcattgcggttctcgacaccggtaaagcagtcggctcgaatgcctttccaaatagaagtactaatgcactcgacaggaaccggcaagaccctgatcgctgccttattactccgttactatgtcgagaaagagctggatgacagatatgccggaaagccacacaagctggctttcttcttggttgacaaggttgcattggttcaccagcagtatagagtgctaa

SEQ ID NO: 2992 - DNA, 1086 bp, Muscodor strobelii
  misc_feature: SGI cDNA ID NO. 560644
  misc_feature: Encodes the peptide sequence at SEQ ID NO 2993
atggtcgagggaccgaggagtctgaagactgtctttcagtctgcggaacagaaacgcttggcaatcgaggggtccttcgcgaccaactcatccacatatcaggatgatgttagtactggtctccagttctatgaagaatgcgtccaaattatggaccaaatctctctattcagtacaaatgagtcactcgaggatctcgctacttcagacttgccttaccttctcgtcttttatcgcatcgccgagcttcttcagagagcatcgacgtcgtcacccctggatcgacgggggattttggtcgcgactcgggaagcttacgacagatttctgcacctcttggacaactacacaatcctctcgcctcaagatagcaagctgtttgccgaatacagcgaggaccccactgccttttctactatcgccaccacggatcccaatgcgcggcgcaacgctaaaattgccaacttcaaagcagagaaggaactgaaacagaaactgtcatatatgcaggcgtcgcctcggtatctcgaagatggcggagacgaagaggctgttcgcgaactgtacctagccagcatcgccttgtgtgtccatttaacgttccaggggcttgagggaatcaaccgagaaatggaggtcttagctcaagcacccgtcccgctgatcccggacgaaacgagcgtcgaggatgatgcgcggaggcgaagggtttctctcgacggtgatggcttcacggagcggctggatactccgctgcgactgcagtcagcgaacagtggtccattgctcagccagaaaggaaagccactacgtcctttcactctggtgagcaaccggcaagagctccagcgtggggtatttcgtccaggacataatctgcccaccatgtcaattgatgagtatcttgacgaggagcggaggcggggcaacatcatcgagggaggtggcgaggcaagtggcagacagccagagccagatgaggacaatatggagaaggcagatgaagagacgatgaaggcccgtgcctgggacgaattcacagaggccaacccgcgtggcagcgggaacaccttgaacagaggctaa

SEQ ID NO: 2993 - protein, 361 aa, Muscodor strobelii
  misc_feature: SGI Peptide ID NO. 560644
  misc_feature (12)..(351): Pfam Id: PF04177 Pfam Desc: TAP42-like family
  misc_feature (261)..(351): Pfam Id: PF04177 Pfam Desc: TAP42-like family
  misc_feature (12)..(190): Pfam Id: PF04177 Pfam Desc: TAP42-like family
  misc_feature (1)..(361): NCBI GI: 116196268 Blast Desc: CHGG_04732 [Chaetomium globosum CBS 148.51] gi|88180645|gb|EAQ88113.1| CHGG_04732 [Chaetomium globosum CBS 148.51]
  misc_feature (5)..(361): NCBI GI: 171690376 Blast Desc: protein product [Podospora anserina] gi|170945136|emb|CAP71247.1| protein product [Podospora anserina]
  misc_feature (7)..(359): NCBI GI: 156032686 Blast Desc: SS1G_13748 [Sclerotinia sclerotiorum 1980] gi|154699151|gb|EDN98889.1| SS1G_13748 [Sclerotinia sclerotiorum 1980]
  misc_feature (7)..(361): NCBI GI: 154301556 Blast Desc: BC1G_10105 [Botryotinia fuckeliana B05.10] gi|150855767|gb|EDN30959.1| BC1G_10105 [Botryotinia fuckeliana B05.10]
  misc_feature (5)..(361): NCBI GI: 256727547 Blast Desc: [Nectria haematococca mpVI 77-13-4]
  misc_feature (5)..(361): NCBI GI: 85105142 Blast Desc: NCU08268 [Neurospora crassa OR74A] gi|28923480|gb|EAA32660.1| [Neurospora crassa OR74A]
  misc_feature (1)..(361): NCBI GI: 242763894 Blast Desc: TOR signaling pathway regulator (TapA), [Talaromyces stipitatus ATCC 10500] gi|218723861|gb|EED23278.1| TOR signaling pathway regulator (TapA), [Talaromyces stipitatus ATCC 10500]
  misc_feature (1)..(361): NCBI GI: 189205611 Blast Desc: type 2A phosphatase-associated protein 42 [Pyrenophora tritici-repentis Pt-1C-BFP] gi|187975233|gb|EDU41859.1| type 2A phosphatase-associated protein 42 [Pyrenophora tritici-repentis
  misc_feature (2)..(361): NCBI GI: 238499725 Blast Desc: TOR signaling pathway regulator (TapA), [Aspergillus flavus NRRL3357] gi|220692850|gb|EED49196.1| TOR signaling pathway regulator (TapA), [Aspergillus flavus NRRL3357]
  misc_feature (1)..(361): NCBI GI: 212529278 Blast Desc: TOR signalling pathway regulator (TapA), [Penicillium marneffei ATCC 18224] gi|210074194|gb|EEA28281.1| TOR signalling pathway regulator (TapA), [Penicillium marneffei ATCC 18224]
MVEGPRSLKTVFQSAEQKRLAIEGSFATNSSTYQDDVSTGLQFYEECVQIMDQISLFSTNESLEDLATSDLPYLLVFYRIAELLQRASTSSPLDRRGILVATREAYDRFLHLLDNYTILSPQDSKLFAEYSEDPTAFSTIATTDPNARRNAKIANFKAEKELKQKLSYMQASPRYLEDGGDEEAVRELYLASIALCVHLTFQGLEGINREMEVLAQAPVPLIPDETSVEDDARRRRVSLDGDGFTERLDTPLRLQSANSGPLLSQKGKPLRPFTLVSNRQELQRGVFRPGHNLPTMSIDEYLDEERRRGNIIEGGGEASGRQPEPDEDNMEKADEETMKARAWDEFTEANPRGSGNTLNRG

SEQ ID NO: 2994 - DNA, 2184 bp, Muscodor strobelii
  misc_feature: SGI EST ID NO. CUFF.7402.0
  misc_feature: Variant of the nucleotide sequence at SEQ ID NO 2992
aaaccccaaacatatcaagggaaccagcgctttgcaaactcgacgatagcttaatttgtatgagtatagaacaaagactatgtttcagtagcgtgtttgtccaatccatcgctggcaccttctataatacaagattcgaggcgtagacataagcctacaagcgatctctatttgccttgagagtattacagtgtgacttggaagtgatttggaggctggctctcatcctggatttttgttgattaaagctcttcaacatgtactgtgagctttgacggggttggaacttgtgtggatcagtgcactccattctggctggttgtaggagaccgggcagtgtgaagtttacatgcaccccgattactcgcacgcccccgagcatccgacgtggggcgtgtctagaaggccataaaatgggtgtgtggctatatcagccaggcagaaagcgcgtaaagaaatattggcaggtgtggtgtagtgtttttcaagtatacatgttgcgatgtgagcgcgactgctgttgtttctcctgctgaggacctggactaaccgacccgcacttgccaactgacgagagatatcgtaaggactgctctgcatgcgaaatcaatttatcgatggagtccccgggtaggctcccccgatatcttaccatacctacttagagtacctaccgttaggttaggtagtcgtcgtatgagttacaagggctgcacaaatacatttgccaccacttataaagcaaccaagattctgtcaaccgcccatgttcaacactcgctacatctgagtcttttgtcttggatcacacgtgtctgtatctgttgctactagttgtggtagttacacacctaacatggtcgagggaccgaggagtctgaagactgtctttcagtctgcggaacagaaacgcttggcaatcgaggggtccttcgcgaccaactcatccacatatcaggatgatgttagtactggtctccagttctatgaagaatgcgtccaaattatggaccaaatctctctattcagtacaaatgagtcactcgaggatctcgctacttcagacttgccttaccttctcgtcttttatcgcatcgccgagcttcttcagagagcatcgacgtcgtcacccctggatcgacgggggattttggtcgcgactcgggaagcttacgacagatttctgcacctcttggacaactacacaatcctctcgcctcaagatagcaagctgtttgccgaatacagcgaggaccccactgccttttctactatcgccaccacggatcccaatgcgcggcgcaacgctaaaattgccaacttcaaagcagagaaggaactgaaacagaaactgtcatatatgcaggcgtcgcctcggtatctcgaagatggcggagacgaagaggctgttcgcgaactgtacctagccagcatcgccttgtgtgtccatttaacgttccaggggcttgagggaatcaaccgagaaatggaggtcttagctcaagcacccgtcccgctgatcccggacgaaacgagcgtcgaggatgatgcgcggaggcgaagggtttctctcgacggtgatggcttcacggagcggctggatactccgctgcgactgcagtcagcgaacagtggtccattgctcagccagaaaggaaagccactacgtcctttcactctggtgagcaaccggcaagagctccagcgtggggtatttcgtccaggacataatctgcccaccatgtcaattgatgagtatcttgacgaggagcggaggcggggcaacatcatcgagggaggtggcgaggcaagtggcagacagccagagccagatgaggacaatatggagaaggcagatgaagagacgatgaaggcccgtgcctgggacgaattcacagaggccaacccgcgtggcagcgggaacaccttgaacagaggctaatttcacagcataatcgactcgagttgaatgtgaacatgtagtgcctcaagtacctattttattctgtacacacaagagtcagatggtcttctctgagcagattatgaatagaagagcagcgagcttcacgaaagggtttttgatgagtatcatcaacacctcatgtataatagtggacaccgaaaaatacggagtggcagttctggaagtaatagaacacctggtataggttccatgcctca

SEQ ID NO: 2995 - DNA, 1257 bp, Muscodor strobelii
  misc_feature: SGI cDNA ID NO. 560645
  misc_feature: Reduced expression when VOC is produced
  misc_feature: Encodes the peptide sequence at SEQ ID NO 2996
atggcggccgcagaacaagaccccctcttgctcctgcgccagtccatcgcgtccggcagcgccatcctccccaccgcttctgccgacgccgacgcccccgaggtcgacctctggcaggcgacacacctcaccttcgccacgcccacccgcctctccctccccatagacaccccgacccgcttcgtctccaacgacacgcctgtcgacctgcgcagcatctactttgcctggctgaagcgcgaggtcgccatccccgagtacaatgccttcgcctcccagctcaacgcagacctcgctggcaagggccaagtccacaagtttgcctacatcgagaagctagatctcatcacctggctcgagggtgccagcgaggagagcgagtgcatcaagcccctagctggcgacaaagatggctctacctcgactgctgctgcggcgctggcctcgaaaggcgctgctgctcctgccgtcggctcgactctgggccgctccggcaagggaaccctggatccgcgactggctgtcatctacaatagcgagcgcaagatgggcgatcgcaacaccgtgctgcgtggcatcaagccgaccgacttctcccatgtacgcaagtttgcggccgtcttcatgtccaagaaacctgctccagcctcatcctcgaacgtctccagcagccccgctatagcgtctcaccacaagcagagacggccagatcccatcatcctcctctcgccctcggcctcgtctctgctccgaatgaccaacatcaagtccttcctcgagggtggccagtatgtgccgacggattcattggccgctagttctagtacaacggcgagcatgttgcacatcaaccgcactatgaaggacatcgaccccaaccgggcaatgcgtttcatcctcgtcgaggggccagagcagttcaagcccgagtactggaaccgtgtcgtggctgtcttcaccaccgggcagacttggcagttcaagaattacaagtggagcagccctacggaactgtttaagcacatacccggcgtctacgtcggctggcgtggcgagcaaccgcccgagaacgtccgtggctggggccatagagtcatgaacattaccgtggacaggtggaagaacacgggaacgacgaataagatggactcgagtcgctggagggatcatgaagcagtggagactatctggaagaatatcgagagtagcatgcgcaccaagggctggaagcgcgaccaagctccgtcttcgatatga

SEQ ID NO: 2996 - protein, 418 aa, Muscodor strobelii
  misc_feature: SGI Peptide ID NO. 560645
  misc_feature (127)..(407): Pfam Id: PF05179 Pfam Desc: RNA pol II accessory factor, Cdc73 family
  misc_feature (232)..(407): Pfam Id: PF05179 Pfam Desc: RNA pol II accessory factor, Cdc73 family
  misc_feature (3)..(418): NCBI GI: 116196164 Blast Desc: CHGG_04680 [Chaetomium globosum CBS 148.51] gi|88180593|gb|EAQ88061.1| CHGG_04680 [Chaetomium globosum CBS 148.51]
  misc_feature (1)..(418): NCBI GI: 145613600 Blast Desc: MGG_11195 [Magnaporthe grisea 70-15] gi|145020658|gb|EDK04787.1| MGG_11195 [Magnaporthe grisea 70-15]
  misc_feature (2)..(418): NCBI GI: 46123699 Blast Desc: FG06227.1 [Gibberella zeae PH-1]
  misc_feature (1)..(418): NCBI GI: 164423522 Blast Desc: NCU08322 [Neurospora crassa OR74A] gi|157070130|gb|EAA33299.2| [Neurospora crassa OR74A]
  misc_feature (1)..(415): NCBI GI: 154289892 Blast Desc: BC1G_15900 [Botryotinia fuckeliana B05.10] gi|150848559|gb|EDN23752.1| BC1G_15900 [Botryotinia fuckeliana B05.10]
  misc_feature (1)..(415): NCBI GI: 156050281 Blast Desc: SS1G_07727 [Sclerotinia sclerotiorum 1980] gi|154692128|gb|EDN91866.1| SS1G_07727 [Sclerotinia sclerotiorum 1980]
  misc_feature (2)..(418): NCBI GI: 256727421 Blast Desc: RNA polymerase II-associated protein [Nectria haematococca mpVI 77-13-4]
  misc_feature (7)..(409): NCBI GI: 258577119 Blast Desc: conserved [Uncinocarpus reesii 1704] gi|237903007|gb|EEP77408.1| conserved [Uncinocarpus reesii 1704]
  misc_feature (3)..(409): NCBI GI: 238839655 Blast Desc: RNA polymerase II accessory factor [Microsporum canis CBS 113480]
  misc_feature (6)..(409): NCBI GI: 169775001 Blast Desc: [Aspergillus oryzae RIB40] gi|83769831|dbj|BAE59966.1| protein product [Aspergillus oryzae]
  misc_feature: Useful for introducing or modulating the production of volatile compounds
MAAAEQDPLLLLRQSIASGSAILPTASADADAPEVDLWQATHLTFATPTRLSLPIDTPTRFVSNDTPVDLRSIYFAWLKREVAIPEYNAFASQLNADLAGKGQVHKFAYIEKLDLITWLEGASEESECIKPLAGDKDGSTSTAAAALASKGAAAPAVGSTLGRSGKGTLDPRLAVIYNSERKMGDRNTVLRGIKPTDFSHVRKFAAVFMSKKPAPASSSNVSSSPAIASHHKQRRPDPIILLSPSASSLLRMTNIKSFLEGGQYVPTDSLAASSSTTASMLHINRTMKDIDPNRAMRFILVEGPEQFKPEYWNRVVAVFTTGQTWQFKNYKWSSPTELFKHIPGVYVGWRGEQPPENVRGWGHRVMNITVDRWKNTGTTNKMDSSRWRDHEAVETIWKNIESSMRTKGWKRDQAPSSI

SEQ ID NO: 2997 - DNA, 2031 bp, Muscodor strobelii
  misc_feature: SGI EST ID NO. CUFF.7439.1
  misc_feature: Variant of the nucleotide sequence at SEQ ID NO 2995
aaggacatgccgcaggtaatccctgccgattcttgcagatagagacaacttggcagcctcgctgcaggctagaacaaacaattctccagatgcgaacaaccacctgtagacgccaggacgcatcttcaacttgcacacggtaacgcagcaaggagtgctcccattgcgacggggtcgagcagcttgcaggcggctgtagctggtttgcgctggttgcaacgacgcaccgcaccagggataacttccctcgagccttcgagtcctccatcctcgccccatccacgacaaaacaccatggcggccgcagaacaagaccccctcttgctcctgcgccagtccatcgcgtccggcagcgccatcctccccaccgcttctgccgacgccgacgcccccgaggtcgacctctggcaggcgacacacctcaccttcgccacgcccacccgcctctccctccccatagacaccccgacccgcttcgtctccaacgacacgcctgtcgacctgcgcagcatctactttgcctggctgaagcgcgaggtcgccatccccgagtacaatgccttcgcctcccagctcaacgcagacctcgctggcaagggccaagtccacaagtttgcctacatcgagaagctagatctcatcacctggctcgagggtgccagcgaggagagcgagtgcatcaagcccctagctggcgacaaagatggctctacctcgactgctgctgcggcgctggcctcgaaaggcgctgctgctcctgccgtcggctcgactctgggccgctccggcaagggaaccctggatccgcgactggctgtcatctacaatagcgagcgcaagatgggcgatcgcaacaccgtgctgcgtggcatcaagccgaccgacttctcccatgtacgcaagtttgcggccgtcttcatgtccaagaaacctgctccagcctcatcctcgaacgtctccagcagccccgctatagcgtctcaccacaagcagagacggccagatcccatcatcctcctctcgccctcggcctcgtctctgctccgaatgaccaacatcaagtccttcctcgagggtggccagtatgtgccgacggattcattggccgctagttctagtacaacggcgagcatgttgcacatcaaccgcactatgaaggacatcgaccccaaccgggcaatgcgtttcatcctcgtcgaggggccagagcagttcaagcccgagtactggaaccgtgtcgtggctgtcttcaccaccgggcagacttggcagttcaagaattacaagtggagcagccctacggaactgtttaagcacatacccggcgtctacgtcggctggcgtggcgagcaaccgcccgagaacgtccgtggctggggccatagagtcatgaacattaccgtggacaggtggaagaacacgggaacgacgaataagatggactcgagtcgctggagggatcatgaagcagtggagactatctggaagaatatcgagagtagcatgcgcaccaagggctggaagcgcgaccaagctccgtcttcgatatgatccagtcacatcgattttacgtacgactgagctgtcaagagtcacagttatccacatcacagcgaggcgcaatgtgacaggtggaattaggagaggcagtggctctaagcttgggcagtctatctacaatagctctgcggcgagaacaccaagatgactgtttctcgctacaatgtatttgtaggcatcgtttcctacgggggatgcttccatgcttgaagaacgaaaaggagcgttcattcgagtggcggccgcggtttatataaccactaattgtattggcatgagcgcaaaagggcgcaacggagtttcaggatgatcgcacggggcgcaccaagtaaggtgcagcgtttatagttttgttcagctcaaattgctgaatagcaaaagaaggaacattgaacatagtgtgcaacccgatctcgctccgaaaagttgataccgtctgcgaagtcctggttatcttctgctccaatttcg

SEQ ID NO: 2998 - DNA, 2181 bp, Muscodor strobelii
  misc_feature: SGI cDNA ID NO. 560646
  misc_feature: Reduced expression when VOC is produced
  misc_feature: Encodes the peptide sequence at SEQ ID NO 2999
atggctgctatccatcacccatcaccaacctcccgggcaccaccaccaccatctctgctgcttcacaaccccgtgcacaaccccgagcctcatcagccaccctctcacacagtcacaacagacgcaacagacacagcagacacaacgtcgcccgctgcaactcgcgctgctgtcactcccgtccctaccactcctagctccgtttccttcgcggccactagcgctcctcgcacctccagcattgcgcccgctgcagcgcctgttgccggcagcaagcccccaagttctcctcggccacagaagcctgcaggattgctcgccattgccgccgccgcatttgacaggacaattgtgagtcgcgccgagccgctggtgcgcaatcgccagtcctcgtccacgctcaaccgcctctcggttgcactagactcccccacgggcagcgagttctctgcctcggacaggtcgtccaagggccgcactctgactggtgtctcgtcgacttcctcgaccccaatcctgctcagtcctctctccgagacccgacggttgagccaggacggatcgttgaagggtcccatttcgacgccatactctgagacagacccaactttgcctccgcccatcctcctgctgtcgagccaacaacacaagatgcatcagacttcctcgaggttactccgcatgacggatgatgaccgtcccttcactcgtgacttcaaagatctcttttccaccctgatagtcagcctgcttccactttcaccacatcgagttcgattgacacgagttgagcacacgtttctatctgaggatgccatcaacaacctgggttcgctcaaattctctcagtctaaccgtatgcctgatccgaaagacccctctcgcattgtaactacaacgacaacgaccacgttctccatggctaaggatatggctcgatcgatatgtcagcgatttctcgacgcaaggttcatcgagtctgccgatggcaaactccagcagatatacaccatgaaaggtgcagtgtggcaattgacgccgaagggcgtatgtgttttggatcgcttctgctcgcgcaatggtattcagcaaagacagataggtgacttgattcagcaaggttccagtcatctgtgcattctcgagcgagatccggcaacagataagttggtcatggatcgaggcacaatggaagtcgttttccgtaggttgtgcggcgtcaatgggctgaatatcaagtccagcgtcagctctgccgattccgactcgctgagcgactatcgagacggtctggcaggagtgaagatggccagtgagcggaaagttggagggaaagtgttcaaagatacttttactggaaagtcgtgctcggactggttgatggattgctgcacgacggtcgatcgtcgtgagaccttcgaaatggcttcgctgttcgtcgaatatgagctgatggagtcaatcttccccgatagaggatacatggcgacgtcaccatctgccgctattttccagccgactaagaacgctatttaccagcttactacgaagggcaaagaaatcctcagcggcactgggagaggtcgcacgtcggagagcgaaggtctaggagcgtcagggcgcgccggggttgcccgtgattcgaacacacaacgtctcgacaagatactaaacgacgcggctcttcgactcttgtttcgagaaaacttgcgagatacccactgcgaggagaatttgtcattttatttggatgtcgaagaattcgttcggagctgtcgaggcgctatcaagtctgctcaaaagaacccaaattctacgtcgatggacgggattaaggaaattatggcgcaagcatacggcatctacaatgcttttctagcccccggctctccttgcgagctgaacattgaccatcagctgcggaataacttagcgacccgtatgactaaggcggttggccaagatgtcgctatgattgataccttgcacgaggtgaccggattgtttgaagacgcacagaatgcggtattcaaattgatggcaagcgattcggtgcctaaatttttgcgcaatgcgaaatacgaaaacaccctgaagaactacgatttcgatgccatcgtcgttggtggtggtgcgggtcgtatcatagaacgaagccaaagccggtccaaccgtagatga

SEQ ID NO: 2999 - protein, 726 aa, Muscodor strobelii
  misc_feature: SGI Peptide ID NO. 560646
  misc_feature (430)..(514): Pfam Id: PF00610 Pfam Desc: Domain found in Dishevelled, Egl-10, and Pleckstrin
  misc_feature (552)..(697): Pfam Id: PF00615 Pfam Desc: Regulator of G protein signaling domain
  misc_feature (103)..(725): NCBI GI: 116196158 Blast Desc: CHGG_04677 [Chaetomium globosum CBS 148.51] gi|88180590|gb|EAQ88058.1| CHGG_04677 [Chaetomium globosum CBS 148.51]
  misc_feature (104)..(726): NCBI GI: 46123701 Blast Desc: FG06228.1 [Gibberella zeae PH-1]
  misc_feature (100)..(725): NCBI GI: 164423526 Blast Desc: developmental regulator flbA [Neurospora crassa OR74A] gi|157070132|gb|EAA33296.2| developmental regulator flbA [Neurospora crassa OR74A]
  misc_feature (218)..(726): NCBI GI: 256727420 Blast Desc: NECHADRAFT_103375 [Nectria haematococca mpVI 77-13-4]
  misc_feature (218)..(726): NCBI GI: 51011900 Blast Desc: CPRGS-1 [Cryphonectria parasitica]
  misc_feature (62)..(725): NCBI GI: 84657442 Blast Desc: regulator of G-protein signaling [Magnaporthe grisea]
  misc_feature (218)..(725): NCBI GI: 119220868 Blast Desc: regulator of G protein signaling [Beauveria bassiana]
  misc_feature (101)..(726): NCBI GI: 171690466 Blast Desc: protein product [Podospora anserina] gi|170945181|emb|CAP71292.1| protein product [Podospora anserina]
  misc_feature (100)..(725): NCBI GI: 156045561 Blast Desc: SS1G_09971 [Sclerotinia sclerotiorum 1980] gi|154694364|gb|EDN94102.1| SS1G_09971 [Sclerotinia sclerotiorum 1980]
  misc_feature (218)..(652): NCBI GI: 111054394 Blast Desc: regulator of G protein signaling pathway [Metarhizium anisopliae]
  misc_feature: Useful for introducing or modulating the production of volatile compounds
MAAIHHPSPTSRAPPPPSLLLHNPVHNPEPHQPPSHTVTTDATDTADTTSPAATRAAVTPVPTTPSSVSFAATSAPRTSSIAPAAAPVAGSKPPSSPRPQKPAGLLAIAAAAFDRTIVSRAEPLVRNRQSSSTLNRLSVALDSPTGSEFSASDRSSKGRTLTGVSSTSSTPILLSPLSETRRLSQDGSLKGPISTPYSETDPTLPPPILLLSSQQHKMHQTSSRLLRMTDDDRPFTRDFKDLFSTLIVSLLPLSPHRVRLTRVEHTFLSEDAINNLGSLKFSQSNRMPDPKDPSRIVTTTTTTTFSMAKDMARSICQRFLDARFIESADGKLQQIYTMKGAVWQLTPKGVCVLDRFCSRNGIQQRQIGDLIQQGSSHLCILERDPATDKLVMDRGTMEVVFRRLCGVNGLNIKSSVSSADSDSLSDYRDGLAGVKMASERKVGGKVFKDTFTGKSCSDWLMDCCTTVDRRETFEMASLFVEYELMESIFPDRGYMATSPSAAIFQPTKNAIYQLTTKGKEILSGTGRGRTSESEGLGASGRAGVARDSNTQRLDKILNDAALRLLFRENLRDTHCEENLSFYLDVEEFVRSCRGAIKSAQKNPNSTSMDGIKEIMAQAYGIYNAFLAPGSPCELNIDHQLRNNLATRMTKAVGQDVAMIDTLHEVTGLFEDAQNAVFKLMASDSVPKFLRNAKYENTLKNYDFDAIVVGGGAGRIIERSQSRSNRR

SEQ ID NO: 3000 - DNA, 5769 bp, Muscodor strobelii
  misc_feature: SGI EST ID NO. CUFF.7831.0
  misc_feature: Variant of the nucleotide sequence at SEQ ID NO 2998
tcatgacctatctaggcatttgatgctaggtttttcatggccagtgccatgcctgagattgcagtgtgtagtggacactgaagcgcgagcaaagtacagtaggatatgtcgacatacctgtcaagtcaagccaagccaagccatgtgttcaattacctacaaagcccggccgggtatggaggatggattacgcagcgtgctcatcgttccccaggagtacaacaagccttagctcgcccggcaagacgctgctaaaattttgtccgtctcatgccaggtaccgtgggcagatgtcggtctttaaatcgcttctgtcgaattccctacttttatgattacagattacttgtgcaggcaaattgcatctggttttgtctttgtgagaacttccaggttccttcgcgtcacattgcattcgtccccccaaaagccattctggaatctagagcgtggaagcgggaactcgacctcgcaaggtcttccgcagcgtcacatcgcacgctctcgacaactcttgtcgctctcgcgcagactctattacgatacaatacctgcaacctagaagacaccccctctccacacgcctcattagtcctagctgccctgcattaacttgcaacttagcagagccgtaacaagtaactctgggagcgccaagagctggactcctctcttgcttttattaaagcagtgtacctaaggtagtcttcggtcgtatgagcgcgggagactggctggactgggtgcgattgagaggcagcattgaattgtcttttacaagtagattgcagttcgctttcgccgtctgctctcgccattcccgctcttttgctttcttctggcccctcacctcgtctcccacaacgtctcgccgccctgtccttgccgttgctctgatagccatctaccctaacctgctgcacgcctagttagactcgtagccgtggtgctaacgattatttgattacaattaattcttgtcgagtctccacgcggaacgctgctagcagaggtgcttgggcgcagatgttcagccataagtaattaagcttgacaattcacggctgccgtccccccaaaatcctgccacccccctccccttccatcccaaattctgaccaagagcccaagaccctctcgctcggctcgaatcctgggtctcctggtagatggctgctatccatcacccatcaccaacctcccgggcaccaccaccaccatctctgctgcttcacaaccccgtgcacaaccccgagcctcatcagccaccctctcacacagtcacaacagacgcaacagacacagcagacacaacgtcgcccgctgcaactcgcgctgctgtcactcccgtccctaccactcctagctccgtttccttcgcggccactagcgctcctcgcacctccagcattgcgcccgctgcagcgcctgttgccggcagcaagcccccaaggtacggtgtcatctcgtctgtctgcctgtcaccccgacggcccgactgtcgcccatttcccgccagcgcccattctcacgcttttgtccccaattcccatctgcccactgcccactgtctcgctgctcacatcaattgactggatctgcacagttctcctcggccacagaagcctgcaggattgctcgccattgccgccgccgcatttgacaggacaattgtgagtcgcgccgagccgctggtgcgcaatcgccagtcctcgtccacgctcaaccgcctctcggttgcactagactcccccacgggcagcgagttctctgcctcggacaggtcgtccaagggccgcactctgactggtgtctcgtcgacttcctcgaccccaatcctgctcagtcctctctccgagacccgacggttgagccaggacggatcgttgaagggtcccatttcgacgccatactctgagacagacccaactttgcctccgcccatcctcctgctgtcgagccaacaacacaagatgcatcagacttcctcgaggttactccgcatgacggatgatgaccgtcccttcactcgtgacttcaaagatctcttttccaccctgatagtcagcctgcttccactttcaccacatcgagttcgattgacacgagttgagcacacgtttctatctgaggatgccatcaacaacctgggttcgctcaaattctctcagtctaaccgtatgcctgatccgaaagacccctctcgcattgtaactacaacgacaacgaccacgttctccatggctaaggatatggctcgatcgatatgtcagcgatttctcgacgcaaggttcatcgagtctgccgatggcaaactccagcagatatacaccatgaaaggtgcagtgtggcaattgacgccgaagggcgtatgtgttttggatcgcttctgctcgcgcaatggtattcagcaaagacagataggtgacttgattcagcaaggttccagtcatctgtgcattctcgagcgagatccggcaacagataagttggtcatggatcgaggcacaatggaagtcgttttccgtaggttgtgcggcgtcaatgggctgaatatcaagtccagcgtcagctctgccgattccgactcgctgagcgactatcgagacggtctggcaggagtgaagatggccagtgagcggaaagttggagggaaagtgttcaaagatacttttactggaaagtcgtgctcggactggttgatggattgctgcacgacggtcgatcgtcgtgagaccttcgaaatggcttcgctgttcgtcgaatatgagctgatggagtcaatcttccccgatagaggatacatggcgacgtcaccatctgccgctattttccagccgactaagaacgctatttaccagcttactacgaagggcaaagaaatcctcagcggcactgggagaggtcgcacgtcggagagcgaaggtctaggagcgtcagggcgcgccggggttgcccgtgattcgaacacacaacgtctcgacaagatactaaacgacgcggctcttcgactcttgtttcgagaaaacttgcgagatacccactgcgaggagaatttgtcattttatttggatgtcgaagaattcgttcggagctgtcgaggcgctatcaagtctgctcaaaagaacccaaattctacgtcgatggacgggattaaggaaattatggcgcaagcatacggcatctacaatgcttttctagcccccggctctccttgcgagctgaacattgaccatcagctgcggaataacttagcgacccgtatgactaaggcggttggccaagatgtcgctatgattgataccttgcacgaggtgaccggattgtttgaagacgcacagaatgcggtattcaaattgatggcaagcgattcggtgcctaaatttttgcgcaatgcgaaatacgaaaacaccctgaagaactacgatttcgatgccatcgtcgttggtggtggtgcgggtcgtatcatagaacgaagccaaagccggtccaaccgtagatgagctttacaccatttatccttttaacgattttcgagacaaagtttctagctcgtcgagcctacctttgccaatgccttgcgtcttggatccacatagcatgaaaatggcatcgcacactgcatcaaatgtgcagagttctaatacaatctttccgaataacgaaactcaaaattattgtttaccaggacataccggcgttgaaggataaagtagcaatagagacaacctcgatcggcgttctgaagcaccagctatatgaggagaacaggcaaatgtcagccagttttgtgtgaatacgggacatctcgactcatcacaaggccctgtatgttacaagaccccaattgaacaattgcattcgacaactatacggagacaggctgcagggacaagcttacacgcaatcgatgcagaagagcgaatgggccattggactggacatgacagcattgatacaacttggtgaaactatagaagcgacggtcaacatcggttggatcagtgcatcccagagtaggatcgagcaaactatgcagaggcatcgcgatggtagcatgtacatagcaacccaatctggtcagactcagcaaagcgctgccatctcaaaatgcaagtcaatattttgttagtgagagatcttcgcagccgtgaagccgattgttggcgagtgagtctgagtgctctttcaactctagggatggcaatcaagccgaggaatgagaccttgtgtttagagggagtagtttctaagtgtcttgagacatcagggggacggcattgcctaaaacctggaattgtgttggacgccctcggagatcattggtattgctctggattgctcatctcttataagattccccggtcagcttgagcattcgcgatcatgaacggattatatccttattaagtctgcaacgctcccctttccgcatcccgccgtctgttctctatcggcctcagttcactcttttctacacactcgtttaatagctcatacaacgccaggccaggtcccatcctcagcatccatcaccactccaacttgcacacataggcccgagacacattcaagatgcagaccgtaacagttatgggaatgttgattgctggcgttgtagcccagtcgtcgatcacaacagttccatctatgtcgatgtccgcatcttcggcggcctcgtctgtgacgacgcttgacccagcacaattggcaaacggtacggcgccagcatatacgtacttcaacgtgacaatcacatccacggttgttgtcaacgagttgacgacactctgtgccgaggcgacgactctcacgttcaatgactgcgagtacacggccacggcgggtgaacagatcgtggtgacgaactgtccatgcacagtgacaacggtatgtttccttccggcactttaggttctattctttctccattacatattggccttcacgatgtgagatatcgcgcaaccggacattctatattgcccctgcttggataaatcacggtgcgacttggctcacccctatcagccaatgtcctgtatcattttatattgttcaacccattgctatagccgtttgccttgttcaaagctctgttactctcgcatcttgtgtcgccaagtttaaatttgttcccccttttttggtcgccttttgcccttttttctgcttgtttatggcgtacccgtttctggccggtcagagatattatttcaaggattagatactaaagcagaatgtccaaaaggctctgcccactctcacatcctcgatctgcaccgagcccacgctcccgatggtccctatggcaccgccagccccgccagcccctattccgaccaccgagacagaggtcgcgccggcagcaccgacggagacgctacctgtggttcaagtcggcggtgccacatcgaagtttgacggagtcaagggcgtggcacttgctcttgttgccctagcgtttgggctctaatcgctatgacgaatctgattgatgatatgtgatacgctgtttggtaaattttaattggacactcactgagaatggcgggactatgcgatatggctacagaggagtagatttgggtcttcgtaggagttgtggtcttttcacgggtcaagatctgagatggatgggttgtgtctccgatctatctaggcgggagagatgctgatttgaatattgggtaatgtttatggatatgtctgatcatgtacttgtttcgtgtaactcttgtcctccataatgtgagcaatgtaccacct

SEQ ID NO: 3001 - DNA, 564 bp, Muscodor strobelii
  misc_feature: SGI cDNA ID NO. 560647
  misc_feature: Reduced expression when VOC is produced
  misc_feature: Encodes the peptide sequence at SEQ ID NO 3002
atgcagaccgtaacagttatgggaatgttgattgctggcgttgtagcccagtcgtcgatcacaacagttccatctatgtcgatgtccgcatcttcggcggcctcgtctgtgacgacgcttgacccagcacaattggcaaacggtacggcgccagcatatacgtacttcaacgtgacaatcacatccacggttgttgtcaacgagttgacgacactctgtgccgaggcgacgactctcacgttcaatgactgcgagtacacggccacggcgggtgaacagatcgtggtgacgaactgtccatgcacagtgacaacgatactaaagcagaatgtccaaaaggctctgcccactctcacatcctcgatctgcaccgagcccacgctcccgatggtccctatggcaccgccagccccgccagcccctattccgaccaccgagacagaggtcgcgccggcagcaccgacggagacgctacctgtggttcaagtcggcggtgccacatcgaagtttgacggagtcaagggcgtggcacttgctcttgttgccctagcgtttgggctctaa

SEQ ID NO: 3002 - protein, 187 aa, Muscodor strobelii
  misc_feature: SGI Peptide ID NO. 560647
  misc_feature (50)..(127): NCBI GI: 256728953 Blast Desc: NECHADRAFT_102622 [Nectria haematococca mpVI 77-13-4]
  misc_feature (60)..(104): NCBI GI: 254586121 Blast Desc: ZYRO0G14894p [Zygosaccharomyces rouxii] gi|238941522|emb|CAR29695.1| ZYRO0G14894p [Zygosaccharomyces rouxii]
  misc_feature (43)..(125): NCBI GI: 156043665 Blast Desc: [Sclerotinia sclerotiorum 1980] gi|154695223|gb|EDN94961.1| [Sclerotinia sclerotiorum 1980]
  misc_feature (42)..(104): NCBI GI: 254586121 Blast Desc: ZYRO0G14894p [Zygosaccharomyces rouxii] gi|238941522|emb|CAR29695.1| ZYRO0G14894p [Zygosaccharomyces rouxii]
  misc_feature (57)..(133): NCBI GI: 145613602 Blast Desc: [Magnaporthe grisea 70-15] gi|145020660|gb|EDK04789.1| [Magnaporthe grisea 70-15]
  misc_feature (46)..(104): NCBI GI: 254586121 Blast Desc: ZYRO0G14894p [Zygosaccharomyces rouxii] gi|238941522|emb|CAR29695.1| ZYRO0G14894p [Zygosaccharomyces rouxii]
  misc_feature (55)..(108): NCBI GI: 256721316 Blast Desc: NECHADRAFT_102066 [Nectria haematococca mpVI 77-13-4]
  misc_feature: Useful for introducing or modulating the production of volatile compounds
MQTVTVMGMLIAGVVAQSSITTVPSMSMSASSAASSVTTLDPAQLANGTAPAYTYFNVTITSTVVVNELTTLCAEATTLTFNDCEYTATAGEQIVVTNCPCTVTTILKQNVQKALPTLTSSICTEPTLPMVPMAPPAPPAPIPTTETEVAPAAPTETLPVVQVGGATSKFDGVKGVALALVALAFGL

SEQ ID NO: 3003 - DNA, 5255 bp, Muscodor strobelii
  misc_feature: SGI EST ID NO. CUFF.7831.1
  misc_feature: Variant of the nucleotide sequence at SEQ ID NO 3001
tcatgacctatctaggcatttgatgctaggtttttcatggccagtgccatgcctgagattgcagtgtgtagtggacactgaagcgcgagcaaagtacagtaggatatgtcgacatacctgtcaagtcaagccaagccaagccatgtgttcaattacctacaaagcccggccgggtatggaggatggattacgcagcgtgctcatcgttccccaggagtacaacaagccttagctcgcccggcaagacgctgctaaaattttgtccgtctcatgccaggtaccgtgggcagatgtcggtctttaaatcgcttctgtcgaattccctacttttatgattacagattacttgtgcaggcaaattgcatctggttttgtctttgtgagaacttccaggttccttcgcgtcacattgcattcgtccccccaaaagccattctggaatctagagcgtggaagcgggaactcgacctcgcaaggtcttccgcagcgtcacatcgcacgctctcgacaactcttgtcgctctcgcgcagactctattacgatacaatacctgcaacctagaagacaccccctctccacacgcctcattagtcctagctgccctgcattaacttgcaacttagcagagccgtaacaagtaactctgggagcgccaagagctggactcctctcttgcttttattaaagcagtgtacctaaggtagtcttcggtcgtatgagcgcgggagactggctggactgggtgcgattgagaggcagcattgaattgtcttttacaagtagattgcagttcgctttcgccgtctgctctcgccattcccgctcttttgctttcttctggcccctcacctcgtctcccacaacgtctcgccgccctgtccttgccgttgctctgatagccatctaccctaacctgctgcacgcctagttagactcgtagccgtggtgctaacgattatttgattacaattaattcttgtcgagtctccacgcggaacgctgctagcagaggtgcttgggcgcagatgttcagccataagtaattaagcttgacaattcacggctgccgtccccccaaaatcctgccacccccctccccttccatcccaaattctgaccaagagcccaagaccctctcgctcggctcgaatcctgggtctcctggtagatggctgctatccatcacccatcaccaacctcccgggcaccaccaccaccatctctgctgcttcacaaccccgtgcacaaccccgagcctcatcagccaccctctcacacagtcacaacagacgcaacagacacagcagacacaacgtcgcccgctgcaactcgcgctgctgtcactcccgtccctaccactcctagctccgtttccttcgcggccactagcgctcctcgcacctccagcattgcgcccgctgcagcgcctgttgccggcagcaagcccccaagttctcctcggccacagaagcctgcaggattgctcgccattgccgccgccgcatttgacaggacaattgtgagtcgcgccgagccgctggtgcgcaatcgccagtcctcgtccacgctcaaccgcctctcggttgcactagactcccccacgggcagcgagttctctgcctcggacaggtcgtccaagggccgcactctgactggtgtctcgtcgacttcctcgaccccaatcctgctcagtcctctctccgagacccgacggttgagccaggacggatcgttgaagggtcccatttcgacgccatactctgagacagacccaactttgcctccgcccatcctcctgctgtcgagccaacaacacaagatgcatcagacttcctcgaggttactccgcatgacggatgatgaccgtcccttcactcgtgacttcaaagatctcttttccaccctgatagtcagcctgcttccactttcaccacatcgagttcgattgacacgagttgagcacacgtttctatctgaggatgccatcaacaacctgggttcgctcaaattctctcagtctaaccgtatgcctgatccgaaagacccctctcgcattgtaactacaacgacaacgaccacgttctccatggctaaggatatggctcgatcgatatgtcagcgatttctcgacgcaaggttcatcgagtctgccgatggcaaactccagcagatatacaccatgaaaggtgcagtgtggcaattgacgccgaagggcgtatgtgttttggatcgcttctgctcgcgcaatggtattcagcaaagacagataggtgacttgattcagcaaggttccagtcatctgtgcattctcgagcgagatccggcaacagataagttggtcatggatcgaggcacaatggaagtcgttttccgtaggttgtgcggcgtcaatgggctgaatatcaagtccagcgtcagctctgccgattccgactcgctgagcgactatcgagacggtctggcaggagtgaagatggccagtgagcggaaagttggagggaaagtgttcaaagatacttttactggaaagtcgtgctcggactggttgatggattgctgcacgacggtcgatcgtcgtgagaccttcgaaatggcttcgctgttcgtcgaatatgagctgatggagtcaatcttccccgatagaggatacatggcgacgtcaccatctgccgctattttccagccgactaagaacgctatttaccagcttactacgaagggcaaagaaatcctcagcggcactgggagaggtcgcacgtcggagagcgaaggtctaggagcgtcagggcgcgccggggttgcccgtgattcgaacacacaacgtctcgacaagatactaaacgacgcggctcttcgactcttgtttcgagaaaacttgcgagatacccactgcgaggagaatttgtcattttatttggatgtcgaagaattcgttcggagctgtcgaggcgctatcaagtctgctcaaaagaacccaaattctacgtcgatggacgggattaaggaaattatggcgcaagcatacggcatctacaatgcttttctagcccccggctctccttgcgagctgaacattgaccatcagctgcggaataacttagcgacccgtatgactaaggcggttggccaagatgtcgctatgattgataccttgcacgaggtgaccggattgtttgaagacgcacagaatgcggtattcaaattgatggcaagcgattcggtgcctaaatttttgcgcaatgcgaaatacgaaaacaccctgaagaactacgatttcgatgccatcgtcgttggtggtggtgcgggtcgtatcatagaacgaagccaaagccggtccaaccgtagatgagctttacaccatttatccttttaacgattttcgagacaaagtttctagctcgtcgagcctacctttgccaatgccttgcgtcttggatccacatagcatgaaaatggcatcgcacactgcatcaaatgtgcagagttctaatacaatctttccgaataacgaaactcaaaattattgtttaccaggacataccggcgttgaaggataaagtagcaatagagacaacctcgatcggcgttctgaagcaccagctatatgaggagaacaggcaaatgtcagccagttttgtgtgaatacgggacatctcgactcatcacaaggccctgtatgttacaagaccccaattgaacaattgcattcgacaactatacggagacaggctgcagggacaagcttacacgcaatcgatgcagaagagcgaatgggccattggactggacatgacagcattgatacaacttggtgaaactatagaagcgacggtcaacatcggttggatcagtgcatcccagagtaggatcgagcaaactatgcagaggcatcgcgatggtagcatgtacatagcaacccaatctggtcagactcagcaaagcgctgccatctcaaaatgcaagtcaatattttgttagtgagagatcttcgcagccgtgaagccgattgttggcgagtgagtctgagtgctctttcaactctagggatggcaatcaagccgaggaatgagaccttgtgtttagagggagtagtttctaagtgtcttgagacatcagggggacggcattgcctaaaacctggaattgtgttggacgccctcggagatcattggtattgctctggattgctcatctcttataagattccccggtcagcttgagcattcgcgatcatgaacggattatatccttattaagtctgcaacgctcccctttccgcatcccgccgtctgttctctatcggcctcagttcactcttttctacacactcgtttaatagctcatacaacgccaggccaggtcccatcctcagcatccatcaccactccaacttgcacacataggcccgagacacattcaagatgcagaccgtaacagttatgggaatgttgattgctggcgttgtagcccagtcgtcgatcacaacagttccatctatgtcgatgtccgcatcttcggcggcctcgtctgtgacgacgcttgacccagcacaattggcaaacggtacggcgccagcatatacgtacttcaacgtgacaatcacatccacggttgttgtcaacgagttgacgacactctgtgccgaggcgacgactctcacgttcaatgactgcgagtacacggccacggcgggtgaacagatcgtggtgacgaactgtccatgcacagtgacaacggctctgcccactctcacatcctcgatctgcaccgagcccacgctcccgatggtccctatggcaccgccagccccgccagcccctattccgaccaccgagacagaggtcgcgccggcagcaccgacggagacgctacctgtggttcaagtcggcggtgccacatcgaagtttgacggagtcaagggcgtggcacttgctcttgttgccctagcgtttgggctctaatcgctatgacgaatctgattgatgatatgtgatacgctgtttggtaaattttaattggacactcactgagaatggcgggactatgcgatatggctacagaggagtagatttgggtcttcgtaggagttgtggtcttttcacgggtcaagatctgagatggatgggttgtgtctccgatctatctaggcgggagagatgctgatttgaatattgggtaatgtttatggatatgtctgatcatgtacttgtttcgtgtaactcttgtcctccataatgtgagcaatgtaccacct

SEQ ID NO: 3004 - DNA, 2445 bp, Muscodor strobelii
  misc_feature: SGI cDNA ID NO. 560648
  misc_feature: Encodes the peptide sequence at SEQ ID NO 3005
atggcacctcgccagacgccaacatctgcccgcaagcgatcgcgagccgacctcgaagcctcttcgcccaaacctgcctctcccgacgcctcagaggaccgggccacgaagcctaagcgtgcccgtaccactccctcctctcgagctgcgcctagtgccttttcctccgtcacatccgctattggcggcgtgctcggcaggatcagtcgtctgcgccaccctgtccccgaagcagcgcacgccagtgaagacactctcgcccagcctggctcgcccagtcccgacaatgccaacgtctacgaggtgcccgactccggtgatgagatagcaactccctcgaggaagagaccagcgaagaatgacattcccgggagcactacagcagctatgcaagatgccaacacagacacttccacaccacgcaggaggggtcgccctcccaaaataaagggtccactggaatctcccgccgtcaagtctcgtgtttatggctcggtcgcgagggctactgcccacgagtctcccaagctgaagggcatattgaccccgcagaaacggaagctaaacacgccgcgcaagacggttctgtttgaagacacagatcgagatgataccgaggacgattggggacgcgccatgcccaaactggttctggaatccgccaaggccaaaagagcgtcgaacccatccgaagaagcctcgttgcggtctgcaaacgaggacggccaaaaacgcacagacacagatgaaggaactgctgtagtagaagatggagaagaagccgagggggcagaggaagaggaggatgagaacgacgaggatgatgatgaagtctgcgtgatatgttcaaagcccgaatcaaagcccgaatcaaagcccccaaatgaaatcatattctgcgaggtttgtgaccggggcttccaccaagcctgctataatgtgcctgtcattcccgagggagactggatatgtaggggttgctcccaagaagacgtcgtgtcccgcttgccagaaacgtcggaggcgctgtctgatcctgttgcaaccgtggaaactccggaaatcctagaagtccctgatataccgaattttgcgcagcacctccaatcgatgcggcacattctactagagcgttgttctagtaaccgccgcatcaaactcagaggccagggtgaggcttttgacaaggcctatcagcttgtagaacagaccgtccttgcgggagaaggaaactctatgatggtcattggcggtcgtggatgtggcaagacgacgatgatggaggagattgtcagcaaacttcggaacgagaacccagatgatttccatgtgatacgtctcaacggtttcatccacacggacgacaagcttgcgctcaaggaaatatggcgtcaacttggcaaggagatggatattgaggacgacctaatcaataagacaaataactatgcagatacgatgacatctctactggctcttttatcacatccaaccgagatcaccggcactgaggaggacggcgtgacctcgaaatctgtagtattcgtgatcgacgagttcgaactgttcgcaacacacggccgacagacactactttacaatctgtttgatattgcccaggccaggaaggcacctatcgctgtcatcggtcttaccaccaggatcgatgtagtggagagcctcgagaagcgagtgaagagtcgcttcagccatcgctacgtctacttggctcttcccaagtcattggcagcatattgggatatctgcagacatgggttgattatagatgaagaagatctagagtcggaaggcctcgatatcaatctcgaaggatctcaagagtttcttgattattggaacaagaaaatcgagacccttcggcagacacaagcctttgaggatcacttggaatattactattatacctctaaatcggtagcggcgtttctctcatcatgcatcttaccactctcagcattgtcgatctcatcccctgacctagcgattccatctccttcgacgacacttgtcttcgagccacctgagccgaaactgcaacttctcgcaaccttatcagatctcgaattggcgctactcatctcagcagcgcggcttgacattgtggcgcacacagacacggtcaactttgcaatggcgtatgatgagtacggtgctcagatggggaagcaacggctgcaaagcgccagcgcgggtatgctggctctaggcggcggtgcgagaacctggggccgaagtgttgcggttgtagcatgggaacgattagtctcactgggcctgctcatccctgcgggcatcggcggacgatccaacgctgcacatgctggactggagggaaagatgtggaagatggatgtctcccttgaagagatacctttggctgttgaccttcctggattcctgactaaatggtgtactcagatttag

SEQ ID NO: 3005 - protein, 814 aa, Muscodor strobelii
  misc_feature: SGI Peptide ID NO. 560648
  misc_feature (278)..(330): Pfam Id: PF00628 Pfam Desc: PHD-finger
  misc_feature (271)..(814): NCBI GI: 46123707 Blast Desc: FG06231.1 [Gibberella zeae PH-1]
  misc_feature (178)..(814): NCBI GI: 116196146 Blast Desc: CHGG_04671 [Chaetomium globosum CBS 148.51] gi|88180584|gb|EAQ88052.1| CHGG_04671 [Chaetomium globosum CBS 148.51]
  misc_feature (278)..(814): NCBI GI: 171690472 Blast Desc: protein product [Podospora anserina] gi|170945184|emb|CAP71295.1| protein product [Podospora anserina]
  misc_feature (168)..(814): NCBI GI: 164423528 Blast Desc: NCU08317 [Neurospora crassa OR74A] gi|157070133|gb|EAA33294.2| conserved [Neurospora crassa OR74A]
  misc_feature (127)..(814): NCBI GI: 261352537 Blast Desc: origin recognition complex subunit 4 [Verticillium albo-atrum VaMs.102]
  misc_feature (271)..(814): NCBI GI: 156045475 Blast Desc: SS1G_09927 [Sclerotinia sclerotiorum 1980] gi|154694321|gb|EDN94059.1| SS1G_09927 [Sclerotinia sclerotiorum 1980]
  misc_feature (326)..(814): NCBI GI: 145613604 Blast Desc: MGG_11196 [Magnaporthe grisea 70-15] gi|145020662|gb|EDK04791.1| MGG_11196 [Magnaporthe grisea 70-15]
  misc_feature (365)..(814): NCBI GI: 169620908 Blast Desc: SNOG_13659 [Phaeosphaeria nodorum SN15] gi|160704133|gb|EAT79106.2| SNOG_13659 [Phaeosphaeria nodorum SN15]
  misc_feature (345)..(810): NCBI GI: 242787653 Blast Desc: origin recognition complex subunit Orc4, [Talaromyces stipitatus ATCC 10500] gi|218721206|gb|EED20625.1| origin recognition complex subunit Orc4, [Talaromyces stipitatus ATCC
  misc_feature (327)..(810): NCBI GI: 121715598 Blast Desc: origin recognition complex subunit Orc4, [Aspergillus clavatus NRRL 1] gi|119403565|gb|EAW13982.1| origin recognition complex subunit Orc4, [Aspergillus clavatus NRRL 1]
MAPRQTPTSARKRSRADLEASSPKPASPDASEDRATKPKRARTTPSSRAAPSAFSSVTSAIGGVLGRISRLRHPVPEAAHASEDTLAQPGSPSPDNANVYEVPDSGDEIATPSRKRPAKNDIPGSTTAAMQDANTDTSTPRRRGRPPKIKGPLESPAVKSRVYGSVARATAHESPKLKGILTPQKRKLNTPRKTVLFEDTDRDDTEDDWGRAMPKLVLESAKAKRASNPSEEASLRSANEDGQKRTDTDEGTAVVEDGEEAEGAEEEEDENDEDDDEVCVICSKPESKPESKPPNEIIFCEVCDRGFHQACYNVPVIPEGDWICRGCSQEDVVSRLPETSEALSDPVATVETPEILEVPDIPNFAQHLQSMRHILLERCSSNRRIKLRGQGEAFDKAYQLVEQTVLAGEGNSMMVIGGRGCGKTTMMEEIVSKLRNENPDDFHVIRLNGFIHTDDKLALKEIWRQLGKEMDIEDDLINKTNNYADTMTSLLALLSHPTEITGTEEDGVTSKSVVFVIDEFELFATHGRQTLLYNLFDIAQARKAPIAVIGLTTRIDVVESLEKRVKSRFSHRYVYLALPKSLAAYWDICRHGLIIDEEDLESEGLDINLEGSQEFLDYWNKKIETLRQTQAFEDHLEYYYYTSKSVAAFLSSCILPLSALSISSPDLAIPSPSTTLVFEPPEPKLQLLATLSDLELALLISAARLDIVAHTDTVNFAMAYDEYGAQMGKQRLQSASAGMLALGGGARTWGRSVAVVAWERLVSLGLLIPAGIGGRSNAAHAGLEGKMWKMDVSLEEIPLAVDLPGFLTKWCTQI

SEQ ID NO: 3006 - DNA, 5781 bp, Muscodor strobelii
  misc_feature: SGI EST ID NO. CUFF.7530.0
  misc_feature: Variant of the nucleotide sequence at SEQ ID NO 3004
cgagccggcatatatatggctccttgttaccatttcaccactctcagctgcactccccaactgcgacttagatgatgaggtcttcgaaatgagagggagactaccagattgagcaaccttgattgcccgaccgcgagatggcacctcgccagacgccaacatctgcccgcaagcgatcgcgagccgacctcgaagcctcttcgcccaaacctgcctctcccgacgcctcagaggaccgggccacgaagcctaagcgtgcccgtaccactccctcctctcgagctgcgcctagtgccttttcctccgtcacatccgctattggcggcgtgctcggcaggatcagtcgtctgcgccaccctgtccccgaagcagcgcacgccagtgaagacactctcgcccagcctggctcgcccagtcccgacaatgccaacgtctacgaggtgcccgactccggtgatgagatagcaactccctcgaggaagagaccagcgaagaatgacattcccgggagcactacagcagctatgcaagatgccaacacagacacttccacaccacgcaggaggggtcgccctcccaaaataaagggtccactggaatctcccgccgtcaagtctcgtgtttatggctcggtcgcgagggctactgcccacgagtctcccaagctgaagggcatattgaccccgcagaaacggaagctaaacacgccgcgcaagacggttctgtttgaagacacagatcgagatgataccgaggacgattggggacgcgccatgcccaaactggttctggaatccgccaaggccaaaagagcgtcgaacccatccgaagaagcctcgttgcggtctgcaaacgaggacggccaaaaacgcacagacacagatgaaggaactgctgtagtagaagatggagaagaagccgagggggcagaggaagaggaggatgagaacgacgaggatgatgatgaagtctgcgtgatatgttcaaagcccgaatcaaagcccgaatcaaagcccccaaatgaaatcatattctgcgaggtttgtgaccggggcttccaccaagcctgctataatgtgcctgtcattcccgagggagactggatatgtaggggttgctcccaagaagacgtcgtgtcccgcttgccagaaacgtcggaggcgctgtctgatcctgttgcaaccgtggaaactccggaaatcctagaagtccctgatataccgaattttgcgcagcacctccaatcgatgcggcacattctactagagcgttgttctagtaaccgccgcatcaaactcagaggccagggtgaggcttttgacaaggcctatcagcttgtagaacagaccgtccttgcgggagaaggaaactctatgatggtcattggcggtcgtggatgtggcaagacgacgatgatggaggagattgtcagcaaacttcggaacgagaacccagatgatttccatgtgatacgtctcaacggtttcatccacacggacgacaagcttgcgctcaaggaaatatggcgtcaacttggcaaggagatggatattgaggacgacctaatcaataagacaaataactatgcagatacgatgacatctctactggctcttttatcacatccaaccgagatcaccggcactgaggaggacggcgtgacctcgaaatctgtagtattcgtgatcgacgagttcgaactgttcgcaacacacggccgacagacactactttacaatctgtttgatattgcccaggccaggaaggcacctatcgctgtcatcggtcttaccaccaggatcgatgtagtggagagcctcgagaagcgagtgaagagtcgcttcagccatcgctacgtctacttggctcttcccaagtcattggcagcatattgggatatctgcagacatgggttgattatagatgaagaagatctagagtcggaaggcctcgatatcaatctcgaaggatctcaagagtttcttgattattggaacaagaaaatcgagacccttcggcagacacaagcctttgaggatcacttggaatattactattatacctctaaatcggtagcggcgtttctctcatcatgcatcttaccactctcagcattgtcgatctcatcccctgacctagcgattccatctccttcgacgacacttgtcttcgagccacctgagccgaaactgcaacttctcgcaaccttatcagatctcgaattggcgctactcatctcagcagcgcggcttgacattgtggcgcacacagacacggtcaactttgcaatggcgtatgatgagtacggtgctcagatggggaagcaacggctgcaaagcgccagcgcgggtatgctggctctaggcggcggtgcgagaacctggggccgaagtgttgcggttgtagcatgggaacgattagtctcactgggcctgctcatccctgcgggcatcggcggacgatccaacgctgcacatgctggactggagggaaagatgtggaagatggatgtctcccttgaagagatacctttggctgttgaccttcctggattcctgactaaatggtgtactcagatttagtcctcaagggctatcagaaaacatcattggccatgacacgagtagttgagagcaggccaaactttgcctggcacaagcccttccgccgcacgaggaagtcaagctaggtatattagcatagccctacatgactaggggcggagcagaagctacgccaactaacaccaatattcacgatgagagatcactgctcgccgtacccattacctgccgcataggccaagagaaatggaaagcatgagctcatacagaatggaatagtctgatatgtcagatgactaatgcaacagctttggataaggggagaccgagagcggttcctatgggcaacaagaatgtctatttgatgattgatctatatggctagggagatggcgggagtgtaagtgccaagtgatgtcatcattggttctcaaggctatgtgcatgtaacgctgtccgcaaatcatgattggggaaaacccggcatctgcggctagctgccaaacctaaaatctataaatatctagggtggtattgatacctcggcgtagagcctcggccgagaggcgcggtctgcaaaaagtagcaacgatgtcaagttgatgcaacatagaatgagcaaacaaatagggtcatgatgtctgtgggtatgtatgatgttattcatagacgggcggcaaggtgctttatatgcagaaagggcttgttgtacaggcacggagttcacatgcgcttgctgctcggctgatgtcggcgatggttggtgccagccgaagctcgctgctgacgcgcgcggatgctggagatgccgtgcgacttgcgacacggtcattccatcccatggcattttgcattctgcattctgcattttacacacttgttgccccatcgttgtcgtccatgttgtcgtcaaccacatccacgtttcatgcttctctacccgccctgcgcgctctagagacgaggggctgctgacgaccgctacgccgccagcgctgtccccctcggataggttaacccacgtctgatcgtctcgcgttctggcgcccgccacacgctctgccacacgctccaaacccctcgactgccgaaccggaggaccgaccgctttcctgccagccgcccgcccgcaccatgtcgaagcgcacgacgttcaggaccatctcgccgctgcccgcgggcatcccgcgtgcggtggtcatcgacttcctgcacaaccaccaagagatgatcgatctgaacccgctgatcatcgagcgccaccccataacaccacccgaacacgcccgagacgaggagatgggctgcatgtggtggagcatgacggacaagatctcgtacctcccgggcggcctcatcaccggcgaggtcgtctacacggccgccttcaacgacctgcccaacggcgtccagacacactgctacgctcctgccggcaccgacatccgcgagcgctggacgctgggcggttcgctgcccggcgagccactggaacctatcgagctcggcctgaacgtcccgaggcaggggctctatcttcgcgaggtttgtgcgccgtcgtctcgttgctctggcttataaacaacagctaaccagtcatctgtcggaaccaggatgtcgagcttcgctgtaattttatgatgagttccttcgtcaagaagacgctcaagaaggcccacggcgctcttgttgagcgactgtgcgagaaggcggccgtcgcatgctcgcggaatcccagccccaacaccagcatcctcgttccgtcctcgaatgcctcctctacctcgttgcagaacgggcctgcgaatggacagcaggtccagcaggcccagcaggcgcacagccgttcctattctcccaaccgtcagcctcattcgtatccgaaccgtcttgaaccgccatatgcacattcaaatttaggccccgggcatgcctggcccaacgcagctgttaacgcacagggatatgctcattatcctccagctgaactgcagtaacggactttgcatggactttaaatggacgaatggtggtctgaggtcacagtgtgacaatcatcgggatggtgttatttggggaaacagatatccaatgcttttttctgcatgctattatctctagcttcggtgttggtttgctttttttcatggcatatgcattgtacgcaaaggaggttccacatattcgtgccctcggtcgaagtaaagggagacgaggactttgaatgatattcccaaccgatgagcttactactactggtagatcggtgtattgcagtctacaaaaaatcgatatgcaatttattcaactcgaacttgaaaggttttttttttcaaaaatcttaatggatgtcatccaagaggttttctctctcgttttctttttttaaaaaaagaaaaagagaggacatgggtaggagacctacccactgtctcgcatgcagcggcatcagacttcagagccagacaattcttgaacagaaacatggtagtaacaaagattatatttaaacatagcccagtactaaatcgcttccctcaaggatcagcctcagccatatcatgcttatatcgctgcaagcatctctccttgctttccttccagtccacatgcggctcgggataccctagcttatcaaactcactcctgctcagccggttgaacgggtcgaacactgccttccccttcacgtccttgagctccggaatatatttccgtatgtagttgccctctggatcgttcttctccgcttgtgacacagggttaaaaacagtatagcttggctcccagccttgcgtattattgcacaagtcccagtccacaaggttctcggcaaaccatctctctccgcgtcggtagtctatgaggagatttgtgtagagatacgaactgacgttcatgcgcagtcgattgtgcatccacgcctcttgcttcagctgccgcattcctgcgtcgacaaacggcattcctgtcttcccgtcgcaccatttctcccagccttcctcgtcatcctcccagtccacgaagtcgaacttgagattctgggggagattcatgctgttgtggggtatgatcacctgttggggttcaaaatgttagcttagacatcatatgttttctgagagagactctgccacgtttccagactcggacaacattgacttctacgtactacaacgacaaacgttagcttgagatcgcaatagaccgctccacg

SEQ ID NO: 3007 - DNA, 795 bp, Muscodor strobelii
  misc_feature: SGI cDNA ID NO. 560649
  misc_feature: Reduced expression when VOC is produced
  misc_feature: Encodes the peptide sequence at SEQ ID NO 3008
atgtcgaagcgcacgacgttcaggaccatctcgccgctgcccgcgggcatcccgcgtgcggtggtcatcgacttcctgcacaaccaccaagagatgatcgatctgaacccgctgatcatcgagcgccaccccataacaccacccgaacacgcccgagacgaggagatgggctgcatgtggtggagcatgacggacaagatctcgtacctcccgggcggcctcatcaccggcgaggtcgtctacacggccgccttcaacgacctgcccaacggcgtccagacacactgctacgctcctgccggcaccgacatccgcgagcgctggacgctgggcggttcgctgcccggcgagccactggaacctatcgagctcggcctgaacgtcccgaggcaggggctctatcttcgcgaggatgtcgagcttcgctgtaattttatgatgagttccttcgtcaagaagacgctcaagaaggcccacggcgctcttgttgagcgactgtgcgagaaggcggccgtcgcatgctcgcggaatcccagccccaacaccagcatcctcgttccgtcctcgaatgcctcctctacctcgttgcagaacgggcctgcgaatggacagcaggtccagcaggcccagcaggcgcacagccgttcctattctcccaaccgtcagcctcattcgtatccgaaccgtcttgaaccgccatatgcacattcaaatttaggccccgggcatgcctggcccaacgcagctgttaacgcacagggatatgctcattatcctccagctgaactgcagtaa

SEQ ID NO: 3008 - protein, 264 aa, Muscodor strobelii
  misc_feature: SGI Peptide ID NO. 560649
  misc_feature (4)..(252): NCBI GI: 256726853 Blast Desc: NECHADRAFT_33114 [Nectria haematococca mpVI 77-13-4]
  misc_feature (1)..(177): NCBI GI: 116196148 Blast Desc: CHGG_04672 [Chaetomium globosum CBS 148.51] gi|88180585|gb|EAQ88053.1| CHGG_04672 [Chaetomium globosum CBS 148.51]
  misc_feature (1)..(198): NCBI GI: 171690470 Blast Desc: protein product [Podospora anserina] gi|170945183|emb|CAP71294.1| protein product [Podospora anserina]
  misc_feature (1)..(172): NCBI GI: 154289896 Blast Desc: BC1G_15902 [Botryotinia fuckeliana B05.10] gi|150848561|gb|EDN23754.1| BC1G_15902 [Botryotinia fuckeliana B05.10]
  misc_feature (1)..(172): NCBI GI: 156050275 Blast Desc: SS1G_07724 [Sclerotinia sclerotiorum 1980] gi|154692125|gb|EDN91863.1| SS1G_07724 [Sclerotinia sclerotiorum 1980]
  misc_feature (1)..(174): NCBI GI: 261352536 Blast Desc: conserved [Verticillium albo-atrum VaMs.102]
  misc_feature (4)..(177): NCBI GI: 46123705 Blast Desc: FG06230.1 [Gibberella zeae PH-1]
  misc_feature (1)..(170): NCBI GI: 39951703 Blast Desc: MGG_01494 [Magnaporthe grisea 70-15] gi|145020661|gb|EDK04790.1| MGG_01494 [Magnaporthe grisea 70-15]
  misc_feature (1)..(211): NCBI GI: 240106988 Blast Desc: CPC735_017780 [Coccidioides posadasii C735 delta SOWgp]
  misc_feature (1)..(211): NCBI GI: 119174925 Blast Desc: CIMG_09404 [Coccidioides immitis RS]
  misc_feature: Useful for introducing or modulating the production of volatile compounds
MSKRTTFRTISPLPAGIPRAVVIDFLHNHQEMIDLNPLIIERHPITPPEHARDEEMGCMWWSMTDKISYLPGGLITGEVVYTAAFNDLPNGVQTHCYAPAGTDIRERWTLGGSLPGEPLEPIELGLNVPRQGLYLREDVELRCNFMMSSFVKKTLKKAHGALVERLCEKAAVACSRNPSPNTSILVPSSNASSTSLQNGPANGQQVQQAQQAHSRSYSPNRQPHSYPNRLEPPYAHSNLGPGHAWPNAAVNAQGYAHYPPAELQ

SEQ ID NO: 3009 - DNA, 5713 bp, Muscodor strobelii
  misc_feature: SGI EST ID NO. CUFF.7530.1
  misc_feature: Variant of the nucleotide sequence at SEQ ID NO 3007
cgagccggcatatatatggctccttgttaccatttcaccactctcagctgcactccccaactgcgacttagatgatgaggtcttcgaaatgagagggagactaccagattgagcaaccttgattgcccgaccgcgagatggcacctcgccagacgccaacatctgcccgcaagcgatcgcgagccgacctcgaagcctcttcgcccaaacctgcctctcccgacgcctcagaggaccgggccacgaagcctaagcgtgcccgtaccactccctcctctcgagctgcgcctagtgccttttcctccgtcacatccgctattggcggcgtgctcggcaggatcagtcgtctgcgccaccctgtccccgaagcagcgcacgccagtgaagacactctcgcccagcctggctcgcccagtcccgacaatgccaacgtctacgaggtgcccgactccggtgatgagatagcaactccctcgaggaagagaccagcgaagaatgacattcccgggagcactacagcagctatgcaagatgccaacacagacacttccacaccacgcaggaggggtcgccctcccaaaataaagggtccactggaatctcccgccgtcaagtctcgtgtttatggctcggtcgcgagggctactgcccacgagtctcccaagctgaagggcatattgaccccgcagaaacggaagctaaacacgccgcgcaagacggttctgtttgaagacacagatcgagatgataccgaggacgattggggacgcgccatgcccaaactggttctggaatccgccaaggccaaaagagcgtcgaacccatccgaagaagcctcgttgcggtctgcaaacgaggacggccaaaaacgcacagacacagatgaaggaactgctgtagtagaagatggagaagaagccgagggggcagaggaagaggaggatgagaacgacgaggatgatgatgaagtctgcgtgatatgttcaaagcccgaatcaaagcccgaatcaaagcccccaaatgaaatcatattctgcgaggtttgtgaccggggcttccaccaagcctgctataatgtgcctgtcattcccgagggagactggatatgtaggggttgctcccaagaagacgtcgtgtcccgcttgccagaaacgtcggaggcgctgtctgatcctgttgcaaccgtggaaactccggaaatcctagaagtccctgatataccgaattttgcgcagcacctccaatcgatgcggcacattctactagagcgttgttctagtaaccgccgcatcaaactcagaggccagggtgaggcttttgacaaggcctatcagcttgtagaacagaccgtccttgcgggagaaggaaactctatgatggtcattggcggtcgtggatgtggcaagacgacgatgatggaggagattgtcagcaaacttcggaacgagaacccagatgatttccatgtgatacgtctcaacggtttcatccacacggacgacaagcttgcgctcaaggaaatatggcgtcaacttggcaaggagatggatattgaggacgacctaatcaataagacaaataactatgcagatacgatgacatctctactggctcttttatcacatccaaccgagatcaccggcactgaggaggacggcgtgacctcgaaatctgtagtattcgtgatcgacgagttcgaactgttcgcaacacacggccgacagacactactttacaatctgtttgatattgcccaggccaggaaggcacctatcgctgtcatcggtcttaccaccaggatcgatgtagtggagagcctcgagaagcgagtgaagagtcgcttcagccatcgctacgtctacttggctcttcccaagtcattggcagcatattgggatatctgcagacatgggttgattatagatgaagaagatctagagtcggaaggcctcgatatcaatctcgaaggatctcaagagtttcttgattattggaacaagaaaatcgagacccttcggcagacacaagcctttgaggatcacttggaatattactattatacctctaaatcggtagcggcgtttctctcatcatgcatcttaccactctcagcattgtcgatctcatcccctgacctagcgattccatctccttcgacgacacttgtcttcgagccacctgagccgaaactgcaacttctcgcaaccttatcagatctcgaattggcgctactcatctcagcagcgcggcttgacattgtggcgcacacagacacggtcaactttgcaatggcgtatgatgagtacggtgctcagatggggaagcaacggctgcaaagcgccagcgcgggtatgctggctctaggcggcggtgcgagaacctggggccgaagtgttgcggttgtagcatgggaacgattagtctcactgggcctgctcatccctgcgggcatcggcggacgatccaacgctgcacatgctggactggagggaaagatgtggaagatggatgtctcccttgaagagatacctttggctgttgaccttcctggattcctgactaaatggtgtactcagatttagtcctcaagggctatcagaaaacatcattggccatgacacgagtagttgagagcaggccaaactttgcctggcacaagcccttccgccgcacgaggaagtcaagctaggtatattagcatagccctacatgactaggggcggagcagaagctacgccaactaacaccaatattcacgatgagagatcactgctcgccgtacccattacctgccgcataggccaagagaaatggaaagcatgagctcatacagaatggaatagtctgatatgtcagatgactaatgcaacagctttggataaggggagaccgagagcggttcctatgggcaacaagaatgtctatttgatgattgatctatatggctagggagatggcgggagtgtaagtgccaagtgatgtcatcattggttctcaaggctatgtgcatgtaacgctgtccgcaaatcatgattggggaaaacccggcatctgcggctagctgccaaacctaaaatctataaatatctagggtggtattgatacctcggcgtagagcctcggccgagaggcgcggtctgcaaaaagtagcaacgatgtcaagttgatgcaacatagaatgagcaaacaaatagggtcatgatgtctgtgggtatgtatgatgttattcatagacgggcggcaaggtgctttatatgcagaaagggcttgttgtacaggcacggagttcacatgcgcttgctgctcggctgatgtcggcgatggttggtgccagccgaagctcgctgctgacgcgcgcggatgctggagatgccgtgcgacttgcgacacggtcattccatcccatggcattttgcattctgcattctgcattttacacacttgttgccccatcgttgtcgtccatgttgtcgtcaaccacatccacgtttcatgcttctctacccgccctgcgcgctctagagacgaggggctgctgacgaccgctacgccgccagcgctgtccccctcggataggttaacccacgtctgatcgtctcgcgttctggcgcccgccacacgctctgccacacgctccaaacccctcgactgccgaaccggaggaccgaccgctttcctgccagccgcccgcccgcaccatgtcgaagcgcacgacgttcaggaccatctcgccgctgcccgcgggcatcccgcgtgcggtggtcatcgacttcctgcacaaccaccaagagatgatcgatctgaacccgctgatcatcgagcgccaccccataacaccacccgaacacgcccgagacgaggagatgggctgcatgtggtggagcatgacggacaagatctcgtacctcccgggcggcctcatcaccggcgaggtcgtctacacggccgccttcaacgacctgcccaacggcgtccagacacactgctacgctcctgccggcaccgacatccgcgagcgctggacgctgggcggttcgctgcccggcgagccactggaacctatcgagctcggcctgaacgtcccgaggcaggggctctatcttcgcgaggatgtcgagcttcgctgtaattttatgatgagttccttcgtcaagaagacgctcaagaaggcccacggcgctcttgttgagcgactgtgcgagaaggcggccgtcgcatgctcgcggaatcccagccccaacaccagcatcctcgttccgtcctcgaatgcctcctctacctcgttgcagaacgggcctgcgaatggacagcaggtccagcaggcccagcaggcgcacagccgttcctattctcccaaccgtcagcctcattcgtatccgaaccgtcttgaaccgccatatgcacattcaaatttaggccccgggcatgcctggcccaacgcagctgttaacgcacagggatatgctcattatcctccagctgaactgcagtaacggactttgcatggactttaaatggacgaatggtggtctgaggtcacagtgtgacaatcatcgggatggtgttatttggggaaacagatatccaatgcttttttctgcatgctattatctctagcttcggtgttggtttgctttttttcatggcatatgcattgtacgcaaaggaggttccacatattcgtgccctcggtcgaagtaaagggagacgaggactttgaatgatattcccaaccgatgagcttactactactggtagatcggtgtattgcagtctacaaaaaatcgatatgcaatttattcaactcgaacttgaaaggttttttttttcaaaaatcttaatggatgtcatccaagaggttttctctctcgttttctttttttaaaaaaagaaaaagagaggacatgggtaggagacctacccactgtctcgcatgcagcggcatcagacttcagagccagacaattcttgaacagaaacatggtagtaacaaagattatatttaaacatagcccagtactaaatcgcttccctcaaggatcagcctcagccatatcatgcttatatcgctgcaagcatctctccttgctttccttccagtccacatgcggctcgggataccctagcttatcaaactcactcctgctcagccggttgaacgggtcgaacactgccttccccttcacgtccttgagctccggaatatatttccgtatgtagttgccctctggatcgttcttctccgcttgtgacacagggttaaaaacagtatagcttggctcccagccttgcgtattattgcacaagtcccagtccacaaggttctcggcaaaccatctctctccgcgtcggtagtctatgaggagatttgtgtagagatacgaactgacgttcatgcgcagtcgattgtgcatccacgcctcttgcttcagctgccgcattcctgcgtcgacaaacggcattcctgtcttcccgtcgcaccatttctcccagccttcctcgtcatcctcccagtccacgaagtcgaacttgagattctgggggagattcatgctgttgtggggtatgatcacctgttggggttcaaaatgttagcttagacatcatatgttttctgagagagactctgccacgtttccagactcggacaacattgacttctacgtactacaacgacaaacgttagcttgagatcgcaatagaccgctccacg

SEQ ID NO: 3010 - DNA, 1725 bp, Muscodor strobelii
  misc_feature: SGI cDNA ID NO. 560650
  misc_feature: Encodes the peptide sequence at SEQ ID NO 3011
atgggcgagagcaagaaacacgagcgcagcgagtctacggataacgtcctcaagcatccgtccacgaagcgcgcgaaggagatcgataggtcggataatccgtacaacgagcttatcgaacgcctggataaagcaaaggaaggggaagacgtgaagacgaggaatgtcctgcattggtttcggtcgaaggatctgcgcgccgaagataataaggcgctgagagcggctagcgagaaagctaaggagggaggaggagtgctgattgggtgcttcttgtactcacccaaagacttgcagtggcatggcacgtcgcctgcgaggtcggacttcatgtttgagagtctgaggttgcttggggagaggctggaggagttggatatcccgcttgtgatcctgacggcggaggagagggaggcgaaaggggagaggatcgcggagtttgtgagggagcatgatgttagtcatgtttttgcgaacctcgagtacgaggttgatgagctgagaagggatctggacatgcttgatcgtttggagaaggatgatgttagggttgagctacatcacgatcagacggttgttattcctggaacgctgacgacgggagcgggtgggccgatgaaggtattcacgccgtatcataaggcgtggctggccgaggtttcggatgacccgagtctcatcgacactgtcccgctaccggataaaaacgacaaggctgtacgacagaagatgaaagatctgtttggtgggaaaatgccagcgttgccgaaggataagaagtttgagtccgagaaagaccgcgaccgcattcgtggattatggcctgctggtcacgaagccgggatgaagcgactaaacgactttctcgataataaagtcgcctcttacgcagcaaataggtctaacccggcagaagataactcctctcggctgtcgccatatctggcatcgggcgtcatatcgattcgagaaatactatcgacggttcggaagcgaaataacgacgatagcgcagatttctcttcttcgggatcagacgctgggatcgcgtcgtgggtccgtgaacttgttttccgcgagttctatcgtcatatgatgggtatgaagtccagctttttctacattattctaaacatagcgcgtggagcggtctattgcgatctcaagctaacgtttgtcgttgtagtgatcataccccacaacagcatgaatctcccccagaatctcaagttcgacttcgtggactgggaggatgacgaggaaggctgggagaaatggtgcgacgggaagacaggaatgccgtttgtcgacgcaggaatgcggcagctgaagcaagaggcgtggatgcacaatcgactgcgcatgaacgtcagttcgtatctctacacaaatctcctcatagactaccgacgcggagagagatggtttgccgagaaccttgtggactgggacttgtgcaataatacgcaaggctgggagccaagctatactgtttttaaccctgtgtcacaagcggagaagaacgatccagagggcaactacatacggaaatatattccggagctcaaggacgtgaaggggaaggcagtgttcgacccgttcaaccggctgagcaggagtgagtttgataagctagggtatcccgagccgcatgtggactggaaggaaagcaaggagagatgcttgcagcgatataagcatgatatggctgaggctgatccttga

SEQ ID NO: 3011 - protein, 574 aa, Muscodor strobelii
  misc_feature: SGI Peptide ID NO. 560650
  misc_feature (54)..(237): Pfam Id: PF00875 Pfam Desc: DNA photolyase
  misc_feature (275)..(569): Pfam Id: PF03441 Pfam Desc: FAD binding domain of DNA photolyase
  misc_feature (399)..(569): Pfam Id: PF03441 Pfam Desc: FAD binding domain of DNA photolyase
  misc_feature (275)..(366): Pfam Id: PF03441 Pfam Desc: FAD binding domain of DNA photolyase
  misc_feature (1)..(574): NCBI GI: 169595114 Blast Desc: SNOG_00291 [Phaeosphaeria nodorum SN15] gi|160701021|gb|EAT91786.2| SNOG_00291 [Phaeosphaeria nodorum SN15]
  misc_feature (1)..(573): NCBI GI: 189202516 Blast Desc: deoxyribodipyrimidine photo-lyase [Pyrenophora tritici-repentis Pt-1C-BFP] gi|187984693|gb|EDU50181.1| deoxyribodipyrimidine photo-lyase [Pyrenophora tritici-repentis
  misc_feature (24)..(571): NCBI GI: 145605824 Blast Desc: MGG_06836 [Magnaporthe grisea 70-15] gi|145013607|gb|EDJ98248.1| MGG_06836 [Magnaporthe grisea 70-15]
  misc_feature (21)..(566): NCBI GI: 171694686 Blast Desc: protein product [Podospora anserina] gi|170947585|emb|CAP59746.1| protein product [Podospora anserina]
  misc_feature (21)..(570): NCBI GI: 46107828 Blast Desc: FG00797.1 [Gibberella zeae PH-1]
  misc_feature (21)..(573): NCBI GI: 256734800 Blast Desc: [Nectria haematococca mpVI 77-13-4]
  misc_feature (39)..(573): NCBI GI: 30315019 Blast Desc: AF500083_1 photolyase [Fusarium oxysporum]
  misc_feature (34)..(573): NCBI GI: 261361435 Blast Desc: deoxyribodipyrimidine photo-lyase [Verticillium albo-atrum VaMs.102]
  misc_feature (21)..(566): NCBI GI: 3947746 Blast Desc: DNA photolyase [Hypocrea lixii]
  misc_feature (56)..(566): NCBI GI: 119497467 Blast Desc: deoxyribodipyrimidine photo-lyase Phr1, [Neosartorya fischeri NRRL 181] gi|119413654|gb|EAW23595.1| deoxyribodipyrimidine photo-lyase Phr1, [Neosartorya fischeri
  misc_feature (56)..(570): SWISSPROT Homolog: EC 4.1.99.3 Deoxyribodipyrimidine photo-lyase
MGESKKHERSESTDNVLKHPSTKRAKEIDRSDNPYNELIERLDKAKEGEDVKTRNVLHWFRSKDLRAEDNKALRAASEKAKEGGGVLIGCFLYSPKDLQWHGTSPARSDFMFESLRLLGERLEELDIPLVILTAEEREAKGERIAEFVREHDVSHVFANLEYEVDELRRDLDMLDRLEKDDVRVELHHDQTVVIPGTLTTGAGGPMKVFTPYHKAWLAEVSDDPSLIDTVPLPDKNDKAVRQKMKDLFGGKMPALPKDKKFESEKDRDRIRGLWPAGHEAGMKRLNDFLDNKVASYAANRSNPAEDNSSRLSPYLASGVISIREILSTVRKRNNDDSADFSSSGSDAGIASWVRELVFREFYRHMMGMKSSFFYIILNIARGAVYCDLKLTFVVVVIIPHNSMNLPQNLKFDFVDWEDDEEGWEKWCDGKTGMPFVDAGMRQLKQEAWMHNRLRMNVSSYLYTNLLIDYRRGERWFAENLVDWDLCNNTQGWEPSYTVFNPVSQAEKNDPEGNYIRKYIPELKDVKGKAVFDPFNRLSRSEFDKLGYPEPHVDWKESKERCLQRYKHDMAEADP

SEQ ID NO: 3012 - DNA, 2778 bp, Muscodor strobelii
  misc_feature: SGI cDNA ID NO. 560651
  misc_feature: Reduced expression when VOC is produced
  misc_feature: Encodes the peptide sequence at SEQ ID NO 3013
atgacttcccgcatggagttcacggaacgtggcaagagggccctcgaggatgccatggccctcgccgagcagtatgcgcactcacaactcctgccagtccatctggccgtctcgctgctcgacccgcccccggaccagtccaaggaccagcaaaataatccaccaccaaactcgagtctcttccgtcaagttgttgagcgagcccacggcgaccctcaactcttcgaccgcgctctcaaaaagactttggtccgtctgccgtcccaagacccgccgcctgagaccgtctccatggcgcactctttcaataccgtcttgaagaaggccaatgatctgcagaaaacacaaaaggacacttacattgctgtcgaccatctcattaccgctctctctgaggatgcatcgatcgccgctgctctcaaggaggcaaacattcccaagagcaagcttatccaagatgctgtgcaggccatccgtggaaccaaacgagtcgactccaaaacggctgacaccgaggaggaaaacgagaatctagctaaatttactatcgacatgactgccatggcacgagagggcaaaatcgacccagtcattggtcgagaagaggagattcgtcgcgtcatccgcattttatcccgacgcaccaaaaacaatccggtactgatcggtgagccgggcgtcggaaaaacgactgttgtcgaaggattggcgcagcggattgtcaacgctgatgttcccgaccaccttgctgcttgcaaactcatgtctttggacgtgggtgcccttgtagccggcagcaagtatcgcggcgagtttgaggagcgcatgaagggtgtccttaaggagatctccgagtccaaagagatgattgtcttatttgttgacgaaatccatcttttgatgggcgctggatcgtccggcgagggtggcatggatgcggccaacctactcaagcccatgcttgcccgtggtcagttacactgtattggcgccaccacacttgcggaatttcgaaagtacatcgagaaagatgccgcgttcgagcgccgattccagcaggttattgtcaaggagccttcaatccctgagactatttccattctgcgtggtctaaaagagaaatacgaagtccatcacggtgtaagtattgccgatagcgccattgtctccgctgcaactcttgctggacgatatcttacggctcggcgtctccccgactcggcggtcgatttgattgatgaagctgccgccgctgtgcgtgttgccagagagtctcagccagaaattattgattcgctggagagacggcttcgacaactacgcatcgagattcatgccttgtctcgggagaaggacgatgcttcgaaggcacggctcgccatcgcgaagcaggacgcagagaatgtcgaagaagagctgcggcccttgcgcgaaaaatacgaaagcgaaagaaagcgaggcaaggacatccaggaggccaaagttaaactcgacggtctcaaggtcaagatggaggatgccgctcgagtgggagaccatgcccgagctgctgatctccaatactatgctattcccgagcaagaaaaattcattaaggagctcgagaaagagaaagctgcagcggacgctgctctgaaccagaaccctgacatgatcggcaacgctatgatcaccgatgttgtcggacccgatcaaatcaacgagattgtctctcgatggacgggtattcctgtcactcgcctcaagacatctgagaaagagaagttgatttatatggaacgggcgcttggcaagactgttgtgggacagaaagaagctgtccaagccgtgtccaatgccatccgtctacaacgctcaggattgagcaacccgaaccaacctcccagcttcctattctgtggtccgtctggcacaggaaagactcttctcacgaaggctttagccgaattcctattcgatgacccgaaggcaatgatccgattcgacatgtccgagtatcaggagcgccatgctctcagccgaatgattggtgctccacccggctacgtaggacatgatgctggtggtcagttgacagaggcattgcgccgaaagccattttctattcttctttttgacgaggtagaaaaggcagcaaaggaggttttgacggttctacttcagctcatggatgacggccgcatcaccgatggccaaggacgtatcgtcgatgcaaagaattgcatcgtcgtcatgacctccaatctgggcgcggaatacctgtctcgacctgccggccgagatggcaagattgatgccacgactcgcgatcttgtcatgaactcgttgcgcaactatttcttaccagaattcttgaaccgtatcagctcaacggtcatcttcaaccggctcaccagacgtgagattcgcaagatcgttgatctccggctcagcgagattcaaaagcgtctttcagacaatgatcgaacagtcatcattgatgtgtcagacgaagccaaggactatctgggcaatgctggctactccccagcatacggcgctcgtcctcttcagcgactcattgagaaggaagtcttgaatcgcatggccgtcttgattctccgtggcgcaatcaaagacggagagacagcaagagttgttctggctggtaacaagatccaggttctctccaaccaccctgagagtgacatgggagatgacgatgactatccaatggacgaagaagatgcggtagaagatattgctcctgaggacatggatgaggatatttacgattaa

SEQ ID NO: 3013 - protein, 925 aa, Muscodor strobelii
  misc_feature: SGI Peptide ID NO. 560651
  misc_feature (109)..(159): Pfam Id: PF02861 Pfam Desc: Clp amino terminal domain
  misc_feature (218)..(413): Pfam Id: PF00004 Pfam Desc: ATPase family associated with various cellular activities (AAA)
  misc_feature (625)..(791): Pfam Id: PF07724 Pfam Desc: ATPase family associated with various cellular activities (AAA)
  misc_feature (629)..(796): Pfam Id: PF07728 Pfam Desc: ATPase family associated with various cellular activities (AAA)
  misc_feature (1)..(925): NCBI GI: 116208096 Blast Desc: heat shock protein HSP98 [Chaetomium globosum CBS 148.51] gi|88183938|gb|EAQ91406.1| heat shock protein HSP98 [Chaetomium globosum CBS 148.51]
  misc_feature (1)..(925): NCBI GI: 171686610 Blast Desc: protein product [Podospora anserina] gi|157779613|gb|ABV71346.1| heat shock protein HSP104 [Podospora anserina] gi|170943266|emb|CAP68919.1| protein product [Podospora
  misc_feature (1)..(925): NCBI GI: 39977113 Blast Desc: MGG_06459 [Magnaporthe grisea 70-15] gi|145016123|gb|EDK00613.1| MGG_06459 [Magnaporthe grisea 70-15]
  misc_feature (1)..(925): NCBI GI: 85083984 Blast Desc: heat shock protein 101 [Neurospora crassa OR74A] gi|44889002|sp|P31540.2|HSP98_NEUCR RecName: Full=Heat shock protein hsp98; AltName: Full=Protein aggregation-remodeling hsp98
  misc_feature (1)..(897): NCBI GI: 261358224 Blast Desc: heat shock protein HSP98 [Verticillium albo-atrum VaMs.102]
  misc_feature (1)..(925): NCBI GI: 256729717 Blast Desc: [Nectria haematococca mpVI 77-13-4]
  misc_feature (6)..(925): NCBI GI: 29570852 Blast Desc: heat shock protein CLPA [Paracoccidioides brasiliensis] gi|226284375|gb|EEH39941.1| heat shock protein HSP98 [Paracoccidioides brasiliensis Pb01]
  misc_feature (6)..(925): NCBI GI: 225681830 Blast Desc: heat shock protein [Paracoccidioides brasiliensis Pb03]
  misc_feature (6)..(925): NCBI GI: 145230944 Blast Desc: An01g13350 [Aspergillus niger] gi|134055860|emb|CAK96205.1| protein product [Aspergillus niger]
  misc_feature (3)..(925): NCBI GI: 261201039 Blast Desc: heat shock protein CLPA [Ajellomyces dermatitidis SLH14081] gi|239593992|gb|EEQ76573.1| heat shock protein CLPA [Ajellomyces dermatitidis SLH14081]
  misc_feature: Useful for introducing or modulating the production of volatile compounds
MTSRMEFTERGKRALEDAMALAEQYAHSQLLPVHLAVSLLDPPPDQSKDQQNNPPPNSSLFRQVVERAHGDPQLFDRALKKTLVRLPSQDPPPETVSMAHSFNTVLKKANDLQKTQKDTYIAVDHLITALSEDASIAAALKEANIPKSKLIQDAVQAIRGTKRVDSKTADTEEENENLAKFTIDMTAMAREGKIDPVIGREEEIRRVIRILSRRTKNNPVLIGEPGVGKTTVVEGLAQRIVNADVPDHLAACKLMSLDVGALVAGSKYRGEFEERMKGVLKEISESKEMIVLFVDEIHLLMGAGSSGEGGMDAANLLKPMLARGQLHCIGATTLAEFRKYIEKDAAFERRFQQVIVKEPSIPETISILRGLKEKYEVHHGVSIADSAIVSAATLAGRYLTARRLPDSAVDLIDEAAAAVRVARESQPEIIDSLERRLRQLRIEIHALSREKDDASKARLAIAKQDAENVEEELRPLREKYESERKRGKDIQEAKVKLDGLKVKMEDAARVGDHARAADLQYYAIPEQEKFIKELEKEKAAADAALNQNPDMIGNAMITDVVGPDQINEIVSRWTGIPVTRLKTSEKEKLIYMERALGKTVVGQKEAVQAVSNAIRLQRSGLSNPNQPPSFLFCGPSGTGKTLLTKALAEFLFDDPKAMIRFDMSEYQERHALSRMIGAPPGYVGHDAGGQLTEALRRKPFSILLFDEVEKAAKEVLTVLLQLMDDGRITDGQGRIVDAKNCIVVMTSNLGAEYLSRPAGRDGKIDATTRDLVMNSLRNYFLPEFLNRISSTVIFNRLTRREIRKIVDLRLSEIQKRLSDNDRTVIIDVSDEAKDYLGNAGYSPAYGARPLQRLIEKEVLNRMAVLILRGAIKDGETARVVLAGNKIQVLSNHPESDMGDDDDYPMDEEDAVEDIAPEDMDEDIYD

SEQ ID NO: 3014 - DNA, 3301 bp, Muscodor strobelii
  misc_feature: SGI EST ID NO. CUFF.7971.0
  misc_feature: Variant of the nucleotide sequence at SEQ ID NO 3012
cctcgcgccagcagcatatcgtacatgtatgttctgacctctctcgacacaaagataaattcacaacttgaatctcaaagatctgaaaacttgctgctttgtcttcacttgaacctcacaacaacataccttcaacttgcattgagccaacacgcctctccaactctttgcacacactctcttgcacttataagctgatcacaccacacaccccaccttcagctttacaacccacatacatcaccaacactctactttctacctgacatcctacttttcattttcactgctcacacgaagagcacatctcataccgtctaccactcctgttcaccatgacttcccgcatggagttcacggaacgtggcaagagggccctcgaggatgccatggccctcgccgagcagtatgcgcactcacaactcctgccagtccatctggccgtctcgctgctcgacccgcccccggaccagtccaaggaccagcaaaataatccaccaccaaactcgagtctcttccgtcaagttgttgagcgagcccacggcgaccctcaactcttcgaccgcgctctcaaaaagactttggtccgtctgccgtcccaagacccgccgcctgagaccgtctccatggcgcactctttcaataccgtcttgaagaaggccaatgatctgcagaaaacacaaaaggacacttacattgctgtcgaccatctcattaccgctctctctgaggatgcatcgatcgccgctgctctcaaggaggcaaacattcccaagagcaagcttatccaagatgctgtgcaggccatccgtggaaccaaacgagtcgactccaaaacggctgacaccgaggaggaaaacgagaatctagctaaatttactatcgacatgactgccatggcacgagagggcaaaatcgacccagtcattggtcgagaagaggagattcgtcgcgtcatccgcattttatcccgacgcaccaaaaacaatccggtactgatcggtgagccgggcgtcggaaaaacgactgttgtcgaaggattggcgcagcggattgtcaacgctgatgttcccgaccaccttgctgcttgcaaactcatgtctttggacgtgggtgcccttgtagccggcagcaagtatcgcggcgagtttgaggagcgcatgaagggtgtccttaaggagatctccgagtccaaagagatgattgtcttatttgttgacgaaatccatcttttgatgggcgctggatcgtccggcgagggtggcatggatgcggccaacctactcaagcccatgcttgcccgtggtcagttacactgtattggcgccaccacacttgcggaatttcgaaagtacatcgagaaagatgccgcgttcgagcgccgattccagcaggttattgtcaaggagccttcaatccctgagactatttccattctgcgtggtctaaaagagaaatacgaagtccatcacggtgtaagtattgccgatagcgccattgtctccgctgcaactcttgctggacgatatcttacggctcggcgtctccccgactcggcggtcgatttgattgatgaagctgccgccgctgtgcgtgttgccagagagtctcagccagaaattattgattcgctggagagacggcttcgacaactacgcatcgagattcatgccttgtctcgggagaaggacgatgcttcgaaggcacggctcgccatcgcgaagcaggacgcagagaatgtcgaagaagagctgcggcccttgcgcgaaaaatacgaaagcgaaagaaagcgaggcaaggacatccaggaggccaaagttaaactcgacggtctcaaggtcaagatggaggatgccgctcgagtgggagaccatgcccgagctgctgatctccaatactatgctattcccgagcaagaaaaattcattaaggagctcgagaaagagaaagctgcagcggacgctgctctgaaccagaaccctgacatgatcggcaacgctatgatcaccgatgttgtcggacccgatcaaatcaacgagattgtctctcgatggacgggtattcctgtcactcgcctcaagacatctgagaaagagaagttgatttatatggaacgggcgcttggcaagactgttgtgggacagaaagaagctgtccaagccgtgtccaatgccatccgtctacaacgctcaggattgagcaacccgaaccaacctcccagcttcctattctgtggtccgtctggcacaggaaagactcttctcacgaaggctttagccgaattcctattcgatgacccgaaggcaatgatccgattcgacatgtccgagtatcaggagcgccatgctctcagccgaatgattggtgctccacccggctacgtaggacatgatgctggtggtcagttgacagaggcattgcgccgaaagccattttctattcttctttttgacgaggtagaaaaggcagcaaaggaggttttgacggttctacttcagctcatggatgacggccgcatcaccgatggccaaggacgtatcgtcgatgcaaagaattgcatcgtcgtcatgacctccaatctgggcgcggaatacctgtctcgacctgccggccgagatggcaagattgatgccacgactcgcgatcttgtcatgaactcgttgcgcaactatttcttaccagaattcttgaaccgtatcagctcaacggtcatcttcaaccggctcaccagacgtgagattcgcaagatcgttgatctccggctcagcgagattcaaaagcgtctttcagacaatgatcgaacagtcatcattgatgtgtcagacgaagccaaggactatctgggcaatgctggctactccccagcatacggcgctcgtcctcttcagcgactcattgagaaggaagtcttgaatcgcatggccgtcttgattctccgtggcgcaatcaaagacggagagacagcaagagttgttctggctggtaacaagatccaggttctctccaaccaccctgagagtgacatgggagatgacgatgactatccaatggacgaagaagatgcggtagaagatattgctcctgaggacatggatgaggatatttacgattaagcacttttgctaacagcatgatgaacgaagaatgacaaggcgcgcgatgagataattttcaagagcttggcgttggggagcatttgcgcgatgaataaaagcatacaggtgtacaggttgtaagctcactgctgtgtcaaattagctatagcattctaatgaaagaaatgtctaaaaatatctcttgc

SEQ ID NO: 3015 - DNA, 777 bp, Muscodor strobelii
  misc_feature: SGI cDNA ID NO. 560652
  misc_feature: Reduced expression when VOC is produced
  misc_feature: Encodes the peptide sequence at SEQ ID NO 3016
atggccttacggctcaatcccataacagcccagttgggcaggatatccatttccactcccagcacattcagcagtctcaccgttcgatgggcgcacaccaagcggaggaaagatgaatttataccgcccaatttcgagcctggccacggcgagaagatctacgtctttaggcatctccttgacggcatgaccgtctactcccatagccccgtcatcaaggccaaccgcgccctcaagcagatccccttcaatggcaagaaactcaagccctccaagattcgaaaggactactggcgccccttagccatgatccagtttccagaaggccaaggcgaggtcggccgaagtgtcttcctgcgcatgcgagaatgcaagaaactgcatgaatactcgtgggacgacagtctgctttacgacgagctcacgaataagaccttgaacaagcacgaacgcggaaagaagctcaacaaccagctccccaataccatcgccgacatggccgctgtgctgggcggtctcggaaaggggaataaaatcatcatcaaggacgccgcagctgagggggcagattcgacagcgcagagtctggtgccagctagtgtgtattgggctgacgagaacgaccgcggatatgctgagacatggtcccagaatgttgcgcattatcgcctatctgaagcccactgggtgcccactgacaggctgttggaaagagaatccgaggaagcattggtccaagagccagaggcagagcccaaggcacagcctacgatatag

SEQ ID NO: 3016 - protein, 258 aa, Muscodor strobelii
  misc_feature: SGI Peptide ID NO. 560652
  misc_feature (15)..(255): NCBI GI: 256729911 Blast Desc: NECHADRAFT_95574 [Nectria haematococca mpVI 77-13-4]
  misc_feature (8)..(250): NCBI GI: 39977115 Blast Desc: MGG_06460 [Magnaporthe grisea 70-15] gi|145016122|gb|EDK00612.1| MGG_06460 [Magnaporthe grisea 70-15]
  misc_feature (9)..(242): NCBI GI: 46122205 Blast Desc: FG05480.1 [Gibberella zeae PH-1]
  misc_feature (47)..(221): NCBI GI: 116208094 Blast Desc: CHGG_03340 [Chaetomium globosum CBS 148.51] gi|88183937|gb|EAQ91405.1| CHGG_03340 [Chaetomium globosum CBS 148.51]
  misc_feature (48)..(221): NCBI GI: 85083980 Blast Desc: NCU00103 [Neurospora crassa OR74A] gi|28918315|gb|EAA27991.1| [Neurospora crassa OR74A]
  misc_feature (42)..(254): NCBI GI: 156037690 Blast Desc: SS1G_12559 [Sclerotinia sclerotiorum 1980] gi|154697967|gb|EDN97705.1| SS1G_12559 [Sclerotinia sclerotiorum 1980]
  misc_feature (27)..(180): NCBI GI: 261358223 Blast Desc: conserved [Verticillium albo-atrum VaMs.102]
  misc_feature (50)..(179): NCBI GI: 171686566 Blast Desc: protein product [Podospora anserina] gi|170943244|emb|CAP68897.1| protein product [Podospora anserina]
  misc_feature (39)..(170): NCBI GI: 189208163 Blast Desc: conserved [Pyrenophora tritici-repentis Pt-1C-BFP] gi|187976508|gb|EDU43134.1| conserved [Pyrenophora tritici-repentis Pt-1C-BFP]
  misc_feature (39)..(171): NCBI GI: 169614706 Blast Desc: SNOG_10500 [Phaeosphaeria nodorum SN15] gi|111060774|gb|EAT81894.1| SNOG_10500 [Phaeosphaeria nodorum SN15]
  misc_feature: Useful for introducing or modulating the production of volatile compounds
MALRLNPITAQLGRISISTPSTFSSLTVRWAHTKRRKDEFIPPNFEPGHGEKIYVFRHLLDGMTVYSHSPVIKANRALKQIPFNGKKLKPSKIRKDYWRPLAMIQFPEGQGEVGRSVFLRMRECKKLHEYSWDDSLLYDELTNKTLNKHERGKKLNNQLPNTIADMAAVLGGLGKGNKIIIKDAAAEGADSTAQSLVPASVYWADENDRGYAETWSQNVAHYRLSEAHWVPTDRLLERESEEALVQEPEAEPKAQPTI

SEQ ID NO: 3017 - DNA, 2234 bp, Muscodor strobelii
  misc_feature: SGI EST ID NO. CUFF.8398.0
  misc_feature: Variant of the nucleotide sequence at SEQ ID NO 3015
ctgagggggagctctaggcaggttttgggtctctggctcagcttaggccgctttgtaagtggggcaactgtagagttgcaggtattcgccaaactttagcagttgggccgccagccgactgcccgccagatgcagggccgagacagcccatacactgatggtccccctgctgtgccttcgccattggccgatcgctccagggtgccggcgtcgcgatttgaagcatcaaattttggggcggccaacgatacaactgcgtattgttcacgacgaccacatctgcgagcatcacaacatcgcgacatcacaatggccttacggctcaatcccataacagcccagttgggcaggatatccatttccactcccagcacattcagcagtctcaccgttcgatgggcgcacaccaagcggaggaaagatgaatttataccgcccaatttcgagcctggccacggcgagaagatctacgtctttaggcatctccttgacggcatgaccgtctactcccatagccccgtcatcaaggccaaccgcgccctcaagcagatccccttcaatggcaagaaactcaagccctccaagattcgaaaggactactggcgccccttagccatgatccagtttccagaaggccaaggcgaggtcggccgaagtgtcttcctgcgcatgcgagaatgcaagaaactgcatgaatactcgtgggacgacagtctgctttacgacgagctcacgaataagaccttgaacaagcacgaacgcggaaagaagctcaacaaccagctccccaataccatcgccgacatggccgctgtgctgggcggtctcggaaaggggaataaaatcatcatcaaggacgccgcagctgagggggcagattcgacagcgcagagtctggtgccagctagtgtgtattgggctgacgagaacgaccgcggatatgctgagacatggtcccagaatgttgcgcattatcgcctatctgaagcccactgggtgcccactgacaggctgttggaaagagaatccgaggaagcattggtccaagagccagaggcagagcccaaggcacagcctacgatatagtggcagagggcaagatggaaaagggagagagcggtataatgccaatgcacatcatcgagcttgagcacgcaggcgacacaatctgccattgtttcatacggctatcccagttgtgtatactaccgtgccatgtcctccaaaactcacaaaactcacactcgcaagaggagttgtaatgtactacctgtcatatacatacattgtaccatagactagcgcataaagcaaatgcaaactggcacgcaaatcatgtgcttccgacttcagaacttaagagcgaaggctttcaggtgttcatagtgcggaatattctcatccacacaggccctgatgatcttctgcccctcatcgccgtacttctctcgccattcctcattttctgattcttgggttggagttttctgcgttcagtcagtgccaacttcccccactgtgagatcaacgtattcgacataccttagcgtgcgtcctagccgacaagcacttgctgtttatagcatcgttgtgccacccgttccacttcgcgaatgcctctgagacatattcctggttctcctcgtcgccccacttcagcatatcctcggtgaaggggatgcccgtctccttgcaaaacgctcggatggcgggttctggccgatcaaggaggtcgtcagcatcgatgatagtgatggcgacctcgttctcctcgacggtcgaaccgttcgtctcaccagccacgcctggtcctaccaacttctgttctcgcagatagtcgaatagacggcgcagctcaacatagcccgcttcactgggcatgaagtgagtgaatccagtcacctcgttcaagggtgggatacaacagcggtagtacgaagggatgcctcgccgagggtgtcggatgaggaatgtccagtgatattgcttgaggacatcgagaggaacgactgtcgggttgccggtgggatcggaaccttgccgtttgtgaccattaacgccgttagtttggtggccattagctccatttgtatcgtgagtgccgttggtgtggccttcttttccaacaccgttggttgatccattggatagcgaaggcgcaattgaaggagtgccatcagaaggcggcatcagataataagccatgtccttgataaacactcgcttgccctaca

SEQ ID NO: 3018 - DNA, 1071 bp, Muscodor strobelii
  misc_feature: SGI cDNA ID NO. 560653
  misc_feature: Encodes the peptide sequence at SEQ ID NO 3019
atgtctggaaagcccattttcgtcgcaacccatcccagggcgtgctctactgcctttgaacgagtgttcatgactcgtcgggatatcctccaatgcgcccatgaaccattcggagatgcattctattatggccccgagagacttggagaacgcttcgacgaggatgaggcgaccaggaagagcagtggtttctccaagaccacctatcaagatgtgcttgaccgactggcccgggatggcagcgagggcaagcgagtgtttatcaaggacatggcttattatctgatgccgccttctgatggcactccttcaattgcgccttcgctatccaatggatcaaccaacggtgttggaaaagaaggccacaccaacggcactcacgatacaaatggagctaatggccaccaaactaacggcgttaatggtcacaaacggcaaggttccgatcccaccggcaacccgacagtcgttcctctcgatgtcctcaagcaatatcactggacattcctcatccgacaccctcggcgaggcatcccttcgtactaccgctgttgtatcccacccttgaacgaggtgactggattcactcacttcatgcccagtgaagcgggctatgttgagctgcgccgtctattcgactatctgcgagaacagaagttggtaggaccaggcgtggctggtgagacgaacggttcgaccgtcgaggagaacgaggtcgccatcactatcatcgatgctgacgacctccttgatcggccagaacccgccatccgagcgttttgcaaggagacgggcatccccttcaccgaggatatgctgaagtggggcgacgaggagaaccaggaatatgtctcagaggcattcgcgaagtggaacgggtggcacaacgatgctataaacagcaagtgcttgtcggctaggacgcacgctaagaaaactccaacccaagaatcagaaaatgaggaatggcgagagaagtacggcgatgaggggcagaagatcatcagggcctgtgtggatgagaatattccgcactatgaacacctgaaagccttcgctcttaagttctga

SEQ ID NO: 3019 - protein, 356 aa, Muscodor strobelii
  misc_feature: SGI Peptide ID NO. 560653
  misc_feature (1)..(356): NCBI GI: 39977117 Blast Desc: MGG_06461 [Magnaporthe grisea 70-15] gi|145016121|gb|EDK00611.1| MGG_06461 [Magnaporthe grisea 70-15]
  misc_feature (2)..(355): NCBI GI: 154291038 Blast Desc: BC1G_15407 [Botryotinia fuckeliana B05.10] gi|150847136|gb|EDN22329.1| BC1G_15407 [Botryotinia fuckeliana B05.10]
  misc_feature (1)..(355): NCBI GI: 242777912 Blast Desc: conserved [Talaromyces stipitatus ATCC 10500] gi|218722748|gb|EED22166.1| conserved [Talaromyces stipitatus ATCC 10500]
  misc_feature (1)..(355): NCBI GI: 116208092 Blast Desc: CHGG_03339 [Chaetomium globosum CBS 148.51] gi|88183936|gb|EAQ91404.1| CHGG_03339 [Chaetomium globosum CBS 148.51]
  misc_feature (1)..(355): NCBI GI: 238484241 Blast Desc: conserved [Aspergillus flavus NRRL3357] gi|220701409|gb|EED57747.1| conserved [Aspergillus flavus NRRL3357]
  misc_feature (1)..(356): NCBI GI: 169598354 Blast Desc: SNOG_01979 [Phaeosphaeria nodorum SN15] gi|160704380|gb|EAT90191.2| SNOG_01979 [Phaeosphaeria nodorum SN15]
  misc_feature (1)..(355): NCBI GI: 171686564 Blast Desc: protein product [Podospora anserina] gi|170943243|emb|CAP68896.1| protein product [Podospora anserina]
  misc_feature (2)..(355): NCBI GI: 156037692 Blast Desc: SS1G_12560 [Sclerotinia sclerotiorum 1980] gi|154697968|gb|EDN97706.1| SS1G_12560 [Sclerotinia sclerotiorum 1980]
  misc_feature (1)..(355): NCBI GI: 212533363 Blast Desc: conserved [Penicillium marneffei ATCC 18224] gi|210072202|gb|EEA26291.1| conserved [Penicillium marneffei ATCC 18224]
  misc_feature (1)..(355): NCBI GI: 145230948 Blast Desc: An01g13370 [Aspergillus niger] gi|134055862|emb|CAK96207.1| protein product [Aspergillus niger]
MSGKPIFVATHPRACSTAFERVFMTRRDILQCAHEPFGDAFYYGPERLGERFDEDEATRKSSGFSKTTYQDVLDRLARDGSEGKRVFIKDMAYYLMPPSDGTPSIAPSLSNGSTNGVGKEGHTNGTHDTNGANGHQTNGVNGHKRQGSDPTGNPTVVPLDVLKQYHWTFLIRHPRRGIPSYYRCCIPPLNEVTGFTHFMPSEAGYVELRRLFDYLREQKLVGPGVAGETNGSTVEENEVAITIIDADDLLDRPEPAIRAFCKETGIPFTEDMLKWGDEENQEYVSEAFAKWNGWHNDAINSKCLSARTHAKKTPTQESENEEWREKYGDEGQKIIRACVDENIPHYEHLKAFALKF

SEQ ID NO: 3020 - DNA, 2741 bp, Muscodor strobelii
  misc_feature: SGI EST ID NO. CUFF.8399.1
  misc_feature: Variant of the nucleotide sequence at SEQ ID NO 3018
cgggcgggcagaatggctctgggttgtccatcgtacttgatttatattgaacatgcccaccccattgccttcattgacaagttcccttctattgttaccattgaatctatcgagtctatcctgtgtacgcttcttgataaattaaacaaaaccaatgggactggtgtctcacacaagatcttgttccatcaattacttccttcggggtgccgtttgagatcagccagattgactagcgatcacgtcataagttatcatgtctggaaagcccattttcgtcgcaacccatcccagggcgtgctctactgcctttgaacgagtgttcatgactcgtcgggatatcctccaatgcgcccatgaaccattcggagatgcattctattatggccccgagagacttggagaacgcttcgacgaggatgaggcgaccaggaagagcagtggtttctccaagaccacctatcaagatgtgcttgaccgactggcccgggatggcagcgagggcaagcgagtgtttatcaaggacatggcttattatctgatgccgccttctgatggcactccttcaattgcgccttcgctatccaatggatcaaccaacggtgttggaaaagaaggccacaccaacggcactcacgatacaaatggagctaatggccaccaaactaacggcgttaatggtcacaaacggcaaggttccgatcccaccggcaacccgacagtcgttcctctcgatgtcctcaagcaatatcactggacattcctcatccgacaccctcggcgaggcatcccttcgtactaccgctgttgtatcccacccttgaacgaggtgactggattcactcacttcatgcccagtgaagcgggctatgttgagctgcgccgtctattcgactatctgcgagaacagaagttggtaggaccaggcgtggctggtgagacgaacggttcgaccgtcgaggagaacgaggtcgccatcactatcatcgatgctgacgacctccttgatcggccagaacccgccatccgagcgttttgcaaggagacgggcatccccttcaccgaggatatgctgaagtggggcgacgaggagaaccaggaatatgtctcagaggcattcgcgaagtggaacgggtggcacaacgatgctataaacagcaagtgcttgtcggctaggacgcacgctaagaaaactccaacccaagaatcagaaaatgaggaatggcgagagaagtacggcgatgaggggcagaagatcatcagggcctgtgtggatgagaatattccgcactatgaacacctgaaagccttcgctcttaagttctgaagtcggaagcacatgatttgcgtgccagtttgcatttgctttatgcgctagtctatggtacaatgtatgtatatgacaggtagtacattacaactcctcttgcgagtgtgagttttgtgagttttggaggacatggcacggtagtatacacaactgggatagccgtatgaaacaatggcagattgtgtcgcctgcgtgctcaagctcgatgatgtgcattggcattataccgctctctcccttttccatcttgccctctgccactatatcgtaggctgtgccttgggctctgcctctggctcttggaccaatgcttcctcggattctctttccaacagcctgtcagtgggcacccagtgggcttcagataggcgataatgcgcaacattctgggaccatgtctcagcatatccgcggtcgttctcgtcagcccaatacacactagctggcaccagactctgcgctgtcgaatctgccccctcagctgcggcgtccttgatgatgattttattcccctttccgagaccgcccagcacagcggccatgtcggcgatggtattggggagctggttgttgagcttctttccgcgttcgtgcttgttcaaggtcttattcgtgagctcgtcgtaaagcagactgtcgtcccacgagtattcatgcagtttcttgcattctcgcatgcgcaggaagacacttcggccgacctcgccttggccttctggaaactggatcatggctaaggggcgccagtagtcctttcgaatcttggagggcttgagtttcttgccattgaaggggatctgcttgagggcgcggttggcctaggcggagcgttgggttagctcttgaattgctgacgagggccggaaattggcatcgattttaccttgatgacggggctatgggagtagacggtcatgccgtcaaggagatgcctaaagacgtagatcttctcgccgtggccaggctcgaaattgggcggtataaattcatctttcctccgcttggtgtgcgcccatcgaacggtgagactgctgaatgtgctgggagtggaaatggatatcctgcccaactgggctgttatgggattgagccgtaaggccattgtgatgtcgcgatgttgtgatgctcgcagatgtggtcgtcgtgaacaatacgcagttgtatcgttggccgccccaaaatttgatgcttcaaatcgcgacgccggcaccctggagcgatcggccaatggcgaaggcacagcagggggaccatcagtgtatgggctgtctcggccctgcatctggcgggcagtcggctggcggcccaactgctaaagtttggcgaatacctgcaactctacagttgccccacttacaaagcggcctaagctgagccagagacccaaaacctgcctagagctccccctcag

SEQ ID NO: 3021 - DNA, 1491 bp, Muscodor strobelii
  misc_feature: SGI cDNA ID NO. 560654
  misc_feature: Encodes the peptide sequence at SEQ ID NO 3022
atgcgccaaagaattacattatttcatcggaacgagcatggcattgaaccatcggatatcaggcttaccgacagctctatatcgggacctgatctagttgcagtccgtgaagatcgcggtaccttagctctcgaagaactgcctgcagagctccaagagctgttgcgcgacgttcacgaactgcacattcgatggagcgccccgattacacacgatgctctcggcccctggaattcaaagctcccctcggggttacacgtcttctacactccaagaactactgctctcgcacactccccacgtctatgctctcacctccgcgcagtttttggggagatagattgtgcctcgccttctgagtcgttcactagactcccagtcgatcgattttcgcattcgacagcttatcagtacttctcatctctgaaggtcatttccagcttatctgctttcgcccagcagtatgcatgcacagcagataaccaaaactgtaaggagtgggctcatcaattagatcgagcggtgtctttcgacttctcttacgatgctatctctcacgccgccaagattacagccttatggccggaacaattacagactttctcggtagactctcacgcagaccatagaactgaagtcggccttctgacacccgatgcacccccttctttggaatcacatgaacttggcgtcacaggtctgttgacggtgctaggcgaagacaagaagccatcaccagtcttatttgcatttccttcgagacataaaaatgcagcgtcgacgtttacatctactttcttgaaaccttccggtctgcatccaacattacaactcagtattgagtcaggcaaacctccgttgcccgacgcctcctgctccttacatgcttacctgaccttgccacgggtcatattcgctgataaatatcagcttgaggacgatctctttctggcctcgaagaacttgagtgcagtacgctacaccagtcaaccagtggatcttgaggcccctgactacgcaatgaagctctggggttcaagtgttctcttagagctccaacggccaggggtaccaagtgatgtttcttttacagcagaggtcccgcttcatcttcgatacctatcacctgaggaaggcgggtatggttctgtcgaagtaccctggccagcattattctgggcttgcaacgttgatgaaggtacattatttccaaatagcccttttgacagagccaacctcggctacgatggcttatttggtccgcgaacgatgttttggcacgtcaatcctgagtctgacaacggccgactgtatcatcagatccaagtccctgtattggacttgaaaaaagtcagctggatcagtgcaggcacagccactgtagtgctcttgggttttgcgtatgtagtgttcaaactcatggccgtatattggaaatcgggatatggggatctgaagacgtcgtcgacaagcgagaagaagaaacagtga

SEQ ID NO: 3022 - protein, 496 aa, Muscodor strobelii
  misc_feature: SGI Peptide ID NO. 560654
  misc_feature (268)..(476): Pfam Id: PF08320 Pfam Desc: PIG-X / PBN1
  misc_feature (1)..(484): NCBI GI: 85083973 Blast Desc: NCU00101 [Neurospora crassa OR74A] gi|74614128|sp|Q7RYM7.1|PBN1_NEUCR RecName: Full=Protein pbn-1 gi|28918313|gb|EAA27989.1| [Neurospora crassa OR74A]
  misc_feature (1)..(480): NCBI GI: 156037808 Blast Desc: SS1G_12618 [Sclerotinia sclerotiorum 1980] gi|154698026|gb|EDN97764.1| SS1G_12618 [Sclerotinia sclerotiorum 1980]
  misc_feature (1)..(476): NCBI GI: 171686522 Blast Desc: protein product [Podospora anserina] gi|170943222|emb|CAP68875.1| protein product [Podospora anserina]
  misc_feature (1)..(496): NCBI GI: 39976771 Blast Desc: MGG_06288 [Magnaporthe grisea 70-15] gi|145016316|gb|EDK00806.1| MGG_06288 [Magnaporthe grisea 70-15]
  misc_feature (1)..(495): NCBI GI: 256729913 Blast Desc: NECHADRAFT_47092 [Nectria haematococca mpVI 77-13-4]
  misc_feature (1)..(495): NCBI GI: 46122201 Blast Desc: FG05478.1 [Gibberella zeae PH-1] gi|110815900|sp|Q4IBD0.1|PBN1_GIBZE RecName: Full=Protein PBN1
  misc_feature (1)..(496): NCBI GI: 261358255 Blast Desc: PBN1 [Verticillium albo-atrum VaMs.102]
  misc_feature (1)..(496): NCBI GI: 119498397 Blast Desc: NFIA_036310 [Neosartorya fischeri NRRL 181] gi|119414120|gb|EAW24059.1| conserved [Neosartorya fischeri NRRL 181]
  misc_feature (1)..(495): NCBI GI: 121712810 Blast Desc: conserved [Aspergillus clavatus NRRL 1] gi|119402169|gb|EAW12590.1| conserved [Aspergillus clavatus NRRL 1]
  misc_feature (1)..(414): NCBI GI: 116208090 Blast Desc: CHGG_03338 [Chaetomium globosum CBS 148.51] gi|88183935|gb|EAQ91403.1| CHGG_03338 [Chaetomium globosum CBS 148.51]
MRQRITLFHRNEHGIEPSDIRLTDSSISGPDLVAVREDRGTLALEELPAELQELLRDVHELHIRWSAPITHDALGPWNSKLPSGLHVFYTPRTTALAHSPRLCSHLRAVFGEIDCASPSESFTRLPVDRFSHSTAYQYFSSLKVISSLSAFAQQYACTADNQNCKEWAHQLDRAVSFDFSYDAISHAAKITALWPEQLQTFSVDSHADHRTEVGLLTPDAPPSLESHELGVTGLLTVLGEDKKPSPVLFAFPSRHKNAASTFTSTFLKPSGLHPTLQLSIESGKPPLPDASCSLHAYLTLPRVIFADKYQLEDDLFLASKNLSAVRYTSQPVDLEAPDYAMKLWGSSVLLELQRPGVPSDVSFTAEVPLHLRYLSPEEGGYGSVEVPWPALFWACNVDEGTLFPNSPFDRANLGYDGLFGPRTMFWHVNPESDNGRLYHQIQVPVLDLKKVSWISAGTATVVLLGFAYVVFKLMAVYWKSGYGDLKTSSTSEKKKQ

SEQ ID NO: 3023 - DNA, 1919 bp, Muscodor strobelii
  misc_feature: SGI EST ID NO. CUFF.7461.0
  misc_feature: Variant of the nucleotide sequence at SEQ ID NO 3021
tatacctaagagctgaaaaatacgcacaatcagagtggcgccaaacgaaccgccctattgctagcgcctaggagctcggaccatatgacgagggcccaaactcccacctcatgctggtcttctcataccctcctaaatcagatgcaatcagtaacatcaagtcaacatgcgccaaagaattacattatttcatcggaacgagcatggcattgaaccatcggatatcaggcttaccgacagctctatatcgggacctgatctagttgcagtccgtgaagatcgcggtaccttagctctcgaagaactgcctgcagagctccaagagctgttgcgcgacgttcacgaactgcacattcgatggagcgccccgattacacacgatgctctcggcccctggaattcaaagctcccctcggggttacacgtcttctacactccaagaactactgctctcgcacactccccacgtctatgctctcacctccgcgcagtttttggggagatagattgtgcctcgccttctgagtcgttcactagactcccagtcgatcgattttcgcattcgacagcttatcagtacttctcatctctgaaggtcatttccagcttatctgctttcgcccagcagtatgcatgcacagcagataaccaaaactgtaaggagtgggctcatcaattagatcgagcggtgtctttcgacttctcttacgatgctatctctcacgccgccaagattacagccttatggccggaacaattacagactttctcggtagactctcacgcagaccatagaactgaagtcggccttctgacacccgatgcacccccttctttggaatcacatgaacttggcgtcacaggtctgttgacggtgctaggcgaagacaagaagccatcaccagtcttatttgcatttccttcgagacataaaaatgcagcgtcgacgtttacatctactttcttgaaaccttccggtctgcatccaacattacaactcagtattgagtcaggcaaacctccgttgcccgacgcctcctgctccttacatgcttacctgaccttgccacgggtcatattcgctgataaatatcagcttgaggacgatctctttctggcctcgaagaacttgagtgcagtacgctacaccagtcaaccagtggatcttgaggcccctgactacgcaatgaagctctggggttcaagtgttctcttagagctccaacggccaggggtaccaagtgatgtttcttttacagcagaggtcccgcttcatcttcgatacctatcacctgaggaaggcgggtatggttctgtcgaagtaccctggccagcattattctgggcttgcaacgttgatgaaggtacattatttccaaatagcccttttgacagagccaacctcggctacgatggcttatttggtccgcgaacgatgttttggcacgtcaatcctgagtctgacaacggccgactgtatcatcagatccaagtccctgtattggacttgaaaaaagtcagctggatcagtgcaggcacagccactgtagtgctcttgggttttgcgtatgtagtgttcaaactcatggccgtatattggaaatcgggatatggggatctgaagacgtcgtcgacaagcgagaagaagaaacagtgataaggatctacgaatcgtatgaacccttgagggcgagtataaactcagagtagcccggtggttgtgtacctgcatggatcatatcatttcggcatgtagtaggggcacatgggcaatccatatcatcttaccagctctatcattttttacgacaatgtgagctattgttcagattaattcgaacaacatcacctttgagctagcaatctctgcttctatttgatagtaaaccagggatgccggctcaattgctctccaaacc

SEQ ID NO: 3024 - DNA, 663 bp, Muscodor strobelii
  misc_feature: SGI cDNA ID NO. 560655
  misc_feature: Elevated expression when VOC is produced
  misc_feature: Encodes the peptide sequence at SEQ ID NO 3025
atgacagttacggagttagcctggatccccactaacacgcccgctgtccctccggcattcatcgaggccgggcgtaaagcaatagacttacagagcgagtggacgaaagctcacgccccaaccctccccattggtcccgcggcagcccgtggcgcagcgatctaccaacagttggaagacaaatcctttactcttgtcacagctcactgggcgtccgtggcgcaacatctcgaatgttatggtagcagtgagaatcaggccgctatggggatcttgggtccaatgattgatccatctcgtgtggaattctttcatctggagggagttgagatgctccctgttgagactattgagcaggggctgttgaccgtgatacgcatcgtcgtcaagggggatgagaaggagaaagtggaagggggctggaaagatattaggggactgcttgaaggtgttgcgggctctaaacataggtgtgggtggaggattgagagacagaaggatgatgatagtaaggaggagttcgtgatcgttggagcttggaagaagaggagtgctttcgtggagtttcagaatgggaaatggaatggtagggaggagtgggagaggaagtggagtgagatgggtgtcacggccgatgttaagtgctacgagagacttatataa

SEQ ID NO: 3025 - protein, 220 aa, Muscodor strobelii
  misc_feature: SGI Peptide ID NO. 560655
  misc_feature (1)..(202): NCBI GI: 189188954 Blast Desc: conserved [Pyrenophora tritici-repentis Pt-1C-BFP] gi|187972422|gb|EDU39921.1| conserved [Pyrenophora tritici-repentis Pt-1C-BFP]
  misc_feature (1)..(189): NCBI GI: 115399464 Blast Desc: [Aspergillus terreus NIH2624] gi|114192204|gb|EAU33904.1| [Aspergillus terreus NIH2624]
  misc_feature (1)..(181): NCBI GI: 85102584 Blast Desc: NCU03634 [Neurospora crassa OR74A] gi|12718383|emb|CAC28691.1| [Neurospora crassa] gi|28922905|gb|EAA32125.1| NCU03634 [Neurospora crassa OR74A]
  misc_feature (3)..(169): NCBI GI: 46123075 Blast Desc: FG05915.1 [Gibberella zeae PH-1]
  misc_feature (1)..(97): NCBI GI: 261354835 Blast Desc: conserved [Verticillium albo-atrum VaMs.102]
  misc_feature (3)..(193): NCBI GI: 121699570 Blast Desc: conserved [Aspergillus clavatus NRRL 1] gi|119396204|gb|EAW06636.1| conserved [Aspergillus clavatus NRRL 1]
  misc_feature (54)..(189): NCBI GI: 119174026 Blast Desc: CIMG_08995 [Coccidioides immitis RS]
  misc_feature: Useful for introducing or modulating the production of volatile compounds
MTVTELAWIPTNTPAVPPAFIEAGRKAIDLQSEWTKAHAPTLPIGPAAARGAAIYQQLEDKSFTLVTAHWASVAQHLECYGSSENQAAMGILGPMIDPSRVEFFHLEGVEMLPVETIEQGLLTVIRIVVKGDEKEKVEGGWKDIRGLLEGVAGSKHRCGWRIERQKDDDSKEEFVIVGAWKKRSAFVEFQNGKWNGREEWERKWSEMGVTADVKCYERLI

SEQ ID NO: 3026 - DNA, 859 bp, Muscodor strobelii
  misc_feature: SGI EST ID NO. CUFF.7480.0
  misc_feature: Variant of the nucleotide sequence at SEQ ID NO 3024
gctatccaaataactagatataaagaaattcaaattctaatgaaaccatcgcctcatctacttccctttccaaaaaaaagttaaaatcttacaagcagcaatcatcatgacagttacggagttagcctggatccccactaacacgcccgctgtccctccggcattcatcgaggccgggcgtaaagcaatagacttacagagcgagtggacgaaagctcacgccccaaccctccccattggtcccgcggcagcccgtggcgcagcgatctaccaacagttggaagacaaatcctttactcttgtcacagctcactgggcgtccgtggcgcaacatctcgaatgttatggtagcagtgagaatcaggccgctatggggatcttgggtccaatgattgatccatctcgtgtggaattctttcatctggagggagttgagatgctccctgttgagactattgagcaggggctgttgaccgtgatacgcatcgtcgtcaagggggatgagaaggagaaagtggaagggggctggaaagatattaggggactgcttgaaggtgttgcgggctctaaacataggtgtgggtggaggattgagagacagaaggatgatgatagtaaggaggagttcgtgatcgttggagcttggaagaagaggagtgctttcgtggagtttcagaatgggaaatggaatggtagggaggagtgggagaggaagtggagtgagatgggtgtcacggccgatgttaagtgctacgagagacttatataaggctttctgacagtcctctatagaaggcataaggtacctgccgctatctacctatgttcttgacttgtccttcatttgaatcaatcgagg

SEQ ID NO: 3027 - DNA, 2853 bp, Muscodor strobelii
  misc_feature: SGI cDNA ID NO. 560656
  misc_feature: Encodes the peptide sequence at SEQ ID NO 3028
atggctgcacttactgccgaacagcttgacctcgcgaactctctcgtgcaggatgacctccccacgaagctgcgatgcgcaatctgcagcaagttggccgtcaacgcttaccggctcccatgttgcgagactgctatctgccaaaactgccagtccacattaccctcttcatgtcctgtctgtgaacactcgcccgtctctgccggagactgtactgtctacaaatccctgagaaccaccatcaaagtcttcctcaagaccgaagagaagaaacgcgaggctgctcgccccaaaaccaacggctccgcccctacaacccccctccaatctacgcctacccctgcgcctacgcaagcgcaaccacaatcacagccgtttgaggagcctaccgtgacaaactcgtccgccccggacgtgcccaactcggagcatccggccaacgactcaggagagcctgctgaccctgcggctgagtccacgaacagaccaagctctgcggaacaagtcgcagctgctgactcaaaccaaccggagaccagtgcaaacctttctgagcgtcaagaccagggtctccagacggaggaggcgaaggatactgaagcacaggctccagccaccgacgagataccgggcgaggatggtggcaaggatgatcaagttgccgaagcaggcacaacccaagcagaccaggccgggatgggctttgggttcgactccatgaataataacttcaacatgaacatggccaacggagacatgaatcaaatgcagatgatgatggctatgcagaatggcatgaaccctgccgccttcggcacttttcccataatgggcatgatggatccgatgatgatgcagaacatgatgatgagcggtggctttaacgcgcaaggcatgggcatgaatggcatgaacatgaacatgggcatgggcatgagtggttttggtggcaatgatgactggaacggacaacaatcatggaacgtcacccaagataatttcaatccaaatgctcctggcatgggtaatggtgactttggcaactttaacgcaaacttccgtacaggtaactacggccatcagaaccagtacaatgactatcgccgcggaggctatggcttcagaggaagaggccgcggacgtggcttctacggcggatacggccgtggcggctaccagcagaactaccacaacaacaacaacgtgatgccagccggccgcattgacggcccccctaatggcgctacgcagtctcatggcaatgcctcagacgacgtcgacgaatttggaagaaccttgcccgcgaccgaaacccaggaacagaactcagtaaaccagaacagccaggatgctcaaggtgcccatgacaacggcagtacatcgtcagtagtcaaagaccttgtgcctgcatcagacactacacaaggtgacaaactggttcaggatggtgatgtgtctactgcaaatggatatgcccatatgaacgggaacacttctggcaatgcgtttcctgtacaggctgctgtgcaagacgtgcccctgaatgcgcccactggtcctaaagccatgcgtcagggtcttcccaacactagtctccacaatcttagggcacgtggctacatgatccaggaagaagcaccaaaggccagcactgctgagccaaccctagtcaattcaacagaagagcggccacgatcgcggagtagttctctgcaatcgcgccaagaacaaaatgtcaaccatcttgaccgtcccgaagaacgtgacatagacaggaaggatggtgtcaaagatgacgagagagcccgtggccgttctaggacccgtagtgtatcgaagcctcgagatcctactcacagccggagccgggaccgtaaagagacccgcagacacggacactatcactcacgttctgcctccgccgatagtcgcaacggcgattcatccaataaaaaacctagaagcagtcgacattcaactagagacgttgatgatatgaaggttcgctcaaggagagacaaagctgaggaaaaatccagatcagtatctcccaacgaccgagactacaagcgctcaagtaaccgcagtcgtcgggagcgcagccgcgatagggacagggaccggaatcgtgaacgcgatcgcgaccatgaccgagaccgtgagcgcgaacgtgatcgtgatcgtgatgacaaacgtcgagatcgtgacagaccgagagacagggacagcgaccgggatcgggatcggcataggaagtcgaaacatcgctcatcccatcacgatcgtgacgaagaacgtgaacgagatagagatcgtacaaaagaccgcgatccggtgcgggagagggaccgttctcgcgatggcgacaccaaagatcgacgccacgaaaagaaacgcccgaccaacggtcctctcactccgaaagaatcgtcggagagaggatttaatcctccaacgggacctcgaggtagcttctccatcaaaggcgccggcagcacacataatgttgagatcaaaggggctactagccgctcatctaattcacagcgacgcgagagtcaggattcgcgccgtccttctcagtcatctaccgcagctcaaaagtcaggatccggggcatcggggaaagacccccatacacttgagcgagaggctcgtgacagagagcgtcttttgaaagaagctcagagaattgccggcatggcaagcctgactggccgaggcggtgggaagcgtagccgggatgctgacgatgacagaggtggtcgtcggaagagtcgccgaagcggcatggacgacgaagaacgcatgcgacgagtcgaagcagagcgagatgcgcgtcgctgggactga

SEQ ID NO: 3028 - protein, 950 aa, Muscodor strobelii
  misc_feature: SGI Peptide ID NO. 560656
  misc_feature (1)..(576): NCBI GI: 154291888 Blast Desc: BC1G_14960 [Botryotinia fuckeliana B05.10] gi|150846568|gb|EDN21761.1| BC1G_14960 [Botryotinia fuckeliana B05.10]
  misc_feature (1)..(368): NCBI GI: 39976879 Blast Desc: MGG_06342 [Magnaporthe grisea 70-15] gi|145016258|gb|EDK00748.1| MGG_06342 [Magnaporthe grisea 70-15]
  misc_feature (2)..(367): NCBI GI: 46122245 Blast Desc: FG05500.1 [Gibberella zeae PH-1]
  misc_feature (4)..(364): NCBI GI: 256729707 Blast Desc: NECHADRAFT_83807 [Nectria haematococca mpVI 77-13-4]
  misc_feature (9)..(630): NCBI GI: 255933285 Blast Desc: Pc12g13050 [Penicillium chrysogenum Wisconsin 54-1255] gi|211582732|emb|CAP80932.1| Pc12g13050 [Penicillium chrysogenum Wisconsin 54-1255]
  misc_feature (9)..(350): NCBI GI: 119481707 Blast Desc: NFIA_089420 [Neosartorya fischeri NRRL 181] gi|119409036|gb|EAW18985.1| conserved [Neosartorya fischeri NRRL 181]
  misc_feature (1)..(367): NCBI GI: 240107351 Blast Desc: CPC735_066360 [Coccidioides posadasii C735 delta SOWgp]
  misc_feature (11)..(404): NCBI GI: 238841564 Blast Desc: pre-mRNA-splicing factor 38B [Microsporum canis CBS 113480]
  misc_feature (1)..(542): NCBI GI: 258565027 Blast Desc: [Uncinocarpus reesii 1704] gi|237906959|gb|EEP81360.1| [Uncinocarpus reesii 1704]
  misc_feature (9)..(392): NCBI GI: 71002156 Blast Desc: conserved [Aspergillus fumigatus Af293] gi|66853397|gb|EAL93721.1| conserved [Aspergillus fumigatus Af293] gi|159129814|gb|EDP54928.1| conserved [Aspergillus A1163]
MAALTAEQLDLANSLVQDDLPTKLRCAICSKLAVNAYRLPCCETAICQNCQSTLPSSCPVCEHSPVSAGDCTVYKSLRTTIKVFLKTEEKKREAARPKTNGSAPTTPLQSTPTPAPTQAQPQSQPFEEPTVTNSSAPDVPNSEHPANDSGEPADPAAESTNRPSSAEQVAAADSNQPETSANLSERQDQGLQTEEAKDTEAQAPATDEIPGEDGGKDDQVAEAGTTQADQAGMGFGFDSMNNNFNMNMANGDMNQMQMMMAMQNGMNPAAFGTFPIMGMMDPMMMQNMMMSGGFNAQGMGMNGMNMNMGMGMSGFGGNDDWNGQQSWNVTQDNFNPNAPGMGNGDFGNFNANFRTGNYGHQNQYNDYRRGGYGFRGRGRGRGFYGGYGRGGYQQNYHNNNNVMPAGRIDGPPNGATQSHGNASDDVDEFGRTLPATETQEQNSVNQNSQDAQGAHDNGSTSSVVKDLVPASDTTQGDKLVQDGDVSTANGYAHMNGNTSGNAFPVQAAVQDVPLNAPTGPKAMRQGLPNTSLHNLRARGYMIQEEAPKASTAEPTLVNSTEERPRSRSSSLQSRQEQNVNHLDRPEERDIDRKDGVKDDERARGRSRTRSVSKPRDPTHSRSRDRKETRRHGHYHSRSASADSRNGDSSNKKPRSSRHSTRDVDDMKVRSRRDKAEEKSRSVSPNDRDYKRSSNRSRRERSRDRDRDRNRERDRDHDRDRERERDRDRDDKRRDRDRPRDRDSDRDRDRHRKSKHRSSHHDRDEERERDRDRTKDRDPVRERDRSRDGDTKDRRHEKKRPTNGPLTPKESSERGFNPPTGPRGSFSIKGAGSTHNVEIKGATSRSSNSQRRESQDSRRPSQSSTAAQKSGSGASGKDPHTLEREARDRERLLKEAQRIAGMASLTGRGGGKRSRDADDDRGGRRKSRRSGMDDEERMRRVEAERDARRWD

SEQ ID NO: 3029 - DNA, 3652 bp, Muscodor strobelii
  misc_feature: SGI EST ID NO. CUFF.7486.0
  misc_feature: Variant of the nucleotide sequence at SEQ ID NO 3027
tagagatcgaatgcattgcgtccgtccaccaaccagcgactcaactgcaaaaacatatatcaccactcgtcagaatcactcttgtcgcgcggggagttgtcgacaacaataatgaggccctcttggacttgatcaagtcgccctctcgcgtcactgcgcttcttgacaaccacgtttgccgcgtctgtcggaccccatccaacccatcgtccatcgcccgtgacacacagcgcaacgcaatcattcatccaccctccacgtctatgacttctgtacctgttgcgccgccaccgcgtcactaaatacctacacacccgtttccacgcctgttctttacatcgccagtgctgttcctcgcatgcgctacctaggcacatcacacgacggcatctgtcctcaacatggctgcacttactgccgaacagcttgacctcgcgaactctctcgtgcaggatgacctccccacgaagctgcgatgcgcaatctgcagcaagttggccgtcaacgcttaccggctcccatgttgcgagactgctatctgccaaaactgccagtccacattaccctcttcatgtcctgtctgtgaacactcgcccgtctctgccggagactgtactgtctacaaatccctgagaaccaccatcaaagtcttcctcaagaccgaagagaagaaacgcgaggctgctcgccccaaaaccaacggctccgcccctacaacccccctccaatctacgcctacccctgcgcctacgcaagcgcaaccacaatcacagccgtttgaggagcctaccgtgacaaactcgtccgccccggacgtgcccaactcggagcatccggccaacgactcaggagagcctgctgaccctgcggctgagtccacgaacagaccaagctctgcggaacaagtcgcagctgctgactcaaaccaaccggagaccagtgcaaacctttctgagcgtcaagaccagggtctccagacggaggaggcgaaggatactgaagcacaggctccagccaccgacgagataccgggcgaggatggtggcaaggatgatcaagttgccgaagcaggcacaacccaagcagaccaggccgggatgggctttgggttcgactccatgaataataacttcaacatgaacatggccaacggagacatgaatcaaatgcagatgatgatggctatgcagaatggcatgaaccctgccgccttcggcacttttcccataatgggcatgatggatccgatgatgatgcagaacatgatgatgagcggtggctttaacgcgcaaggcatgggcatgaatggcatgaacatgaacatgggcatgggcatgagtggttttggtggcaatgatgactggaacggacaacaatcatggaacgtcacccaagataatttcaatccaaatgctcctggcatgggtaatggtgactttggcaactttaacgcaaacttccgtacaggtaactacggccatcagaaccagtacaatgactatcgccgcggaggctatggcttcagaggaagaggccgcggacgtggcttctacggcggatacggccgtggcggctaccagcagaactaccacaacaacaacaacgtgatgccagccggccgcattgacggcccccctaatggcgctacgcagtctcatggcaatgcctcagacgacgtcgacgaatttggaagaaccttgcccgcgaccgaaacccaggaacagaactcagtaaaccagaacagccaggatgctcaaggtgcccatgacaacggcagtacatcgtcagtagtcaaagaccttgtgcctgcatcagacactacacaaggtgacaaactggttcaggatggtgatgtgtctactgcaaatggatatgcccatatgaacgggaacacttctggcaatgcgtttcctgtacaggctgctgtgcaagacgtgcccctgaatgcgcccactggtcctaaagccatgcgtcagggtcttcccaacactagtctccacaatcttagggcacgtggctacatgatccaggaagaagcaccaaaggccagcactgctgagccaaccctagtcaattcaacagaagagcggccacgatcgcggagtagttctctgcaatcgcgccaagaacaaaatgtcaaccatcttgaccgtcccgaagaacgtgacatagacaggaaggatggtgtcaaagatgacgagagagcccgtggccgttctaggacccgtagtgtatcgaagcctcgagatcctactcacagccggagccgggaccgtaaagagacccgcagacacggacactatcactcacgttctgcctccgccgatagtcgcaacggcgattcatccaataaaaaacctagaagcagtcgacattcaactagagacgttgatgatatgaaggttcgctcaaggagagacaaagctgaggaaaaatccagatcagtatctcccaacgaccgagactacaagcgctcaagtaaccgcagtcgtcgggagcgcagccgcgatagggacagggaccggaatcgtgaacgcgatcgcgaccatgaccgagaccgtgagcgcgaacgtgatcgtgatcgtgatgacaaacgtcgagatcgtgacagaccgagagacagggacagcgaccgggatcgggatcggcataggaagtcgaaacatcgctcatcccatcacgatcgtgacgaagaacgtgaacgagatagagatcgtacaaaagaccgcgatccggtgcgggagagggaccgttctcgcgatggcgacaccaaagatcgacgccacgaaaagaaacgcccgaccaacggtcctctcactccgaaagaatcgtcggagagaggatttaatcctccaacgggacctcgaggtagcttctccatcaaaggcgccggcagcacacataatgttgagatcaaaggggctactagccgctcatctaattcacagcgacgcgagagtcaggattcgcgccgtccttctcagtcatctaccgcagctcaaaagtcaggatccggggcatcggggaaagacccccatacacttgagcgagaggctcgtgacagagagcgtcttttgaaagaagctcagagaattgccggcatggcaagcctgactggccgaggcggtgggaagcgtagccgggatgctgacgatgacagaggtggtcgtcggaagagtcgccgaagcggcatggacgacgaagaacgcatgcgacgagtcgaagcagagcgagatgcgcgtcgctgggactgagagttgaatggttgctctggatcttcatgtcgtagtagataaatactacctaaaatgtggatactacgaaagaataggcaagctgaaatcgaaccaaatcagcgtcaaccattgtggactgaagaatgaggaaagaaatgagccgagcaaccaaaaccgacgtggatgacgatcagatatggtgattgacctcctgacaatcacctgctccgggaaagcgcacttcaatattcactttgggattggtgctcgttgctcggtcgcataaaattgtacatagcaaaaagagagtcctttacttgagatacccgctacatagcgcttcagagagtaaagacaagaaacccaggatcaaggaaactgcactgcctttacagattcgctcacttagtcctgca

SEQ ID NO: 3030 - DNA, 711 bp, Muscodor strobelii
  misc_feature: SGI cDNA ID NO. 560657
  misc_feature: Encodes the peptide sequence at SEQ ID NO 3031
atggactcaaacgccccgagaccaagcagcagcgtcaagctggttctgctcggcgaggccgccgtcggaaagtcctcgcttgtgttgcgcttcgtcaacaacgacttccaagagaacaaggaacccacaatcggcgctgccttcttgacacagaagtgcaacctaccttcgcggacaatcaagttcgaaatctgggacaccgccggccaggagcgcttcgcttccctggcacccatgtactaccgaaatgcccaagccgcactggttgtctacgacctcaccaagcccacctccctcatcaaagccaagcactgggtcgccgagctgcagaggcaagcctcgcccggcatcgtcatcgctctggtcggcaacaagttggatctcacggacgacaacgagtccggccaggtggagggcgatgcggacggcgagagtggggagggtgccggctccggtgacgcgcgaaagatttcgactgaggaggctaaggcatacgccgaggaggagagtctcctgttcttcgagaccagcgccaagacggggcacaacgtcagcgaagtcttcaccgccattgccaacgccatccccgagacgtctttgaagagcacgagaggtcctggtgcagccggcacggccacccgggccggcgaggagcagcgggtcaatctcaacggaccacgcgagagcgtcaaggaaggatgtgcatgctaa

SEQ ID NO: 3031 - protein, 236 aa, Muscodor strobelii
  misc_feature: SGI Peptide ID NO. 560657
  misc_feature (13)..(127): Pfam Id: PF08477 Pfam Desc: Miro-like protein
  misc_feature (13)..(197): Pfam Id: PF00071 Pfam Desc: Ras family
  misc_feature (2)..(236): NCBI GI: 85076611 Blast Desc: Rab5-like protein ypt51 [Neurospora crassa OR74A] gi|28916987|gb|EAA26716.1| Rab5-like protein ypt51 [Neurospora crassa OR74A]
  misc_feature (3)..(236): NCBI GI: 256729706 Blast Desc: NECHADRAFT_62851 [Nectria haematococca mpVI 77-13-4]
  misc_feature (2)..(236): NCBI GI: 171686920 Blast Desc: protein product [Podospora anserina] gi|170943421|emb|CAP69074.1| protein product [Podospora anserina]
  misc_feature (3)..(236): NCBI GI: 156051994 Blast Desc: conserved [Sclerotinia sclerotiorum 1980] gi|154705182|gb|EDO04921.1| conserved [Sclerotinia sclerotiorum 1980]
  misc_feature (3)..(236): NCBI GI: 46122247 Blast Desc: FG05501.1 [Gibberella zeae PH-1]
  misc_feature (2)..(208): NCBI GI: 116191911 Blast Desc: conserved [Chaetomium globosum CBS 148.51] gi|88181586|gb|EAQ89054.1| conserved [Chaetomium globosum CBS 148.51]
  misc_feature (3)..(236): NCBI GI: 119491781 Blast Desc: RAB GTPase Vps21/Ypt51, [Neosartorya fischeri NRRL 181] gi|119411545|gb|EAW21488.1| RAB GTPase Vps21/Ypt51, [Neosartorya fischeri NRRL 181]
  misc_feature (3)..(236): NCBI GI: 121705630 Blast Desc: RAB GTPase Vps21/Ypt51, [Aspergillus clavatus NRRL 1] gi|119399224|gb|EAW09652.1| RAB GTPase Vps21/Ypt51, [Aspergillus clavatus NRRL 1]
  misc_feature (3)..(236): NCBI GI: 145232756 Blast Desc: An02g06400 [Aspergillus niger] gi|134056697|emb|CAL00639.1| protein product [Aspergillus niger]
  misc_feature (3)..(236): NCBI GI: 223974943 Blast Desc: [Zea mays]
  misc_feature (8)..(133): SWISSPROT Homolog: EC 2.7.11.1 Non-specific serine/threonine protein kinase
MDSNAPRPSSSVKLVLLGEAAVGKSSLVLRFVNNDFQENKEPTIGAAFLTQKCNLPSRTIKFEIWDTAGQERFASLAPMYYRNAQAALVVYDLTKPTSLIKAKHWVAELQRQASPGIVIALVGNKLDLTDDNESGQVEGDADGESGEGAGSGDARKISTEEAKAYAEEESLLFFETSAKTGHNVSEVFTAIANAIPETSLKSTRGPGAAGTATRAGEEQRVNLNGPRESVKEGCAC

SEQ ID NO: 3032 - DNA, 1339 bp, Muscodor strobelii
  misc_feature: SGI EST ID NO. CUFF.7647.1
  misc_feature: Variant of the nucleotide sequence at SEQ ID NO 3030
tcgacctgcttatcattcccgctgtctacctacccttcaaggtcgtgctgcaacgacctgcaacgacctgcaacgactagaaagctatcgtcatatggccatattcgctgcctattagtagcgtccccatcgccatcatttggtcaactagtcgcctaactggatctgggtacattcagaatcctgtcgcctgcttgcccttggctctctagttaaaacccaccagctgcttgctctccatctcccctccacccgccaccgtcctgtcctcccatacccgtcgatatggactcaaacgccccgagaccaagcagcagcgtcaagctggttctgctcggcgaggccgccgtcggaaagtcctcgcttgtgttgcgcttcgtcaacaacgacttccaagagaacaaggaacccacaatcggcgctgccttcttgacacagaagtgcaacctaccttcgcggacaatcaagttcgaaatctgggacaccgccggccaggagcgcttcgcttccctggcacccatgtactaccgaaatgcccaagccgcactggttgtctacgacctcaccaagcccacctccctcatcaaagccaagcactgggtcgccgagctgcagaggcaagcctcgcccggcatcgtcatcgctctggtcggcaacaagttggatctcacggacgacaacgagtccggccaggtggagggcgatgcggacggcgagagtggggagggtgccggctccggtgacgcgcgaaagatttcgactgaggaggctaaggcatacgccgaggaggagagtctcctgttcttcgagaccagcgccaagacggggcacaacgtcagcgaagtcttcaccgccattgccaacgccatccccgagacgtctttgaagagcacgagaggtcctggtgcagccggcacggccacccgggccggcgaggagcagcgggtcaatctcaacggaccacgcgagagcgtcaaggaaggatgtgcatgctaaagctctgaagcgacgcagatatgcacacgcgagagtccggcttacattgcagttgatgggaagggacgtttatcatggatttctagcatgtaaatattggagcgacggtcattttctgcagactcgggattatgggcgtggttaatagttagtgattgtatcaacagcaagaagacgtcgacacagcggtacacggctgcaacgtagcaatgcgattcaatacccatctatcatcatggtcttatacgcaggataatcccgtctttacattgagtgtagtattacttaggtattgatgaggtgtctagtaccgagtctatttctactcgcagtctaggtatcc

SEQ ID NO: 3033 - DNA, 1926 bp, Muscodor strobelii
  misc_feature: SGI cDNA ID NO. 560658
  misc_feature: Reduced expression when VOC is produced
  misc_feature: Encodes the peptide sequence at SEQ ID NO 3034
atggcctccaccactgtgcccaaacctgcacttttcgacgatagcgacgatcaatccgacggcggcgtcagtctcaatatcaataaagattatgcgaaacgctttgaacacaacaagaagcgcgaggagcgcatgaagttggaggaaaaatacaaggccactggtcgaaccctaaagcccagaggcgacgatagcgacgacgatgacagcggttcctccgacgacgaaacagaagacgaggatggtttcctcgccaccgaagaactcgatgcccagatatcagccaccctccaggccattaagaacaaggacccccgtctgtacgatgggaagtccactttctatgcgcccatagacgaggacgtcgccagtcaacccaccgcccccaaacagaagaaggaaaagcccgtgtttctgcaagactaccatcgggaaaagattctacgtggcgacacgggagccgatgaccaggatgagcccttagcaccccagacctacgcacaggaacaagaggacctgaagaaatcgctacaaagggaggtgcaggcccaattgacagccggtgctgatagtgaagaggatagtgatgacgacgacttcatcaaggccaaacacggcatccaggacaccccagagaatggcgttcacccatctcgagccagcaaggttagaattgccaagccagacgtagaagatgccgacaagaatccggagctcttcctgtccaactttctcgcttcccgagcctggatcgaggaagacggcaacgggtggcagccttttgagtcagacgaaggagaggacgacaaggcagacgaatgggaagctgcatacaatctacgcttcgaggaccccagcaagagtaacgaggtcttgagatcatatgcacgtgacgtgaccgctgcgcgctccgtgaggaaagaggagaagacgggcagaaagcgccagcgtgaactggaacgggagcagaaggacgccgagaagcagcagaggcgtgaggagcgagctcggctacggaaattgaaactcgaagaggccggagataagttggccaagatcaagaaagccgctggactccgaggcaagtctctcgacgacgaggactggcagaaacttctggacggggcatgggaagatagcaagtgggagcaagaaatgaacaagactttcaacgatgaatactatgccgaggacgacggtgcctcagccgaggagggtgccgccgacggcactaagaagaagaagatcaagaagccaacatgggacgacgatatcgatgtgaaggatctgattccggatttcgacgacgaagatcgtccgaatatcacactcacggacgatgaagcggaggaagggccagagcaggacagaggagatgtggaggatgaggatgacgccccggcagccaagcgccagaagacgagcaaggagcggaagaaggagaagcttatgagccagaaagcagctcggcaggagcgtgccaagcttgaagctattgttgacgcacacatggaccttgatgatcctgaattgcttgctggctcttcgtctgcgaaaggcaaaggtcaaccgcggtttgcatatcgcgaaacgaagccagagaccttcggtctcaccactcgcgacatcctcatggcgtcagatgcggatctcaacacctttgtcggtctcaaaaagcttgcacattttcgtgacgctgaaaaacaagcaaaggaccgcaagagactgggcaagaaggcacgtcttcgacagtggaggaaagatacctttgggcctgagtttgaacgcgatccaccacagcttaacttcggagaacatgaaaaggcgaaagcgaaagcaaaagacgatgagagtagcaacatcgtggagggctcaaagaagaaacgcaagagatcacggccgaagaaaggcatggctgttgagtag

SEQ ID NO: 3034 - protein, 641 aa, Muscodor strobelii
  misc_feature: SGI Peptide ID NO. 560658
  misc_feature (364)..(592): Pfam Id: PF05178 Pfam Desc: Krr1 family
  misc_feature (525)..(592): Pfam Id: PF05178 Pfam Desc: Krr1 family
  misc_feature (25)..(622): NCBI GI: 256729902 Blast Desc: NECHADRAFT_105055 [Nectria haematococca mpVI 77-13-4]
  misc_feature (24)..(603): NCBI GI: 39976679 Blast Desc: MGG_06242 [Magnaporthe grisea 70-15] gi|145016365|gb|EDK00855.1| MGG_06242 [Magnaporthe grisea 70-15]
  misc_feature (25)..(603): NCBI GI: 116191909 Blast Desc: CHGG_05672 [Chaetomium globosum CBS 148.51] gi|88181585|gb|EAQ89053.1| CHGG_05672 [Chaetomium globosum CBS 148.51]
  misc_feature (23)..(593): NCBI GI: 145255162 Blast Desc: An18g04230 [Aspergillus niger] gi|134084471|emb|CAK43225.1| protein product [Aspergillus niger]
  misc_feature (11)..(603): NCBI GI: 46122249 Blast Desc: FG05502.1 [Gibberella zeae PH-1]
  misc_feature (23)..(604): NCBI GI: 115389518 Blast Desc: conserved [Aspergillus terreus NIH2624] gi|114194660|gb|EAU36360.1| conserved [Aspergillus terreus NIH2624]
  misc_feature (24)..(604): NCBI GI: 154309718 Blast Desc: BC1G_07329 [Botryotinia fuckeliana B05.10] gi|150851790|gb|EDN26983.1| BC1G_07329 [Botryotinia fuckeliana B05.10]
  misc_feature (19)..(604): NCBI GI: 156051996 Blast Desc: SS1G_07406 [Sclerotinia sclerotiorum 1980] gi|154705183|gb|EDO04922.1| SS1G_07406 [Sclerotinia sclerotiorum 1980]
  misc_feature (5)..(603): NCBI GI: 85076604 Blast Desc: NCU06409 [Neurospora crassa OR74A] gi|28916986|gb|EAA26715.1| [Neurospora crassa OR74A]
  misc_feature (20)..(604): NCBI GI: 169764799 Blast Desc: [Aspergillus oryzae RIB40] gi|83764725|dbj|BAE54869.1| protein product [Aspergillus oryzae]
  misc_feature: Useful for introducing or modulating the production of volatile compounds
MASTTVPKPALFDDSDDQSDGGVSLNINKDYAKRFEHNKKREERMKLEEKYKATGRTLKPRGDDSDDDDSGSSDDETEDEDGFLATEELDAQISATLQAIKNKDPRLYDGKSTFYAPIDEDVASQPTAPKQKKEKPVFLQDYHREKILRGDTGADDQDEPLAPQTYAQEQEDLKKSLQREVQAQLTAGADSEEDSDDDDFIKAKHGIQDTPENGVHPSRASKVRIAKPDVEDADKNPELFLSNFLASRAWIEEDGNGWQPFESDEGEDDKADEWEAAYNLRFEDPSKSNEVLRSYARDVTAARSVRKEEKTGRKRQRELEREQKDAEKQQRREERARLRKLKLEEAGDKLAKIKKAAGLRGKSLDDEDWQKLLDGAWEDSKWEQEMNKTFNDEYYAEDDGASAEEGAADGTKKKKIKKPTWDDDIDVKDLIPDFDDEDRPNITLTDDEAEEGPEQDRGDVEDEDDAPAAKRQKTSKERKKEKLMSQKAARQERAKLEAIVDAHMDLDDPELLAGSSSAKGKGQPRFAYRETKPETFGLTTRDILMASDADLNTFVGLKKLAHFRDAEKQAKDRKRLGKKARLRQWRKDTFGPEFERDPPQLNFGEHEKAKAKAKDDESSNIVEGSKKKRKRSRPKKGMAVE

SEQ ID NO: 3035 - DNA, 2398 bp, Muscodor strobelii
  misc_feature: SGI EST ID NO. CUFF.7616.0
  misc_feature: Variant of the nucleotide sequence at SEQ ID NO 3033
attaatctcgccgcctgctcatccctcgcttttggcatcttcatgctgccctattaactcgtggtcagcttcaaggctctgcttgcttcgagccactttgtacttttctataaaacccttgcattgtctctcctcccgcaaaacgcaacccggaataaattcgaggcgcaaagtcaagcagtcgccattgcttggctttacatcgacctcaacctctcaacacactatggcctccaccactgtgcccaaacctgcacttttcgacgatagcgacgatcaatccgacggcggcgtcagtctcaatatcaataaagattatgcgaaacgctttgaacacaacaagaagcgcgaggagcgcatgaagttggaggaaaaatacaaggccactggtcgaaccctaaagcccagaggcgacgatagcgacgacgatgacagcggttcctccgacgacgaaacagaagacgaggatggtttcctcgccaccgaagaactcgatgcccagatatcagccaccctccaggccattaagaacaaggacccccgtctgtacgatgggaagtccactttctatgcgcccatagacgaggacgtcgccagtcaacccaccgcccccaaacagaagaaggaaaagcccgtgtttctgcaagactaccatcgggaaaagattctacgtggcgacacgggagccgatgaccaggatgagcccttagcaccccagacctacgcacaggaacaagaggacctgaagaaatcgctacaaagggaggtgcaggcccaattgacagccggtgctgatagtgaagaggatagtgatgacgacgacttcatcaaggccaaacacggcatccaggacaccccagagaatggcgttcacccatctcgagccagcaaggttagaattgccaagccagacgtagaagatgccgacaagaatccggagctcttcctgtccaactttctcgcttcccgagcctggatcgaggaagacggcaacgggtggcagccttttgagtcagacgaaggagaggacgacaaggcagacgaatgggaagctgcatacaatctacgcttcgaggaccccagcaagagtaacgaggtcttgagatcatatgcacgtgacgtgaccgctgcgcgctccgtgaggaaagaggagaagacgggcagaaagcgccagcgtgaactggaacgggagcagaaggacgccgagaagcagcagaggcgtgaggagcgagctcggctacggaaattgaaactcgaagaggccggagataagttggccaagatcaagaaagccgctggactccgaggcaagtctctcgacgacgaggactggcagaaacttctggacggggcatgggaagatagcaagtgggagcaagaaatgaacaagactttcaacgatgaatactatgccgaggacgacggtgcctcagccgaggagggtgccgccgacggcactaagaagaagaagatcaagaagccaacatgggacgacgatatcgatgtgaaggatctgattccggatttcgacgacgaagatcgtccgaatatcacactcacggacgatgaagcggaggaagggccagagcaggacagaggagatgtggaggatgaggatgacgccccggcagccaagcgccagaagacgagcaaggagcggaagaaggagaagcttatgagccagaaagcagctcggcaggagcgtgccaagcttgaagctattgttgacgcacacatggaccttgatgatcctgaattgcttgctggctcttcgtctgcgaaaggcaaaggtcaaccgcggtttgcatatcgcgaaacgaagccagagaccttcggtctcaccactcgcgacatcctcatggcgtcagatgcggatctcaacacctttgtcggtctcaaaaagcttgcacattttcgtgacgctgaaaaacaagcaaaggaccgcaagagactgggcaagaaggcacgtcttcgacagtggaggaaagatacctttgggcctgagtttgaacgcgatccaccacagcttaacttcggagaacatgaaaaggcgaaagcgaaagcaaaagacgatgagagtagcaacatcgtggagggctcaaagaagaaacgcaagagatcacggccgaagaaaggcatggctgttgagtagctgcccggacctggatagcgatctgtagttccaacttggacattgtactcgtcatttcatctacaacattgtcagcactacgcctcggctacgaaaatacttatagtactagatgttcgatagcattgaaatagtaaagtgtacacatatatgtgccctacttgcgaatcttttacggcctaatgactattatgacaccgatagatagaatgttgctatcttcgccagcccagtcaaatagatata

SEQ ID NO: 3036 - DNA, 3336 bp, Muscodor strobelii
  misc_feature: SGI cDNA ID NO. 560659
  misc_feature: Encodes the peptide sequence at SEQ ID NO 3037
atgtccccggatcaagcgcttcagaaaaggcagcctttctctcccgatggtgccaatggcacagaatctaccaatgaacccgaacatcaacaatcacgacccgatacaaccgacctgaatggtttctcactgcatgaagagcaggaagatgtcgatgctgaggtagtcaacagccttctcgaaccctcacagttcccggatttcccgttttcgtttcaagatctacccgacaacaatccaatcgtaaatctcgacgatcatgcagccgatctttttgccaactcagctactgatgctaccccattgactggagatagagaaggatcgataaactcggggccccgcaatgtcatactcgatagaggccagatttcgcacaaaaagccttgcagtatcgatgcatctgaggatggatcgcaagaaagtccgcacgacgggtccaaccccctcgaggacaatttgtctgacgactttggactttctaccgcaattacaggtgacagtactgagataagtgggaagttgaaggagagcaaaacagatcctacaccagcctggagcgatttgaaaactaaggcaggaaaggatagaaaacgattgccattggcatgcatagcttgtcggaggaagaaaattcgctgttcgggagagaagcctgcctgcaaacattgtcttcgttcgcgaataccatgtgtttacaaggtcacaactcggaaagcggcgcctaggacagactatatggctatgctggacaaaagactcaaaaggatggaagatcggatcatcaaaatcgtacctaggtcagagcaagagaacacagtcacagtagtacgtggtgtggtcaaacctgttctcccgggaagtctgccgaatagcaaacaagcgaacagaaagcgagctgcagaagaagcatttggtgccgaattggatcagtgggcccgaggctctgctagactgaggcaggagccttcgagtcgaccaccgtctttgaaagtacacgaagaggaggaaaataaacttctcttcgaaggccaagacgccctacctgagaaagaactccaagaacatcttgctgaagttttctttgacaatatctatggtcaagcttatcatttacttcacaaaccaagctatatgaggaaattgaaagcgggcactttgcccccagttctgatactgtctgtatgtgctgtttctgcccgattctctactcatccaaaattcggatcgtcagattgtttcttgcgtggcgaggaatgggcaaaacccgcacgagatatcgtcaccagtagatacgagtggcccaatatcacgatcctaacctgtcttttactacttggcctacacgaatttggcacttgccatggcggaagaagttggtctttagggggacaggctacccgtatggcttttgcattacaactgcacaaggacttagactatgatcccatgcgaccaacaccttcagctcaactgagcttcatagacagggagatcaggaggcggactatgtgggcttgcttcttgatggaccgctttaactcttccggaaccgatcgaccgatgttcgttaaagaggaaaccattaggatacagctgcccatcaaagaaaagctttttcagctcgatatgccagggcctacggaggatctggatggtcgcatacctcaccctgttccggacaacgagggtcagctatctaatgcaacagacaacatgggtgttgctgcctacatgatccgaaccatcgcattgtgggggaagattattagctttttgaatcaaggcggcaaggaacaggacgaacgcccaatgtggtataacgattcggattacgcaaacctgctaagccacgccgaagagtttcccaataagctccctgatggactaaagtataacgcggaaaatcttcatctacataaaactgaagggatggcaaaccaatttctctttttgcatatatcgatacaacagaatattctttttatgaatcgatttgccgtatcctcccccagcggtaactctcaagctgacgtcccccaacatttcattacacaagctggagccaaggctttcgctgcagcaaaccgcatttccgacttgctcaaagacgccgaagcttatatgataacagctccttttgttggctactgcgctttcctgtcaagcaccgtccacatcttcggaattttctccggaaacgcaacggtggaagtagcagcgaaaaggaacctcaccgtcaacgtcaaatttctgactaaaatgaagagatactggggcatgtttcacttcatggcagagaacttacgcgaccaatacaagacttgtgcggacgcagctcgccaaggagcgccagcgaacgaaagctctgcaccctcgcccattttccagtacggcgactggttcgatcggtacccacatggtgtgtcgcaagacccctatatcgaaacttcagccaagaagaaagaaaccggtgccgatgctgtgttagagcagaagtccgagctccatacggtcgaagagttcttcacgcagctctctcccccgccaagcacaagtgaggcacgggaggctgctggatcaactcgaccccctcttgcgaaacgcaaatcactggcaaagaagggcagtaactctcgcattgatcagcaacaacagctcgagcctcttctcaccaacttgggaggcgccagccttcctgaacagatccagcaacgtattcaacaagctcaacaacagcaggctcagcgtaacttccgtatgggcggacaggctacaggggctagcacattccacgcgctgcagaatgcccgagctagatcgcaagctgctaatgggtttcatgctctttccccgatctcacccatcatcggtgggtttccccatggatatcatggtcatggtcacggatatcccgggccactctacaatcaggaccttatctccttgtcgctatcaaaccaggcgggcatacttccacagctcgaccgccagctcgtgttcaatgcatacggagctttggatcccacaactatcagtgggccggaggcattgatggattgggatgcgttagcagggaatacatctggcaatgctgattcgggcagcgtccgcaattcatcgcgtaatgacgcatctggccacgatagcttccctgccggcttcgctccagaaccaagctctgcctggtttatgccatttaacattacgggagcattcattgacataaagacctcgatagtggagcccccagaattgggccatgacttagggaacggggcactcgataactttggcatgtttagccctaacacttcgcgtagaggtggacggtga

SEQ ID NO: 3037 - protein, 1111 aa, Muscodor strobelii
  misc_feature: SGI Peptide ID NO. 560659
  misc_feature (202)..(240): Pfam Id: PF00172 Pfam Desc: Fungal Zn(2)-Cys(6) binuclear cluster domain
  misc_feature (436)..(538): Pfam Id: PF04082 Pfam Desc: Fungal specific transcription factor domain
  misc_feature (166)..(853): NCBI GI: 238504008 Blast Desc: C6 transcription factor, [Aspergillus flavus NRRL3357] gi|220690707|gb|EED47056.1| C6 transcription factor, [Aspergillus flavus NRRL3357]
  misc_feature (109)..(914): NCBI GI: 169596967 Blast Desc: SNOG_01260 [Phaeosphaeria nodorum SN15] gi|111069789|gb|EAT90909.1| SNOG_01260 [Phaeosphaeria nodorum SN15]
  misc_feature (171)..(864): NCBI GI: 261197499 Blast Desc: C6 transcription factor [Ajellomyces dermatitidis SLH14081] gi|239595782|gb|EEQ78363.1| C6 transcription factor [Ajellomyces dermatitidis SLH14081]
  misc_feature (171)..(864): NCBI GI: 239606778 Blast Desc: C6 transcription factor [Ajellomyces dermatitidis ER-3]
  misc_feature (177)..(865): NCBI GI: 70990948 Blast Desc: C6 transcription factor [Aspergillus fumigatus Af293] gi|66847955|gb|EAL88285.1| C6 transcription factor, [Aspergillus fumigatus Af293]
  misc_feature (177)..(865): NCBI GI: 159130797 Blast Desc: C6 transcription factor, [Aspergillus fumigatus A1163]
  misc_feature (177)..(848): NCBI GI: 119496643 Blast Desc: C6 transcription factor, [Neosartorya fischeri NRRL 181] gi|119413257|gb|EAW23198.1| C6 transcription factor, [Neosartorya fischeri NRRL 181]
  misc_feature (184)..(903): NCBI GI: 67527638 Blast Desc: AN4096.2 [Aspergillus nidulans FGSC A4] gi|40740167|gb|EAA59357.1| AN4096.2 [Aspergillus nidulans FGSC A4] gi|259481314|tpe|CBF74715.1| TPA: Zn(II)2Cys6 transcription
  misc_feature (184)..(856): NCBI GI: 145254947 Blast Desc: An18g03530 [Aspergillus niger] gi|134084397|emb|CAK48736.1| protein product [Aspergillus niger]
  misc_feature (166)..(1069): NCBI GI: 212527874 Blast Desc: C6 transcription factor, [Penicillium marneffei ATCC 18224] gi|210073492|gb|EEA27579.1| C6 transcription factor, [Penicillium marneffei ATCC 18224]
MSPDQALQKRQPFSPDGANGTESTNEPEHQQSRPDTTDLNGFSLHEEQEDVDAEVVNSLLEPSQFPDFPFSFQDLPDNNPIVNLDDHAADLFANSATDATPLTGDREGSINSGPRNVILDRGQISHKKPCSIDASEDGSQESPHDGSNPLEDNLSDDFGLSTAITGDSTEISGKLKESKTDPTPAWSDLKTKAGKDRKRLPLACIACRRKKIRCSGEKPACKHCLRSRIPCVYKVTTRKAAPRTDYMAMLDKRLKRMEDRIIKIVPRSEQENTVTVVRGVVKPVLPGSLPNSKQANRKRAAEEAFGAELDQWARGSARLRQEPSSRPPSLKVHEEEENKLLFEGQDALPEKELQEHLAEVFFDNIYGQAYHLLHKPSYMRKLKAGTLPPVLILSVCAVSARFSTHPKFGSSDCFLRGEEWAKPARDIVTSRYEWPNITILTCLLLLGLHEFGTCHGGRSWSLGGQATRMAFALQLHKDLDYDPMRPTPSAQLSFIDREIRRRTMWACFLMDRFNSSGTDRPMFVKEETIRIQLPIKEKLFQLDMPGPTEDLDGRIPHPVPDNEGQLSNATDNMGVAAYMIRTIALWGKIISFLNQGGKEQDERPMWYNDSDYANLLSHAEEFPNKLPDGLKYNAENLHLHKTEGMANQFLFLHISIQQNILFMNRFAVSSPSGNSQADVPQHFITQAGAKAFAAANRISDLLKDAEAYMITAPFVGYCAFLSSTVHIFGIFSGNATVEVAAKRNLTVNVKFLTKMKRYWGMFHFMAENLRDQYKTCADAARQGAPANESSAPSPIFQYGDWFDRYPHGVSQDPYIETSAKKKETGADAVLEQKSELHTVEEFFTQLSPPPSTSEAREAAGSTRPPLAKRKSLAKKGSNSRIDQQQQLEPLLTNLGGASLPEQIQQRIQQAQQQQAQRNFRMGGQATGASTFHALQNARARSQAANGFHALSPISPIIGGFPHGYHGHGHGYPGPLYNQDLISLSLSNQAGILPQLDRQLVFNAYGALDPTTISGPEALMDWDALAGNTSGNADSGSVRNSSRNDASGHDSFPAGFAPEPSSAWFMPFNITGAFIDIKTSIVEPPELGHDLGNGALDNFGMFSPNTSRRGGR

SEQ ID NO: 3038 - DNA, 4863 bp, Muscodor strobelii
  misc_feature: SGI EST ID NO. CUFF.7546.0
  misc_feature: Variant of the nucleotide sequence at SEQ ID NO 3036
ccggctcagctccttccagacattcaaatatgatgcaactggtgtcgatggagatggcgaatgagaaaagatcagaaccggccagccctagatcttggtaggagttcctcaagaagctcatcctcctcatcaatctcgccgccccttgccgtacccattatgaacctggtctgtcaaaacacccataagcgcttacaagtgaacattcgccccgtaacatttctggggtaatcgtagccatttcagtgttcctcacactagtgttcatgttccccaaccttctcatcgatcttctccctgtctgcgtttctcacccacacgtgcctgctgctgtgctcggttcattgagcgttttccatctcaccgagacattctctccgagtacaatcttcttcgcctttccctaatacttgaacggaaacgtagtgagcgcggcaggttgattagtctaggcgctgccgtgagttcgggactgagttgccctggaatggttgtactctgtgtgcgatgagacctcgaatctggacaaccaaatagaggcataagggaaagccccgtacataagtcattgtcgactgtcgagtcttttgaagaggagctatcgttgtcctcatcttccccagctttgatcccgctggaccccacagcgcaagggtgattcccaacgctcatccgagtctccgcctccactaccggcgctcgagtcggggtgcttgactacgctgcggcaacttccacttcgctcttttctagacccgaggctgtctttggtctatggtggcagtccaatcctcttcatcgcaaaagtcatcctccatcatcatcctttatcgccgccttcgccgtccgaaccgccccttgatttcccaattccgcgccagcatgtcggctcaacattgacatcaccgtcaactgacatgacacgctccctacgctctccctgtcgctttctggtctcttaaattggactaccaagacagaactggccgaataccaaccattgcaactcgatgagtcggtgatcttgtctgccatcgtgcgcgggagaaggcatagttcttgaccaaaagctgtcgactaaagacgcttgtgcctcatatttcaagtttccacgaacacctctaccataagaggacaaatagtcacgtgtgacagcaatgtccccggatcaagcgcttcagaaaaggcagcctttctctcccgatggtgccaatggcacagaatctaccaatgaacccgaacatcaacaatcacgacccgatacaaccgacctgaatggtttctcactgcatgaagagcaggaagatgtcgatgctgaggtagtcaacagccttctcgaaccctcacagttcccggatttcccgttttcgtttcaagatctacccgacaacaatccaatcgtaaatctcgacgatcatgcagccgatctttttgccaactcagctactgatgctaccccattgactggagatagagaaggatcgataaactcggggccccgcaatgtcatactcgatagaggccagatttcgcacaaaaagccttgcagtatcgatgcatctgaggatggatcgcaagaaagtccgcacgacgggtccaaccccctcgaggacaatttgtctgacgactttggactttctaccgcaattacaggtgacagtactgagataagtgggaagttgaaggagagcaaaacagatcctacaccagcctggagcgatttgaaaactaaggcaggaaaggatagaaaacgattgccattggcatgcatagcttgtcggaggaagaaaattcgctgttcgggagagaagcctgcctgcaaacattgtcttcgttcgcgaataccatgtgtttacaaggtcacaactcggaaagcggcgcctaggacagactatatggctatgctggacaaaagactcaaaaggatggaagatcggatcatcaaaatcgtacctaggtcagagcaagagaacacagtcacagtagtacgtggtgtggtcaaacctgttctcccgggaagtctgccgaatagcaaacaagcgaacagaaagcgagctgcagaagaagcatttggtgccgaattggatcagtgggcccgaggctctgctagactgaggcaggagccttcgagtcgaccaccgtctttgaaagtacacgaagaggaggaaaataaacttctcttcgaaggccaagacgccctacctgagaaagaactccaagaacatcttgctgaagttttctttgacaatatctatggtcaagcttatcatttacttcacaaaccaagctatatgaggaaattgaaagcgggcactttgcccccagttctgatactgtctgtatgtgctgtttctgcccgattctctactcatccaaaattcggatcgtcagattgtttcttgcgtggcgaggaatgggcaaaacccgcacgagatatcgtcaccagtagatacgagtggcccaatatcacgatcctaacctgtcttttactacttggcctacacgaatttggcacttgccatggcggaagaagttggtctttagggggacaggctacccgtatggcttttgcattacaactgcacaaggacttagactatgatcccatgcgaccaacaccttcagctcaactgagcttcatagacagggagatcaggaggcggactatgtgggcttgcttcttgatggaccgctttaactcttccggaaccgatcgaccgatgttcgttaaagaggaaaccattaggatacagctgcccatcaaagaaaagctttttcagctcgatatgccagggcctacggaggatctggatggtcgcatacctcaccctgttccggacaacgagggtcagctatctaatgcaacagacaacatgggtgttgctgcctacatgatccgaaccatcgcattgtgggggaagattattagctttttgaatcaaggcggcaaggaacaggacgaacgcccaatgtggtataacgattcggattacgcaaacctgctaagccacgccgaagagtttcccaataagctccctgatggactaaagtataacgcggaaaatcttcatctacataaaactgaagggatggcaaaccaatttctctttttgcatatatcgatacaacagaatattctttttatgaatcgatttgccgtatcctcccccagcggtaactctcaagctgacgtcccccaacatttcattacacaagctggagccaaggctttcgctgcagcaaaccgcatttccgacttgctcaaagacgccgaagcttatatgataacagctccttttgttggctactgcgctttcctgtcaagcaccgtccacatcttcggaattttctccggaaacgcaacggtggaagtagcagcgaaaaggaacctcaccgtcaacgtcaaatttctgactaaaatgaagagatactggggcatgtttcacttcatggcagagaacttacgcgaccaatacaagacttgtgcggacgcagctcgccaaggagcgccagcgaacgaaagctctgcaccctcgcccattttccagtacggcgactggttcgatcggtacccacatggtgtgtcgcaagacccctatatcgaaacttcagccaagaagaaagaaaccggtgccgatgctgtgttagagcagaagtccgagctccatacggtcgaagagttcttcacgcagctctctcccccgccaagcacaagtgaggcacgggaggctgctggatcaactcgaccccctcttgcgaaacgcaaatcactggcaaagaagggcagtaactctcgcattgatcagcaacaacagctcgagcctcttctcaccaacttgggaggcgccagccttcctgaacagatccagcaacgtattcaacaagctcaacaacagcaggctcagcgtaacttccgtatgggcggacaggctacaggggctagcacattccacgcgctgcagaatgcccgagctagatcgcaagctgctaatgggtttcatgctctttccccgatctcacccatcatcggtgggtttccccatggatatcatggtcatggtcacggatatcccgggccactctacaatcaggaccttatctccttgtcgctatcaaaccaggcgggcatacttccacagctcgaccgccagctcgtgttcaatgcatacggagctttggatcccacaactatcagtgggccggaggcattgatggattgggatgcgttagcagggaatacatctggcaatgctgattcgggcagcgtccgcaattcatcgcgtaatgacgcatctggccacgatagcttccctgccggcttcgctccagaaccaagctctgcctggtttatgccatttaacatggagcccccagaattgggccatgacttagggaacggggcactcgataactttggcatgtttagccctaacacttcgcgtagaggtggacggtgataatgtcttctctttttgtgataccccggacgcttgctaggtggtgctttgtcttgaaatgatacctcttatttgtcatatatacacactattcctccatactacgacgactacgttttacatgcgaacgatgagttggattcctgcgtccttgcgtaagtgcaagtcggcaccgttcgggtcatggcagacacccgtacctgccttgtggatgcattacgttatatgaatacttgtacattgggataagcgtggatggatctagaaggcataattgtatgaagagagaacgacccagtaaattaggtagttcacttaggctgagtttctgaatgaaagtttggattccagatcagcattggtcagtatgaacagagttgagacaggctcatacttctcgtactag

SEQ ID NO: 3039 - DNA, 1227 bp, Muscodor strobelii
  misc_feature: SGI cDNA ID NO. 560660
  misc_feature: Elevated expression when VOC is produced
  misc_feature: Encodes the peptide sequence at SEQ ID NO 3040
atgccatggcacgagtcgttcacatatagatacgtcgtgacgtgttcgccgctagtcaccgaagggtacacgaccgaaatccatgacaataacgtctcatccgtccggtacaactatggcggcgctctcaccggtaatggcacagtcaacaactattcttttgagtccaccgatctagatacccaatgtcacgccctttcgcaaacatttggcggcgctcccatagtcagtacaggctatcttcttccaagcgcacctatgcaacgctcggatggcgatgtgtctatcttctttctatcaggcaacggtgtctacttcttcgactcgcctatggacgacgcctggtatcgcgcaacccgcttcgcccgccacgttacgggctcgggcaatctgaaccaaacgaagaatacatacatgcccacagaagccgccagtccgctggcctgcgtcgagcaacaccagtggtgtaataacgctcggggttgtggaccactcgccagccgtttcgatgccgcttccgagaatggtatcgggcggctcgtaggcgtgctaggtgctaagtcgctagagtcgcagaatcggcttgaaggcggcgtacagtatgcactacctgataaccagtggcaactagacgtgacaaattggtggaatgtatcactggctcagcttcagtctacctttgtgaggactgcgctggggtcagcaccatacaagtatgcaccacttaatcggcatgagcagaggctctgcaatagtcagaaaatacgcagtagcaactacacctcattctccgtattcgctctcctattcacgtacctagccagtgcactcatcatcacctgctccttcgtcgtcgagccagtcttggcttaccttgcgagacgatacaagtacaggcaatatcagtttctcgagtggactgcaaatgagtccctacagctgcaccgtctagctcaagaagccatcggacctgagaaatggacgggaggcgcgaacagagtgccgaccacgcgatcggataacttgcttgcggatattgatatcagtgatccacaccatcctgttctctctcgctcgaacatgattaaaatggttggttctgggggcaaacaagagtacggtcaagctgtccatcactatgatagggtagatcccatcagtcatgtagggccctctgctagagacccttcggggagcaagggcgatatcgaaggatcgaaaagctga

SEQ ID NO: 3040 - protein, 408 aa, Muscodor strobelii
  misc_feature: SGI Peptide ID NO. 560660
  misc_feature (2)..(356): NCBI GI: 189194015 Blast Desc: conserved [Pyrenophora tritici-repentis Pt-1C-BFP] gi|187978910|gb|EDU45536.1| conserved [Pyrenophora tritici-repentis Pt-1C-BFP]
  misc_feature (7)..(354): NCBI GI: 169615058 Blast Desc: SNOG_10683 [Phaeosphaeria nodorum SN15] gi|111060957|gb|EAT82077.1| SNOG_10683 [Phaeosphaeria nodorum SN15]
  misc_feature (2)..(361): NCBI GI: 115399382 Blast Desc: [Aspergillus terreus NIH2624] gi|114192163|gb|EAU33863.1| [Aspergillus terreus NIH2624]
  misc_feature (2)..(337): NCBI GI: 119474227 Blast Desc: NFIA_004500 [Neosartorya fischeri NRRL 181] gi|119407142|gb|EAW17092.1| conserved [Neosartorya fischeri NRRL 181]
  misc_feature (2)..(351): NCBI GI: 159128250 Blast Desc: conserved [Aspergillus fumigatus A1163]
  misc_feature (2)..(351): NCBI GI: 70986226 Blast Desc: conserved [Aspergillus fumigatus Af293] gi|66846236|gb|EAL86569.1| conserved [Aspergillus fumigatus Af293]
  misc_feature (9)..(323): NCBI GI: 121699395 Blast Desc: ACLA_082720 [Aspergillus clavatus NRRL 1] gi|119396149|gb|EAW06581.1| ACLA_082720 [Aspergillus clavatus NRRL 1]
  misc_feature (2)..(323): NCBI GI: 169772941 Blast Desc: [Aspergillus oryzae RIB40] gi|83768800|dbj|BAE58937.1| protein product [Aspergillus oryzae]
  misc_feature (2)..(348): NCBI GI: 256723662 Blast Desc: NECHADRAFT_86728 [Nectria haematococca mpVI 77-13-4]
  misc_feature (138)..(339): NCBI GI: 46116086 Blast Desc: FG03885.1 [Gibberella zeae PH-1]
  misc_feature: Useful for introducing or modulating the production of volatile compounds
MPWHESFTYRYVVTCSPLVTEGYTTEIHDNNVSSVRYNYGGALTGNGTVNNYSFESTDLDTQCHALSQTFGGAPIVSTGYLLPSAPMQRSDGDVSIFFLSGNGVYFFDSPMDDAWYRATRFARHVTGSGNLNQTKNTYMPTEAASPLACVEQHQWCNNARGCGPLASRFDAASENGIGRLVGVLGAKSLESQNRLEGGVQYALPDNQWQLDVTNWWNVSLAQLQSTFVRTALGSAPYKYAPLNRHEQRLCNSQKIRSSNYTSFSVFALLFTYLASALIITCSFVVEPVLAYLARRYKYRQYQFLEWTANESLQLHRLAQEAIGPEKWTGGANRVPTTRSDNLLADIDISDPHHPVLSRSNMIKMVGSGGKQEYGQAVHHYDRVDPISHVGPSARDPSGSKGDIEGSKS

SEQ ID NO: 3041 - DNA, 1205 bp, Muscodor strobelii
  misc_feature: SGI EST ID NO. CUFF.7553.0
  misc_feature: Variant of the nucleotide sequence at SEQ ID NO 3039
tgtctatcttctttctatcaggcaacggtgtctacttcttcgactcgcctatggacgacgcctggtatcgcgcaacccgcttcgcccgccacgttacgggctcgggcaatctgaaccaaacgaagaatacatacatgcccacagaagccgccagtccgctggcctgcgtcgagcaacaccagtggtgtaataacgctcggggttgtggaccactcgccagccgtttcgatgccgcgtacggagttgcggcgcttttcaacttgagtcaagaagctctggaccctctacggcctgtctctcaggacgctataggcacgtgattgatttggccgctgctgatggttctcagttccgagaatggtatcgggcggctcgtaggcgtgctaggtgctaagtcgctagagtcgcagaatcggcttgaaggcggcgtacagtatgcactacctgataaccagtggcaactagacgtgacaaattggtggaatgtatcactggctcagcttcagtctacctttgtgaggactgcgctggggtcagcaccatacaagtatgcaccacttaatcggcatgagcagaggctctgcaatagtcagaaaatacgcagtagcaactacacctcattctccgtattcgctctcctattcacgtacctagccagtgcactcatcatcacctgctccttcgtcgtcgagccagtcttggcttaccttgcgagacgatacaagtacaggcaatatcagtttctcgagtggactgcaaatgagtccctacagctgcaccgtctagctcaagaagccatcggacctgagaaatggacgggaggcgcgaacagagtgccgaccacgcgatcggataacttgcttgcggatattgatatcagtgatccacaccatcctgttctctctcgctcgaacatgattaaaatggttggttctgggggcaaacaagagtacggtcaagctgtccatcactatgatagggtagatcccatcagtcatgtagggccctctgctagagacccttcggggagcaagggcgatatcgaaggatcgaaaagctgactggaagagatgcggagtacgaatatcacaatatttagacttgcccagaacctaaaaaggacacagggaaaatgcctggttacatttgaacaatagtcagcgttattacctcgataagtcaactcttttcctggagaagttgag

SEQ ID NO: 3042 - DNA, 6333 bp, Muscodor strobelii
  misc_feature: SGI cDNA ID NO. 560661
  misc_feature: Encodes the peptide sequence at SEQ ID NO 3043
atggctccccttgtcgccaaacaggccgatgccattcggtctgccgtcacctctgcggcaacatgtaccccggcaacatccgctgctctaaaggaaatcctccagggcctcgataacaacaataatcacatctccaaacttcccaattcgacgttgcgaactacttcgaaagtcccctcgaaaacgagacctccaacagccaaaaagcaggcggccaaaccagctgcggcgcaagacagtggcgatgagttgagtgccaaggagaaggcagcactggctgtacaggttataaatgccactctcaaagctcttggggaggcagcaaaagcgtcatcctcagccgagtcaacgacacggccgatagccaagaatacaccggcaaagagcttaaagcgagctgccttgcggagatcgatttcggctccaaatacacctctacaccctcggcccttgaatcgagtcttgacttcccccggtacagcgaaaacgaaccaggctccattggctaacgcgagtgacggttgtctgccactcttggaatgcactcgtgtggcgtttacaacactcaggactctgcagtccacgggggcagtgcagctccctgatttgcagttggaatcgggcatgtcctcgctcgtaaacaagttaattgcgttgaagatgtacgatcaggcaataaaagacctgcgcgtactgaaaaagaggctggaatgctcagtatgcgcaagcagcagcaagaagacggacgtaccaagcgtcaatacgtgtagcccaccgaaaactttccccgatctcctagactaccctgcgatcacaacatctggaccccttcgaggcttcgtcattactgctcaactacaagctctgcaaatattgcatggtctcaaaaaattgtcgcatcttgaagcgacgttgcccttcctacgaaataccaactcctcctcacctttaagcttacttgtctcgtctgtggatgacagaacgacagatcgagtgaaagtcgcgagacagctggatactttgtcccaaatactcttgtctctaactccaagcctggcgcagaaggacgatggcattgcgtgtgagccgagactgagtccgagcccaagcagtgcactggaaatccaagcacttgggctagctgcgcgattggaatcatggcatatttcaagccacaagggggatgtaggcaaggaaattttgatacctctcagtgtttgcttgactgcctgcaagagaaggatctcgtgcgaagagagctcaattctcgaagcggtcttccagcagatttggagcaagatagaaacacggcggcttgggacgtcagattcagacacaactctcaccaccatataccaacttctggccagcgctgctcaggattctgggagacacaaagatgctaaacagtggacagtgaaattgagatctttggtcgatccccaacaaggctcggtaaccaagtgttgtgctgtcactgcacaattacttactctgtcattgaaagactcgctagaagtggacgaaaacttgatgttgcaagttttggaaggaatacaaggaaacttgagtggaagtacctcggagttgaacgatcttcttaccagtatacacaatctccggaaagctgtgattaatatcataaccaagcatcttgtacccacactcgatgcatcacattcggctcgggagcttcttgagaaattcatcttccatctacctcggtttgcctgcagatggctaggtaaaccaccggacttgaaggcagctacgaaagatcgacttcgattcgaacagcgacgtcaactcttggccacttgccaaaaatcctggctcgactcgacactgacccttaccaaaatacatttggaccaagatagatcaacatgggatgtaacggattcgactcttcaagagtgccttaccttgttagagtacatgggtgacactggctctcttgacgttgagaaacaccctgcaagctcctaccacgttaaaatctctcatctctactaccagcagtacctcttactccagaaattcgcaacaaaagatcaaggcgcaatttctctacgagccttgcgcaaatctatagactgtgtgaaaatgcagtcacagcctgaacagaccaaagcccaactcctcttcaaatgggaaaaattcatcgaattatgcatagcctctggcaggaaagactatgccattgaggcgctacgctccctgcgagaccacctagtccgacacgaagtggttgataccataactgccagccttgagagccaatcagttgtcaagtcttggcgcctcagcactgaagcagagatcctctcaaggactgtctgcaatctcgcgcggctggacaagaagcagagcgattggacttggctactttctggcaacaacaaagcaactgctttggagcatgacctatacttcatctctggtagtgacactccaagtcaacaaaacagaggagcagcagaaacgtcgaatgataaattgctgcagctatactctgtcgaaaatcaccctattagacgattccgagtgctattggtgctcttgatatcaaacattggtgtgcgagatgtattggatagatttcgaggcgagattgagacggtgtcttctgcccttgaaggcggacacttcgaggacgatactggtctcaaacactatcttccacatttgcgcagtctttcaatctgcactctgagcttggtcaatggcgaacttgagccatcgactattcttcgagctatatccgggtggaagtcgatactggccaggagcccatccgccgcccaactaggagattttatcgacgacgtgcctcgcatgctgagggttctcacgtcccttgcagacctcacccggatgaaggggtttcaaagtctcctgactgaaataatcgagctgtgcgttgtgatttctcgaacggtactcgatgacaatattgaactatacatatcgcatagtactgttctttccttacactaccttagtcttgggcagacgacccgggcggagaagatcttgacgacaatcatggagaagaccattcttcccaacgtctcgtgtgatactatctcgtatctgcatctctccgcggcggagttttaccttgctaccgaacatctcgacaaagttgaagaacacttaaccaaagcttgcgagctagccactggagcgtcaacccgaaatttcaaaaagagccaccgtgtgtacaataaaatcgctgttgcgcaagcgtcatttttgacctcaaatatggctcttgaaagaggagaggatcatcgtgctcttcaacttgctaaagctgctgtcaatatgttattccacgactggcaacaattacagccctgcttagactcttcaacagacacatctatggaaaccacgcaagatatctccgaagaagagctgagcttgaatgatagcatagttgggcttgataacacacgtactagcactggtcctgaattttgggccttggtgtatccactgtaccgattcgtatcacgactctcatcaatatacgcccacattggcatgtaccaagagacattgtattatgccgagcaagctcggaaagtggccgaaagtatggaatcgtcagcgttcatcgctgaagctacgatgtggctagcatctatctcgttgatggccggaaacacaatcaaatctaaggaactattcactgaattagagtctatgctactcgctgccgagccgacttactccatcgctaccgaaatatgccgagcagcttttgtttaccaaggaatagatgaggtaaaacatgcggaagagctgatatcgaaagcgaattcgatgttggaggcgctcgaggaatacgctaaaatcgacgccagcgtaatcgagaacgatctggaggacggcatggcaaacctcaaaatatcagaagcaacattggcagcccctgcttcgaaaccttcgcgagtctcaaagaaaaatatcgtcaagaaggtgcctaccaagggaaagcatgattcgaaaaagattgtgtctgtctctaggaaagaagatgtgcagctcagatcattacatgcttctatcctccaactgcaatctataactcttctgactaatgaaaactggaatggcgctattactgcgctacaaagcgcagctcaactctccgcaatgtcttcgggtcttctgcaagaacatctgtacctggggcggagtttaattggcaagagtcttgagcaaatggggagtgattctattttctctttcatccaagactctactctttcgttcccttccgtagccgtagccgtgagagacaaaggctctgcttctcagtcggtatcggtcaaaatatccccagttgggaaacatcgcttatctatcgaggacgggcgaagctttgtcgagaatttacagaatgcccaaaagcatctactcagagcccattctatcgcaatactgagtggtaatggtgctattgtgcaccagatcgcggttgtactgcagaacgttgcgatcctccttctgaacaccgactgctcggtttctggcacaggacttccggcatatgccacatgctcggtggaactggcacgcaacctaacgtggcgacgcgaacgcaaagcgaatagcgaggctatcatcagcggctccaagaccgcctggcccatagttgttggaagtaacagtacgcgacgcttaagcctcgatctttgcacggatttgaaccgattcaatagggaatacatcgatatcatacccaaagcatggaatgtattttcggtatcattaagcgagaataagaatgatctttgcatcaccaagttgcaagctggtttcagtccttttgccttgcgtcttccgctggaaagggcaaattctcgagatgctgataccgaaatatttgatttccaacaaggccgatctgagcttattgagatcatacaaatggcaaatcgcaattgtcacgatgccagagatatgacacagactgagtccaaatcaaagtggtgggcggagcgtgaagagctggacggccgcctcaagcagcttctcgataacattgatgagacttggcttggcggctttagaggcattttctcccaacatcgcaagcgtcctgacctcttagcaagacttcaaaaaactttccaaaacatactcgagaaatatctgccatctcggcgtccaactcgaggcaaaaagttgaaaatggctcctccgaaggtgaatctcgacactaggattttagatctattcattggattgggtgacgcaactgagcctgattgcgacctagatgagcctttgacagatttgctctactttgttgtggacgtgctgcagtttcatggcgaacctaatgcctatgacgaaatcgattttgatgccatggtcattgacacttttgatgcgctacactcctatcacagcgcagccaaagatgcgaaatccacacacaaggaggaagagtcgtcacacacaatcttgattctcgataaatctctccatattttcccttgggagtcgctcccttgtctctttggcaaggctgtatctcgtatgccctccctagattgtctacgacgatcgattttggaatcacgagcaccacctgctgcaccacaatatcctacatctagttcaagcagggatgacgagggaattgtttctggacctcgcgctggccatcatgtttcaatcaactccggcacatacatcctgaacccgggcgtagacctgacgaatacgcaagcaacattcggtcgcccactatcctcgttgccaccagcatggtctagcattgagacacgagagccaaacgaaaaagaattccaatccgcattgaccgatcgtgatattcttctttattttggacacggctcgggcgcacagtatatccgtagtcgcacaatccggcgactggaaaaatgccgcaccacggccttactcatgggatgcagctcggcatcccttactcatgctggcgattttgagccttatgggcctgtctggaattacatgcttgcaggtgcaccagccgtcgtgggcacactttgggatgttaccgaccgggacatcgaccgcttcacaggctgtgtcttcgagggatggggtctcttgccccgtggtacgtttggcgaagagaaggaaaagggaagagctaggtcaaaaaccacaggtgggaggaagaaggctaaagccttggaggacaaaactatggcactgagcctcgtcgaggctgtggcaaaagctcgcattgacacttgtcggttcaagtatctaactgcggctgctgtgtgtgtttatggcatacctgtctttatcagcgagtga

SEQ ID NO: 3043 - protein, 2110 aa, Muscodor strobelii
  misc_feature: SGI Peptide ID NO. 560661
  misc_feature (1591)..(2026): Pfam Id: PF03568 Pfam Desc: Peptidase family C50
  misc_feature (1591)..(1862): Pfam Id: PF03568 Pfam Desc: Peptidase family C50
  misc_feature (1897)..(2026): Pfam Id: PF03568 Pfam Desc: Peptidase family C50
  misc_feature (8)..(2041): NCBI GI: 116191877 Blast Desc: CHGG_05656 [Chaetomium globosum CBS 148.51] gi|88181569|gb|EAQ89037.1| CHGG_05656 [Chaetomium globosum CBS 148.51]
  misc_feature (5)..(2110): NCBI GI: 85080717 Blast Desc: NCU00205 [Neurospora crassa OR74A] gi|28917660|gb|EAA27354.1| [Neurospora crassa OR74A]
  misc_feature (21)..(2097): NCBI GI: 171686934 Blast Desc: protein product [Podospora anserina] gi|170943428|emb|CAP69081.1| protein product [Podospora anserina]
  misc_feature (83)..(2108): NCBI GI: 46122253 Blast Desc: FG05504.1 [Gibberella zeae PH-1]
  misc_feature (67)..(2108): NCBI GI: 256729704 Blast Desc: NECHADRAFT_46823 [Nectria haematococca mpVI 77-13-4]
  misc_feature (42)..(2099): NCBI GI: 261358209 Blast Desc: separin [Verticillium albo-atrum VaMs.102]
  misc_feature (77)..(2110): NCBI GI: 156051870 Blast Desc: SS1G_07342 [Sclerotinia sclerotiorum 1980] gi|154705120|gb|EDO04859.1| SS1G_07342 [Sclerotinia sclerotiorum 1980]
  misc_feature (7)..(2110): NCBI GI: 154315354 Blast Desc: BC1G_04716 [Botryotinia fuckeliana B05.10] gi|150847679|gb|EDN22872.1| BC1G_04716 [Botryotinia fuckeliana B05.10]
  misc_feature (832)..(2110): NCBI GI: 145608948 Blast Desc: MGG_06245 [Magnaporthe grisea 70-15] gi|145016362|gb|EDK00852.1| MGG_06245 [Magnaporthe grisea 70-15]
  misc_feature (10)..(2108): NCBI GI: 70997872 Blast Desc: separin [Aspergillus fumigatus Af293] gi|66851304|gb|EAL91630.1| separin, [Aspergillus fumigatus Af293]
  misc_feature (833)..(2108): SWISSPROT Homolog: EC 3.4.22.49 Separase
MAPLVAKQADAIRSAVTSAATCTPATSAALKEILQGLDNNNNHISKLPNSTLRTTSKVPSKTRPPTAKKQAAKPAAAQDSGDELSAKEKAALAVQVINATLKALGEAAKASSSAESTTRPIAKNTPAKSLKRAALRRSISAPNTPLHPRPLNRVLTSPGTAKTNQAPLANASDGCLPLLECTRVAFTTLRTLQSTGAVQLPDLQLESGMSSLVNKLIALKMYDQAIKDLRVLKKRLECSVCASSSKKTDVPSVNTCSPPKTFPDLLDYPAITTSGPLRGFVITAQLQALQILHGLKKLSHLEATLPFLRNTNSSSPLSLLVSSVDDRTTDRVKVARQLDTLSQILLSLTPSLAQKDDGIACEPRLSPSPSSALEIQALGLAARLESWHISSHKGDVGKEILIPLSVCLTACKRRISCEESSILEAVFQQIWSKIETRRLGTSDSDTTLTTIYQLLASAAQDSGRHKDAKQWTVKLRSLVDPQQGSVTKCCAVTAQLLTLSLKDSLEVDENLMLQVLEGIQGNLSGSTSELNDLLTSIHNLRKAVINIITKHLVPTLDASHSARELLEKFIFHLPRFACRWLGKPPDLKAATKDRLRFEQRRQLLATCQKSWLDSTLTLTKIHLDQDRSTWDVTDSTLQECLTLLEYMGDTGSLDVEKHPASSYHVKISHLYYQQYLLLQKFATKDQGAISLRALRKSIDCVKMQSQPEQTKAQLLFKWEKFIELCIASGRKDYAIEALRSLRDHLVRHEVVDTITASLESQSVVKSWRLSTEAEILSRTVCNLARLDKKQSDWTWLLSGNNKATALEHDLYFISGSDTPSQQNRGAAETSNDKLLQLYSVENHPIRRFRVLLVLLISNIGVRDVLDRFRGEIETVSSALEGGHFEDDTGLKHYLPHLRSLSICTLSLVNGELEPSTILRAISGWKSILARSPSAAQLGDFIDDVPRMLRVLTSLADLTRMKGFQSLLTEIIELCVVISRTVLDDNIELYISHSTVLSLHYLSLGQTTRAEKILTTIMEKTILPNVSCDTISYLHLSAAEFYLATEHLDKVEEHLTKACELATGASTRNFKKSHRVYNKIAVAQASFLTSNMALERGEDHRALQLAKAAVNMLFHDWQQLQPCLDSSTDTSMETTQDISEEELSLNDSIVGLDNTRTSTGPEFWALVYPLYRFVSRLSSIYAHIGMYQETLYYAEQARKVAESMESSAFIAEATMWLASISLMAGNTIKSKELFTELESMLLAAEPTYSIATEICRAAFVYQGIDEVKHAEELISKANSMLEALEEYAKIDASVIENDLEDGMANLKISEATLAAPASKPSRVSKKNIVKKVPTKGKHDSKKIVSVSRKEDVQLRSLHASILQLQSITLLTNENWNGAITALQSAAQLSAMSSGLLQEHLYLGRSLIGKSLEQMGSDSIFSFIQDSTLSFPSVAVAVRDKGSASQSVSVKISPVGKHRLSIEDGRSFVENLQNAQKHLLRAHSIAILSGNGAIVHQIAVVLQNVAILLLNTDCSVSGTGLPAYATCSVELARNLTWRRERKANSEAIISGSKTAWPIVVGSNSTRRLSLDLCTDLNRFNREYIDIIPKAWNVFSVSLSENKNDLCITKLQAGFSPFALRLPLERANSRDADTEIFDFQQGRSELIEIIQMANRNCHDARDMTQTESKSKWWAEREELDGRLKQLLDNIDETWLGGFRGIFSQHRKRPDLLARLQKTFQNILEKYLPSRRPTRGKKLKMAPPKVNLDTRILDLFIGLGDATEPDCDLDEPLTDLLYFVVDVLQFHGEPNAYDEIDFDAMVIDTFDALHSYHSAAKDAKSTHKEEESSHTILILDKSLHIFPWESLPCLFGKAVSRMPSLDCLRRSILESRAPPAAPQYPTSSSSRDDEGIVSGPRAGHHVSINSGTYILNPGVDLTNTQATFGRPLSSLPPAWSSIETREPNEKEFQSALTDRDILLYFGHGSGAQYIRSRTIRRLEKCRTTALLMGCSSASLTHAGDFEPYGPVWNYMLAGAPAVVGTLWDVTDRDIDRFTGCVFEGWGLLPRGTFGEEKEKGRARSKTTGGRKKAKALEDKTMALSLVEAVAKARIDTCRFKYLTAAAVCVYGIPVFISE

SEQ ID NO: 3044 - DNA, 2576 bp, Muscodor strobelii
  misc_feature: SGI EST ID NO. CUFF.7558.0
  misc_feature: Variant of the nucleotide sequence at SEQ ID NO 3042
gtgcagctcagatcattacatgcttctatcctccaactgcaatctataactcttctgactaatgaaaactggaatggcgctattactgcgctacaaagcgcagctcaactctccgcaatgtcttcgggtcttctgcaagaacatctgtacctggggcggagtttaattggcaagagtcttgagcaaatggggagtgattctattttctctttcatccaagactctactctttcgttcccttccgtagccgtagccgtgagagacaaaggctctgcttctcagtcggtatcggtcaaaatatccccagttgggaaacatcgcttatctatcgaggacgggcgaagctttgtcgagaatttacagaatgcccaaaagcatctactcagagcccattctatcgcaatactgagtggtaatggtgctattgtgcaccagatcgcggttgtactgcagaacgttgcgatcctccttctgaacaccgactgctcggtttctggcacaggacttccggcatatgccacatgctcggtggaactggcacgcaacctaacgtggcgacgcgaacgcaaagcgaatagcgaggctatcatcagcggctccaagaccgcctggcccatagttgttggaagtaacagtacgcgacgcttaagcctcgatctttgcacggatttgaaccgattcaatagggaatacatcgatatcatacccaaagcatggaatgtattttcggtatcattaagcgagaataagaatgatctttgcatcaccaagttgcaagctggtttcagtccttttgccttgcgtcttccgctggaaagggcaaattctcgagatgctgataccgaaatatttgatttccaacaaggccgatctgagcttattgagatcatacaaatggcaaatcgcaattgtcacgatgccagagatatgacacagactgagtccaaatcaaagtggtgggcggagcgtgaagagctggacggccgcctcaagcagcttctcgataacattgatgagacttggcttggcggctttagaggcattttctcccaacatcgcaagcgtcctgacctcttagcaagacttcaaaaaactttccaaaacatactcgagaaatatctgccatctcggcgtccaactcgaggcaaaaagttgaaaatggctcctccgaaggtgaatctcgacactaggattttagatctattcattggattgggtgacgcaactgagcctgattgcgacctagatgagcctttgacagatttgctctactttgttgtggacgtgctgcagtttcatggcgaacctaatgcctatgacgaaatcgattttgatgccatggtcattgacacttttgatgcgctacactcctatcacagcgcagccaaagatgcgaaatccacacacaaggaggaagagtcgtcacacacaatcttgattctcgataaatctctccatattttcccttgggagtcgctcccttgtctctttggcaaggctgtatctcgtatgccctccctagattgtctacgacgatcgattttggaatcacgagcaccacctgctgcaccacaatatcctacatctagttcaagcagggatgacgagggaattgtttctggacctcgcgctggccatcatgtttcaatcaactccggcacatacatcctgaacccgggcgtagacctgacgaatacgcaagcaacattcggtcgcccactatcctcgttgccaccagcatggtctagcattgagacacgagagccaaacgaaaaagaattccaatccgcattgaccgatcgtgatattcttctttattttggacacggctcgggcgcacagtatatccgtagtcgcacaatccggcgactggaaaaatgccgcaccacggccttactcatgggatgcagctcggcatcccttactcatgctggcgattttgagccttatgggcctgtctggaattacatgcttgcaggtgcaccagccgtcgtgggcacactttgggatgttaccgaccgggacatcgaccgcttcacaggctgtgtcttcgagggatggggtctcttgccccgtggtacgtttggcgaagagaaggaaaagggaagagctaggtcaaaaaccacaggtgggaggaagaaggctaaagccttggaggacaaaactatggcactgagcctcgtcgaggctgtggcaaaagctcgcattgacacttgtcggttcaagtatctaactgcggctgctgtgtgtgtttatggcatacctgtctttatcagcgagtgaggggcataaaggcaattgttgcattttcaaaggcatgttggagactgtatcctgcattgcgaggagttctcgtcctgtttaccttcctgctagtgatcgatacttggttttagaatggtgttgttgatacccgagtgcagttaatgttgaatatagagatatcttcatgcacctgtgcttcacattccactcttgttattagtagtattgctgggtgatacgtgtctcaatgacgacgcacagggagcacactgtcattggtctcgcatatatgtgtgagaggtggattgatc

SEQ ID NO: 3045 - DNA, 666 bp, Muscodor strobelii
  misc_feature: SGI cDNA ID NO. 560662
  misc_feature: Encodes the peptide sequence at SEQ ID NO 3046
atgggaagctcaatcggccagcgagccgtaaaggcaatcagccttgtcccacccgccagaatcgccagaatccctacgaccacctgcctcttccgccaccagcagcttcgatgccagagctctgtcccgaccatcgcccagacttctttctggaaatccatgatccccaagcctctgcgccccaaacccaagtctaccgtcgattggggtgtcccagaagaggggctccccagacagaagaaacccaaggcgaaggcaaagagctggaatcctgccactttcttcatcgtcatatttctcttcattggctctaatgccatccagatgatagctctgaagaaggactatgcgacattcatgcgacgcgccgaggtccgcatcggtctactccgcgaggttgtcgagaagctgcagagcgggcaggacgttgatgttgagaaggctctgggcaccggtgatgccgagaaggagaaggactgggaagaggtgttgaaggccattgagcaagacgaagtgctcaagagcacgggtaaagctgctacaagcgaacctgtgtctctttcaccggcaacgtcgagccaaccggaacgtgcttcaacatcatcatccgataattccactacgcctgcacgatccaagcccaccaacttctcaagcttcttctag

SEQ ID NO: 3046 - protein, 221 aa, Muscodor strobelii
  misc_feature: SGI Peptide ID NO. 560662
  misc_feature (11)..(183): NCBI GI: 145237488 Blast Desc: An07g03080 [Aspergillus niger] gi|134075863|emb|CAL00242.1| [Aspergillus niger]
  misc_feature (44)..(170): NCBI GI: 171686936 Blast Desc: protein product [Podospora anserina] gi|170943429|emb|CAP69082.1| protein product [Podospora anserina]
  misc_feature (39)..(204): NCBI GI: 154315356 Blast Desc: BC1G_04717 [Botryotinia fuckeliana B05.10] gi|150847680|gb|EDN22873.1| BC1G_04717 [Botryotinia fuckeliana B05.10]
  misc_feature (20)..(210): NCBI GI: 242803844 Blast Desc: conserved [Talaromyces stipitatus ATCC 10500] gi|218717600|gb|EED17021.1| conserved [Talaromyces stipitatus ATCC 10500]
  misc_feature (83)..(221): NCBI GI: 145608946 Blast Desc: MGG_12876 [Magnaporthe grisea 70-15] gi|145016361|gb|EDK00851.1| MGG_12876 [Magnaporthe grisea 70-15]
  misc_feature (36)..(171): NCBI GI: 212539716 Blast Desc: conserved [Penicillium marneffei ATCC 18224] gi|210067312|gb|EEA21404.1| conserved [Penicillium marneffei ATCC 18224]
  misc_feature (14)..(173): NCBI GI: 67903594 Blast Desc: AN8784.2 [Aspergillus nidulans FGSC A4] gi|40741387|gb|EAA60577.1| AN8784.2 [Aspergillus nidulans FGSC A4] gi|259483010|tpe|CBF78026.1| TPA: [Aspergillus nidulans FGSC
  misc_feature (85)..(173): NCBI GI: 164428933 Blast Desc: NCU00204 [Neurospora crassa OR74A] gi|157072341|gb|EAA27353.2| [Neurospora crassa OR74A]
  misc_feature (15)..(216): NCBI GI: 226279077 Blast Desc: conserved [Paracoccidioides brasiliensis Pb01]
  misc_feature (42)..(216): NCBI GI: 255931743 Blast Desc: Pc12g05840 [Penicillium chrysogenum Wisconsin 54-1255] gi|211582047|emb|CAP80211.1| Pc12g05840 [Penicillium chrysogenum Wisconsin 54-1255]
MGSSIGQRAVKAISLVPPARIARIPTTTCLFRHQQLRCQSSVPTIAQTSFWKSMIPKPLRPKPKSTVDWGVPEEGLPRQKKPKAKAKSWNPATFFIVIFLFIGSNAIQMIALKKDYATFMRRAEVRIGLLREVVEKLQSGQDVDVEKALGTGDAEKEKDWEEVLKAIEQDEVLKSTGKAATSEPVSLSPATSSQPERASTSSSDNSTTPARSKPTNFSSFF

SEQ ID NO: 3047 - DNA, 4950 bp, Muscodor strobelii
  misc_feature: SGI EST ID NO. CUFF.7576.0
  misc_feature: Variant of the nucleotide sequence at SEQ ID NO 3045
tgcatgtccaatctccagcatctcagattactgcatcgaaaagacttgctagaccgcatagcctatcatcttcaacaccgaactacatttactaaggtcggctcagataatcagctatcatgggaagctcaatcggccagcgagccgtaaaggcaatcagccttgtcccacccgccagaatcgccagaatccctacgaccacctgcctcttccgccaccagcagcttcgatgccagagctctgtcccgaccatcgcccagacttctttctggaaatccatgatccccaagcctctgcgccccaaacccaagtctaccgtcgattggggtgtcccagaagaggggctccccagacagaagaaacccaaggcgaaggcaaagagctggaatcctgccactttcttcatcgtcatatttctcttcattggctctaatgccatccagatgatagctctgaagaaggactatgcgacattcatgcgacgcgccgaggtccgcatcggtctactccgcgaggttgtcgagaagctgcagagcgggcaggacgttgatgttgagaaggctctgggcaccggtgatgccgagaaggagaaggactgggaagaggtgttgaaggccattgagcaagacgaagtgctcaagagcacgggtaaagctgctacaagcgaacctgtgtctctttcaccggcaacgtcgagccaaccggaacgtgcttcaacatcatcatccgataattccactacgcctgcacgatccaagcccaccaacttctcaagcttcttctagattagacgaggaatttcgctgccctagttgaccgcctggctatatacaataaaatcgtcgacggcatgacttctgacatgatacctgagcctgcttgccctctcccctatatcccttgtgtggctcaggcttctccagtgaggccgatggttgactgttgccgcaacgtttccactacggctggtaacaagtcacctgtaggtatctctatccttgcccccaactcaccacgttggtccggattgagtccagcaaacagtgcatcctcgcccctcactccgcccagattgataacagcaatcggcatgccttggtccttggctcgctgagccaacctccaggcagaataagtcgctaaagacgtgcccataacgagaagtctgtcggcattgtcaatggccgtctctgcatcggtcttgaccgcactacgtatgctctctccgaacatgacgacggccggtttgagaatcccggccgtacttgtaggatgccaagccccatccgagtctagatgcacagatgcacgagagccgtcgtctaggactggggggctggccaagcatgttgggcacgaaggatagcgaaatgtttgataagaggctcccggaaggtcaacatcaccgtcaggattcattttcatgcctcgggcgcgtctctcatctgggctttctgtatccaaggcgccggagaccaggatcttctgcaggaaatcagcccatgctggattgagtctcgccaactcttcttgaaagagatctcgggatagctcttggtgacatgacgtgcagacacaggatcttaaatagccatgtagctcgacggtgggaatttgcatcccgactttcgagtggaaagaatcaacattttgagtaataacactccgaactagacctaaatcgctcagatccttcacagcgtagtgagtcgcgtttggcctcgccttgtgtaatgttgtccaacctatactagtatatgggattatgttagtcattattgacattgtatgtagtctgtgatcaaacggtgccgttccagaattgccgggcctatgctaagattttagtcgaaacacattgctactcactatggggaaaattagcatgaatccttatacaaacagattgcccttaggaccacgaaagaacatgattttatacgtgccaaacttcttgcccagtagcgctgccgagcctcgtggcttttaacaaattcggggtagtagatgggacggtaggtcttgttcacgcgatatgtgcctttggttcccctatagtctgcaagtccactggcgacagaaatcccggcgccggtcagaaccagagcacggggcgtgcggcctcccgatgtcgacggagccgttaggaatgcatggagagccgcaagtgcgccaggcagggagacggcacttctcggaataattgctggtgctggtagaacgtccgtgtagggtattcgcatataaggctttttcatttccaatatctcaggggtccaagtccaccaggctcaagaattaagggacgcgcatgcaatacaacagacactgtctattggaggaagtttgagagcaataacaagacaagatcgaagcttggttatggtgtagctgcacggtaagggacttgctgaattaggcactgactctgagagactaatgtggatttccatactgttagatgcccaggtgagcttagcttagatgattctgacattattcacatttgaggcaagtcgatgaagtcatcatcagcctcaagagagacgtggggagtcctggtggcttgggccgctgaaagaacaacgggggtgacaacctgaccattggaattcaatgaagtactaaacattactcgagcgcagatacgtgctgcgcgctagcgagggaggctcttcggagacgcgcgtagacatacatatatatgtggtgacttaagtaactagggcgaacgaatagtagacggctgtctcatgtttcagaatggcgaacggtgcaccaagccggtcgggacctggcctgggatcattgtgggatgatgctttgcaatggctgtggtcagtcgccagtctcgactcttgccagtggaatctgcaaagcctggcggcaccggccagtttgggacgttccgatgtttccctttcacatacatacaagctatctgtaccccaagacaccatttccccctggtgcgcgccctggcccgacttgatcgaattggaaaaacgtgtcttgaagcccttgcgtagctgtatgacgatctgccgctccatggtgctgctacgttattacgcgtcctagccgtgaagcatcaatatcgccgttgagggccgtttcagtccaatcacccttatgttggcgcaatgtaggccgagctttggccgcccaaatctttcttttgcggctggctttcgtcccgccgcgcaactcgtaccgcacctgcagccactgcgcgaaaccacagctacatcccaccaacaccaccgcagccaccacattcgttctcccttaaggacacatcgactgctgcgcaaccatctgcagcagcgccgtgtctttctaacctccagtctttctcccacatcattgccgttcactcttccactcccaagctcttttgtggacacacgctctttacttgtacgctctgtgccagccatggcttcggtcactcagacaagaagccacagcggccatcatcaccatcaccaccacgacaatgtttacctcacctcaagcaacaagaacgacgcaggtgtgcgcatcaccaggataggcctctactccaacttaggcatggccattgccaaattcgcaggtggttatcttttcaattcgcaagctatgatcgccgatgccttccacagcgtcaccgacttggcctccgactttctcacgcttttcaccatatcctggagcatcaagccgccgacagacaaatacccacaaggcttcggcaaaatcgagtctcttggctccctgggcgtgtctagtatgctgctatttggtggcggctggatgttttacagcagtctcttaacactctacgggcattttttcctagaccctgcggctgctgttgagctggctgcccacgtgcattcgcattcccacgcacatgaccacgcagatgtcgtcccaagtttgcatgcagcgtggctagccgcaggtactgtggcagtcaaagagtggctctatcaggccacaatgaaagtcgctcgtgaaagaaagtcttccgtcttggcctccaatgccgtccaccatcgaatcgacagtctcaccggcatcgtgactctcgcagtcattcttggagccaacataatgcaaaatgctgcctggctggatcctgtaggcggcctactgatctcgcttatggtcgtcaaggcaggcgctgagaacactctgtcttcgctccttgagcttgcagataaggccattgatgacgaggttaaatcctcgattcgaaaacaggtgcagaaggcatctgccgacatggctgaaagtcaaaatattgaattgcgcgacgtgtcgggcatcaaatctggacaaaactatctggtcgatctagaagtggctgttcctggcggctggacagtcgaagatgtgagagaggtggaggaaaagatcagaactagggttggaagcaaggtgcgaggtgttcgaaaggtgcgcgtccgattcgtaccgaaggagggcacagcactacctaagttcgatgaatttataccaggtgatattagccctaagtcaagtccagagcctgaagcagaagatggccatcaccacaacggcgatgcagctcaccggaaatctgagtagtcttctatatagaacattttggcacaaatggcgttcgggcgttggttagtgtcgcagtcaaaagagataccacattatgcgaactgaatctcaatagcaaggttctattgggagtgtgggcaatattgtagaacaagatgcaatgtcttctcgaagagagaccactataaaataggacagtccaatccaagaatttgagaggacgttgaacaaggagttttggggaaaccttttccgatacccaacgacagctcgtctcaaaacgtgatattgtgacaacacaacctctagctgggatgaggccagacaaagggaatgtggcagagtagatttcaagctgcttcatcatgg

SEQ ID NO: 3048 - DNA, 1152 bp, Muscodor strobelii
  misc_feature: SGI cDNA ID NO. 560663
  misc_feature: Encodes the peptide sequence at SEQ ID NO 3049
atgaaaaagccttatatgcgaataccctacacggacgttctaccagcaccagcaattattccgagaagtgccgtctccctgcctggcgcacttgcggctctccatgcattcctaacggctccgtcgacatcgggaggccgcacgccccgtgctctggttctgaccggcgccgggatttctgtcgccagtggacttgcagactataggggaaccaaaggcacatatcgcgtgaacaagacctaccgtcccatctactaccccgaatttgttaaaagccacgaggctcggcagcgctactgggcaagaagtttggcacgttggacaacattacacaaggcgaggccaaacgcgactcactacgctgtgaaggatctgagcgatttaggtctagttcggagtgttattactcaaaatgttgattctttccactcgaaagtcgggatgcaaattcccaccgtcgagctacatggctatttaagatcctgtgtctgcacgtcatgtcaccaagagctatcccgagatctctttcaagaagagttggcgagactcaatccagcatgggctgatttcctgcagaagatcctggtctccggcgccttggatacagaaagcccagatgagagacgcgcccgaggcatgaaaatgaatcctgacggtgatgttgaccttccgggagcctcttatcaaacatttcgctatccttcgtgcccaacatgcttggccagccccccagtcctagacgacggctctcgtgcatctgtgcatctagactcggatggggcttggcatcctacaagtacggccgggattctcaaaccggccgtcgtcatgttcggagagagcatacgtagtgcggtcaagaccgatgcagagacggccattgacaatgccgacagacttctcgttatgggcacgtctttagcgacttattctgcctggaggttggctcagcgagccaaggaccaaggcatgccgattgctgttatcaatctgggcggagtgaggggcgaggatgcactgtttgctggactcaatccggaccaacgtggtgagttgggggcaaggatagagatacctacaggtgacttgttaccagccgtagtggaaacgttgcggcaacagtcaaccatcggcctcactggagaagcctga

SEQ ID NO: 3049 - protein, 383 aa, Muscodor strobelii
  misc_feature: SGI Peptide ID NO. 560663
  misc_feature (56)..(311): Pfam Id: PF02146 Pfam Desc: Sir2 family
  misc_feature (1)..(373): NCBI GI: 116191875 Blast Desc: CHGG_05655 [Chaetomium globosum CBS 148.51] gi|88181568|gb|EAQ89036.1| CHGG_05655 [Chaetomium globosum CBS 148.51]
  misc_feature (1)..(373): NCBI GI: 171686938 Blast Desc: protein product [Podospora anserina] gi|170943430|emb|CAP69083.1| protein product [Podospora anserina]
  misc_feature (1)..(376): NCBI GI: 39976687 Blast Desc: MGG_06246 [Magnaporthe grisea 70-15] gi|145016360|gb|EDK00850.1| MGG_06246 [Magnaporthe grisea 70-15]
  misc_feature (40)..(380): NCBI GI: 156051868 Blast Desc: SS1G_07341 [Sclerotinia sclerotiorum 1980] gi|154705119|gb|EDO04858.1| SS1G_07341 [Sclerotinia sclerotiorum 1980]
  misc_feature (1)..(371): NCBI GI: 115432972 Blast Desc: ATEG_08002 [Aspergillus terreus NIH2624] gi|114189475|gb|EAU31175.1| ATEG_08002 [Aspergillus terreus NIH2624]
  misc_feature (1)..(341): NCBI GI: 121718173 Blast Desc: Sir2 family transcriptional regulator, [Aspergillus clavatus NRRL 1] gi|119404319|gb|EAW14695.1| Sir2 family transcriptional regulator, [Aspergillus clavatus NRRL 1]
  misc_feature (1)..(371): NCBI GI: 70984852 Blast Desc: SIR2 family histone deacetylase [Aspergillus fumigatus Af293] gi|66845560|gb|EAL85894.1| SIR2 family histone deacetylase, [Aspergillus fumigatus Af293] SIR2 family histone
  misc_feature (1)..(347): NCBI GI: 169776589 Blast Desc: [Aspergillus oryzae RIB40] gi|83771496|dbj|BAE61628.1| protein product [Aspergillus oryzae]
  misc_feature (1)..(347): NCBI GI: 238503307 Blast Desc: SIR2 family histone deacetylase, [Aspergillus flavus NRRL3357] gi|220691697|gb|EED48045.1| SIR2 family histone deacetylase, [Aspergillus flavus NRRL3357]
  misc_feature (1)..(341): NCBI GI: 33340103 Blast Desc: AF306860_1 silencing information regulator [Emericella nidulans]
MKKPYMRIPYTDVLPAPAIIPRSAVSLPGALAALHAFLTAPSTSGGRTPRALVLTGAGISVASGLADYRGTKGTYRVNKTYRPIYYPEFVKSHEARQRYWARSLARWTTLHKARPNATHYAVKDLSDLGLVRSVITQNVDSFHSKVGMQIPTVELHGYLRSCVCTSCHQELSRDLFQEELARLNPAWADFLQKILVSGALDTESPDERRARGMKMNPDGDVDLPGASYQTFRYPSCPTCLASPPVLDDGSRASVHLDSDGAWHPTSTAGILKPAVVMFGESIRSAVKTDAETAIDNADRLLVMGTSLATYSAWRLAQRAKDQGMPIAVINLGGVRGEDALFAGLNPDQRGELGARIEIPTGDLLPAVVETLRQQSTIGLTGEA

SEQ ID NO: 3050 - DNA, 1161 bp, Muscodor strobelii
  misc_feature: SGI cDNA ID NO. 560664
  misc_feature: Encodes the peptide sequence at SEQ ID NO 3051
atggcttcggtcactcagacaagaagccacagcggccatcatcaccatcaccaccacgacaatgtttacctcacctcaagcaacaagaacgacgcaggtgtgcgcatcaccaggataggcctctactccaacttaggcatggccattgccaaattcgcaggtggttatcttttcaattcgcaagctatgatcgccgatgccttccacagcgtcaccgacttggcctccgactttctcacgcttttcaccatatcctggagcatcaagccgccgacagacaaatacccacaaggcttcggcaaaatcgagtctcttggctccctgggcgtgtctagtatgctgctatttggtggcggctggatgttttacagcagtctcttaacactctacgggcattttttcctagaccctgcggctgctgttgagctggctgcccacgtgcattcgcattcccacgcacatgaccacgcagatgtcgtcccaagtttgcatgcagcgtggctagccgcaggtactgtggcagtcaaagagtggctctatcaggccacaatgaaagtcgctcgtgaaagaaagtcttccgtcttggcctccaatgccgtccaccatcgaatcgacagtctcaccggcatcgtgactctcgcagtcattcttggagccaacataatgcaaaatgctgcctggctggatcctgtaggcggcctactgatctcgcttatggtcgtcaaggcaggcgctgagaacactctgtcttcgctccttgagcttgcagataaggccattgatgacgaggttaaatcctcgattcgaaaacaggtgcagaaggcatctgccgacatggctgaaagtcaaaatattgaattgcgcgacgtgtcgggcatcaaatctggacaaaactatctggtcgatctagaagtggctgttcctggcggctggacagtcgaagatgtgagagaggtggaggaaaagatcagaactagggttggaagcaaggtgcgaggtgttcgaaaggtgcgcgtccgattcgtaccgaaggagggcacagcactacctaagttcgatgaatttataccaggtgatattagccctaagtcaagtccagagcctgaagcagaagatggccatcaccacaacggcgatgcagctcaccggaaatctgagtag

SEQ ID NO: 3051 - protein, 386 aa, Muscodor strobelii
  misc_feature: SGI Peptide ID NO. 560664
  misc_feature (37)..(344): Pfam Id: PF01545 Pfam Desc: Cation efflux family
  misc_feature (37)..(129): Pfam Id: PF01545 Pfam Desc: Cation efflux family
  misc_feature (151)..(344): Pfam Id: PF01545 Pfam Desc: Cation efflux family
  misc_feature (20)..(365): NCBI GI: 164424148 Blast Desc: NCU07879 [Neurospora crassa OR74A] gi|157070395|gb|EAA33576.2| conserved [Neurospora crassa OR74A]
  misc_feature (1)..(369): NCBI GI: 156051866 Blast Desc: SS1G_07340 [Sclerotinia sclerotiorum 1980] gi|154705118|gb|EDO04857.1| SS1G_07340 [Sclerotinia sclerotiorum 1980]
  misc_feature (20)..(384): NCBI GI: 171686940 Blast Desc: protein product [Podospora anserina] gi|170943431|emb|CAP69084.1| protein product [Podospora anserina]
  misc_feature (15)..(372): NCBI GI: 256729900 Blast Desc: [Nectria haematococca mpVI 77-13-4]
  misc_feature (20)..(376): NCBI GI: 46122257 Blast Desc: FG05506.1 [Gibberella zeae PH-1]
  misc_feature (21)..(384): NCBI GI: 115400125 Blast Desc: conserved [Aspergillus terreus NIH2624] gi|114191317|gb|EAU33017.1| conserved [Aspergillus terreus NIH2624]
  misc_feature (19)..(367): NCBI GI: 145608944 Blast Desc: MGG_06247 [Magnaporthe grisea 70-15] gi|145016359|gb|EDK00849.1| MGG_06247 [Magnaporthe grisea 70-15]
  misc_feature (19)..(384): NCBI GI: 67903608 Blast Desc: AN8791.2 [Aspergillus nidulans FGSC A4] gi|40741394|gb|EAA60584.1| AN8791.2 [Aspergillus nidulans FGSC A4] gi|259483003|tpe|CBF78013.1| TPA: CDF iron transporter FGSC
  misc_feature (21)..(372): NCBI GI: 238504938 Blast Desc: cation efflux family protein, [Aspergillus flavus NRRL3357] gi|220689812|gb|EED46162.1| cation efflux family protein, [Aspergillus flavus NRRL3357]
  misc_feature (19)..(366): NCBI GI: 116191873 Blast Desc: CHGG_05654 [Chaetomium globosum CBS 148.51] gi|88181567|gb|EAQ89035.1| CHGG_05654 [Chaetomium globosum CBS 148.51]
MASVTQTRSHSGHHHHHHHDNVYLTSSNKNDAGVRITRIGLYSNLGMAIAKFAGGYLFNSQAMIADAFHSVTDLASDFLTLFTISWSIKPPTDKYPQGFGKIESLGSLGVSSMLLFGGGWMFYSSLLTLYGHFFLDPAAAVELAAHVHSHSHAHDHADVVPSLHAAWLAAGTVAVKEWLYQATMKVARERKSSVLASNAVHHRIDSLTGIVTLAVILGANIMQNAAWLDPVGGLLISLMVVKAGAENTLSSLLELADKAIDDEVKSSIRKQVQKASADMAESQNIELRDVSGIKSGQNYLVDLEVAVPGGWTVEDVREVEEKIRTRVGSKVRGVRKVRVRFVPKEGTALPKFDEFIPGDISPKSSPEPEAEDGHHHNGDAAHRKSE

SEQ ID NO: 3052 - DNA, 4950 bp, Muscodor strobelii; identical to SEQ ID NO: 3047
  misc_feature: SGI EST ID NO. CUFF.7576.0
  misc_feature: Variant of the nucleotide sequence at SEQ ID NO 3050

SEQ ID NO: 3053 - DNA, 1734 bp, Muscodor strobelii
  misc_feature: SGI cDNA ID NO. 560665
  misc_feature: Encodes the peptide sequence at SEQ ID NO 3054
atgagtggtcctctctatctaggctttgatctttcaacccagcagctcaaagcgattgtgatcacatcagacctcgcagtcatctcagaggccaaggtcgactttgatgccgacttcggtgcaaagtatggaattaggaaaggcgttcggattaaccaagatgagggcgaggtatttcagcccgtcgccctgtggatagaagctgctgagctcgtgctatcacggttgcgagagaacggctgtcccatgaacctcatccaaggcattagtggttcgggccagcagcactcgagcgtatactgggctgccaatgcagaagccacgctcaagaatcttgacccagccaagacgctgctcgagcagctcaaaggtgtctttgcctatgagttcgcccctaactggcaagacggcagcacccagcgcgagtgtgatgactttgaagagcatgttggtggtggtcaaaacctggcccgcattacaggcagttcagctcatcatcgcttcacagggactcaaattctacggatgcgcaggaagcgtccacaagtctacaatgacacggcacgcatctcactatgctcatctttcctcgcctcaattttcgtaggcgccattgcaccgttcgatatcagcgacgtaacagggatgaatttgtgggatatcacagccgaaaagtggaatgagtccttgcttatactgacggccgggggcgccgaagatgctccagctctgcaaaagaaactcggcgatgttcctacagacggcggcgcgattgtcggccaaatatcaccttattttgtcgagagatttgggttcagtgcggactgtcgtgtcacagcgttcactggagacaaccccgcgacaattctctcgtttcctttacgtccgcaagatgcgatagtctcgctgggtacgtccagcacttttctaatgagcacgcctcattacaagaccgactcatcgtaccattttatgaaccatcccacgacgaaagaccacttcatgttcatgctttgctataagaacggtggattagcccgagagaaggtaagagacgcgctcccaaagcccgccgatggagaaaaagacacatgggcaacgttcaataaatgcgtattggaaacgccaccgcttgatgtacgtcaaggcaacgacagtgcaaaactaggactctacttccctctaccagaaatcgtacccaacgtgcgagctggtacgtatcgctatacatgtatcgttcaagatggttgctcgctcactgagtgcccatcttctggagattggagccctgaagccgacgcacgcatcatcgtcgaatcacaagccctatccatgcgtctacggtcacagaacctcgtatcagatatcccaggtcgtccagagctacctgcccaaccccgtcgcatctatcttgtcggcggcggttcacttaatcccgccattgctcgcgtgttcggcgatgtgctaggtggtgccgagggtgtataccgattggacgtcggcggaaatgcatgcgcgttaggtggcgcgtacaaagccctgtgggcatgcgagcgcgggatcaatgggaatccgcagagttttgatgagctcatcggtgcacgctggaaagaagagggaaatgttcaaaaagttgacgatgggtaccgtgcagaccagttccagacctatggaaatgtgcttggggcattcgaagagatggaaaataagatactgagcgtggcgagaaactag

SEQ ID NO: 3054 - protein, 577 aa, Muscodor strobelii
  misc_feature: SGI Peptide ID NO. 560665
  misc_feature (5)..(291): Pfam Id: PF00370 Pfam Desc: FGGY family of carbohydrate kinases, N-terminal domain
  misc_feature (6)..(572): NCBI GI: 189202310 Blast Desc: xylulose kinase [Pyrenophora tritici-repentis Pt-1C-BFP] gi|187984590|gb|EDU50078.1| xylulose kinase [Pyrenophora tritici-repentis Pt-1C-BFP]
  misc_feature (3)..(572): NCBI GI: 119479357 Blast Desc: D-xylulose kinase [Neosartorya fischeri NRRL 181] gi|119407861|gb|EAW17810.1| D-xylulose kinase [Neosartorya fischeri NRRL 181]
  misc_feature (3)..(572): NCBI GI: 70997848 Blast Desc: D-xylulose kinase [Aspergillus fumigatus Af293] gi|66851292|gb|EAL91618.1| D-xylulose kinase [Aspergillus fumigatus Af293] gi|159126610|gb|EDP51726.1| D-xylulose kinase
  misc_feature (1)..(572): NCBI GI: 18496269 Blast Desc: D-xylulose kinase [Aspergillus niger]
  misc_feature (1)..(572): NCBI GI: 238504936 Blast Desc: D-xylulose kinase [Aspergillus flavus NRRL3357] gi|220689811|gb|EED46161.1| D-xylulose kinase [Aspergillus flavus NRRL3357]
  misc_feature (1)..(572): NCBI GI: 145237500 Blast Desc: An07g03140 [Aspergillus niger] gi|134075869|emb|CAL00248.1| protein product [Aspergillus niger]
  misc_feature (1)..(572): NCBI GI: 169780860 Blast Desc: [Aspergillus oryzae RIB40] gi|83773634|dbj|BAE63761.1| protein product [Aspergillus oryzae]
  misc_feature (3)..(572): NCBI GI: 121713352 Blast Desc: D-xylulose kinase [Aspergillus clavatus NRRL 1] gi|119402440|gb|EAW12861.1| D-xylulose kinase [Aspergillus clavatus NRRL 1]
  misc_feature (1)..(572): NCBI GI: 67903606 Blast Desc: AN8790.2 [Aspergillus nidulans FGSC A4] gi|40741393|gb|EAA60583.1| AN8790.2 [Aspergillus nidulans FGSC A4] gi|259483004|tpe|CBF78014.1| TPA: D-xylulose kinase nidulans
  misc_feature (3)..(572): NCBI GI: 242803869 Blast Desc: D-xylulose kinase [Talaromyces stipitatus ATCC 10500] gi|218717605|gb|EED17026.1| D-xylulose kinase [Talaromyces stipitatus ATCC 10500]
  misc_feature (5)..(569): SWISSPROT Homolog: EC 2.7.1.17 Xylulokinase
MSGPLYLGFDLSTQQLKAIVITSDLAVISEAKVDFDADFGAKYGIRKGVRINQDEGEVFQPVALWIEAAELVLSRLRENGCPMNLIQGISGSGQQHSSVYWAANAEATLKNLDPAKTLLEQLKGVFAYEFAPNWQDGSTQRECDDFEEHVGGGQNLARITGSSAHHRFTGTQILRMRRKRPQVYNDTARISLCSSFLASIFVGAIAPFDISDVTGMNLWDITAEKWNESLLILTAGGAEDAPALQKKLGDVPTDGGAIVGQISPYFVERFGFSADCRVTAFTGDNPATILSFPLRPQDAIVSLGTSSTFLMSTPHYKTDSSYHFMNHPTTKDHFMFMLCYKNGGLAREKVRDALPKPADGEKDTWATFNKCVLETPPLDVRQGNDSAKLGLYFPLPEIVPNVRAGTYRYTCIVQDGCSLTECPSSGDWSPEADARIIVESQALSMRLRSQNLVSDIPGRPELPAQPRRIYLVGGGSLNPAIARVFGDVLGGAEGVYRLDVGGNACALGGAYKALWACERGINGNPQSFDELIGARWKEEGNVQKVDDGYRADQFQTYGNVLGAFEEMENKILSVARN

SEQ ID NO: 3055 - DNA, 2134 bp, Muscodor strobelii
  misc_feature: SGI EST ID NO. CUFF.7579.0
  misc_feature: Variant of the nucleotide sequence at SEQ ID NO 3053
ttgatgacttgaggcatgcagggacgcggggcagtttgcatcatgtccagaacggccgctctctcggttcgatggcacctctagaggctcaggacagtggtagtttagtgttagattcagtatcgtgaacgagtccattcaaaaaaaatcgacctgtatacctacgtttacttattcccctcaatcaaatttgcattcttcgtgactacaatctctcgggattgaagatacttcatatcatctagtccgtggctataagcccaataagactacaagatgagtggtcctctctatctaggctttgatctttcaacccagcagctcaaagcgattgtgatcacatcagacctcgcagtcatctcagaggccaaggtcgactttgatgccgacttcggtgcaaagtatggaattaggaaaggcgttcggattaaccaagatgagggcgaggtatttcagcccgtcgccctgtggatagaagctgctgagctcgtgctatcacggttgcgagagaacggctgtcccatgaacctcatccaaggcattagtggttcgggccagcagcactcgagcgtatactgggctgccaatgcagaagccacgctcaagaatcttgacccagccaagacgctgctcgagcagctcaaaggtgtctttgcctatgagttcgcccctaactggcaagacggcagcacccagcgcgagtgtgatgactttgaagagcatgttggtggtggtcaaaacctggcccgcattacaggcagttcagctcatcatcgcttcacagggactcaaattctacggatgcgcaggaagcgtccacaagtctacaatgacacggcacgcatctcactatgctcatctttcctcgcctcaattttcgtaggcgccattgcaccgttcgatatcagcgacgtaacagggatgaatttgtgggatatcacagccgaaaagtggaatgagtccttgcttatactgacggccgggggcgccgaagatgctccagctctgcaaaagaaactcggcgatgttcctacagacggcggcgcgattgtcggccaaatatcaccttattttgtcgagagatttgggttcagtgcggactgtcgtgtcacagcgttcactggagacaaccccgcgacaattctctcgtttcctttacgtccgcaagatgcgatagtctcgctgggtacgtccagcacttttctaatgagcacgcctcattacaagaccgactcatcgtaccattttatgaaccatcccacgacgaaagaccacttcatgttcatgctttgctataagaacggtggattagcccgagagaaggtaagagacgcgctcccaaagcccgccgatggagaaaaagacacatgggcaacgttcaataaatgcgtattggaaacgccaccgcttgatgtacgtcaaggcaacgacagtgcaaaactaggactctacttccctctaccagaaatcgtacccaacgtgcgagctggtacgtatcgctatacatgtatcgttcaagatggttgctcgctcactgagtgcccatcttctggagattggagccctgaagccgacgcacgcatcatcgtcgaatcacaagccctatccatgcgtctacggtcacagaacctcgtatcagatatcccaggtcgtccagagctacctgcccaaccccgtcgcatctatcttgtcggcggcggttcacttaatcccgccattgctcgcgtgttcggcgatgtgctaggtggtgccgagggtgtataccgattggacgtcggcggaaatgcatgcgcgttaggtggcgcgtacaaagccctgtgggcatgcgagcgcgggatcaatgggaatccgcagagttttgatgagctcatcggtgcacgctggaaagaagagggaaatgttcaaaaagttgacgatgggtaccgtgcagaccagttccagacctatggaaatgtgcttggggcattcgaagagatggaaaataagatactgagcgtggcgagaaactagaggcgctgcgcgcatcagtagagcccagatcattctcgcgctgctatacccaaaatatgttacgatgaaccatatagtgagaaaacatacaccttcatgttgctagacaataactgaagacaat

SEQ ID NO: 3056 - DNA, 1236 bp, Muscodor strobelii
  misc_feature: SGI cDNA ID NO. 560666
  misc_feature: Encodes the peptide sequence at SEQ ID NO 3057
atgatcttaggtccagtctcgttactggattgcgcagctttctgttggtacttagcaccacagctgttcaagcaggccggcatcttcttaacgattgccactatactacaatgcgtaccatttctgttaatccgacttcccattgcttttttccataaccgctatttcgtcgatcgccaaagacggcctcctttcttcagagacgcttcgccattcgaggatgttgtgataagatgcgtacggttcgcctttgccaacgtctcacccaacatcgggaaagcattcttctccaaacaagtctctttgccttttctcaagttccgtctgtggcgtcatggaatgtcagatttcccgttttattggcatgagcttctggaagttgacgaggagggaacaaaggttcggggcatttggatcagagatgatccagagaaacaacctgatgaggggggttcgcaatggtacgcaatgaaggccatccactatatgccgcatacgagattggcttttcccactaacaagctactcatgaagggctcaccgtggttttatcttgaattcctcatcacgtggttgtatcttctaaaggaggccggctatcaaaatcccgctattttcgcattggagtacactctggtccccaatgactgctacccgacacaaatgaaagaggttcaagctggttataaacatgttctctcgacaatgaatcatcaggcatacagaatctgcatcagcggagactctgccggcgcgacgctagttctcactttcctgcttgctggaggagatcactgggtgaataaagtccagttggcagtgataatcagcccttgggtatcgctcgactctcccaaacacaaaaacacgacgagtgattacctggacattactagtctgcgcgactggcactggcgtcaaggctggcccgagagagggatatgtgtcgtctacggtcgtgaagaggtcttcgccccaacaatccagagcataatagcagactggaaagggtataaattccgtgatatcaagagttatgagaaaccagctaggatccatgcatggccggttgtatcgctattcctcaaaagcgataccaaggagcgactagagggcttaagactgataacatcaggaatgacagctacaatacctacaatgcaacgctattttcaggacgctcccgacgttgatacggctggagggacttgggaagaatgtgtcatgtcagattag

SEQ ID NO: 3057 - protein, 411 aa, Muscodor strobelii
  misc_feature: SGI Peptide ID NO. 560666
  misc_feature (1)..(378): NCBI GI: 156047960 Blast Desc: SS1G_08711 [Sclerotinia sclerotiorum 1980] gi|154693108|gb|EDN92846.1| SS1G_08711 [Sclerotinia sclerotiorum 1980]
  misc_feature (1)..(377): NCBI GI: 164424139 Blast Desc: NCU11352 [Neurospora crassa OR74A] gi|157070391|gb|EDO65045.1| conserved [Neurospora crassa OR74A]
  misc_feature (1)..(377): NCBI GI: 39976801 Blast Desc: MGG_06303 [Magnaporthe grisea 70-15] gi|145016300|gb|EDK00790.1| MGG_06303 [Magnaporthe grisea 70-15]
  misc_feature (1)..(365): NCBI GI: 171685666 Blast Desc: protein product [Podospora anserina] gi|170942794|emb|CAP68447.1| protein product [Podospora anserina]
  misc_feature (1)..(384): NCBI GI: 189207424 Blast Desc: conserved [Pyrenophora tritici-repentis Pt-1C-BFP] gi|187976139|gb|EDU42765.1| conserved [Pyrenophora tritici-repentis Pt-1C-BFP]
  misc_feature (1)..(383): NCBI GI: 154291890 Blast Desc: BC1G_14961 [Botryotinia fuckeliana B05.10] gi|150846569|gb|EDN21762.1| BC1G_14961 [Botryotinia fuckeliana B05.10]
  misc_feature (1)..(303): NCBI GI: 261358278 Blast Desc: esterase [Verticillium albo-atrum VaMs.102]
  misc_feature (182)..(385): NCBI GI: 116208142 Blast Desc: CHGG_03364 [Chaetomium globosum CBS 148.51] gi|88183961|gb|EAQ91429.1| CHGG_03364 [Chaetomium globosum CBS 148.51]
  misc_feature (185)..(384): NCBI GI: 169621371 Blast Desc: SNOG_13895 [Phaeosphaeria nodorum SN15] gi|160704239|gb|EAT78919.2| SNOG_13895 [Phaeosphaeria nodorum SN15]
  misc_feature (167)..(374): NCBI GI: 46122237 Blast Desc: FG05496.1 [Gibberella zeae PH-1]
MILGPVSLLDCAAFCWYLAPQLFKQAGIFLTIATILQCVPFLLIRLPIAFFHNRYFVDRQRRPPFFRDASPFEDVVIRCVRFAFANVSPNIGKAFFSKQVSLPFLKFRLWRHGMSDFPFYWHELLEVDEEGTKVRGIWIRDDPEKQPDEGGSQWYAMKAIHYMPHTRLAFPTNKLLMKGSPWFYLEFLITWLYLLKEAGYQNPAIFALEYTLVPNDCYPTQMKEVQAGYKHVLSTMNHQAYRICISGDSAGATLVLTFLLAGGDHWVNKVQLAVIISPWVSLDSPKHKNTTSDYLDITSLRDWHWRQGWPERGICVVYGREEVFAPTIQSIIADWKGYKFRDIKSYEKPARIHAWPVVSLFLKSDTKERLEGLRLITSGMTATIPTMQRYFQDAPDVDTAGGTWEECVMSD

SEQ ID NO: 3058 - DNA, 1378 bp, Muscodor strobelii
  misc_feature: SGI EST ID NO. CUFF.7582.0
  misc_feature: Variant of the nucleotide sequence at SEQ ID NO 3056
agcaatcctaagtaaacaagtatcgagagcatgaagcaaacatctcaatgaccaattgatcgatacatctgattgccaactcaatgagcttcgtttttcatcgctcctttcctatgtgagacaagcgcaatcacggcagagtcctcgacgtcactaaagacggtagcagttgactttcaaagtctttctattgacctaaagttaggtaggatcaacgtgccagaggtagaatcgaatgatccaatccacttgcagccattcatcggactcagcgcccatcgtgacgatacgtagcattctatgtcctcaatattttgggatttgcacccacgtataaagagagattgcagcactatcgagcacaaagaattatcgatcacaacccaacaccgatgccaattttccaattcgcaacatgatcttaggtccagtctcgttactggattgcgcagctttctgttggtacttagcaccacagctgttcaagcaggccggcatcttcttaacgattgccactatactacaatgcgtaccatttctgttaatccgacttcccattgcttttttccataaccgctatttcgtcgatcgccaaagacggcctcctttcttcagagacgcttcgccattcgaggatgttgtgataagatgcgtacggttcgcctttgccaacgtctcacccaacatcgggaaagcattcttctccaaacaagtctctttgccttttctcaagttccgtctgtggcgtcatggaatgtcagatttcccgttttattggcatgagcttctggaagttgacgaggagggaacaaaggttcggggcatttggatcagagatgatccagagaaacaacctgatgtatgtgtgtattatattcacggtaagatacctgatgcaatcgtaattaccttatgatgtactgatttcgcgtaggaggggggttcgcaatggtacgcaatgaaggccatccactatatgccgcatacgagattggcttttcccactaacaagctactcatgaagggctcaccgtggttttatcttgaattcctcatcacgtggttgtatcttctaaaggaggccggctatcaaaatcccgctattttcgcattggagtacactctggtccccaatgactgctacccgacacaaatgaaagaggttcaagctggttataaacatgttctctcgacaatgaatcatcaggcatacagaatctgcatcagcggagactctgccggcgcgacgctagttctcactttcctgcttgctggaggagatcactgggtgaataaagtccagttggcagtgataatcagcccttgggtatcgctcgactctcccaaacacaaaaacacgacgagtgattacctggac

SEQ ID NO: 3059 - DNA, 1167 bp, Muscodor strobelii
  misc_feature: SGI cDNA ID NO. 560667
  misc_feature: Reduced expression when VOC is produced
  misc_feature: Encodes the peptide sequence at SEQ ID NO 3060
atgtctgcgaccggagatagctatgcacccaagtcgcccgacttgtcatccttttatggtgccgaggtcgcctcgagctctactgctagcacgggagatcctgcaaactcataccaccccttgcaacctgtgaacccttatacgtacccggcacaggcacaggcacagacaccgcaaacacatttgcaggtaggcgcgcacaatttcagccaagcacagccccaccacgagcaccagcaccaatactacccaggagcccaagcccaagctccctacagcaataataatcgcgactccaccattaccagcgcgaccacaggcatcgccaaccaccgcccagaataccgcccttatcaacactctcctccttctgctgctgctgctcctcctccctcatactcgaagcccggcaacatctctcactactatcctcctcatctgcagcagcaacaccagcagccagctccggagcagccgcagtatccgcagccccagcacgggcagcctgtcttccagctcaacgccaacgccccgacagccccacatcagtactattcacattcacagtacgctgaaccaaactctggccccccctcaacgagctatctacagacggcccaaccattgcagcaagcacctctgcctccacaagtagctcaaacccatcttcattcgcagtctatttcgttcgaccaacctatcgatttcagctcccacacttctcagcccaccatgccgccccgcaaagcagtcgcccaagtggccaaggagcccgagatcatggcctccccagtccgaaccaagtttccgacggcgcgcatcaagcgcattatgcaggccgacgatgaggtcggcaaagtcgcacaacagaccccgattgcagttggcaaggcgttggagctgttcatggtgcagctggtggagaagagcgctgaggttgccaaggacaagcactccaagcgcattacggcaccgatgctcaagcaggccatcgattccactaacgaatgggattttctgagggacatcgtcgccaaggtctcggaggagagggagggagccaaggccggccgagccaaggccgagagcgagagcgacgaagatgccgacatgggagaggtcaagaagaagggacgcggtggtcggaaaaagaagggaactgcctag

SEQ ID NO: 3060 - protein, 388 aa, Muscodor strobelii
  misc_feature: SGI Peptide ID NO. 560667
  misc_feature (267)..(331): Pfam Id: PF00808 Pfam Desc: Histone-like transcription factor (CBF/NF-Y) and archaeal histone
  misc_feature (1)..(368): NCBI GI: 256729904 Blast Desc: NECHADRAFT_95558 [Nectria haematococca mpVI 77-13-4]
  misc_feature (245)..(369): NCBI GI: 145608872 Blast Desc: MGG_06302 [Magnaporthe grisea 70-15] gi|145016301|gb|EDK00791.1| MGG_06302 [Magnaporthe grisea 70-15]
  misc_feature (244)..(369): NCBI GI: 171685664 Blast Desc: protein product [Podospora anserina] gi|170942793|emb|CAP68446.1| protein product [Podospora anserina]
  misc_feature (245)..(371): NCBI GI: 261358276 Blast Desc: DNA polymerase epsilon subunit C [Verticillium albo-atrum VaMs.102]
  misc_feature (265)..(362): NCBI GI: 85075472 Blast Desc: NCU06405 [Neurospora crassa OR74A] gi|28916782|gb|EAA26539.1| conserved [Neurospora crassa OR74A]
  misc_feature (258)..(344): NCBI GI: 116208138 Blast Desc: CHGG_03362 [Chaetomium globosum CBS 148.51] gi|88183959|gb|EAQ91427.1| CHGG_03362 [Chaetomium globosum CBS 148.51]
  misc_feature (265)..(385): NCBI GI: 169772437 Blast Desc: [Aspergillus oryzae RIB40] gi|83768548|dbj|BAE58685.1| protein product [Aspergillus oryzae]
  misc_feature (265)..(385): NCBI GI: 238490342 Blast Desc: CBF/NF-Y family transcription factor, [Aspergillus flavus NRRL3357] gi|220696821|gb|EED53162.1| CBF/NF-Y family transcription factor, [Aspergillus flavus NRRL3357]
  misc_feature (265)..(385): NCBI GI: 259479439 Blast Desc: TPA: CCAAT-box-binding transcription factor (Eurofung) [Aspergillus nidulans FGSC A4]
  misc_feature (265)..(385): NCBI GI: 71002154 Blast Desc: CBF/NF-Y family transcription factor [Aspergillus fumigatus Af293] gi|66853396|gb|EAL93720.1| CBF/NF-Y family transcription factor, [Aspergillus fumigatus Af293] CBF/NF-Y
  misc_feature: Useful for introducing or modulating the production of volatile compounds
MSATGDSYAPKSPDLSSFYGAEVASSSTASTGDPANSYHPLQPVNPYTYPAQAQAQTPQTHLQVGAHNFSQAQPHHEHQHQYYPGAQAQAPYSNNNRDSTITSATTGIANHRPEYRPYQHSPPSAAAAPPPSYSKPGNISHYYPPHLQQQHQQPAPEQPQYPQPQHGQPVFQLNANAPTAPHQYYSHSQYAEPNSGPPSTSYLQTAQPLQQAPLPPQVAQTHLHSQSISFDQPIDFSSHTSQPTMPPRKAVAQVAKEPEIMASPVRTKFPTARIKRIMQADDEVGKVAQQTPIAVGKALELFMVQLVEKSAEVAKDKHSKRITAPMLKQAIDSTNEWDFLRDIVAKVSEEREGAKAGRAKAESESDEDADMGEVKKKGRGGRKKKGTA

SEQ ID NO: 3061 - DNA, 2847 bp, Muscodor strobelii
  misc_feature: SGI cDNA ID NO. 560668
  misc_feature: Encodes the peptide sequence at SEQ ID NO 3062
atgtcgtgggatctgctccagcggttcatcgagagcgacgtcttcaaccagaaccccttcctctccgtctcctacctctctcgatatgccgaccatgtcggcatccactatgtcttgtgctccaagctccgccagttcccctacgaggacattgagttcttcctgccgcagctatgccacctcatcatcagcgtcgacaatgaatccatggccctcgaggaatttctgttggatctgtgcgaggagtcagtcggcgccgcgcttctgaccttctggctctttcagacctatctacatgacctcgccgcgacgccccagctgcaggccttcaagacttgccggagagtctacaacaaagtgcaacacatcgtgttcggcctcccggactcggccaggcaagagaagatcaccgaaaacgtcctcccggtcaccgtgctagcaagcttcgtcctagctagcattggcctgcccctactgccgcaatgggctggccctctagctgtagcgcaagcacgcaagtcgcagcccacgagcgatgtcatctccgattctgcacaagcccccacgaaagtgtccagaagccagaccgtgacagcttcgtcgtcccgttcacgccgccagagagatggcccaagaggcggtagcgccccagatacgaaagcgaatagccagacttccgagaaccccctacggaacgccactgcttcgacgccgaacctctccgacggtcaggaaggggccgggcaggaggggtcgaagcctgctgtccacgatccgaaaatgctggacgcccgtctgagttcttcgtctctcccgcttccggagctgcgttcgccgagaatggtcacccgtcctgcaacaccactaaggggaggctactgcgacaaaaactacttcaggactcaaactttatttctctccgccctggaagatatttctaacagactggtcattgtacctaagcccgctcgcctcagcgcattgcgggccgaacttgcgcttattggccgcgacctgccggctgagcttgatattccggttctctgtccgccgaccctcgtggatggttcgccagcgaagagtcggcatcatcggattgtgagggtaaacccagcggaagctactgtgcttaatagtgcagagaaggttccatatctactcatgatcgaaatcttacgggatgacttcactttcgatcccacctcttctgataatcaccaccggcttagcactcttcttgctgaacaaaccgaccgcaaacgcctctttgacctatcagacgcccaccgaacagccatcagcgagcgatcgacgtctatggagcatgacaagatcgacagtgtatttgagcccacttccggcgacttgggtcactctccaatgttgaaaccccatgatgatgaattcatcgacaagaaatccgtgaaactaatcaatcgtaagtctatgccgaacggcgtgacggccttatcctctgagatcaccaccccgcgagactcgggagccttcatgtctagatcaagtagtccaggctcattccaaaagatgagtctcccgagccaacggggtaatgcgcaggatcagccagacttttcggctctggctactcacatgcgcacagcttcgcaaatgttggctcagttggaagccacgagtgggaaacgaccgaaacatgaggtagctgccattcgatcaaagatcatagcaagcatgcaaagccttgaagaacagaattttgacctggacgatacacaaggccctacttttgatatgatcattgccaaaacaaataccgcggttcccacgacttcggaaggcgacctcgatgatgagttcgaaaatgcgaatgattcgaccgcaggggccgctaggatggagaatgatgccatgactggaggcgtgcagaaaaaaggcgacagagatgacccaagcgcagcagtattcggggaagcgtggcatgtcaagaaagagcgcattcggaaaaactcaccatacggttggatgaagaattgggaccttgttagtgttatcgtaaagacaggatctgatctcaggcaggaggctttcgcatgccagctgattcaggtctgtcacaagatatgggttgacgcaggggtaccggtatgggtgaagctcatgcaaatattagtaacgggcgaatcatcagggctcatcgagaccatcaccaacggtgtttcactacattctctcaagagaagcctgacattgtcttcgatcgagtcaggaatcaaccctcgacggcgcttcgctacactcaaagaccattgggtcaagacattcggcaaccctgatagtgaaccctacaaggttgctgtggatgcgttcaagagatctcttgcagcttacagtatgatacagtacattctgcaactcaaggatcgccacaacggaaacgttctcatcgataatgagggacacattattcacatcgactttggtttcatgctttctaactctccgggctcagttggatttgaagccgcccctttcaaactcacccaagaatatgtcgacgtgctgggaggagttgggtccccagactttaacgattacaaaaccctctgcaagcatgcatttcaagcccttcgtcgatctgcggataacattattgacatggtcaacatgatgggacgagattccaagatgccatgctattcagctggtgttgcccagacaacggctgccttacgacaacgctttcagcttcacctgagtgccgatgaggctgagagctttgtggaaactgatcttgtcgcaaaatctcttggcagttattacacacgactttatgatacgttccagtatcgtacgcagggtatttattag

SEQ ID NO: 3062 - protein, 948 aa, Muscodor strobelii
  misc_feature: SGI Peptide ID NO. 560668
  misc_feature (673)..(893): Pfam Id: PF00454 Pfam Desc: Phosphatidylinositol 3- and 4-kinase
  misc_feature (769)..(893): Pfam Id: PF00454 Pfam Desc: Phosphatidylinositol 3- and 4-kinase
  misc_feature (673)..(737): Pfam Id: PF00454 Pfam Desc: Phosphatidylinositol 3- and 4-kinase
  misc_feature (1)..(948): NCBI GI: 171685658 Blast Desc: protein product [Podospora anserina] gi|170942790|emb|CAP68443.1| protein product [Podospora anserina]
  misc_feature (1)..(948): NCBI GI: 116208132 Blast Desc: CHGG_03359 [Chaetomium globosum CBS 148.51] gi|88183956|gb|EAQ91424.1| CHGG_03359 [Chaetomium globosum CBS 148.51]
  misc_feature (1)..(948): NCBI GI: 46122243 Blast Desc: FG05499.1 [Gibberella zeae PH-1]
  misc_feature (1)..(948): NCBI GI: 261358275 Blast Desc: phosphatidylinositol 4-kinase PIK1 [Verticillium albo-atrum VaMs.102]
  misc_feature (1)..(948): NCBI GI: 256729903 Blast Desc: [Nectria haematococca mpVI 77-13-4]
  misc_feature (1)..(936): NCBI GI: 164425040 Blast Desc: NCU10397 [Neurospora crassa OR74A] gi|157070766|gb|EDO65106.1| conserved [Neurospora crassa OR74A]
  misc_feature (1)..(936): NCBI GI: 169621175 Blast Desc: SNOG_13795 [Phaeosphaeria nodorum SN15] gi|160704196|gb|EAT78819.2| SNOG_13795 [Phaeosphaeria nodorum SN15]
  misc_feature (124)..(948): NCBI GI: 145608878 Blast Desc: MGG_12862 [Magnaporthe grisea 70-15] gi|145016304|gb|EDK00794.1| MGG_12862 [Magnaporthe grisea 70-15]
  misc_feature (296)..(948): NCBI GI: 154298338 Blast Desc: BC1G_11624 [Botryotinia fuckeliana B05.10] gi|150858077|gb|EDN33269.1| BC1G_11624 [Botryotinia fuckeliana B05.10]
  misc_feature (300)..(948): NCBI GI: 189206726 Blast Desc: phosphatidylinositol 4-kinase PIK1a [Pyrenophora tritici-repentis Pt-1C-BFP] gi|187975790|gb|EDU42416.1| phosphatidylinositol 4-kinase PIK1a [Pyrenophora tritici-repentis
  misc_feature (297)..(948): SWISSPROT Homolog: EC 2.7.1.67 1-phosphatidylinositol 4-kinase
MSWDLLQRFIESDVFNQNPFLSVSYLSRYADHVGIHYVLCSKLRQFPYEDIEFFLPQLCHLIISVDNESMALEEFLLDLCEESVGAALLTFWLFQTYLHDLAATPQLQAFKTCRRVYNKVQHIVFGLPDSARQEKITENVLPVTVLASFVLASIGLPLLPQWAGPLAVAQARKSQPTSDVISDSAQAPTKVSRSQTVTASSSRSRRQRDGPRGGSAPDTKANSQTSENPLRNATASTPNLSDGQEGAGQEGSKPAVHDPKMLDARLSSSSLPLPELRSPRMVTRPATPLRGGYCDKNYFRTQTLFLSALEDISNRLVIVPKPARLSALRAELALIGRDLPAELDIPVLCPPTLVDGSPAKSRHHRIVRVNPAEATVLNSAEKVPYLLMIEILRDDFTFDPTSSDNHHRLSTLLAEQTDRKRLFDLSDAHRTAISERSTSMEHDKIDSVFEPTSGDLGHSPMLKPHDDEFIDKKSVKLINRKSMPNGVTALSSEITTPRDSGAFMSRSSSPGSFQKMSLPSQRGNAQDQPDFSALATHMRTASQMLAQLEATSGKRPKHEVAAIRSKIIASMQSLEEQNFDLDDTQGPTFDMIIAKTNTAVPTTSEGDLDDEFENANDSTAGAARMENDAMTGGVQKKGDRDDPSAAVFGEAWHVKKERIRKNSPYGWMKNWDLVSVIVKTGSDLRQEAFACQLIQVCHKIWVDAGVPVWVKLMQILVTGESSGLIETITNGVSLHSLKRSLTLSSIESGINPRRRFATLKDHWVKTFGNPDSEPYKVAVDAFKRSLAAYSMIQYILQLKDRHNGNVLIDNEGHIIHIDFGFMLSNSPGSVGFEAAPFKLTQEYVDVLGGVGSPDFNDYKTLCKHAFQALRRSADNIIDMVNMMGRDSKMPCYSAGVAQTTAALRQRFQLHLSADEAESFVETDLVAKSLGSYYTRLYDTFQYRTQGIY

SEQ ID NO: 3063 - DNA, 3943 bp, Muscodor strobelii
  misc_feature: SGI EST ID NO. CUFF.7637.0
  misc_feature: Variant of the nucleotide sequence at SEQ ID NO 3061
cagctaccgatgtcgaccaagcttgcgaagaaaagcccggcagcacgaggagaagtgcagtgatgagcaatagaccaggtgggggggcatggtccgactctgcgctggagaggacttgtggactacctttgttgcgactcctcaatgtagatgtgctaggccgtgctaggatttgcggagggagcattttagcattgcagacgcttcatgtacataactaggtacttacggcaattttcccaacatcgtagcggtatcctaaagcgcagcacaatttctactgcaagtccatctacagtatctacgaattatccgatacccttccgtctagcttcgccttggtcgcgcgtcgactcctggacctcgactcaccaccacgtcagggttgatgcggtactgagcaggtcaagctgtgagctgttgagggcagcagccatgttccctttgcgagcccgatcaaggtgacatgattccgtcccctccgttgcactagaataatcagacgccgctatgtcgtgggatctgctccagcggttcatcgagagcgacgtcttcaaccagaaccccttcctctccgtctcctacctctctcgatatgccgaccatgtcggcatccactatgtcttgtgctccaagctccgccagttcccctacgaggacattgagttcttcctgccgcagctatgccacctcatcatcagcgtcgacaatgaatccatggccctcgaggaatttctgttggatctgtgcgaggagtcagtcggcgccgcgcttctgaccttctggctctttcagacctatctacatgacctcgccgcgacgccccagctgcaggccttcaagacttgccggagagtctacaacaaagtgcaacacatcgtgttcggcctcccggactcggccaggcaagagaagatcaccgaaaacgtcctcccggtcaccgtgctagcaagcttcgtcctagctagcattggcctgcccctactgccgcaatgggctggccctctagctgtagcgcaagcacgcaagtcgcagcccacgagcgatgtcatctccgattctgcacaagcccccacgaaagtgtccagaagccagaccgtgacagcttcgtcgtcccgttcacgccgccagagagatggcccaagaggcggtagcgccccagatacgaaagcgaatagccagacttccgagaaccccctacggaacgccactgcttcgacgccgaacctctccgacggtcaggaaggggccgggcaggaggggtcgaagcctgctgtccacgatccgaaaatgctggacgcccgtctgagttcttcgtctctcccgcttccggagctgcgttcgccgagaatggtcacccgtcctgcaacaccactgtctgccagactgccgcggccgacggaggctatctctcgtcgacactctcatcatgtcaagtctattctcagcctggcggaaatgacggccgaccagaaggggaggctactgcgacaaaaactacttcaggactcaaactttatttctctccgccctggaagatatttctaacagactggtcattgtacctaagcccgctcgcctcagcgcattgcgggccgaacttgcgcttattggccgcgacctgccggctgagcttgatattccggttctctgtccgccgaccctcgtggatggttcgccagcgaagagtcggcatcatcggattgtgagggtaaacccagcggaagctactgtgcttaatagtgcagagaaggttccatatctactcatgatcgaaatcttacgggatgacttcactttcgatcccacctcttctgataatcaccaccggcttagcactcttcttgctgaacaaaccgaccgcaaacgcctctttgacctatcagacgcccaccgaacagccatcagcgagcgatcgacgtctatggagcatgacaagatcgacagtgtatttgagcccacttccggcgacttgggtcactctccaatgttgaaaccccatgatgatgaattcatcgacaagaaatccgtgaaactaatcaatcgtaagtctatgccgaacggcgtgacggccttatcctctgagatcaccaccccgcgagactcgggagccttcatgtctagatcaagtagtccaggctcattccaaaagatgagtctcccgagccaacggggtaatgcgcaggatcagccagacttttcggctctggctactcacatgcgcacagcttcgcaaatgttggctcagttggaagccacgagtgggaaacgaccgaaacatgaggtagctgccattcgatcaaagatcatagcaagcatgcaaagccttgaagaacagaattttgacctggacgatacacaaggccctacttttgatatgatcattgccaaaacaaataccgcggttcccacgacttcggaaggcgacctcgatgatgagttcgaaaatgcgaatgattcgaccgcaggggccgctaggatggagaatgatgccatgactggaggcgtgcagaaaaaaggcgacagagatgacccaagcgcagcagtattcggggaagcgtggcatgtcaagaaagagcgcattcggaaaaactcaccatacggttggatgaagaattgggaccttgttagtgttatcgtaaagacaggatctgatctcaggcaggaggctttcgcatgccagctgattcaggtctgtcacaagatatgggttgacgcaggggtaccggtatgggtgaagctcatgcaaatattagtaacgggcgaatcatcagggctcatcgagaccatcaccaacggtgtttcactacattctctcaagagaagcctgacattgtcttcgatcgagtcaggaatcaaccctcgacggcgcttcgctacactcaaagaccattgggtcaagacattcggcaaccctgatagtgaaccctacaaggttgctgtggatgcgttcaagagatctcttgcagcttacagtatgatacagtacattctgcaactcaaggatcgccacaacggaaacgttctcatcgataatgagggacacattattcacatcgactttggtttcatgctttctaactctccgggctcagttggatttgaagccgcccctttcaaactcacccaagaatatgtcgacgtgctgggaggagttgggtccccagactttaacgattacaaaaccctctgcaagcatgcatttcaagcccttcgtcgatctgcggataacattattgacatggtcaacatgatgggacgagattccaagatgccatgctattcagctggtgttgcccagacaacggctgccttacgacaacgctttcagcttcacctgagtgccgatgaggctgagagctttgtggaaactgatcttgtcgcaaaatctcttggcagttattacacacgactgtaagttgttatgcccatcctgtccatgaatgcatgctgatgctcccgtccactagttatgatacgttccagtatcgtacgcagggtatttattagcacgctttcatgaattaaatagcgaccatggaaggaagggaccatggctagactcggcatatggacggcgttgtgggtgatataattgtgactttgggatattttcaacccagtacaagcgtcccactggattttgatatgattgtaacgccgatatagaatcgtgaaaatacatacacttacctcttattctattgctcacttctcgcagactagaagaactgtagggaggaacactattgtgccgtgactcatatcaaggtggttggcagcgagtcctttttcagtagtagcacgtggttggtgtaaataaaaatggcacagtcgacgtcccttcgagacagacattatcaaatgtgaccatggtaattgtatgattaggtcgtcgatagtcacatggtgaccttgaccattatgtcagtgacaatataat

SEQ ID NO: 3064 - DNA, 1098 bp, Muscodor strobelii
  misc_feature: SGI cDNA ID NO. 560669
  misc_feature: Encodes the peptide sequence at SEQ ID NO 3065
atgtcttcttccccaacttcgtcttcgcagtcagtcgctgcacccgctaccccacgttcactcaccaagtcaaacacaaccacatcgtcaccagtttccgagtcatctgtacagccagcagaggcctgctcctggaaggaacatgatctgaacacagtctgggcttttatgtgtcgacttgagcatgtgcccgataagaccaagaggctcgcccgcattcgagctcgcaagggctttaacaagtcccagatcttgcagaacgaatgggtgtacagactcacaaataaactgaacgatgccctgaaccgcaagtacaatgactgtctatctaaagaggacgtccaagatgtcgtgactttcacgttggtcagaggcgggaagcagctcgaagcgtacctggatcgtcaacagcccccattccgcattactcaagccagaaagtacgtcttcaagcgccttggaaatatttcggttttcaacaaagatcttcaagattggatcgcccagggtcgaccagccgtctggcagcccaaaatgcgcgctgaccagagccgtgctcgttcctcatcgcgaggtgacaacaaatccggtcccctcacgagcaatggagatcttcgtaatcgcacaggcggtggaagtagccagggatacaggcgcatcccaaaacgcccaattcatggacttccgccccgacctcccactcccccgcctcctccgccgcgtcctttcgacttctcgaatctcccaggttctgtcaacgcaaacccctacggcgctccggttggtggtgtccaagtccagactcatcaccgtggaaacccctatggtggcttcaacatgattaaaccccttcaaccagagacaccctatacttctatgtcacgtggattctcgagcaatgtccatcctaccagcccccagcctggtggaacccctgtgtgtctcccttcacctatgcacaagctggccagcaagtattcctacggccacggctacggcaatcccgatgagcagggtgccgttcttgagaccccgacatcccccgtctccccagcgttcgctcccaacactgtcgcctactcgcccacctataattag

SEQ ID NO: 3065 - protein, 365 aa, Muscodor strobelii
  misc_feature: SGI Peptide ID NO. 560669
MSSSPTSSSQSVAAPATPRSLTKSNTTTSSPVSESSVQPAEACSWKEHDLNTVWAFMCRLEHVPDKTKRLARIRARKGFNKSQILQNEWVYRLTNKLNDALNRKYNDCLSKEDVQDVVTFTLVRGGKQLEAYLDRQQPPFRITQARKYVFKRLGNISVFNKDLQDWIAQGRPAVWQPKMRADQSRARSSSRGDNKSGPLTSNGDLRNRTGGGSSQGYRRIPKRPIHGLPPRPPTPPPPPPRPFDFSNLPGSVNANPYGAPVGGVQVQTHHRGNPYGGFNMIKPLQPETPYTSMSRGFSSNVHPTSPQPGGTPVCLPSPMHKLASKYSYGHGYGNPDEQGAVLETPTSPVSPAFAPNTVAYSPTYN

SEQ ID NO: 3066 - DNA, 1482 bp, Muscodor strobelii
  misc_feature: SGI cDNA ID NO. 560670
  misc_feature: Encodes the peptide sequence at SEQ ID NO 3067
atggcatcacagtcgtccccatcatcgaccttaatctttgatagccgaacacaaatcatagataactgcgaatttgtgttaaacaaggacgacagcattacagtggttacaagcaaagaccccaatgacaaattcttcaaatcatacgctgtccgttgtaatgaagatgttcgtgaagtggttttggagtccaatccctgtgaaaccgcccaggaagccacggaatctcttcacacaaagtcatgcgaagctatccataactacatcacgaccaatggcttcgcaaaccctcgagatcataagatgatgttcatcgacgacgcccaaagcgatgtcgatgacgatgctgcctccatcatctccggccgctccgaatcctctaccgtggctttctctgactgggctcactcggacgatgaggcgacgatggttcatcaggagcaacgtacgccccaaactaatggtggggaaaaaatagcaggcctcgcacctagagtactcggagattctgagtgggatcaagcctgcgtggctgctgacaaaaaaagagccttgcgctcaccagaggctctgaataaaactgctgatccggatgtttcatcacccccacgcgccgcccgcgtcatccggtcgccccctgatcgtatacattgtcgttcgcctcagctggcctgtcgacagccgccaccgccgccacctcctgggtgggctagtcctccagctcctccaccttccatgagagggatgccgccgaatttgaaaccatccggaccgcaacgaactcggcaatcccctccgttacctccgaaccttcatcagcagcaaagacatatcccgcgtcaatgtcgtccccagaatgtcccagtgccgcctcagcatgtggcctacttcccaaattttaatacgcctgctcactcacagggttgtccccatcctccaacgagtcaagggcaggtggtccggagggaaatacgcccaaacccaagtccctgtcatgctttcaacccgacccggggacctccagtaaccgtctcatcccggctccgaactgttcgccttaatatccactggctacgccacgggaatcatcgcatcgtagcagtctgccaggcgaacattcgggcactcgaggatgcagcgatgacccatgtcagagggactccagaagcattcctcggcgggtctaataagccccagctagaagaatctgtggttcgcaagggcgactcgctagaaagtgggaaaggctttggcacacggtatctacgtgcctgcgttagtcgagtcatattcagcaataatacatcttgtgatatgcggggattccgcggagacgacttgagcagcttctttggcagcgatgtagtcccttgctttgaggtcgtcgtcgaatcacttgaagacaaggcgatcttagatgatgtctccgagtcttcgcagggagcaggggacttgacggaggacgaagatcagtgggagtga

SEQ ID NO: 3067 - protein, 493 aa, Muscodor strobelii
  misc_feature: SGI Peptide ID NO. 560670
  misc_feature (13)..(95): NCBI GI: 171685656 Blast Desc: protein product [Podospora anserina] gi|170942789|emb|CAP68442.1| protein product [Podospora anserina]
  misc_feature (21)..(121): NCBI GI: 116208128 Blast Desc: CHGG_03357 [Chaetomium globosum CBS 148.51] gi|88183954|gb|EAQ91422.1| CHGG_03357 [Chaetomium globosum CBS 148.51]
MASQSSPSSTLIFDSRTQIIDNCEFVLNKDDSITVVTSKDPNDKFFKSYAVRCNEDVREVVLESNPCETAQEATESLHTKSCEAIHNYITTNGFANPRDHKMMFIDDAQSDVDDDAASIISGRSESSTVAFSDWAHSDDEATMVHQEQRTPQTNGGEKIAGLAPRVLGDSEWDQACVAADKKRALRSPEALNKTADPDVSSPPRAARVIRSPPDRIHCRSPQLACRQPPPPPPPGWASPPAPPPSMRGMPPNLKPSGPQRTRQSPPLPPNLHQQQRHIPRQCRPQNVPVPPQHVAYFPNFNTPAHSQGCPHPPTSQGQVVRREIRPNPSPCHAFNPTRGPPVTVSSRLRTVRLNIHWLRHGNHRIVAVCQANIRALEDAAMTHVRGTPEAFLGGSNKPQLEESVVRKGDSLESGKGFGTRYLRACVSRVIFSNNTSCDMRGFRGDDLSSFFGSDVVPCFEVVVESLEDKAILDDVSESSQGAGDLTEDEDQWE

SEQ ID NO: 3068 - DNA, 6766 bp, Muscodor strobelii
  misc_feature: SGI EST ID NO. CUFF.7620.0
  misc_feature: Variant of the nucleotide sequence at SEQ ID NO 3066
attgaatgtttctgcgcctatttgtcaagtaccttgactaattctccagccagaatactgtgaatgttgtcgacgccagtacctcagcaacctagtgcagtacctctatgcgagtcgaccttcatctccaagctctcgctgcatgtactttgacctagctgtctttggtcgcgctactcagaattcgaccccaaattccaacaccaagcgcgcctgcaaagctgccaacggcgctcatctgaaagcagcattcatggcgaagctctttcctaatcgtatttggtaaacaatcggtcgcactttgcgcacacaagcacatttcgtttctaaatacatctgcactctgtcagtataggcgcacctttcatctgtgaggctgctgtccaggcagaaatgcacttttcgcctgagatctgacgccccgatcgcctcgaccgcctcacttccctggcccaaaatgccaaagataaagagctacacaccctcgtggctatcgagcccttcgcctggtcaccaactcttcgcacctagtcccggcacctctcatgctgtgcctgctcccccgaccggtcctcgtcgtaccatcgccagacgtggcaccgaagttttcatcgccgtcggcagagagatcagatgggccgatctagtataccttaaggagaggtggcaggagaagaatgcccagactcgcatcaagcgcgagtcatcctcggatcctgaagaccgcgacatcatcagagcctccatagaagatggctgtgccgaaggcttcagaaccatcaaaccctctgtcggcagcgacatccagcagctaattatctcaccttatgctaatctcatggctgttgtgactacacacacgctccgcgtcatcgtgctgcccgattcgtcgcacctcacagcccccagcatcgatgccataaagcccaagtcctggactctcgggcctactgtacatgtcacagaccgctcgcctattgcctctgccatctggcacccacttggtgtcaatggctcgacgctcgtcacagtcacgaaggatgcaatagtgagagtctgggagttatcccagacagatcgctggtcgttcgatacacctaccttgtccatcgatcttcccaagctagcagatggcacctccctagatcagaacttcgctaccaacgatgcgacgaacaagggattctcgcctgattctttcgagatggatgttgcagcggcgtgctttgcgggccgaggatctggaggctggtctcccatgaccctgtggattgccatgagagaaggggatgtgtatgccttgtgcccattgctaccaactcagtgggcaccacctcagaccttgattccgtcgctaacaatgtcggttgtcggtaacaccgcagcctctgaggatgacccggacgtgtctgagcaaggcaagttgttggcgcggcaacagttggagtggatgtcggatctggataatcaggagcccagaataatcgagggtcctcccggagaaccacccaccgagatttacaagagaccctcacgaccaggtgctacacctcgcttgcagggaccctttgtcctagatctaagtccaggcagcgaggacgaacttgataccgagctgacagatatattcgtcatcggtgagaagctggatactgatgagctgatgttcggcgaagaggaggagctggagctggaagagatcgaaagagaaggcctctccttatctgtgatctgtctcctttcttcgagcggccaagttcaagtctgcttggacaccgccggcgtgcaggctcagtggttaccaccccgaaataagcttaagactatggggcgtctggtcggatcatccacacttttgacatttcaaagtctggacgtgctgaaccccttagagatgatagaggactcgtggcctgttttctgccccgatgttatgtctcgatatgcattttacgtcacccatccatcgagcataacctacatatctttaaccccgtgggtgttcaggctagagaatgagctccagagcggctctgatgcaggctctgagttcagactcagggttatggtgaacggcccccgatgcaaacgagaaagactctacacaagccctgcccagggcgatgtacagctacctctcagtgcttctattcccgttcgagatcctgatctaggttatttcttgctatctgccacgccgttcgagcccatcgccttatcatttgaggtacctgaagacgaattcgtaccgctacgatcactctcgccctccttcgacaaggatgcggaagtgcagccattggatttcttcgagcctcgccctgtctatcaaccatcacatgcttttgacgaaagcggattccctcaatttatagagaaactacgatcaagtcgacacaaaacggtcatgtctcaagaagtgcgactgtcacccctcacgttgcagttgtttacaatggcacacaaagtcctgagtgacgacacacacagactgggcgttgcagcgtcagaagtcttccgccgatgcttaaaactccaagacgatctccgacaccaaattgctaaagccaacgaggttaagagccgcgttgaggccatcacaggtgaagaccaaggtgatgatggcgaaacagtgtccaacaatgcctccattgagagacggttgcaggctgtcaaaatgaagggcgacgccctgagccagcgtttggagagaatgaggaagacagttaacaaggcgaccagtagggaactgagcaagaaggaacaggactgggtaaaggaagtcaagacgcttgattctggaatatttggctcggctctcccaacagatggaccaaatcgggcccagcattacatggagcggtatgcaaaaattatggatttgcgggatgaattggcagagcaggcaaaggcgttggctatcccggcgggtgaagaagatgatgcgtcaagtccggccagggctgacctgcgcattccatctgacctcaggcgcgcgaagatcgatcaagtcaaagcacttcttgagcgagagagcgccttggttgaggccgtcaagtccagactggaacgcctgtctgttgctgcataggtataaacgaggagctcgccgtttgtactcattactgagaaacacatagttgtaaaattggacacgctgtccccggtcagcatcacattcatgcttactggcccccatgccatgtgccatgttgaacagatctttttcagggggcggtcagaattattgtgtgtcgtggcgtgctcatgtcgaatgcatcccacgggcatccctcgccggcgaatgaaatcaaatgtctctcctggccattgagaatggtgatgtggcgtttgcgccgtgagctgtgagtccaactaaccccggcagagaaatgaagctgtatgtggttttgagccgaatggtcttcgcagcttcgaacgtccatattaagtagcaggactgatgcctaaagttgaaaagaatgtccaagacatcttgtcgaattattgcactttcttcactttaagaaataacatataaatggatagattttccggttcctcgtccccgacacctctccaagaacttgtgcactactaagcggcggtgtagcgtctccgtcttgagaaacctacctacctaggtatgcaagcaagcaggtccatgcaggaccggttcttaccacaatctattggcaattgacgcaccagagcaggtcgcctcatcttttttctactacagtccacagtccgacgtccgttgctgatgtacaactaaccaacttcgccacgggattcgcgtaacccactatatgctaatttcagataatgttcgggaatgtttcttgaaccacacagtggaggatcgatcaaataatcacttatcaacaaatttctgggggccaatgtcatcccaagacaggatcggcaagacgttgcacttggtgcccatacagtaactcattgatccagatatgccaacccggggcttttctccaaggaccgtgagtgaggctccgagatattttgcggactttttcttttcttgaggctccaatccaataacaaggtcaagggggaatgacacttgagaccgggtttggcgacactttggcccttcccggcatcgatgtgcaatcatgcatgctcccatattcgaccaattgtggacggcaagacgtgcgagtggctgcagcctcctgcacaagtatttgtggtataatataaatataagacatcgtgcttcaaacttcgaccatggtcttcgcagtgagatttctacacttcacgttcctcgatgctagtttttctacaagagccaatcaagtcggccatatcttcatatcaaattcgcccaaatctagttatggcatcacagtcgtccccatcatcgaccttaatctttgatagccgaacacaaatcatagataactgcgaatttgtgttaaacaaggacgacagcattacagtggttacaagcaaagaccccaatgacaaattcttcaaatcatacgctgtccgttgtaatgaagatgttcgtgaagtggttttggagtccaatccctgtgaaaccgcccaggaagccacggaatctcttcacacaaagtcatgcgaagctatccataactacatcacgaccaatggcttcgcaaaccctcgagatcataagatgatgttcatcgacgacgcccaaagcgatgtcgatgacgatgctgcctccatcatctccggccgctccgaatcctctaccgtggctttctctgactgggctcactcggacgatgaggcgacgatggttcatcaggagcaacgtacgccccaaactaatggtggggaaaaaatagcaggcctcgcacctagagtactcggagattctgagtgggatcaagcctgcgtggctgctgacaaaaaaagagccttgcgctcaccagaggctctgaataaaactgctgatccggatgtttcatcacccccacgcgccgcccgcgtcatccggtcgccccctgatcgtatacattgtcgttcgcctcagctggcctgtcgacagccgccaccgccgccacctcctgggtgggctagtcctccagctcctccaccttccatgagagggatgccgccgaatttgaaaccatccggaccgcaacgaactcggcaatcccctccgttacctccgaaccttcatcagcagcaaagacatatcccgcgtcaatgtcgtccccagaatgtcccagtgccgcctcagcatgtggcctacttcccaaattttaatacgcctgctcactcacagggttgtccccatcctccaacgagtcaagggcaggtggtccggagggaaatacgcccaaacccaagtccctgtcatgctttcaacccgacccggggacctccagtaaccgtctcatcccggctccgaactgttcgccttaatatccactggctacgccacgggaatcatcgcatcgtagcagtctgccaggcgaacattcgggcactcgaggatgcagcgatgacccatgtcagagggactccagaagcattcctcggcgggtctaataagccccagctagaagaatctgtggttcgcaagggcgactcgctagaaagtgggaaaggctttggcacacggtatctacgtgcctgcgttagtcgagtcatattcagcaataatacatcttgtgatatgcggggattccgcggagacgacttgagcagcttctttggcagcgatgtagtcccttgctttgaggtcgtcgtcgaatcacttgaagacaaggcgatcttagatgatgtctccgagtcttcgcagggagcaggggacttgacggaggacgaagatcagtgggagtgagcagcccatctgtgatgacaatgatcaacaaagtggacagcaggatgccacaagggtaatcaaatggtgaacattgcgagagcatgaactttcttggtaccaccttgcggcatggcgtagggctcatgcatctctgacccgttcgcccatcatggttggacaggtttgagcaagctaatgtcgtggtattgaatcctggtcacctctttcctcgcattggacgcgatttatccattcatctgttaaatcatctgccctcatatgtcactcgttacatgcatatttactgcaccgattcatcgccttcttcttctcagatcacaattctctgattttccagcttacttctttttttacccctgatctttctttttcttcccctattagcacaataggtgccaaggagtcggttcaaaaggtgttttgggtttaaggaggaccatagagaatataggcatggagcttttgatgataacctgacctatgttaagagtctatgattagatcgcgaatccattgacacgggaattgataaattcaaagtctctagcccacctcgatctgagcttcattatctcgtgaactcggcgttttggagattacggtttctggaaatatgaaccaaccagaacagcgggtagctgagcgtagacccaaatggtccctgcataatggcctccaaccaccttccttcaaaccaaatccaacagttcatccataatgaatggtgcaaaatgtgttgttgcgcagttggagaatacgggaggaagcgctagtcgcctcattcgacgatcgttactgtaatgaagaagagtaagttgccaattttacatatataaggtaacgactccaactttcagccaggttcaggggtggagctctcgacgacaatgaagtcggcacttcagggacaattaa

SEQ ID NO: 3069 - DNA, 2634 bp, Muscodor strobelii
  misc_feature: SGI cDNA ID NO. 560671
  misc_feature: Encodes the peptide sequence at SEQ ID NO 3070
atgccaaagataaagagctacacaccctcgtggctatcgagcccttcgcctggtcaccaactcttcgcacctagtcccggcacctctcatgctgtgcctgctcccccgaccggtcctcgtcgtaccatcgccagacgtggcaccgaagttttcatcgccgtcggcagagagatcagatgggccgatctagtataccttaaggagaggtggcaggagaagaatgcccagactcgcatcaagcgcgagtcatcctcggatcctgaagaccgcgacatcatcagagcctccatagaagatggctgtgccgaaggcttcagaaccatcaaaccctctgtcggcagcgacatccagcagctaattatctcaccttatgctaatctcatggctgttgtgactacacacacgctccgcgtcatcgtgctgcccgattcgtcgcacctcacagcccccagcatcgatgccataaagcccaagtcctggactctcgggcctactgtacatgtcacagaccgctcgcctattgcctctgccatctggcacccacttggtgtcaatggctcgacgctcgtcacagtcacgaaggatgcaatagtgagagtctgggagttatcccagacagatcgctggtcgttcgatacacctaccttgtccatcgatcttcccaagctagcagatggcacctccctagatcagaacttcgctaccaacgatgcgacgaacaagggattctcgcctgattctttcgagatggatgttgcagcggcgtgctttgcgggccgaggatctggaggctggtctcccatgaccctgtggattgccatgagagaaggggatgtgtatgccttgtgcccattgctaccaactcagtgggcaccacctcagaccttgattccgtcgctaacaatgtcggttgtcggtaacaccgcagcctctgaggatgacccggacgtgtctgagcaaggcaagttgttggcgcggcaacagttggagtggatgtcggatctggataatcaggagcccagaataatcgagggtcctcccggagaaccacccaccgagatttacaagagaccctcacgaccaggtgctacacctcgcttgcagggaccctttgtcctagatctaagtccaggcagcgaggacgaacttgataccgagctgacagatatattcgtcatcggtgagaagctggatactgatgagctgatgttcggcgaagaggaggagctggagctggaagagatcgaaagagaaggcctctccttatctgtgatctgtctcctttcttcgagcggccaagttcaagtctgcttggacaccgccggcgtgcaggctcagtggttaccaccccgaaataagcttaagactatggggcgtctggtcggatcatccacacttttgacatttcaaagtctggacgtgctgaaccccttagagatgatagaggactcgtggcctgttttctgccccgatgttatgtctcgatatgcattttacgtcacccatccatcgagcataacctacatatctttaaccccgtgggtgttcaggctagagaatgagctccagagcggctctgatgcaggctctgagttcagactcagggttatggtgaacggcccccgatgcaaacgagaaagactctacacaagccctgcccagggcgatgtacagctacctctcagtgcttctattcccgttcgagatcctgatctaggttatttcttgctatctgccacgccgttcgagcccatcgccttatcatttgaggtacctgaagacgaattcgtaccgctacgatcactctcgccctccttcgacaaggatgcggaagtgcagccattggatttcttcgagcctcgccctgtctatcaaccatcacatgcttttgacgaaagcggattccctcaatttatagagaaactacgatcaagtcgacacaaaacggtcatgtctcaagaagtgcgactgtcacccctcacgttgcagttgtttacaatggcacacaaagtcctgagtgacgacacacacagactgggcgttgcagcgtcagaagtcttccgccgatgcttaaaactccaagacgatctccgacaccaaattgctaaagccaacgaggttaagagccgcgttgaggccatcacaggtgaagaccaaggtgatgatggcgaaacagtgtccaacaatgcctccattgagagacggttgcaggctgtcaaaatgaagggcgacgccctgagccagcgtttggagagaatgaggaagacagttaacaaggcgaccagtagggaactgagcaagaaggaacaggactgggtaaaggaagtcaagacgcttgattctggaatatttggctcggctctcccaacagatggaccaaatcgggcccagcattacatggagcggtatgcaaaaattatggatttgcgggatgaattggcagagcaggcaaaggcgttggctatcccggcgggtgaagaagatgatgcgtcaagtccggccagggctgacctgcgcattccatctgacctcaggcgcgcgaagatcgatcaagtcaaagcacttcttgagcgagagagcgccttggttgaggccgtcaagtccagactggaacgcctgtctgttgctgcatag

SEQ ID NO: 3070 - protein, 877 aa, Muscodor strobelii
  misc_feature: SGI Peptide ID NO. 560671
  misc_feature (1)..(873): NCBI GI: 46122219 Blast Desc: FG05487.1 [Gibberella zeae PH-1]
  misc_feature (1)..(873): NCBI GI: 256729713 Blast Desc: [Nectria haematococca mpVI 77-13-4]
  misc_feature (1)..(875): NCBI GI: 261358273 Blast Desc: conserved [Verticillium albo-atrum VaMs.102]
  misc_feature (1)..(876): NCBI GI: 154315643 Blast Desc: BC1G_04394 [Botryotinia fuckeliana B05.10] gi|150847334|gb|EDN22527.1| BC1G_04394 [Botryotinia fuckeliana B05.10]
  misc_feature (1)..(876): NCBI GI: 171685654 Blast Desc: protein product [Podospora anserina] gi|170942788|emb|CAP68441.1| protein product [Podospora anserina]
  misc_feature (1)..(876): NCBI GI: 156033109 Blast Desc: SS1G_13630 [Sclerotinia sclerotiorum 1980] gi|154699033|gb|EDN98771.1| SS1G_13630 [Sclerotinia sclerotiorum 1980]
  misc_feature (1)..(875): NCBI GI: 85080733 Blast Desc: NCU00209 [Neurospora crassa OR74A] gi|28917664|gb|EAA27358.1| conserved [Neurospora crassa OR74A]
  misc_feature (1)..(876): NCBI GI: 116208126 Blast Desc: CHGG_03356 [Chaetomium globosum CBS 148.51] gi|88183953|gb|EAQ91421.1| CHGG_03356 [Chaetomium globosum CBS 148.51]
  misc_feature (1)..(876): NCBI GI: 169783914 Blast Desc: [Aspergillus oryzae RIB40] gi|83775163|dbj|BAE65286.1| protein product [Aspergillus oryzae]
  misc_feature (1)..(876): NCBI GI: 121698316 Blast Desc: conserved [Aspergillus clavatus NRRL 1] gi|119395923|gb|EAW06355.1| conserved [Aspergillus clavatus NRRL 1]
MPKIKSYTPSWLSSPSPGHQLFAPSPGTSHAVPAPPTGPRRTIARRGTEVFIAVGREIRWADLVYLKERWQEKNAQTRIKRESSSDPEDRDIIRASIEDGCAEGFRTIKPSVGSDIQQLIISPYANLMAVVTTHTLRVIVLPDSSHLTAPSIDAIKPKSWTLGPTVHVTDRSPIASAIWHPLGVNGSTLVTVTKDAIVRVWELSQTDRWSFDTPTLSIDLPKLADGTSLDQNFATNDATNKGFSPDSFEMDVAAACFAGRGSGGWSPMTLWIAMREGDVYALCPLLPTQWAPPQTLIPSLTMSVVGNTAASEDDPDVSEQGKLLARQQLEWMSDLDNQEPRIIEGPPGEPPTEIYKRPSRPGATPRLQGPFVLDLSPGSEDELDTELTDIFVIGEKLDTDELMFGEEEELELEEIEREGLSLSVICLLSSSGQVQVCLDTAGVQAQWLPPRNKLKTMGRLVGSSTLLTFQSLDVLNPLEMIEDSWPVFCPDVMSRYAFYVTHPSSITYISLTPWVFRLENELQSGSDAGSEFRLRVMVNGPRCKRERLYTSPAQGDVQLPLSASIPVRDPDLGYFLLSATPFEPIALSFEVPEDEFVPLRSLSPSFDKDAEVQPLDFFEPRPVYQPSHAFDESGFPQFIEKLRSSRHKTVMSQEVRLSPLTLQLFTMAHKVLSDDTHRLGVAASEVFRRCLKLQDDLRHQIAKANEVKSRVEAITGEDQGDDGETVSNNASIERRLQAVKMKGDALSQRLERMRKTVNKATSRELSKKEQDWVKEVKTLDSGIFGSALPTDGPNRAQHYMERYAKIMDLRDELAEQAKALAIPAGEEDDASSPARADLRIPSDLRRAKIDQVKALLERESALVEAVKSRLERLSVAA

SEQ ID NO: 3071 - DNA, 6766 bp, Muscodor strobelii; identical to SEQ ID NO: 3068
  misc_feature: SGI EST ID NO. CUFF.7620.0
  misc_feature: Variant of the nucleotide sequence at SEQ ID NO 3069

SEQ ID NO: 3072 - DNA, 615 bp, Muscodor strobelii
  misc_feature: SGI cDNA ID NO. 560672
  misc_feature: Encodes the peptide sequence at SEQ ID NO 3073
atgccttcggctctccgatccaccgttgatcggctggacaggcccagcgcctactatcacagccgcaacaacaagagcaggagacgaaatgaccgtggccgtgacggcagagacgagagagacggcaaggatggcgacacagacatggctgatgccaaacccgaagagccacctgaggaccccctgaagaatgccactaccctctacgtcggtaatctgtcattctacactactgaggagcaggtatatgagttattctctaagtgcggtgagatcaagcgcctggtcatgggcctagacaggttccagaagactccgtgcggcttctgcttcgtcgaatactacacccaccaagatgctctagactgcatgaagtacattggaggaaccaagctggatgagcgcatcatccgtaccgatctagaccccggtttcgaggagggtcgtcaatatggtcgtggcaagtctggcggccaggtgcgtgacgagtaccgcgatgacttcgatgaagggcgaggaggtctgggcagagccattcagagtgagcgcatgcgtgacaacgagagaaaccgagatcgtgatcacaacgaagaggattatggacgactccgctag

SEQ ID NO: 3073 - protein, 204 aa, Muscodor strobelii
  misc_feature: SGI Peptide ID NO. 560672
  misc_feature (68)..(139): Pfam Id: PF00076 Pfam Desc: RNA recognition motif. (a.k.a. RRM, RBD, or RNP domain)
  misc_feature (1)..(188): NCBI GI: 156033107 Blast Desc: SS1G_13629 [Sclerotinia sclerotiorum 1980] gi|154699032|gb|EDN98770.1| SS1G_13629 [Sclerotinia sclerotiorum 1980]
  misc_feature (1)..(188): NCBI GI: 154315645 Blast Desc: nuclear cap binding protein subunit 2 [Botryotinia fuckeliana B05.10] gi|150847335|gb|EDN22528.1| nuclear cap binding protein subunit 2 [Botryotinia fuckeliana B05.10]
  misc_feature (1)..(204): NCBI GI: 261358272 Blast Desc: nuclear cap-binding protein subunit 2 [Verticillium albo-atrum VaMs.102]
  misc_feature (1)..(188): NCBI GI: 256729908 Blast Desc: [Nectria haematococca mpVI 77-13-4]
  misc_feature (1)..(182): NCBI GI: 46122221 Blast Desc: FG05488.1 [Gibberella zeae PH-1]
  misc_feature (5)..(188): NCBI GI: 225559401 Blast Desc: nuclear cap binding protein subunit 2 [Ajellomyces capsulatus G186AR]
  misc_feature (4)..(183): NCBI GI: 171685652 Blast Desc: protein product [Podospora anserina] gi|170942787|emb|CAP68440.1| protein product [Podospora anserina]
  misc_feature (4)..(188): NCBI GI: 239606356 Blast Desc: nuclear cap binding protein subunit 2 [Ajellomyces dermatitidis ER-3]
  misc_feature (5)..(188): NCBI GI: 154274135 Blast Desc: nuclear cap binding protein subunit 2 [Ajellomyces capsulatus NAm1] gi|150415527|gb|EDN10880.1| nuclear cap binding protein subunit 2 [Ajellomyces capsulatus NAm1] nuclear cap 2
  misc_feature (1)..(186): NCBI GI: 255935633 Blast Desc: Pc13g04070 [Penicillium chrysogenum Wisconsin 54-1255] gi|211583463|emb|CAP91476.1| Pc13g04070 [Penicillium chrysogenum Wisconsin 54-1255]
MPSALRSTVDRLDRPSAYYHSRNNKSRRRNDRGRDGRDERDGKDGDTDMADAKPEEPPEDPLKNATTLYVGNLSFYTTEEQVYELFSKCGEIKRLVMGLDRFQKTPCGFCFVEYYTHQDALDCMKYIGGTKLDERIIRTDLDPGFEEGRQYGRGKSGGQVRDEYRDDFDEGRGGLGRAIQSERMRDNERNRDRDHNEEDYGRLR

SEQ ID NO: 3074 - DNA, 1692 bp, Muscodor strobelii
  misc_feature: SGI EST ID NO. CUFF.7667.1
  misc_feature: Variant of the nucleotide sequence at SEQ ID NO 3072
ctcaggcaaaacgccggccataagtaggtaacccaatcatttgccgcataagctgatgacagctttgctcatcttactatctcaagggaggctagatccaacatgccttcggctctccgatccaccgttgatcggctggacaggcccagcgcctactatcacagccgcaacaacaagagcaggagacgaaatgaccgtggccgtgacggcagagacgagagagacggcaaggatggcgacacagacatggctgatgccaaacccgaagagccacctgaggaccccctgaagaatgccactaccctctacgtcggtaatctgtcattctacactactgaggagcaggtatatgagttattctctaagtgcggtgagatcaagcgcctggtcatgggcctagacaggttccagaagactccgtgcggcttctgcttcgtcgaatactacacccaccaagatgctctagactgcatgaagtacattggaggaaccaagctggatgagcgcatcatccgtaccgatctagaccccggtttcgaggagggtcgtcaatatggtcgtggcaagtctggcggccaggtgcgtgacgagtaccgcgatgacttcgatgaagggcgaggaggtctgggcagagccattcagagtgagcgcatgcgtgacaacgagagaaaccgagatcgtgatcacaacgaagaggattatggacgactccgctaggacagaggctcagacttttgggctcagaaccgatttccatctttaggtgggagaggaggaaactatggttcaccagaaaactcatcaccaacatgtacattagaggggcacaatctactctatggcaacaaaatgcctacggcgttgagcagtagcatcgcggcaatttacagagatcatctattcattcgcgactcttatctaatgttcatcccatgatatatattttatgtgctgggccctctcctcaaatcagtagtagcctaagccgtgttttttggtacattgaatagtgtacacaggcgatccaagtctcagtcgtgtccatcgcctgatgtgatggatactgccagatcctctataacctccatcaaggtctcttgtccttataatccgtccagtgctgtccattactttaataaccaggtgggttgatccgttgcgagactcgcgtccatttgggcagctctgtaggaaatcatcattatcagcgcatcaatctttcagaggcaggcttgagttcgcgcttgtatgagggtaacgtactgtgtatgccctttctatatctcttctctttgcgatcgaacatagtgtatttgtctctgggcaacatctcgacctcggtgggcatggtctcggaccatgcatcaagcgatttcatagtctggccctgcttggctagggcttgctggacagtggcgacgacggagtcaacagcgcgcagacgaagtcgatggcgggctttctggaactttgagagccgccatggggttttcctgtcggggtcatattagcgggcggccgagtgatagtagtgacgcgagatcgagcagagatgacgcaccatagtagaccactcgataatgagtttgtggctctgaaggcaccaaacatgatgaagttggcgatgcaagtcgttgagacaatgcacgtgaaatgggttcggggccgtcgttcgatgacagcaaaagtttc

SEQ ID NO: 3075 - DNA, 333 bp, Muscodor strobelii
  misc_feature: SGI cDNA ID NO. 560673
  misc_feature: Encodes the peptide sequence at SEQ ID NO 3076
atgtttggtgccttcagagccacaaactcattatcgagtggtctactatggaaaaccccatggcggctctcaaagttccagaaagcccgccatcgacttcgtctgcgcgctgttgactccgtcgtcgccactgtccagcaagccctagccaagcagggccagactatgaaatcgcttgatgcatggtccgagaccatgcccaccgaggtcgagatgttgcccagagacaaatacactatgttcgatcgcaaagagaagagatatagaaagggcatacacaagctgcccaaatggacgcgagtctcgcaacggatcaacccacctggttattaa

SEQ ID NO: 3076 - protein, 110 aa, Muscodor strobelii
  misc_feature: SGI Peptide ID NO. 560673
  misc_feature (1)..(110): NCBI GI: 46122223 Blast Desc: FG05489.1 [Gibberella zeae PH-1]
  misc_feature (1)..(110): NCBI GI: 256729712 Blast Desc: [Nectria haematococca mpVI 77-13-4]
  misc_feature (1)..(110): NCBI GI: 261358271 Blast Desc: 54S ribosomal protein L31 [Verticillium albo-atrum VaMs.102]
  misc_feature (1)..(110): NCBI GI: 156033105 Blast Desc: SS1G_13628 [Sclerotinia sclerotiorum 1980] gi|154699031|gb|EDN98769.1| SS1G_13628 [Sclerotinia sclerotiorum 1980]
  misc_feature (1)..(110): NCBI GI: 116208122 Blast Desc: CHGG_03354 [Chaetomium globosum CBS 148.51] gi|88183951|gb|EAQ91419.1| CHGG_03354 [Chaetomium globosum CBS 148.51]
  misc_feature (1)..(110): NCBI GI: 171685650 Blast Desc: protein product [Podospora anserina] gi|170942786|emb|CAP68439.1| protein product [Podospora anserina]
  misc_feature (1)..(110): NCBI GI: 164428935 Blast Desc: NCU00211 [Neurospora crassa OR74A] gi|157072342|gb|EAA27360.2| conserved [Neurospora crassa OR74A]
  misc_feature (1)..(110): NCBI GI: 169612872 Blast Desc: SNOG_09564 [Phaeosphaeria nodorum SN15] gi|111061709|gb|EAT82829.1| SNOG_09564 [Phaeosphaeria nodorum SN15]
  misc_feature (1)..(110): NCBI GI: 189188710 Blast Desc: mitochondrial ribosomal protein subunit L31 [Pyrenophora tritici-repentis Pt-1C-BFP] gi|187972300|gb|EDU39799.1| mitochondrial ribosomal protein L31
  misc_feature (1)..(110): NCBI GI: 39976785 Blast Desc: MGG_06295 [Magnaporthe grisea 70-15] gi|145016309|gb|EDK00799.1| MGG_06295 [Magnaporthe grisea 70-15]
MFGAFRATNSLSSGLLWKTPWRLSKFQKARHRLRLRAVDSVVATVQQALAKQGQTMKSLDAWSETMPTEVEMLPRDKYTMFDRKEKRYRKGIHKLPKWTRVSQRINPPGY

SEQ ID NO: 3077 - DNA, 1421 bp, Muscodor strobelii
  misc_feature: SGI EST ID NO. CUFF.7668.2
  misc_feature: Variant of the nucleotide sequence at SEQ ID NO 3075
cgacggccccgaacccatttcacgtgcattgtctcaacgacttgcatcgccaacttcatcatgtttggtgccttcagagccacaaactcattatcgagtggtctactatggaaaaccccatggcggctctcaaagttccagaaagcccgccatcgacttcgtctgcgcgctgttgactccgtcgtcgccactgtccagcaagccctagccaagcagggccagactatgaaatcgcttgatgcatggtccgagaccatgcccaccgaggtcgagatgttgcccagagacaaatacactatgttcgatcgcaaagagaagagatatagaaagggcatacacaagctgcccaaatggacgcgagtctcgcaacggatcaacccacctggttattaaagtaatggacagcactggacggattataaggacaagagaccttgatggaggttatagaggatctggcagtatccatcacatcaggcgatggacacgactgagacttggatcgcctgtgtacactattcaatgtaccaaaaaacacggcttaggctactactgatttgaggagagggcccagcacataaaatatatatcatgggatgaacattagataagagtcgcgaatgaatagatgatctctgtaaattgccgcgatgctactgctcaacgccgtaggcattttgttgccatagagtagattgtgcccctctaatgtacatgttggtgatgagttttctggtgaaccatagtttcctcctctcccacctaaagatggaaatcggttctgagcccaaaagtctgagcctctgtcctagcggagtcgtccataatcctcttcgttgtgatcacgatctcggtttctctcgttgtcacgcatgcgctcactctgaatggctctgcccagacctcctcgcccttcatcgaagtcatcgcggtactcgtcacgcacctggccgccagacttgccacgaccatattgacgaccctcctcgaaaccggggtctagatcggtacggatgatgcgctcatccagcttggttcctccaatgtacttcatgcagtctagagcatcttggtgggtgtagtattcgacgaagcagaagccgcacggagtcttctggaacctgtctaggcccatgaccaggcgcttgatctcaccgcacttagagaataactcatatacctgctcctcagtagtgtagaatgacctacagaacaatttgttaagctcaatgatgtgagatcaagatatgtggaaagatgagcttacagattaccgacgtagagggtagtggcattcttcagggggtcctcaggtggctcttcgggtttggcatcagccatgtctgtgtcgccatccttgccgtctctctcgtctctgccgtcacggccacggtcatttcgtctcctgctcttgttgttct

SEQ ID NO: 3078 - DNA, 501 bp, Muscodor strobelii
  misc_feature: SGI cDNA ID NO. 560674
  misc_feature: Encodes the peptide sequence at SEQ ID NO 3079
atgtcatactacttcgtgatagtcggcacccaggacaacccgctcttcgagcatgaattcggcacttccaagtccggcggcgacgggcaggcccacttccccgaagcctcccgccacatgaaccagttcatcgtccactccagtctcgacatcgtcgaagaagtccaatggggcagcggccagatgtatctgaaatgcatcgatcgcttcttcaacagctacgtatcctgtttcctcaccggcggcaacatcaagttcatgctgctccatcagcccccgcccaccgccaacccttcgtccgcgcgcgcatccacctcctcctcgaccatcgcctccaacccgacctccccgcagaccgaagaggctgttcgtgccttcatgctcgaagtctacgaatcctgggtcaagactatcatgagcccattctaccgcgtgaacatggaggttacctcccccgttttccgccagcgcgttgtcgctgctggtaagaagtatctctag

SEQ ID NO: 3079 - protein, 166 aa, Muscodor strobelii
  misc_feature: SGI Peptide ID NO. 560674
  misc_feature (7)..(164): Pfam Id: PF04628 Pfam Desc: Sedlin, N-terminal conserved region
  misc_feature (1)..(166): NCBI GI: 154315649 Blast Desc: MIP-2A [Botryotinia fuckeliana B05.10] gi|150847337|gb|EDN22530.1| MIP-2A [Botryotinia fuckeliana B05.10]
  misc_feature (1)..(166): NCBI GI: 39976783 Blast Desc: trafficking protein particle complex subunit 2, [Magnaporthe grisea 70-15] gi|145016310|gb|EDK00800.1| trafficking protein particle complex subunit 2, [Magnaporthe
  misc_feature (1)..(166): NCBI GI: 261358270 Blast Desc: trafficking protein particle complex subunit 2 [Verticillium albo-atrum VaMs.102]
  misc_feature (1)..(166): NCBI GI: 256729907 Blast Desc: NECHADRAFT_47064 [Nectria haematococca mpVI 77-13-4]
  misc_feature (1)..(166): NCBI GI: 164428937 Blast Desc: NCU11174 [Neurospora crassa OR74A] gi|157072343|gb|EDO65406.1| NCU11174 [Neurospora crassa OR74A]
  misc_feature (1)..(148): NCBI GI: 46122225 Blast Desc: FG05490.1 [Gibberella zeae PH-1]
  misc_feature (1)..(166): NCBI GI: 171685648 Blast Desc: protein product [Podospora anserina] gi|170942785|emb|CAP68438.1| protein product [Podospora anserina]
  misc_feature (1)..(166): NCBI GI: 258574181 Blast Desc: conserved [Uncinocarpus reesii 1704] gi|237901538|gb|EEP75939.1| conserved [Uncinocarpus reesii 1704]
  misc_feature (1)..(166): NCBI GI: 119192894 Blast Desc: CIMG_00824 [Coccidioides immitis RS]
  misc_feature (1)..(166): NCBI GI: 240105922 Blast Desc: CPC735_054850 [Coccidioides posadasii C735 delta SOWgp]
MSYYFVIVGTQDNPLFEHEFGTSKSGGDGQAHFPEASRHMNQFIVHSSLDIVEEVQWGSGQMYLKCIDRFFNSYVSCFLTGGNIKFMLLHQPPPTANPSSARASTSSSTIASNPTSPQTEEAVRAFMLEVYESWVKTIMSPFYRVNMEVTSPVFRQRVVAAGKKYL

SEQ ID NO: 3080 - DNA, 1884 bp, Muscodor strobelii
  misc_feature: SGI EST ID NO. CUFF.7622.1
  misc_feature: Variant of the nucleotide sequence at SEQ ID NO 3078
tgacacggtcgagacaagtggaagtaaaggcacacaactcacatcaagtatttcattgacttacacttcgtcgcggcaacgttcagacggcagacacacacgatggataggcggaacagatgattttacgaggacgcgataaccatcgtctcacaaagtcaccgactctttctctcttttgcggtcgcatagagctcgggagccccgagttgcgcccaccaccttcactgccatcaccaccacctccgccgccatgtcatactacttcgtgatagtcggcacccaggacaacccgctcttcgagcatgaattcggcacttccaagtccggcggcgacgggcaggcccacttccccgaagcctcccgccacatgaaccagttcatcgtccactccagtctcgacatcgtcgaagaagtccaatggggcagcggccagatgtatctgaaatgcatcgatcgcttcttcaacagctacgtatcctgtttcctcaccggcggcaacatcaagttcatgctgctccatcagcccccgcccaccgccaacccttcgtccgcgcgcgcatccacctcctcctcgaccatcgcctccaacccgacctccccgcagaccgaagaggctgttcgtgccttcatgctcgaagtctacgaatcctgggtcaagactatcatgagcccattctaccgcgtgaacatggaggttacctcccccgttttccgccagcgcgttgtcgctgctggtaagaagtatctctagcttcttcgccttgcatggtgaggccaaggcatgtatggatcacaagcctcgtttgcagaatatctttaattgcctagctctgaaaagtagagcgagcatgtaccgttactcatccctcgatcgacacgtattaatgagtagctcactcataagattccgatggtcatcgtcaccaatggttcttaggcgataggcgtgaagccacattcgtgaggcggacacggcttcggatgcacgtcatgtcagggaatgaatccacgaatcaataccattaagcctatcccgcttccagcgtgcgtattgctggtttgatcgaccgataaataatatgtgtctcactcgaagccaaatcgcatggatattgggtgtatgtgtgtaagtaagcacatcgcttttccacgaggctccgaaaatctggggcgccaaactacccaaaatgcgacgaatcattgcagaacagataggattagtcattttagtgaatggaatgaaggagcaatgaatctaccaggagcctgatgtctgttctctgtcttcgatttatatgctaaggttagttagggggaacaatgttctatctatagcttgacgctcgcgctcgtattgagagccgatagatggccattgtacaccgggatctgcacatactatgcagcttctcagctactggtatttcattttatctatccgtgtagtagaagcaatattatgagcactctagagaagttcacattcccatctcgcgcctgcctgaccccttctctctattttctattaactatccgcttggtagtactgcatactcatgatacgacactatatgtcttaagccagtgatctacttaaaaacggcaccaatggccttcttggccaagctcttaggctgcttcttgccgtcttcgacatcttccttgtagaacctacgaccctcgtctaggttgattgtgtcgagacgcacataccaagggccacgatagtaacaacgagcaccgaggtagaggacgataagaacgacaatggaaatgtagctggagaaaaaacccttggcgctaggtgtcccacccatcggccatacggcattatagaattggactacaatcagcacagagctgaaaatcaacgcgtaccag

SEQ ID NO: 3081 - DNA, 1602 bp, Muscodor strobelii
  misc_feature: SGI cDNA ID NO. 560675
  misc_feature: Encodes the peptide sequence at SEQ ID NO 3082
atggaaccagtcatggacaacatgaaactatctccaggcgagagctcagatgacgatcacgagcgtagtggcgatcatggagctgagagccagctccaacgaagactcagcactcgtcacttgaccatgattgcgctgggttcgagtatcggtcaggggctatggcttggaagcggcgttgcactggcgttagggggaccggctgggactttcctgggatatctgcttgctggtactatggtctggtgcgtgagtcactcgattggtgagatggctgtcatgtatccgttgccttcggcatttattcagtggcaaggcaagttcgttgatcgttcctcggcttttgcactcggttggtcattctggttcgcgttcacactcaatatcgccaatgagctccaggcggtcaacacggttctcaacttctggactaacgcagtcccgattgcgggttggatcaccatctggtgggcgttcatcgtgctggttaacgtgggcgcggtgtcgatgctcggcgagatcgaggttgtgttcagcacgatcaagttcggttggatcgtcgttgtcgttatctctatgattattacatcggccggtggagctggcacggaaccgatcggcttcagatactggtatacggatacgttcgcgcataatggcttccggggcttcattgctatcctaccgatctgcatctttgccatggctggcgccgagagcgcaggtatcgtcgcgtccgagacggcgaatccaaagaagtcggtgccccgtgcagtcagctctatctggatccgcctggcgctgttctacctcctcggttctctcgtcgttaccatcaacgtcgaccccaagaacccgaacatcttcgggctatcaggcacgaatgcgtcaccctttgttattgcttaccgcgaggctgggctacctccgcttgcgcacctcatgaatgttgtcatcttcatctccgtgatttcagccgggacgatctcggcctacggcgcatctcgaacggccatgggcctggctcagctgggcatggcaccacgtcaactcctgatagccgacaagaagggccggccatggtttggcctcgtgcctacttttctcgtgggtggcggtctcgcgtacttgggagtgaatcaatctggatcggacgtattcaagtggctgtctagcctcacttcattgtttgtccttttcggctggggctcggtcagtctctcacacatccgttttcgccgggcctggaaggtccagggtcggactcttgaggaactaccatggcggtcatggctctatccgtacggtccctggtacgcgttgattttcagctctgtgctgattgtagtccaattctataatgccgtatggccgatgggtgggacacctagcgccaagggttttttctccagctacatttccattgtcgttcttatcgtcctctacctcggtgctcgttgttactatcgtggcccttggtatgtgcgtctcgacacaatcaacctagacgagggtcgtaggttctacaaggaagatgtcgaagacggcaagaagcagcctaagagcttggccaagaaggccattggtgccgtttttaagtag

SEQ ID NO: 3082 - protein, 533 aa, Muscodor strobelii
  misc_feature: SGI Peptide ID NO. 560675
  misc_feature (40)..(500): Pfam Id: PF00324 Pfam Desc: Amino acid permease
  misc_feature (40)..(490): Pfam Id: PF00324 Pfam Desc: Amino acid permease
  misc_feature (6)..(526): NCBI GI: 145234825 Blast Desc: An03g01590 [Aspergillus niger] gi|134057735|emb|CAK38132.1| protein product [Aspergillus niger]
  misc_feature (11)..(528): NCBI GI: 115402241 Blast Desc: conserved [Aspergillus terreus NIH2624] gi|114189043|gb|EAU30743.1| conserved [Aspergillus terreus NIH2624]
  misc_feature (17)..(533): NCBI GI: 119483600 Blast Desc: amino acid permease, [Neosartorya fischeri NRRL 181] gi|119409859|gb|EAW19806.1| amino acid permease, [Neosartorya fischeri NRRL 181]
  misc_feature (17)..(533): NCBI GI: 70983195 Blast Desc: amino acid transporter [Aspergillus fumigatus Af293] gi|66844750|gb|EAL85087.1| amino acid transporter, [Aspergillus fumigatus Af293]
  misc_feature (17)..(533): NCBI GI: 159124009 Blast Desc: amino acid transporter, [Aspergillus fumigatus A1163]
  misc_feature (25)..(515): NCBI GI: 169785297 Blast Desc: [Aspergillus oryzae RIB40] gi|238506289|ref|XP_002384346.1| amino acid transporter, [Aspergillus flavus NRRL3357] gi|83775857|dbj|BAE65976.1| protein
  misc_feature (14)..(515): NCBI GI: 145232260 Blast Desc: An02g04440 [Aspergillus niger] gi|134056494|emb|CAK37583.1| protein product [Aspergillus niger]
  misc_feature (6)..(526): NCBI GI: 238507876 Blast Desc: arginine permease, [Aspergillus flavus NRRL3357] gi|220688658|gb|EED45010.1| arginine permease, [Aspergillus flavus NRRL3357]
  misc_feature (14)..(526): NCBI GI: 169784898 Blast Desc: [Aspergillus oryzae RIB40] gi|83775657|dbj|BAE65777.1| protein product [Aspergillus oryzae]
  misc_feature (1)..(527): NCBI GI: 238496109 Blast Desc: histidine permease, [Aspergillus flavus NRRL3357] gi|220694170|gb|EED50514.1| histidine permease, [Aspergillus flavus NRRL3357]
MEPVMDNMKLSPGESSDDDHERSGDHGAESQLQRRLSTRHLTMIALGSSIGQGLWLGSGVALALGGPAGTFLGYLLAGTMVWCVSHSIGEMAVMYPLPSAFIQWQGKFVDRSSAFALGWSFWFAFTLNIANELQAVNTVLNFWTNAVPIAGWITIWWAFIVLVNVGAVSMLGEIEVVFSTIKFGWIVVVVISMIITSAGGAGTEPIGFRYWYTDTFAHNGFRGFIAILPICIFAMAGAESAGIVASETANPKKSVPRAVSSIWIRLALFYLLGSLVVTINVDPKNPNIFGLSGTNASPFVIAYREAGLPPLAHLMNVVIFISVISAGTISAYGASRTAMGLAQLGMAPRQLLIADKKGRPWFGLVPTFLVGGGLAYLGVNQSGSDVFKWLSSLTSLFVLFGWGSVSLSHIRFRRAWKVQGRTLEELPWRSWLYPYGPWYALIFSSVLIVVQFYNAVWPMGGTPSAKGFFSSYISIVVLIVLYLGARCYYRGPWYVRLDTINLDEGRRFYKEDVEDGKKQPKSLAKKAIGAVFK

SEQ ID NO: 3083 - DNA, 1142 bp, Muscodor strobelii
  misc_feature: SGI EST ID NO. CUFF.7626.0
  misc_feature: Variant of the nucleotide sequence at SEQ ID NO 3081
gcgatcatggagctgagagccagctccaacgaagactcagcactcgtcacttgaccatgattgcgctgggttcgagtatcggtcaggggctatggcttggaagcggcgttgcactggcgttagggggaccggctgggactttcctgggatatctgcttgctggtactatggtctggtgcgtgagtcactcgattggtgagatggctgtcatgtatccgttgccttcggcatttattcagtggcaaggcaagttcgttgatcgttcctcggcttttgcactcggttggtcattctggttcgcgttcacactcaatatcgccaatgagctccaggcggtcaacacggttctcaacttctggactaacgcagtcccgattgcgggttggatcaccatctggtgggcgttcatcgtgctggttaacgtgggcgcggtgtcgatgctcggcgagatcgaggttgtgttcagcacgatcaagttcggttggatcgtcgttgtcgttatctctatgattattacatcggccggtggagctggcacggaaccgatcggcttcagatactggtatacggatacgttcgcgcataatggcttccggggcttcattgctatcctaccgatctgcatctttgccatggctggcgccgagagcgcaggtatcgtcgcgtccgagacggcgaatccaaagaagtcggtgccccgtgcagtcagctctatctggatccgcctggcgctgttctacctcctcggttctctcgtcgttaccatcaacgtcgaccccaagaacccgaacatcttcgggctatcaggcacgaatgcgtcaccctttgttattgcttaccgcgaggctgggctacctccgcttgcgcacctcatgaatgttgtcatcttcatctccgtgatttcagccgggacgatctcggcctacggcgcatctcgaacggccatgggcctggctcagctgggcatggcaccacgtcaactcctgatagccgacaagaagggccggccatggtttggcctcgtgcctacttttctcgtgggtggcggtctcgcgtacttgggagtgaatcaatctggatcggacgtattcaagtggctgtctagcctcacttcattgtttgtccttttcggctggggctcg

SEQ ID NO: 3084 - DNA, 312 bp, Muscodor strobelii
  misc_feature: SGI cDNA ID NO. 560676
  misc_feature: Encodes the peptide sequence at SEQ ID NO 3085
atgactggacgcggcaagggcggcaagggcctcggaaagggcggtgccaagcgtcaccgaaagattcttcgtgacaacattcagggtatcaccaagcccgccatccgacgtctcgctcgtcgtggtggtgtcaagcgtatctctgccatgatctacgaagagacccgcggtgtcctcaagtccttcctcgagggtgtcatccgtgacgcagtcacctacaccgagcacgccaagcgcaagaccgtcacatccctcgacgtcgtctacgctctgaagcgacagggtcgtactctttacggtttcggtggttaa

SEQ ID NO: 3085 - protein, 103 aa, Muscodor strobelii; identical to SEQ ID NO: 515
  misc_feature: SGI Peptide ID NO. 560676
  misc_feature (25)..(94): Pfam Id: PF00125 Pfam Desc: Core histone H2A/H2B/H3/H4
  misc_feature (66)..(92): Pfam Id: PF02969 Pfam Desc: TATA box binding protein associated factor (TAF)
  misc_feature (1)..(103): NCBI GI: 39973387 Blast Desc: histone H4 [Magnaporthe grisea 70-15] gi|39976781|ref|XP_369778.1| histone H4.2 [Magnaporthe grisea 70-15] gi|154296461|ref|XP_001548661.1| histone H4 [Botryotinia
  misc_feature (5)..(103): NCBI GI: 171690210 Blast Desc: protein product [Podospora anserina] gi|170945053|emb|CAP71164.1| protein product [Podospora anserina]
  misc_feature (1)..(103): NCBI GI: 46122227 Blast Desc: H4_NEUCR Histone H4 [Gibberella zeae PH-1] gi|70995986|ref|XP_752748.1| histone H4.1 [Aspergillus fumigatus Af293] gi|85080745|ref|XP_956597.1| histone H4.1 [Neurospora H4
  misc_feature (1)..(103): NCBI GI: 115384376 Blast Desc: histone H4.2 [Aspergillus terreus NIH2624] gi|119481631|ref|XP_001260844.1| histone h4 [Neosartorya fischeri NRRL 181] gi|121716320|ref|XP_001275769.1| histone h4 clavatus 1]
  misc_feature (1)..(103): NCBI GI: 116204829 Blast Desc: histone H4.2 [Chaetomium globosum CBS 148.51] gi|88176426|gb|EAQ83894.1| histone H4.2 [Chaetomium globosum CBS 148.51]
  misc_feature (1)..(103): NCBI GI: 169763210 Blast Desc: [Aspergillus oryzae RIB40] gi|212531987|ref|XP_002146150.1| histone H4.1 [Penicillium marneffei ATCC 18224] gi|238489089|ref|XP_002375782.1| histone H4
  misc_feature (1)..(103): NCBI GI: 67523941 Blast Desc: H42_EMENI Histone H4.2 [Aspergillus nidulans FGSC A4] gi|169774419|ref|XP_001821677.1| [Aspergillus oryzae RIB40] gi|212537025|ref|XP_002148668.1| histone H4.2 [Penicillium ATCC
  misc_feature (1)..(103): NCBI GI: 169623333 Blast Desc: SNOG_14904 [Phaeosphaeria nodorum SN15] gi|189192066|ref|XP_001932372.1| histone H4 [Pyrenophora tritici-repentis Pt-1C-BFP] gi|111056636|gb|EAT77756.1| nodorum
  misc_feature (1)..(103): NCBI GI: 119186679 Blast Desc: histone H4 [Coccidioides immitis RS] gi|240108478|gb|EER26652.1| Histone H4, [Coccidioides posadasii C735 delta SOWgp]
  misc_feature (1)..(103): NCBI GI: 58257417 Blast Desc: histone H4-like protein [Magnaporthe grisea]

SEQ ID NO: 3086 - DNA, 949 bp, Muscodor strobelii
  misc_feature: SGI EST ID NO. CUFF.7635.0
  misc_feature: Variant of the nucleotide sequence at SEQ ID NO 3084
gattggtccaaatttgcactgatttctattttctgaggccagtccgcatcctttcttagctaaggctaatcagtcatccgacacaatcagcaactgccccccaattgtcccattaagtcaattgtccccgtacccttcttttccgactttctcctctctcttctccccttctcacgacttccacaacacacacgcccaccagctatcacacgcatttggcatcaacagccatctatcttcatcgacaaccaacatctactacactcaccaacccaaatcacaatgactggacgcggcaagggcggcaagggcctcggaaagggcggtgccaagcgtcaccgaaagattcttcgtgacaacattcagggtatcaccaagcccgccatccgacgtctcgctcgtcgtggtggtgtcaagcgtatctctgccatgatctacgaagagacccgcggtgtcctcaagtccttcctcgagggtgtcatccgtgacgcagtcacctacaccgagcacgccaagcgcaagaccgtcacatccctcgacgtcgtctacgctctgaagcgacagggtcgtactctttacggtttcggtggttaaagccactgttgtatatgcagcctttttttctgcccagacagttcaccttactctcttgtcgccatatcacatgtcgcagccggcttagtactgagaggcggaaggtctatgtttgtgcggtagatggttgttggttatgagatatcaattgtttgcaaacggttaagggcatgatacaagcataaggagaataataggcgttaggtggtttcggggatttgcactggtctacacgctgatttgagtctccgcaatgggagaaaaggcgtcggaaggaagacagccgatgtcctcacgtatgaatacaaacgcactgttcagcgcgcagtgacgcgtcaatcacaccttgtcgacc

SEQ ID NO: 3087 - DNA, 2430 bp, Muscodor strobelii
  misc_feature: SGI cDNA ID NO. 560677
  misc_feature: Encodes the peptide sequence at SEQ ID NO 3088
atggcgccttcgaatgctgctatcacagctcagttaaggcacgttgtgcactaccacctcgaccattacgcatacgacaatgccctcttcttctccgaacgacttgctgctcatgaccctcgctctggcgaatccgcatacctgctcgcgctctgccacttcaggcttggagaccacaggtccgcttatgagataagcaaagctgctggctatcgtggtattcaccttggctgcgccttcgtatttgcccagagctgcctcgtcctcgagagatacaaagatggcatcactgctctggagaagtctaaaggcttgtgttcgcagaagaccagcttggggaaacacacagcaactacgagagccccaagcccggactccgccagcgtctcgtgcttactagggaagctgtacagagcttatagtgacaagaaaaaggcaatcatcaacttcgaagatgcgttgaaagtaaatcccctcatgtgggatgccttcacggctttgtgtgacatgggcgttcatgtaaggacacaaaacattttcaagctgaacgacgtgttgctcgacgggctgagctatgatcaacctattggtatcctggtggagcagaaggataacagcgcagggaatcctgtggagccaatcaacaagaagtcgtctattcgctctgccgtatatgatgcattagatccatttggctcccagagatcaggtgcgtcaaatgacatagttttcgggaacaatttcctcacgacaggtcctggagagaacgacaccatgtctaagagtcatgcggctcgctctagggtggctaccgcacaagagcccgctcatgagactttgggcaccccaacaattgtgaatagtgatgctggtcagacacgatcgactttggccctggagccaccacaagcgccgagtcggaagataagaaacgcgcagttaactgagccgagtctcatcgatgcggcccctaagatgggatcccgattagggacgaaaaggagtcagaaagctcaggacgagtcttacgagaccaacccttctatcctccgagctaccgcttcgacgctttcggccattgagcgtaagaggaccgtatctgggcatccagttcccagacaacaatccgaggagcccgcacagagaaggagcgcgaggataaaaagtacgaccacacggacgaattcaggccctgccacgattggggccgctgcgacgagagaagtcaagaggccccagatctcacgtactatacgacatactgccagcagcaccggcatcggtaggattgccagtggcaatcgtaaggcgctggaggagaacggcatggatatagaccaagccgaagcaccacgatcgagagaagctcccgcgccattggcgaaatatgctgagcctgatgtggctaaagttgaagaaaccttcaagtaccttttggatcttctcagaaaactcggttccgggtatttggccctctctcaataccgctgtttagacgctcttgcttcgtatacatcactaccacgaacgcaccaagacacgccctgggttttgtctcaaatggggcgcgcgcactatgagcaggcatcatatggcgatgcagaaaagtactataggaggttgcgtattctcgcgcctacgcgcctggaagacatggaggtatactctaccatcctgtggtttctcaagcgagagacggatctttcctttctcgctcacgagctggttgactcgtcttggcattcgccccaagcatggtgtgctctcggtaacgcatggtcactcgcgcgtgatcatgagcaagcgctacgctgcttcaagcgggctacgcagctcaatcccaagtttgcatacgcgtttacgttgcaaggccacgaacatgtgtcgaatgaggaatatgaaaaggcccttacggcctatcgacaagctatttcggcggatcggcgccactataatgcatactatggcattggcagagtctatgaaaagcttggcagttacgacaaggcctacagccacttccattccgcatctatcatcaatcccaccaatgctgtcctcatctgttgtataggcaatgtgctcgagaagcaacggcaaatcggccaggcgttggagtatttcaccaaggctactgagcttgccccccaagcggctcagacccgatataagaaggctagggcattgctcgcccttaatcagctcgatgcggcacaaagggaattggagattctcaaaacccttgcacccgatgaagctacggtccatttccttctcggcaaactgtacaagacactgaatgacaagggctcagctgtccggcatttcacaattgccctgaatctagacccgaaggcaagccagcaaatcaaagaggccatcgaaagtctagaagaagaagacagttttgacgattctatgatggtatga

SEQ ID NO: 3088 - protein, 809 aa, Muscodor strobelii
  misc_feature: SGI Peptide ID NO. 560677
  misc_feature (583)..(616): Pfam Id: PF00515 Pfam Desc: Tetratricopeptide repeat
  misc_feature (651)..(684): Pfam Id: PF00515 Pfam Desc: Tetratricopeptide repeat
  misc_feature (685)..(718): Pfam Id: PF00515 Pfam Desc: Tetratricopeptide repeat
  misc_feature (617)..(650): Pfam Id: PF00515 Pfam Desc: Tetratricopeptide repeat
  misc_feature (583)..(616): Pfam Id: PF07719 Pfam Desc: Tetratricopeptide repeat
  misc_feature (685)..(718): Pfam Id: PF07719 Pfam Desc: Tetratricopeptide repeat
  misc_feature (651)..(684): Pfam Id: PF07719 Pfam Desc: Tetratricopeptide repeat
  misc_feature (753)..(786): Pfam Id: PF07719 Pfam Desc: Tetratricopeptide repeat
  misc_feature (1)..(809): NCBI GI: 261358268 Blast Desc: bimA [Verticillium albo-atrum VaMs.102]
  misc_feature (1)..(798): NCBI GI: 256729710 Blast Desc: [Nectria haematococca mpVI 77-13-4]
  misc_feature (1)..(808): NCBI GI: 145608888 Blast Desc: MGG_06292 [Magnaporthe grisea 70-15] gi|145016312|gb|EDK00802.1| MGG_06292 [Magnaporthe grisea 70-15]
  misc_feature (1)..(808): NCBI GI: 171685644 Blast Desc: protein product [Podospora anserina] gi|170942783|emb|CAP68436.1| protein product [Podospora anserina]
  misc_feature (1)..(808): NCBI GI: 46122229 Blast Desc: FG05492.1 [Gibberella zeae PH-1]
  misc_feature (1)..(808): NCBI GI: 116208118 Blast Desc: CHGG_03352 [Chaetomium globosum CBS 148.51] gi|88183949|gb|EAQ91417.1| CHGG_03352 [Chaetomium globosum CBS 148.51]
  misc_feature (1)..(808): NCBI GI: 85080749 Blast Desc: NCU00213 [Neurospora crassa OR74A] gi|28917668|gb|EAA27362.1| conserved [Neurospora crassa OR74A]
  misc_feature (1)..(799): NCBI GI: 156045017 Blast Desc: SS1G_09697 [Sclerotinia sclerotiorum 1980] gi|154694092|gb|EDN93830.1| SS1G_09697 [Sclerotinia sclerotiorum 1980]
  misc_feature (1)..(807): NCBI GI: 225559397 Blast Desc: nuclear protein bimA [Ajellomyces capsulatus G186AR]
  misc_feature (1)..(807): NCBI GI: 226293834 Blast Desc: 20S cyclosome subunit (BimA/Nuc2/Cdc27) [Paracoccidioides brasiliensis Pb18]
MAPSNAAITAQLRHVVHYHLDHYAYDNALFFSERLAAHDPRSGESAYLLALCHFRLGDHRSAYEISKAAGYRGIHLGCAFVFAQSCLVLERYKDGITALEKSKGLCSQKTSLGKHTATTRAPSPDSASVSCLLGKLYRAYSDKKKAIINFEDALKVNPLMWDAFTALCDMGVHVRTQNIFKLNDVLLDGLSYDQPIGILVEQKDNSAGNPVEPINKKSSIRSAVYDALDPFGSQRSGASNDIVFGNNFLTTGPGENDTMSKSHAARSRVATAQEPAHETLGTPTIVNSDAGQTRSTLALEPPQAPSRKIRNAQLTEPSLIDAAPKMGSRLGTKRSQKAQDESYETNPSILRATASTLSAIERKRTVSGHPVPRQQSEEPAQRRSARIKSTTTRTNSGPATIGAAATREVKRPQISRTIRHTASSTGIGRIASGNRKALEENGMDIDQAEAPRSREAPAPLAKYAEPDVAKVEETFKYLLDLLRKLGSGYLALSQYRCLDALASYTSLPRTHQDTPWVLSQMGRAHYEQASYGDAEKYYRRLRILAPTRLEDMEVYSTILWFLKRETDLSFLAHELVDSSWHSPQAWCALGNAWSLARDHEQALRCFKRATQLNPKFAYAFTLQGHEHVSNEEYEKALTAYRQAISADRRHYNAYYGIGRVYEKLGSYDKAYSHFHSASIINPTNAVLICCIGNVLEKQRQIGQALEYFTKATELAPQAAQTRYKKARALLALNQLDAAQRELEILKTLAPDEATVHFLLGKLYKTLNDKGSAVRHFTIALNLDPKASQQIKEAIESLEEEDSFDDSMMV

SEQ ID NO: 3089 - DNA, 3695 bp, Muscodor strobelii
  misc_feature: SGI EST ID NO. CUFF.7644.0
  misc_feature: Variant of the nucleotide sequence at SEQ ID NO 3087
accagaagtagctgctaggtaggtctccgccccctcgacgtaggtagacccaggcgacaaccacgtctccctaagcgcttccgggtttgtttgttgctctgccaggccgcttcctcaccggccccctgtcatcctcactccaccacaacataccaaagtcgtgaatgccctcgagacacctccgacggtgctttgttgttctgcatcccaccacgtcacccgcccgcggtccccgatcacccccgatggtatcgctttcaggacatccgtgagtttggcgttgcatattctgtaccgacagaatcccgacggcaacatcaccgccttccagcccagttctgtaatggcttcgtcgtggtaggcatattcacagcgctgcatctgcctgctatctgtaaccctatcacgcctctttgatgccggaatccaattcaacagacatgcgccttcaacaccaccgaaccctcctcaaccgacttttcattccagtttctttctcgcgctacctcttctccgacgtgtgctcatccactgccactccgttatcgtaataaagttccattggcaccgcgcatatccttggaatagcacacccttctcggatttggaacaccagcctaccatcgataatactgtaccatattcaacacatttttcacgatcacgtaacgcctcgatccaactgctcccctcttcattcacgcggagtgggccagtagaccgcgcagactacatggatgtgcaacaatagcatcacacggccccaactgtaacgaccggcttcaccgtcttctcttgcagcatggcgccttcgaatgctgctatcacagctcagttaaggcacgttgtgcactaccacctcgaccattacgcatacgacaatgccctcttcttctccgaacgacttgctgctcatgaccctcgctctggcgaatccgcatacctgctcgcgctctgccacttcaggcttggagaccacaggtccgcttatgagataagcaaagctgctggctatcgtggtattcaccttggctgcgccttcgtatttgcccagagctgcctcgtcctcgagagatacaaagatggcatcactgctctggagaagtctaaaggcttgtgttcgcagaagaccagcttggggaaacacacagcaactacgagagccccaagcccggactccgccagcgtctcgtgcttactagggaagctgtacagagcttatagtgacaagaaaaaggcaatcatcaacttcgaagatgcgttgaaagtaaatcccctcatgtgggatgccttcacggctttgtgtgacatgggcgttcatgtaaggacacaaaacattttcaagctgaacgacgtgttgctcgacgggctgagctatgatcaacctattggtatcctggtggagcagaaggataacagcgcagggaatcctgtggagccaatcaacaagaagtcgtctattcgctctgccgtatatgatgcattagatccatttggctcccagagatcaggtgcgtcaaatgacatagttttcgggaacaatttcctcacgacaggtcctggagagaacgacaccatgtctaagagtcatgcggctcgctctagggtggctaccgcacaagagcccgctcatgagactttgggcaccccaacaattgtgaatagtgatgctggtcagacacgatcgactttggccctggagccaccacaagcgccgagtcggaagataagaaacgcgcagttaactgagccgagtctcatcgatgcggcccctaagatgggatcccgattagggacgaaaaggagtcagaaagctcaggacgagtcttacgagaccaacccttctatcctccgagctaccgcttcgacgctttcggccattgagcgtaagaggaccgtatctgggcatccagttcccagacaacaatccgaggagcccgcacagagaaggagcgcgaggataaaaagtacgaccacacggacgaattcaggccctgccacgattggggccgctgcgacgagagaagtcaagaggccccagatctcacgtactatacgacatactgccagcagcaccggcatcggtaggattgccagtggcaatcgtaaggcgctggaggagaacggcatggatatagaccaagccgaagcaccacgatcgagagaagctcccgcgccattggcgaaatatgctgagcctgatgtggctaaagttgaagaaaccttcaagtaccttttggatcttctcagaaaactcggttccgggtatttggccctctctcaataccgctgtttagacgctcttgcttcgtatacatcactaccacgaacgcaccaagacacgccctgggttttgtctcaaatggggcgcgcgcactatgagcaggcatcatatggcgatgcagaaaagtactataggaggttgcgtattctcgcgcctacgcgcctggaagacatggaggtatactctaccatcctgtggtttctcaagcgagagacggatctttcctttctcgctcacgagctggttgactcgtcttggcattcgccccaagcatggtgtgctctcggtaacgcatggtcactcgcgcgtgatcatgagcaagcgctacgctgcttcaagcgggctacgcagctcaatcccaagtttgcatacgcgtttacgttgcaaggccacgaacatgtgtcgaatgaggaatatgaaaaggcccttacggcctatcgacaagctatttcggcggatcggcgccactataatgcatactatggcattggcagagtctatgaaaagcttggcagttacgacaaggcctacagccacttccattccgcatctatcatcaatcccaccaatgctgtcctcatctgttgtataggcaatgtgctcgagaagcaacggcaaatcggccaggcgttggagtatttcaccaaggctactgagcttgccccccaagcggctcagacccgatataagaaggctagggcattgctcgcccttaatcagctcgatgcggcacaaagggaattggagattctcaaaacccttgcacccgatgaagctacggtccatttccttctcggcaaactgtacaagacactgaatgacaagggctcagctgtccggcatttcacaattgccctgaatctagacccgaaggcaagccagcaaatcaaagaggccatcgaaagtctagaagaagaagacagttttgacgattctatgatggtatgacataggatatgatggaacggagtgggcctctcattcaaggggcaccggattgattataaagtacatgagcgggaattggactgtgcaaaggtctgttgacatgacatttggtttgaaagcacggggcatgatttcagcggcagtatcaggagtacggggagccggtacagctctgccagggctttgcattgcatgcggcgttggggattcatgatgagccagttcacgacgacgctggggctgtcgaagtacctagtggtcgagtgcttttgcttataccattatcatacgtgaaaagtgtacagtactagcatgttgttttatagcatacaagcaggatacaagagtcctacgtgacacgcattccgaatgtctcggcttaatgcacctttgacatctgtggacttctcaaatcggactgagtgcgtaatttgaagcatcaacttcgcatgctcgttgcaag

SEQ ID NO: 3090 - DNA, 483 bp, Muscodor strobelii
  misc_feature: SGI cDNA ID NO. 560678
  misc_feature: Encodes the peptide sequence at SEQ ID NO 3091
atggcccaaaaagcccgaaaagaccgcgcgaaggcaaatgccgccgcattgacaaaccttcacattggaacgctagtcgtcaacacgctgttcgtcttatttaatttgctattcaaacggaggtcgttgctactctacgtgctcctctccatacccagttttgcatgcgagttcgtcctggaatctactggccgtcctaagtacgatgcatcgaatacgctcaagactgctggcgaagatctcgctgctcctggtcttaccgagtacatgttcgatgtcatttgggtgacctgggcctccgtggttctggttattctatttgggaactgggcttggcttgtatgggctgtcgtcccagcctatggcgccttcaagggctttggtctcctcagcgcagcccgtggcatgggagcaatgcagcaaaatcagcaatctcatgaggttccggctcctgggaatcgaaaacagcgacgggctgcctaa

SEQ ID NO: 3091 - protein, 160 aa, Muscodor strobelii
  misc_feature: SGI Peptide ID NO. 560678
  misc_feature (1)..(160): Pfam Id: PF05620 Pfam Desc: Domain of function (DUF788)
  misc_feature (1)..(130): Pfam Id: PF05620 Pfam Desc: Domain of function (DUF788)
  misc_feature (1)..(160): NCBI GI: 171685642 Blast Desc: protein product [Podospora anserina] gi|170942782|emb|CAP68435.1| protein product [Podospora anserina]
  misc_feature (1)..(160): NCBI GI: 261358267 Blast Desc: DUF788 domain-containing protein [Verticillium albo-atrum VaMs.102]
  misc_feature (1)..(160): NCBI GI: 85080753 Blast Desc: NCU00214 [Neurospora crassa OR74A] gi|28917669|gb|EAA27363.1| conserved [Neurospora crassa OR74A]
  misc_feature (1)..(160): NCBI GI: 39976777 Blast Desc: MGG_06291 [Magnaporthe grisea 70-15] gi|145016313|gb|EDK00803.1| MGG_06291 [Magnaporthe grisea 70-15]
  misc_feature (1)..(160): NCBI GI: 116208116 Blast Desc: CHGG_03351 [Chaetomium globosum CBS 148.51] gi|88183948|gb|EAQ91416.1| CHGG_03351 [Chaetomium globosum CBS 148.51]
  misc_feature (1)..(160): NCBI GI: 256729906 Blast Desc: [Nectria haematococca mpVI 77-13-4]
  misc_feature (1)..(160): NCBI GI: 46122233 Blast Desc: FG05494.1 [Gibberella zeae PH-1]
  misc_feature (1)..(158): NCBI GI: 156045015 Blast Desc: SS1G_09696 [Sclerotinia sclerotiorum 1980] gi|154694091|gb|EDN93829.1| SS1G_09696 [Sclerotinia sclerotiorum 1980]
  misc_feature (1)..(158): NCBI GI: 119480681 Blast Desc: NFIA_084240 [Neosartorya fischeri NRRL 181] gi|119408523|gb|EAW18472.1| conserved [Neosartorya fischeri NRRL 181]
  misc_feature (1)..(158): NCBI GI: 238493731 Blast Desc: DUF788 domain protein [Aspergillus flavus NRRL3357] gi|220696596|gb|EED52938.1| DUF788 domain protein [Aspergillus flavus NRRL3357]
MAQKARKDRAKANAAALTNLHIGTLVVNTLFVLFNLLFKRRSLLLYVLLSIPSFACEFVLESTGRPKYDASNTLKTAGEDLAAPGLTEYMFDVIWVTWASVVLVILFGNWAWLVWAVVPAYGAFKGFGLLSAARGMGAMQQNQQSHEVPAPGNRKQRRAA

SEQ ID NO: 3092 - DNA, 558 bp, Muscodor strobelii
  misc_feature: SGI cDNA ID NO. 560679
  misc_feature: Encodes the peptide sequence at SEQ ID NO 3093
atgggagacgtcccagtgaactcggcgccagttgacgcgccgttcccgttaacccaagtcgataagtgggttctctccctcacggatgaagagttcatctatcacgactgggaggacttgaagaagattattagcgaaaataatctctccgttctaaaacgaaagccttctgacttgcggcgatatatgaaatggacaacagagatcaaatcagagatcccattcggcgacgcatctgactatcgcgttttgaagaacgattggccatacggcttgacaaatgacatcacacatatcgttgtttggtccagaaccatcatcgagaccgactcggtgaagggggacatgaccccagagagccgccagacagttgctgaatttatcaagagatttttcattgacagactcggcccggaaggtgatcagaaggttttatggtttaaaaactgggttgcgttgcaaagtgtccgtaccttagaacatatccatgtgatggtgaaggatgcaagcgatgatctcatagaggagttcactcgagaattggggtgccacgcttga

SEQ ID NO: 3093 - protein, 185 aa, Muscodor strobelii
  misc_feature: SGI Peptide ID NO. 560679
  misc_feature (12)..(184): NCBI GI: 39976775 Blast Desc: MGG_06290 [Magnaporthe grisea 70-15] gi|145016314|gb|EDK00804.1| MGG_06290 [Magnaporthe grisea 70-15]
  misc_feature (1)..(184): NCBI GI: 171685640 Blast Desc: protein product [Podospora anserina] gi|170942781|emb|CAP68434.1| protein product [Podospora anserina]
  misc_feature (1)..(180): NCBI GI: 256729708 Blast Desc: [Nectria haematococca mpVI 77-13-4]
  misc_feature (14)..(180): NCBI GI: 85080757 Blast Desc: NCU00215 [Neurospora crassa OR74A] gi|28917670|gb|EAA27364.1| conserved [Neurospora crassa OR74A]
  misc_feature (8)..(180): NCBI GI: 46122235 Blast Desc: FG05495.1 [Gibberella zeae PH-1]
  misc_feature (1)..(185): NCBI GI: 154281907 Blast Desc: conserved [Ajellomyces capsulatus NAm1] gi|150411945|gb|EDN07333.1| conserved [Ajellomyces capsulatus NAm1]
  misc_feature (1)..(180): NCBI GI: 225563327 Blast Desc: conserved [Ajellomyces capsulatus G186AR]
  misc_feature (1)..(180): NCBI GI: 240275920 Blast Desc: conserved [Ajellomyces capsulatus H143]
  misc_feature (2)..(180): NCBI GI: 212527380 Blast Desc: conserved [Penicillium marneffei ATCC 18224] gi|210073245|gb|EEA27332.1| conserved [Penicillium marneffei ATCC 18224]
  misc_feature (12)..(180): NCBI GI: 115384432 Blast Desc: conserved [Aspergillus terreus NIH2624] gi|114196455|gb|EAU38155.1| conserved [Aspergillus terreus NIH2624]
MGDVPVNSAPVDAPFPLTQVDKWVLSLTDEEFIYHDWEDLKKIISENNLSVLKRKPSDLRRYMKWTTEIKSEIPFGDASDYRVLKNDWPYGLTNDITHIVVWSRTIIETDSVKGDMTPESRQTVAEFIKRFFIDRLGPEGDQKVLWFKNWVALQSVRTLEHIHVMVKDASDDLIEEFTRELGCHA

SEQ ID NO: 3094 - DNA, 1886 bp, Muscodor strobelii
  misc_feature: SGI EST ID NO. CUFF.7656.0
  misc_feature: Variant of the nucleotide sequence at SEQ ID NO 3092
cgtacctagcagtatcatattcttttgaccattttagacgacattattccataatgggagacgtcccagtgaactcggcgccagttgacgcgccgttcccgttaacccaagtcgataagtgggttctctccctcacggatgaagagttcatctatcacgactgggaggacttgaagaagattattagcgaaaataatctctccgttctaaaacgaaagccttctgacttgcggcgatatatgaaatggacaacagagatcaaatcagagtatgggtctatgacggaatatatacgaattcatcgcttgccaaaggtttggggctctcctcccttcactcccacttctctggtatgtagaaacacatcccgtgccattctcagtcgtcactcttgccagggaaaaatcccaatgctaacatggactttagtgagcaatattcgtattgattagatcctctagcaaagacttaggaaaatccaaaccatgaccaatcgattctaaattgttatacactaggatcccattcggcgacgcatctgactatcgcgttttgaagaacgattggtgcgttctcttgcattattccaggccatcatgagtattctactcatcgacattatcctgtggtagaggctgacgaggatcaactctaggccatacggcttgacaaatgacatcacacatatcggtacgtagatactagaatctgtagattgatctctttcgctgtggccgcgtgtggaagctgacttatcgacgcagttgtttggtccagaaccatcatcgtgcgtaaatccttcttttatacatatcgacatatatgctgtcctcagccagcttcattcttgttctggcaggtctaacttggttcaggagaccgactcggtgaagggggacatgaccccagagagccgccagacagttgctgaatttatcaagagatttttcattgacagactcggcccggaaggtgatcagaaggttttatggtttaaaaactgggttgcgttgcaaagtgtccgtaccttagaacatatccatgtgatggtgaaggatgcaagcgatgatctcatagaggagttcactcgagaattggggtgccacgcttgaacggttggtgggaatgcgtgataagacatacttctgtctggacaccgtgagcttcatcaacacgctactaggacaatgccgtttaggcagcccgtcgctgttttcgattcccaggagccggaacctcatgagattgctgattttgctgcattgctcccatgccacgggctgcgctgaggagaccaaagcccttgaaggcgccataggctgggacgacagcccatacaagccaagcccagttcccaaatagaataaccagaaccacggaggcccaggtcacccaaatgacatcgaacatgtactcggtaagaccaggagcagcgagatcttcgccagcagtcttgagcgtattcgatgcatcgtacttaggacggccagtagattccaggacgaactcgcatgcaaaactgggtatggagaggagcacgtagagtagcaacgacctccgtttgaatagcaaattaaataagacgaacagcgtgttgacgactagcgttccaatgtgaaggtttgtcaatgcggcggcatttgccttcgcgcggtcttttcgggctttttgggccatgatgaagacacaaccgtggaattgagtaggataatgtgcgagggctgacgttatttagctgccggtcatttgtatcagcttggagtttgaccgtggtacagagctagacctagagactaggttgaggggaaattgtaagtgcgcgttttcgctttggtgtccagcttgatcttgaaattgtattgaagtcgattgagtctatgtggacg

SEQ ID NO: 3095 - DNA, 933 bp, Muscodor strobelii
  misc_feature: SGI cDNA ID NO. 560680
  misc_feature: Reduced expression when VOC is produced
  misc_feature: Encodes the peptide sequence at SEQ ID NO 3096
atggcggacgattcgctcgcctcaaagaggtacattaatggaatatacattcctgctggtctcctcctggtcggcacgtacattgtcaagagcgaatggacccctttcgccgctgtcctcgccatactactgggtgcttggaagtacatgcagtcgcaacccaagaaggtcctgaagcctgatgcatttcaagacttcgtactcaaagagaagaccatcatttcccacaatgtagccatctatcgattttctttacctgcacccaatgccatcctgggccttcctatcgggcagcacatctccattggcgcgaacctcccccaacccgacggcacgactaaggagattgttcgatcgtacaccccgatctcaggcgatcaccaacccggccatttcgacctcctcatcaagtcctacccaactggcaacatctccaagcacatggcctctctggctgtcgggcaaaccatcaaggtccgcggtcccaagggtgcttttgtctacacccccaacatggttcgacatttcggaatggttgctggtggaacaggtatcacccctatgctgcaggttatccgggccatcatccgcggccgtgctgctggcgacaagactcaggtcgacctcatcttcgcgaacgtagctcctcaagacattttgttgaaggaggatcttgatcaactcgtcaaagaggatgcaggaatcagagtccactatgtacttgacaagcctccagaggactggactggcggtgttggttacgtcacggccgacatggttacgaaatggcttcccaaggctgcacctgatgtcaagatcctactctgtggtcctccacccatgatcagcggactgaagaaggccactgaaagccttggcttccagaaggcccggccagtgagcaagctggaggatcaggtattctcattttaa

SEQ ID NO: 3096 - protein, 310 aa, Muscodor strobelii
  misc_feature: SGI Peptide ID NO. 560680
  misc_feature (65)..(168): Pfam Id: PF00970 Pfam Desc: Oxidoreductase FAD-binding domain
  misc_feature (177)..(287): Pfam Id: PF00175 Pfam Desc: Oxidoreductase NAD-binding domain
  misc_feature (4)..(310): NCBI GI: 171685638 Blast Desc: protein product [Podospora anserina] gi|170942780|emb|CAP68433.1| protein product [Podospora anserina]
  misc_feature (2)..(310): NCBI GI: 256732709 Blast Desc: [Nectria haematococca mpVI 77-13-4]
  misc_feature (3)..(310): NCBI GI: 46125139 Blast Desc: FG06947.1 [Gibberella zeae PH-1]
  misc_feature (4)..(310): NCBI GI: 261358317 Blast Desc: nitrate reductase [Verticillium albo-atrum VaMs.102]
  misc_feature (4)..(310): NCBI GI: 116208114 Blast Desc: CHGG_03350 [Chaetomium globosum CBS 148.51] gi|88183947|gb|EAQ91415.1| CHGG_03350 [Chaetomium globosum CBS 148.51]
  misc_feature (1)..(310): NCBI GI: 85080761 Blast Desc: nitrate reductase [Neurospora crassa OR74A] gi|74613863|sp|Q7RXL1.1|NCB5R_NEUCR RecName: Full=NADH-cytochrome b5 reductase 1; AltName: Full=Microsomal cytochrome b reductase
  misc_feature (6)..(310): NCBI GI: 39976773 Blast Desc: MGG_06289 [Magnaporthe grisea 70-15] gi|187609763|sp|A4R935.1|NCB5R_MAGGR RecName: Full=NADH-cytochrome b5 reductase 1; AltName: Full=Microsomal b
  misc_feature (4)..(310): NCBI GI: 154289628 Blast Desc: BC1G_16069 [Botryotinia fuckeliana B05.10] gi|150849000|gb|EDN24193.1| BC1G_16069 [Botryotinia fuckeliana B05.10]
  misc_feature (4)..(310): NCBI GI: 156045013 Blast Desc: SS1G_09695 [Sclerotinia sclerotiorum 1980] gi|154694090|gb|EDN93828.1| SS1G_09695 [Sclerotinia sclerotiorum 1980]
  misc_feature (5)..(310): NCBI GI: 261195448 Blast Desc: NADH-cytochrome b5 reductase 1 [Ajellomyces dermatitidis SLH14081] gi|239588000|gb|EEQ70643.1| NADH-cytochrome b5 reductase 1 [Ajellomyces dermatitidis b5 1
  misc_feature (1)..(310): SWISSPROT Homolog: EC 1.6.2.2 Cytochrome-b5 reductase
  misc_feature: Useful for introducing or modulating the production of volatile compounds
MADDSLASKRYINGIYIPAGLLLVGTYIVKSEWTPFAAVLAILLGAWKYMQSQPKKVLKPDAFQDFVLKEKTIISHNVAIYRFSLPAPNAILGLPIGQHISIGANLPQPDGTTKEIVRSYTPISGDHQPGHFDLLIKSYPTGNISKHMASLAVGQTIKVRGPKGAFVYTPNMVRHFGMVAGGTGITPMLQVIRAIIRGRAAGDKTQVDLIFANVAPQDILLKEDLDQLVKEDAGIRVHYVLDKPPEDWTGGVGYVTADMVTKWLPKAAPDVKILLCGPPPMISGLKKATESLGFQKARPVSKLEDQVFSF

SEQ ID NO: 3097 - DNA, 2087 bp, Muscodor strobelii
  misc_feature: SGI EST ID NO. CUFF.7974.0
  misc_feature: Variant of the nucleotide sequence at SEQ ID NO 3095
tcttctggggactaagctcatcctggccgaaatcccaaatcccaacataatcccccactaccctgcccacaacgagccgtctctcagcccatcttctcggaaatctcatgattctgctcgcttccgagtgaaagggtcgcttcttggtagcgtgtgcgccggctgctgcagagcttgatctccatcctcctacccagagtcttataccatctcttcggctccccttctcgcggcaattgctaaacgctttgggcttcctccttaactcaactccccgcgagtctcacaatggcggacgattcgctcgcctcaaagaggtacattaatggaatatacattcctgctggtctcctcctggtcggcacgtacattgtcaagagcgaatggacccctttcgccgctgtcctcgccatactactgggtgcttggaagtacatgcagtcgcgtatgtgtcgagctttgggtcttccgacctcaccccgtaccgcagcccaattctgacccatcgactagaacccaagaaggtcctgaagcctgatgcatttcaagacttcgtactcaaagagaagaccatcatttcccacaatgtagccatctatcgattttctttacctgcacccaatgccatcctgggccttcctatcgggcagcacatctccattggcgcgaacctcccccaacccgacggcacgactaaggagattgttcgatcgtacaccccgatctcaggcgatcaccaacccggccatttcgacctcctcatcaagtcctacccaactggcaacatctccaagcacatggcctctctggctgtcgggcaaaccatcaaggtccgcggtcccaagggtgcttttgtctacacccccaacatggttcgacatttcggaatggttgctggtggaacaggtatcacccctatgctgcaggttatccgggccatcatccgcggccgtgctgctggcgacaagactcaggtcgacctcatcttcgcgaacgtagctcctcaagacattttgttgaaggaggatcttgatcaactcgtcaaagaggatgcaggaatcagagtccactatgtacttgacaagcctccagaggactggactggcggtgttggttacgtcacggccgacatggttacgaaatggcttcccaaggctgcacctgatgtcaagatcctactctgtggtcctccacccatgatcagcggactgaagaaggccactgaaagccttggcttccagaaggcccggccagtgagcaagctggaggatcaggtattctcattttaagcgagccaggaagccggttatcaagctctgatctcatctacgcactgggagacctttcccccaagttcgtgacggcgagcacaattttttcaccccaaataggcgcacctagtagtaatgtgtgccaggacatggtcggtgagcacttgatcatttccagcgtcgtacatttaaaaatagccaaaagacttgggatagatcgggcatttcaacatatatcttgcccctaatagactaaaattcaagaaatgttctaatcctggataaggcattaaagccatttatttgcgtatttctttacgggccctgagtcgttcgagctaagaaacgtgaatttgatgttgggttcacttcaagattagtcaatcgggatgcgcatggtaaaacttgaccaaagttcggttctcaacacatgacgaacacacctaaaatagattggtacgagacagtcccagcaggctgcaaagcatgtattcattctaccactcactaagatattgagtacataggccagctttcctgcctctatgatgacagctctgaatatgacaatttagaactcctggcatgcttgtgcctacacgcgccagattaacaaaagcttgaccgatctcgaacacgttctgagacatacagttactaccgtcacgccgctgtgagaatcagtcacagacagttcgttatgagatgtgagccaaaagtcaagggggaacctcgtttgtagcatcattgatcttatggcgacgtttcaagtcttggtcttgtttgtgaattcactcaacatataatgtgaacagg

SEQ ID NO: 3098 - DNA, 1755 bp, Muscodor strobelii
  misc_feature: SGI cDNA ID NO. 560681
  misc_feature: Reduced expression when VOC is produced
  misc_feature: Encodes the peptide sequence at SEQ ID NO 3099
atgtcctctatccacgtaaacgtgtcgccgaggagtctgccgtcgtcgacgtcttccgacgagaatttagtgtcaccgccgcactccgagaaggacgatgcctccgttcccaatcctgccggcaccgagcagcccgacgctgcggcggagctgctcctcgacgccgccaaagacgtccgccagatagtccgtctcgtccaatgtcagctctgttggaagatcctgcaacatcccacaaccctgccgtgtggctacagcatatgcaggtcctgcttgcctcagacccgagcccgtgccaacatctcgtggcctgcgacggccaaccgcctgcaaggctttgattgcccgttccgagaatgcggcaaggagcatgccaccgcggactgtgctatcgatgtcaccttgaacaaagtgctggagatcatcaagacggccgttacactggaccgcaccgctgcggaccaccctgatgttgccacgcacatcaccatccatgaccgctgggccgttgccgggctgtcctcgctgggcgaggaagaagtcgagtcgagtgtggtgaaaggaggcaggatccttgcaacgtacacgttggccgagtcgggcaaattgaagttcagtagcgaggtatcatactcgtctgtaggcggtaatgaagacaaggtcaccgagctggattctgccgctttcttcagactgaaagaatctgtgaggagtgaaatggactgccaggtttgctatgctctattcctcgaccccatgaccacgacgtgcggccacacgtactgccgcacatgtctccacgagatactcaatcgctccaatctctgcccgatatgtcggcgcaccatatctttgcaatcccatgtcgatccacgatcttcgccttccaatggacgccttgtctctatgatcaacgggttttgggctgacttgattgcgcttcgagcccaagcctacagactggagcagcaggcaaattatggtggatttgatattccgatcttcgtctgcacactgtcttatccatccatgcctctatttctgcacgttttcgaagcacgctaccgtctcatgattcaacgcgcgatggaaggcgataggactttcggcatggtggtggaccgaacgaacccgttgcctggagagtcacatttcatgccgcttggtactttgatgaggattgtaaacattgaattctttcccgatggccgcagtctcctggagacagttggcgtctcacgcttcaggatcatgcagcacggttggctagatggatatgttgttgccaatatcgagaaagttgatgatatcagtattgccgaagaagaggcgacagaggccgcagaattcactcagggccaggctcggttagcgcagggcggcctcacacggtcaaccgacggtgcagtgtcacattctacttcgacaacccgagagacgcctatgccggtttctgtggatgacctcaactccatgtctacccaggagctagtggatttcggtatcgacttcgtcaggagaatgcaggcacagagcgtcacatggctcgcgactcgaatgattgcgatatatggtgattgccctattgatcccgcagtctttccttggtggtttgcttccgttctgcctgtcagcgacgctgaaaagtaccgactattgagcacatcgagtgtgcgtcagcggctcaagattgcgagcgagtgggctatcgaatgggaagctagtagggtaagttctgatcctgtaatgccatga

SEQ ID NO: 3099 - protein, 584 aa, Muscodor strobelii
  misc_feature: SGI Peptide ID NO. 560681
  misc_feature (242)..(279): Pfam Id: PF00097 Pfam Desc: Zinc finger, C3HC4 type (RING finger)
  misc_feature (332)..(571): Pfam Id: PF02190 Pfam Desc: ATP-dependent protease La (LON) domain
  misc_feature (332)..(417): Pfam Id: PF02190 Pfam Desc: ATP-dependent protease La (LON) domain
  misc_feature (60)..(576): NCBI GI: 256729673 Blast Desc: NECHADRAFT_101277 [Nectria haematococca mpVI 77-13-4]
  misc_feature (60)..(576): NCBI GI: 46122409 Blast Desc: FG05582.1 [Gibberella zeae PH-1]
  misc_feature (44)..(579): NCBI GI: 189204358 Blast Desc: PTRG_08182 [Pyrenophora tritici-repentis Pt-1C-BFP] gi|187985613|gb|EDU51101.1| PTRG_08182 [Pyrenophora tritici-repentis Pt-1C-BFP]
  misc_feature (176)..(576): NCBI GI: 261358476 Blast Desc: ATP-dependent protease [Verticillium albo-atrum VaMs.102]
  misc_feature (48)..(576): NCBI GI: 39977055 Blast Desc: MGG_06430 [Magnaporthe grisea 70-15] gi|145016155|gb|EDK00645.1| MGG_06430 [Magnaporthe grisea 70-15]
  misc_feature (62)..(574): NCBI GI: 71001398 Blast Desc: ATP-dependent protease (CrgA) [Aspergillus fumigatus Af293] gi|66853018|gb|EAL93342.1| ATP-dependent protease (CrgA), [Aspergillus fumigatus Af293] gi|159129454|gb|EDP54568.1| (CrgA),
  misc_feature (27)..(574): NCBI GI: 119480997 Blast Desc: ATP-dependent protease (CrgA), [Neosartorya fischeri NRRL 181] gi|119408681|gb|EAW18630.1| ATP-dependent protease (CrgA), [Neosartorya fischeri NRRL 181]
  misc_feature (20)..(576): NCBI GI: 121715472 Blast Desc: ATP-dependent protease (CrgA), [Aspergillus clavatus NRRL 1] gi|119403502|gb|EAW13919.1| ATP-dependent protease (CrgA), [Aspergillus clavatus NRRL 1]
  misc_feature (54)..(574): NCBI GI: 255950408 Blast Desc: Pc22g20710 [Penicillium chrysogenum Wisconsin 54-1255] gi|211592988|emb|CAP99359.1| Pc22g20710 [Penicillium chrysogenum Wisconsin 54-1255]
  misc_feature (22)..(574): NCBI GI: 238493275 Blast Desc: ATP-dependent protease (CrgA), [Aspergillus flavus NRRL3357] gi|220696368|gb|EED52710.1| ATP-dependent protease (CrgA), [Aspergillus flavus NRRL3357]
  misc_feature: Useful for introducing or modulating the production of volatile compounds
MSSIHVNVSPRSLPSSTSSDENLVSPPHSEKDDASVPNPAGTEQPDAAAELLLDAAKDVRQIVRLVQCQLCWKILQHPTTLPCGYSICRSCLPQTRARANISWPATANRLQGFDCPFRECGKEHATADCAIDVTLNKVLEIIKTAVTLDRTAADHPDVATHITIHDRWAVAGLSSLGEEEVESSVVKGGRILATYTLAESGKLKFSSEVSYSSVGGNEDKVTELDSAAFFRLKESVRSEMDCQVCYALFLDPMTTTCGHTYCRTCLHEILNRSNLCPICRRTISLQSHVDPRSSPSNGRLVSMINGFWADLIALRAQAYRLEQQANYGGFDIPIFVCTLSYPSMPLFLHVFEARYRLMIQRAMEGDRTFGMVVDRTNPLPGESHFMPLGTLMRIVNIEFFPDGRSLLETVGVSRFRIMQHGWLDGYVVANIEKVDDISIAEEEATEAAEFTQGQARLAQGGLTRSTDGAVSHSTSTTRETPMPVSVDDLNSMSTQELVDFGIDFVRRMQAQSVTWLATRMIAIYGDCPIDPAVFPWWFASVLPVSDAEKYRLLSTSSVRQRLKIASEWAIEWEASRVSSDPVMP

SEQ ID NO: 3100 - DNA, 3306 bp, Muscodor strobelii
  misc_feature: SGI EST ID NO. CUFF.7661.0
  misc_feature: Variant of the nucleotide sequence at SEQ ID NO 3098
gttggttctagggtggtcagaggagcctccacccaagctactagtctgccagccctgcgcatctgtttcctgtaatgatgaattctcaagctgtgggctgcacacctagaagcatctctgggtacatgcacttgctgccttagtcagttggccccgttgtacctcgcacgtcttgccatgccctcgcacccctggggctcgacgactccggtgcgggccagggtccaaagggcaaatgatgactgctacatctttgacagttgcgccgatgcgctccatgatgtgtggttctccattcttatacttccgacactcgatcattgattgctattaggttgcaactttggaattccgctattaggcgcttatgaatcctccatgcacaattgtatacgctcaggaccctttgacacgataatcagccatccgttcgtgctcccgcattgccactaccaccatcgtgaccacccaagctgatatccatgatcctgataccctttgaatttggcccgctcgagcaactcgctttctcgtctcttctctgccttgccgccacgtcgtctcttgttctataatttacctagctgatttcttcgtccctctgcttgttcatgcatgcaactcgaccgctgcacgtatgctcccgaccctaacatctgctctccttcattgctttgtcgcggacacgaacctacgtcatagccctggaggatattaacccagcgacctggatacggcgacgccacaccccacgaccgcctcgttcgcaacttgcttcgcccggcgttccggcccacgtgctggatgactcgtaattttcatgtcctctatccacgtaaacgtgtcgccgaggagtctgccgtcgtcgacgtcttccgacgagaatttagtgtcaccgccgcactccgagaaggacgatgcctccgttcccaatcctgccggcaccgagcagcccgacgctgcggcggagctgctcctcgacgccgccaaagacgtccgccagatagtccgtctcgtccaatgtcagctctgttggaagatcctgcaacatcccacaaccctgccgtgtggctacagcatatgcaggtcctgcttgcctcagacccgagcccgtgccaacatctcgtggcctgcgacggccaaccgcctgcaaggctttgattgcccgttccgagaatgcggcaaggagcatgccaccgcggactgtgctatcgatgtcaccttgaacaaagtgctggagatcatcaagacggccgttacactggaccgcaccgctgcggaccaccctgatgttgccacgcacatcaccatccatgaccgctgggccgttgccgggctgtcctcgctgggcgaggaagaagtcgagtcgagtgtggtgaaaggaggcaggatccttgcaacgtacacgttggccgagtcgggcaaattgaagttcagtagcgaggtatcatactcgtctgtaggcggtaatgaagacaaggtcaccgagctggattctgccgctttcttcagactgaaagaatctgtgaggagtgaaatggactgccaggtttgctatgctctattcctcgaccccatgaccacgacgtgcggccacacgtactgccgcacatgtctccacgagatactcaatcgctccaatctctgcccgatatgtcggcgcaccatatctttgcaatcccatgtcgatccacgatcttcgccttccaatggacgccttgtctctatgatcaacgggttttgggctgacttgattgcgcttcgagcccaagcctacagactggagcagcaggcaaattatggtggatttgatattccgatcttcgtctgcacactgtcttatccatccatgcctctatttctgcacgttttcgaagcacgctaccgtctcatgattcaacgcgcgatggaaggcgataggactttcggcatggtggtggaccgaacgaacccgttgcctggagagtcacatttcatgccgcttggtactttgatgaggattgtaaacattgaattctttcccgatggccgcagtctcctggagacagttggcgtctcacgcttcaggatcatgcagcacggttggctagatggatatgttgttgccaatatcgagaaagttgatgatatcagtattgccgaagaagaggcgacagaggccgcagaattcactcagggccaggctcggttagcgcagggcggcctcacacggtcaaccgacggtgcagtgtcacattctacttcgacaacccgagagacgcctatgccggtttctgtggatgacctcaactccatgtctacccaggagctagtggatttcggtatcgacttcgtcaggagaatgcaggcacagagcgtcacatggctcgcgactcgaatgattgcgatatatggtgattgccctattgatcccgcagtctttccttggtggtttgcttccgttctgcctgtcagcgacgctgaaaagtaccgactattgagcacatcgagtgtgcgtcagcggctcaagattgcgagcgagtgggctatcgaatgggaagctagtaggtggtaagtagtgccatttactaccgagttgtcgtattgttaagccttacttcatatgtgggctcaaatgattttgtaccactttccttaaatcctcctcaaggcgataccagttgcataagctgaggtttactagacgagaagatctgttgacaggatcttcaaccaggcaccttacagattgcttagtgtcatgaaacaaagcatatctcaaaacgcatcttataccaaatccattatcctatcgaaagtcgacaagtactacggactacagactcatgatttcacgttgcatcaggaagttttcattccacggagttgggggcgggaagatattgcactagtacctgcatcatcagcattgttatcgattatcatacaagtgatacctccactggcagaaggccggtagactcgcgcaattttctgttctagctgttattgcgtgttttggacagggttcttctaggcgaccttgattatgtccaacagatacctagaatgtggatgataactctggtggtttgtccatataagtatataattttgaaaattttagttcatacgagaacatatactatctttccggataaatacaattcttgatgcatggagctgcattcttttcccagtacttgggaaagatcgtcaatttagtcggtatatagaaattaagaataacactttcttgaagacacttccagaaatatgtccgagactataatctcgctataatgtaacatattgactattacgaac

SEQ ID NO: 3101 - DNA, 2415 bp, Muscodor strobelii
  misc_feature: SGI cDNA ID NO. 560682
  misc_feature: Encodes the peptide sequence at SEQ ID NO 3102
atgccgctctcgacgcctctagaggacgacgtgcctcaggtctcagccatgacacggctcctcaccgaattgctcgaccacgcgcggtctctcaagccgacatccacgatagaaccgcccctcacgaaaccccagctagacccttaccttgctcagctgtccactattttcgatgccgacaaggttcgcatgtacgctgctgtcgagactgctgcgcggaacgtcttcagctccatcgtctcggccacttccatcgacaccccagagtttgtgcaagtctggaatctcttcgatgtcttgtccgtactgtccgatagcgcccagtgcgatccagctcttctgttctggctggtcgaggagctgctcgacagccagactgtcgacggctgccgcaaggtcttcgattttcttgagtcgcgcagagagcgcatcactgccaagaacctcaagcaaaagtctcttgtcatcctgagatcctgcaacgacctgttgcggagactgtcccgcgctgaagacgccgccttctgcggccgcgtttacatcttcatgttccagagtatccccccgggtgatagaagctccgtgaatctgcgaggagagtaccacgtcgaaaatgtcacctcattcgaggagactacacagacgcctgccgtcgccgacgatcccatggaccaggacaccgagggcgatgccgctaagcaagagagcaaagaaaacaagtctacgtcaaaggctgtgtcttttgattccaaaaatccttccgaacccgagaaaatcctggacacggatgcgctgtatcccatattctggtctttacagcacttcttcagtcagcccaccacattgttcgatgcagctcagcttggcaaatttaaaagcggtctggaagccactttgaatgctttccaagcagtggaaaagattcagaggaatactaagagttctgatgacaatagaattattccacagaagaggaagatctcagatggcggagaagatctgcgaagtaccaatcacaacccaaagtatctcacgagcagggaccttttcgagttagagatcagtgacctctacttcagacgccacattcttatccaggctttcatcatcctggatttccttctgtctctcaccccgcaggcaagggccaagatcgccaacgtacaacagaacaggtccgtggtgtacgccgatcagactctgggagaggacgatgcaaaatgggcaaagaccatgaaagacaagatcacgaactacattcaagcagacaccgatgggttctttttcattagagttgtggagagcgttatatctagggataaaggatgggttcgttggaaagtcgaaaattgccagccaatcgagcgagattcagtaaagtcctcagagttcattgaagcaagatccaatgccaaacgcctagccactggccgaaaaccgaagacaggtatgaattcactgtctttgtccttcatggatgcaagtgatagcacagtggcaatggagaggttgaagaacgaggagaagtggagattgccgccattggaagattttcagaaaaaaatcgcaaacgatgaccttgatatggactttgcgaaggacgaaaaagagaaatttcaattactggagtcgaaggcgagcaagacttggcgtgccatgagaattgcgcggacttcgcgactagccgcattggacaaaatcgatgagtggcaaaaggccgattctttattccaggagccggcggagaacgaagagacggcgggaaaagaagaggccacgggaattcaccctcaaaatcgagagaccgttattctctctggcccaactggagttggtaaatctacactgatctcgatgcttcaagaacgacaaccgggggtctttgggaaagtgatacaacatacgacgcgcagtccgaaggatgccgagattgatgggcaggatttccactttgttgatacgaagacgtttgacaccatactagatggagactacttcctcgagttcagtgagcacgaggatgttaagcatgggactagtcggaaagttgtagaggccttcaaggaagccaacaagattgcactaatccaacttgagagagagggtacacaatcagccagagataatggattttctgcacgtgtaatccacatctcaccaccgagcttagatgagttgagggcccgccttgagaacaagaatctcgaggagggtaaaattcagaaggcagtaaaagctgctgagctggaaatggcggctgactcggcgctttaccaaaaatcaatcatcaacgatgacctggagacggcgtacaaggaactagaacagttcatttatgaaacgtcggaagtcaatggtaatggggttcatgagagcgaggtgccaaaagaagaagatgtcaagatggaggtttag

SEQ ID NO: 3102 - protein, 804 aa, Muscodor strobelii
  misc_feature: SGI Peptide ID NO. 560682
  misc_feature (636)..(738): Pfam Id: PF00625 Pfam Desc: Guanylate kinase
  misc_feature (11)..(783): NCBI GI: 46122093 Blast Desc: FG05424.1 [Gibberella zeae PH-1]
  misc_feature (20)..(800): NCBI GI: 256729936 Blast Desc: NECHADRAFT_46674 [Nectria haematococca mpVI 77-13-4]
  misc_feature (1)..(793): NCBI GI: 261358475 Blast Desc: guanylate kinase [Verticillium albo-atrum VaMs.102]
  misc_feature (1)..(779): NCBI GI: 171687098 Blast Desc: protein product [Podospora anserina] gi|170943510|emb|CAP69163.1| protein product [Podospora anserina]
  misc_feature (1)..(802): NCBI GI: 85109865 Blast Desc: NCU07865 [Neurospora crassa OR74A] gi|28924778|gb|EAA33890.1| [Neurospora crassa OR74A]
  misc_feature (1)..(781): NCBI GI: 145608760 Blast Desc: MGG_06394 [Magnaporthe grisea 70-15] gi|145016196|gb|EDK00686.1| MGG_06394 [Magnaporthe grisea 70-15]
  misc_feature (9)..(637): NCBI GI: 225555030 Blast Desc: nuclear matrix protein [Ajellomyces capsulatus G186AR]
  misc_feature (9)..(637): NCBI GI: 240279266 Blast Desc: nuclear matrix protein [Ajellomyces capsulatus H143]
  misc_feature (9)..(587): NCBI GI: 226279722 Blast Desc: nuclear matrix protein [Paracoccidioides brasiliensis Pb01]
  misc_feature (9)..(587): NCBI GI: 226289601 Blast Desc: nuclear matrix protein [Paracoccidioides brasiliensis Pb18]
MPLSTPLEDDVPQVSAMTRLLTELLDHARSLKPTSTIEPPLTKPQLDPYLAQLSTIFDADKVRMYAAVETAARNVFSSIVSATSIDTPEFVQVWNLFDVLSVLSDSAQCDPALLFWLVEELLDSQTVDGCRKVFDFLESRRERITAKNLKQKSLVILRSCNDLLRRLSRAEDAAFCGRVYIFMFQSIPPGDRSSVNLRGEYHVENVTSFEETTQTPAVADDPMDQDTEGDAAKQESKENKSTSKAVSFDSKNPSEPEKILDTDALYPIFWSLQHFFSQPTTLFDAAQLGKFKSGLEATLNAFQAVEKIQRNTKSSDDNRIIPQKRKISDGGEDLRSTNHNPKYLTSRDLFELEISDLYFRRHILIQAFIILDFLLSLTPQARAKIANVQQNRSVVYADQTLGEDDAKWAKTMKDKITNYIQADTDGFFFIRVVESVISRDKGWVRWKVENCQPIERDSVKSSEFIEARSNAKRLATGRKPKTGMNSLSLSFMDASDSTVAMERLKNEEKWRLPPLEDFQKKIANDDLDMDFAKDEKEKFQLLESKASKTWRAMRIARTSRLAALDKIDEWQKADSLFQEPAENEETAGKEEATGIHPQNRETVILSGPTGVGKSTLISMLQERQPGVFGKVIQHTTRSPKDAEIDGQDFHFVDTKTFDTILDGDYFLEFSEHEDVKHGTSRKVVEAFKEANKIALIQLEREGTQSARDNGFSARVIHISPPSLDELRARLENKNLEEGKIQKAVKAAELEMAADSALYQKSIINDDLETAYKELEQFIYETSEVNGNGVHESEVPKEEDVKMEV

SEQ ID NO: 3103 - DNA, 2922 bp, Muscodor strobelii
  misc_feature: SGI EST ID NO. CUFF.7665.0
  misc_feature: Variant of the nucleotide sequence at SEQ ID NO 3101
aacctatccgactcaatcaacatccccatacctggaagaacaaagagagggcgacgcactcttttgcgccgcttcgtattgtgtactgctaccttacggaatcaacaatgacacagttgcacggcgcaaacttggtcaggtagctctctcgtgtctcgcgtccattgacgtcgtgaatgccatgggcatatgatacatgcgagtctgctgaacatgtcgattgagcttcgctgggcaccttcccatatccaccctcacagaatccaagagccgccatccaccacgtaagagccctcccccacgatgccctccgcgatgccgctctcgacgcctctagaggacgacgtgcctcaggtctcagccatgacacggctcctcaccgaattgctcgaccacgcgcggtctctcaagccgacatccacgatagaaccgcccctcacgaaaccccagctagacccttaccttgctcagctgtccactattttcgatgccgacaaggttcgcatgtacgctgctgtcgagactgctgcgcggaacgtcttcagctccatcgtctcggccacttccatcgacaccccagagtttgtgcaagtctggaatctcttcgatgtcttgtccgtactgtccgatagcgcccagtgcgatccagctcttctgttctggctggtcgaggagctgctcgacagccagactgtcgacggctgccgcaaggtcttcgattttcttgagtcgcgcagagagcgcatcactgccaagaacctcaagcaaaagtctcttgtcatcctgagatcctgcaacgacctgttgcggagactgtcccgcgctgaagacgccgccttctgcggccgcgtttacatcttcatgttccagagtatccccccgggtgatagaagctccgtgaatctgcgaggagagtaccacgtcgaaaatgtcacctcattcgaggagactacacagacgcctgccgtcgccgacgatcccatggaccaggacaccgagggcgatgccgctaagcaagagagcaaagaaaacaagtctacgtcaaaggctgtgtcttttgattccaaaaatccttccgaacccgagaaaatcctggacacggatgcgctgtatcccatattctggtctttacagcacttcttcagtcagcccaccacattgttcgatgcagctcagcttggcaaatttaaaagcggtctggaagccactttgaatgctttccaagcagtggaaaagattcagaggaatactaagagttctgatgacaatagaattattccacagaagaggaagatctcagatggcggagaagatctgcgaagtaccaatcacaacccaaagtatctcacgagcagggaccttttcgagttagagatcagtgacctctacttcagacgccacattcttatccaggctttcatcatcctggatttccttctgtctctcaccccgcaggcaagggccaagatcgccaacgtacaacagaacaggtccgtggtgtacgccgatcagactctgggagaggacgatgcaaaatgggcaaagaccatgaaagacaagatcacgaactacattcaagcagacaccgatgggttctttttcattagagttgtggagagcgttatatctagggataaaggatgggttcgttggaaagtcgaaaattgccagccaatcgagcgagattcagtaaagtcctcagagttcattgaagcaagatccaatgccaaacgcctagccactggccgaaaaccgaagacaggtatgaattcactgtctttgtccttcatggatgcaagtgatagcacagtggcaatggagaggttgaagaacgaggagaagtggagattgccgccattggaagattttcagaaaaaaatcgcaaacgatgaccttgatatggactttgcgaaggacgaaaaagagaaatttcaattactggagtcgaaggcgagcaagacttggcgtgccatgagaattgcgcggacttcgcgactagccgcattggacaaaatcgatgagtggcaaaaggccgattctttattccaggagccggcggagaacgaagagacggcgggaaaagaagaggccacgggaattcaccctcaaaatcgagagaccgttattctctctggcccaactggagttggtaaatctacactgatctcgatgcttcaagaacgacaaccgggggtctttgggaaagtgatacaacatacgacgcgcagtccgaaggatgccgagattgatgggcaggatttccactttgttgatacgaagacgtttgacaccatactagatggagactacttcctcgagttcagtgagcacgaggatgttaagcatgggactagtcggaaagttgtagaggccttcaaggaagccaacaagattgcactaatccaacttgagagagagggtacacaatcagccagagataatggattttctgcacgtgtaatccacatctcaccaccgagcttagatgagttgagggcccgccttgagaacaagaatctcgaggagggtaaaattcagaaggcagtaaaagctgctgagctggaaatggcggctgactcggcgctttaccaaaaatcaatcatcaacgatgacctggagacggcgtacaaggaactagaacagttcatttatgaaacgtcggaagtcaatggtaatggggttcatgagagcgaggtgccaaaagaagaagatgtcaagatggaggtttagataggggctgttgtgtcgctaggatctgtgtaatttattgccccggagtgagatcacgggtcaggggtgaggaggtcaagtgaacagatgacgagctgttagatacccataaatcgaggatgttattaggcgatcatattagatttgaattatctgcaaatatggtgataagcgtagagtatagatgcgaca

SEQ ID NO: 3104 - DNA, 4350 bp, Muscodor strobelii
  misc_feature: SGI cDNA ID NO. 560683
  misc_feature: Encodes the peptide sequence at SEQ ID NO 3105
atgccgaccgccaaacgcctcaagagcaatgcgaaggccaaggcgcgcgacaagcctgcagcccgcccaaccgtcgccgacctcgagggagagtccgaattcgcccagctcgccggccagcactggctgaaggctaccaagcgccagaccaaagtcaaggtcaagaacgacgtcctcaagaaccagatatgggatgtgcttgagaaggacagctttccttacagatccctgctggtcctcgagggcctgcagactttggagagctacctgtggccaggctattccgaagactcgtccaacttccacgttctgctcatagctctcatcaccaatgtcaagtcgcgggagaggctggagacgtggagcatattcgaagaccggccagccgagttcgccagccttttcactcgcatactatctctcagtctcgacagcaccctgtccctgcccgtccgcacgcacctcctcagcttcatcatcttcgccttccagagcctggactggtccagcgtgagaaaggaatgcgcgcccctggtttccatcgccatatggcacaatctttcgtccgaagagaagcgcgagtccaagctgggccagatgccccagctgcgcaagtcctggaaagcagctgcgaagcgatatgattccgctgacgataccaccaaagcccgcatccgcttcgagagggcctggctgtacaccctcacatcggactttcttcgcctgctgtacgccgaaaagagatcgcagtcacatatcgtttactgcgagcgctttgtcgagttcatttccgaccttttgagtcagctccctacgaggcgatacgttaacacgttgctccaggacttgcacatccttcccgcactgcagttatctcccatgttcaacgatgaggacaatgggttactgcgtgaccagtgcgccttactcagccattacgtctatttctccatagatgatcagacaggttcgcagcatagccggacggaatcgtacgagaagcactgtgccgagcttggaaagctacaacgtgtcgcgcttcgtcatttcaaggacaaactcaccgttttggccctatcgaattatggctccatagataagagaggcgagttggagaacctgctggagcctctgactgacgctgaactcatcaggctcaccgggttgcttcacttgcgcactgaatacccggagtcagtcgctatcactgtggatagacaatttatcatggaggtgttgctgtctacttttgaaaagcgcaagacattccaagagactgccaaagatatgagcattcttcctacagagcagagtctctttgaccaaagccttgctagaacagatgactacgatggctcacatcctctcgcattgcccaaattgaaattgcagtatctatcggttggtgacttcctatggagggcactcgtgctgtatagatgcgagtcattttatggcataaggaaagacatcagtgatgccgtgcggcggctgaaaccagagctaaggcgctcgggtgagactggcttcgctgggtctactaagatggcactgcccatctcccgcccttctatactggaagtgctcccgccgcttgttggggatgataagccctcggctgtgcgagcggaagtttcgcttgatgttcgtcgcttgggcgaccgggtcagacgagagtgggattctctccgtcctaatgatgttgtctttcttgttgctgtcgatgctgcttcgcagattaccggtctcaacggcagcggaagcagtgtatcagaagcactgaagcttggcgttgtaacagtgcgaacggccgaggttgcccagattctggacgacaagggcaagtctatcagggatcctactgcctatttcagcggcccaatcagatcacctacgaggagaatgcagctccggcttgatccttcaatgtataaggaggatatggatcgagcgtcgaagaacaagccagacgtatacgagcgcatcaacttgatcgtccgccggagcggtagagagaacaacttcaagcccgtgcttgaatcaatacgaacactaaccttgtccgaggttccattagcatcatggctgcacgaaaacttcctcggttatggggatcccgccggtgcaacttataaacacttgtcaaatcgacttggcaagcttgattttcgggatacctttctagattggcagcatctagttgcaagtctgcctggaaagaccatcgaaccaggtttcgaagtgagcagtagttttggtcctccatatgtcctggaatcgatagataaaccaccaccggaagaattgccttcaaaaacttccaagaaaagacggagagatgcagaacctgcgatgcttgctgagatagagacgtacaaagtttctacatacaagcccgcgaattccggaccttaccccatcgacgctcccaagctcaatggcgtccgtttcacaccagcccagattgatgcggttatgtctgggacgcaacctggacttacggttattgtcggtccgcccggaaccggaaagacagatgttgctacgcagattattaataacttatatcacaactttccagagcaaaggacattgctaattgctcattccaaccaagccctaaaccaactgtttgccaaaattgtagccttggacatcgatgagcgccatctgctgcgacttggtcatggcgaggaagaacttgatacggaagggaacttcagcaaacatggaagggtcgaatccttcctagaaattagagatcgctaccttcaagaagtgaatcgtctagcagcaagcataggcgccccaggcgcacatggcaactctgcagagacagcaggctacttcaactctgtctacattcagccaatatgggccaagtttatagatgctatcaaggacgatcaatctaccgcagccgacgttattcaggcgttcccctttggccagttcttttctgacgcgcctcaacccctatttcccaataaggatgacaaagctagtgtcgtagaaattgtcgaaggctgttaccggcatattagcagaatgttctccgaactcgaggacgtacagccctttgagatcctccgacgcgatcgggacaaagcaaattatcttttgaccagcgaagctcgcatcattgctatgacctcaactcatgcggccatgcggcgatctgaaattgcctcgctcggtttccactatgacaatgttgttatggaagaggcagcccaggtcactgaagtggaaagcttcattcctctagccatgcagaaaccacaagaaggacagctagctctccagagggttgtgctttgcggtgatcactatcaaaactcacctgtcatacaaagtcttgcctttcgacattacgcaaaccttgagcagtcgttgttttctcgtctcgtgcgcttaggcataccagtcatcatacttgatcaacaaggtcgtgctcgaccgtcgattgcagcactgtatcaatggaggtatcctagtcttggcaatttgccacacgttgagactcttcccgaattccagtttgccaatgctggatttaagtacgactatcagtttatcaatgtgccagactataaaggtcacggagagatggaaccaacgccgcatttcatacaaaatttgggagaggctgaatacgccgttgcgctctatcaatacatgcggctactaggatatccagcctcgaagataagcatcctaacaacatatgccggtcaaagagcactcattagagacgttttgtcgtttcggtgtgagaatgatgcgatctttggaatgcctaagatcgtttcgacggtcgacaagtatcagggcgaacaaaacgactatattattctttcacttacccgtacgtctcgagtcggctatctgcgagatattcgccgcctgaccgttgcactttcacgtgcacgccttggtctttatattgttggtcgaagagaggtcttcgaagcgtgttacgaactgaagtcagcatttgagcttttgcttcagcgaccggacaagcttgtgctgtccactggcgagatgtggccatccagtcgtgtactggctgaagaagaggggaccgcagcgcctaacgaagcagccatggagggtgtggagcatctgggacagtttgtttacgagatgacactttcaaaagttaagcagtggcgagccgacaacggcctaccgccggacgaggaaattgatccgcaggaaaagctacagcccatccgggaggaggatgaagttcagtacgtgggtgcggaaagcgatgaggaagatgaggaggaagatgaggaggaagatgggcagcaagagcctgatggcgaggcagcggtgtaa

SEQ ID NO: 3105 - protein, 1449 aa, Muscodor strobelii
  misc_feature: SGI Peptide ID NO. 560683
  misc_feature (1)..(1393): NCBI GI: 171687096 Blast Desc: protein product [Podospora anserina] gi|170943509|emb|CAP69162.1| protein product [Podospora anserina]
  misc_feature (1)..(1407): NCBI GI: 85109867 Blast Desc: NCU07866 [Neurospora crassa OR74A] gi|28924779|gb|EAA33891.1| NCU07866 [Neurospora crassa OR74A]
  misc_feature (1)..(1405): NCBI GI: 116191695 Blast Desc: CHGG_05565 [Chaetomium globosum CBS 148.51] gi|88181478|gb|EAQ88946.1| CHGG_05565 [Chaetomium globosum CBS 148.51]
  misc_feature (1)..(1397): NCBI GI: 256729749 Blast Desc: [Nectria haematococca mpVI 77-13-4]
  misc_feature (1)..(1399): NCBI GI: 46122091 Blast Desc: FG05423.1 [Gibberella zeae PH-1]
  misc_feature (4)..(1438): NCBI GI: 156065309 Blast Desc: SS1G_00665 [Sclerotinia sclerotiorum 1980] gi|154691524|gb|EDN91262.1| SS1G_00665 [Sclerotinia sclerotiorum 1980]
  misc_feature (1)..(1399): NCBI GI: 145608758 Blast Desc: MGG_06395 [Magnaporthe grisea 70-15] gi|145016195|gb|EDK00685.1| MGG_06395 [Magnaporthe grisea 70-15]
  misc_feature (21)..(1406): NCBI GI: 121714345 Blast Desc: DEAD helicases superfamily protein (Aquarius), [Aspergillus clavatus NRRL 1] gi|119402937|gb|EAW13357.1| DEAD helicases superfamily protein (Aquarius), [Aspergillus clavatus
  misc_feature (21)..(1430): NCBI GI: 119486897 Blast Desc: DEAD helicases superfamily protein (Aquarius), [Neosartorya fischeri NRRL 181] gi|119410525|gb|EAW20471.1| DEAD helicases superfamily protein (Aquarius), [Neosartorya fischeri
  misc_feature (21)..(1430): NCBI GI: 169784201 Blast Desc: [Aspergillus oryzae RIB40] gi|83775307|dbj|BAE65429.1| protein product [Aspergillus oryzae]
MPTAKRLKSNAKAKARDKPAARPTVADLEGESEFAQLAGQHWLKATKRQTKVKVKNDVLKNQIWDVLEKDSFPYRSLLVLEGLQTLESYLWPGYSEDSSNFHVLLIALITNVKSRERLETWSIFEDRPAEFASLFTRILSLSLDSTLSLPVRTHLLSFIIFAFQSLDWSSVRKECAPLVSIAIWHNLSSEEKRESKLGQMPQLRKSWKAAAKRYDSADDTTKARIRFERAWLYTLTSDFLRLLYAEKRSQSHIVYCERFVEFISDLLSQLPTRRYVNTLLQDLHILPALQLSPMFNDEDNGLLRDQCALLSHYVYFSIDDQTGSQHSRTESYEKHCAELGKLQRVALRHFKDKLTVLALSNYGSIDKRGELENLLEPLTDAELIRLTGLLHLRTEYPESVAITVDRQFIMEVLLSTFEKRKTFQETAKDMSILPTEQSLFDQSLARTDDYDGSHPLALPKLKLQYLSVGDFLWRALVLYRCESFYGIRKDISDAVRRLKPELRRSGETGFAGSTKMALPISRPSILEVLPPLVGDDKPSAVRAEVSLDVRRLGDRVRREWDSLRPNDVVFLVAVDAASQITGLNGSGSSVSEALKLGVVTVRTAEVAQILDDKGKSIRDPTAYFSGPIRSPTRRMQLRLDPSMYKEDMDRASKNKPDVYERINLIVRRSGRENNFKPVLESIRTLTLSEVPLASWLHENFLGYGDPAGATYKHLSNRLGKLDFRDTFLDWQHLVASLPGKTIEPGFEVSSSFGPPYVLESIDKPPPEELPSKTSKKRRRDAEPAMLAEIETYKVSTYKPANSGPYPIDAPKLNGVRFTPAQIDAVMSGTQPGLTVIVGPPGTGKTDVATQIINNLYHNFPEQRTLLIAHSNQALNQLFAKIVALDIDERHLLRLGHGEEELDTEGNFSKHGRVESFLEIRDRYLQEVNRLAASIGAPGAHGNSAETAGYFNSVYIQPIWAKFIDAIKDDQSTAADVIQAFPFGQFFSDAPQPLFPNKDDKASVVEIVEGCYRHISRMFSELEDVQPFEILRRDRDKANYLLTSEARIIAMTSTHAAMRRSEIASLGFHYDNVVMEEAAQVTEVESFIPLAMQKPQEGQLALQRVVLCGDHYQNSPVIQSLAFRHYANLEQSLFSRLVRLGIPVIILDQQGRARPSIAALYQWRYPSLGNLPHVETLPEFQFANAGFKYDYQFINVPDYKGHGEMEPTPHFIQNLGEAEYAVALYQYMRLLGYPASKISILTTYAGQRALIRDVLSFRCENDAIFGMPKIVSTVDKYQGEQNDYIILSLTRTSRVGYLRDIRRLTVALSRARLGLYIVGRREVFEACYELKSAFELLLQRPDKLVLSTGEMWPSSRVLAEEEGTAAPNEAAMEGVEHLGQFVYEMTLSKVKQWRADNGLPPDEEIDPQEKLQPIREEDEVQYVGAESDEEDEEEDEEEDGQQEPDGEAAV

SEQ ID NO: 3106 - DNA, 4935 bp, Muscodor strobelii
  misc_feature: SGI EST ID NO. CUFF.7674.0
  misc_feature: Variant of the nucleotide sequence at SEQ ID NO 3104
cgcgacaaggctgagacgcgaggtttgacgtttccttagaaccagaatctgacctagcctgctggccgaactgcccatgtacgggggattgcggccatagctctcccaccacgttgcgccacaccaagtttagcgccagcgtctcgaaacacagtcgcatagaggtactttaggtacgatatcaaatccgcaaacaaatcggatcttttcgtaatcggtcgcacctgccacactacacccgtaccttgggcccagcaggacgcaccacagacccatgccccgccactcttgacgacaacaaccccgggagtgctgctcgcgtcgcatcgccggctctcggccaggttttctctcgccatctctcccctaccgacactacaccatgccgaccgccaaacgcctcaagagcaatgcgaaggccaaggcgcgcgacaagcctgcagcccgcccaaccgtcgccgacctcgagggagagtccgaattcgcccagctcgccggccagcactggctgaaggctaccaagcgccagaccaaagtcaaggtcaagaacgacgtcctcaagaaccagatatgggatgtgcttgagaaggacagctttccttacagatccctgctggtcctcgagggcctgcagactttggagagctacctgtggccaggctattccgaagactcgtccaacttccacgttctgctcatagctctcatcaccaatgtcaagtcgcgggagaggctggagacgtggagcatattcgaagaccggccagccgagttcgccagccttttcactcgcatactatctctcagtctcgacagcaccctgtccctgcccgtccgcacgcacctcctcagcttcatcatcttcgccttccagagcctggactggtccagcgtgagaaaggaatgcgcgcccctggtttccatcgccatatggcacaatctttcgtccgaagagaagcgcgagtccaagctgggccagatgccccagctgcgcaagtcctggaaagcagctgcgaagcgatatgattccgctgacgataccaccaaagcccgcatccgcttcgagagggcctggctgtacaccctcacatcggactttcttcgcctgctgtacgccgaaaagagatcgcagtcacatatcgtttactgcgagcgctttgtcgagttcatttccgaccttttgagtcagctccctacgaggcgatacgttaacacgttgctccaggacttgcacatccttcccgcactgcagttatctcccatgttcaacgatgaggacaatgggttactgcgtgaccagtgcgccttactcagccattacgtctatttctccatagatgatcagacaggttcgcagcatagccggacggaatcgtacgagaagcactgtgccgagcttggaaagctacaacgtgtcgcgcttcgtcatttcaaggacaaactcaccgttttggccctatcgaattatggctccatagataagagaggcgagttggagaacctgctggagcctctgactgacgctgaactcatcaggctcaccgggttgcttcacttgcgcactgaatacccggagtcagtcgctatcactgtggatagacaatttatcatggaggtgttgctgtctacttttgaaaagcgcaagacattccaagagactgccaaagatatgagcattcttcctacagagcagagtctctttgaccaaagccttgctagaacagatgactacgatggctcacatcctctcgcattgcccaaattgaaattgcagtatctatcggttggtgacttcctatggagggcactcgtgctgtatagatgcgagtcattttatggcataaggaaagacatcagtgatgccgtgcggcggctgaaaccagagctaaggcgctcgggtgagactggcttcgctgggtctactaagatggcactgcccatctcccgcccttctatactggaagtgctcccgccgcttgttggggatgataagccctcggctgtgcgagcggaagtttcgcttgatgttcgtcgcttgggcgaccgggtcagacgagagtgggattctctccgtcctaatgatgttgtctttcttgttgctgtcgatgctgcttcgcagattaccggtctcaacggcagcggaagcagtgtatcagaagcactgaagcttggcgttgtaacagtgcgaacggccgaggttgcccagattctggacgacaagggcaagtctatcagggatcctactgcctatttcagcggcccaatcagatcacctacgaggagaatgcagctccggcttgatccttcaatgtataaggaggatatggatcgagcgtcgaagaacaagccagacgtatacgagcgcatcaacttgatcgtccgccggagcggtagagagaacaacttcaagcccgtgcttgaatcaatacgaacactaaccttgtccgaggttccattagcatcatggctgcacgaaaacttcctcggttatggggatcccgccggtgcaacttataaacacttgtcaaatcgacttggcaagcttgattttcgggatacctttctagattggcagcatctagttgcaagtctgcctggaaagaccatcgaaccaggtttcgaagtgagcagtagttttggtcctccatatgtcctggaatcgatagataaaccaccaccggaagaattgccttcaaaaacttccaagaaaagacggagagatgcagaacctgcgatgcttgctgagatagagacgtacaaagtttctacatacaagcccgcgaattccggaccttaccccatcgacgctcccaagctcaatggcgtccgtttcacaccagcccagattgatgcggttatgtctgggacgcaacctggacttacggttattgtcggtccgcccggaaccggaaagacagatgttgctacgcagattattaataacttatatcacaactttccagagcaaaggacattgctaattgctcattccaaccaagccctaaaccaactgtttgccaaaattgtagccttggacatcgatgagcgccatctgctgcgacttggtcatggcgaggaagaacttgatacggaagggaacttcagcaaacatggaagggtcgaatccttcctagaaattagagatcgctaccttcaagaagtgaatcgtctagcagcaagcataggcgccccaggcgcacatggcaactctgcagagacagcaggctacttcaactctgtctacattcagccaatatgggccaagtttatagatgctatcaaggacgatcaatctaccgcagccgacgttattcaggcgttcccctttggccagttcttttctgacgcgcctcaacccctatttcccaataaggatgacaaagctagtgtcgtagaaattgtcgaaggctgttaccggcatattagcagaatgttctccgaactcgaggacgtacagccctttgagatcctccgacgcgatcgggacaaagcaaattatcttttgaccagcgaagctcgcatcattgctatgacctcaactcatgcggccatgcggcgatctgaaattgcctcgctcggtttccactatgacaatgttgttatggaagaggcagcccaggtcactgaagtggaaagcttcattcctctagccatgcagaaaccacaagaaggacagctagctctccagagggttgtgctttgcggtgatcactatcaaaactcacctgtcatacaaagtcttgcctttcgacattacgcaaaccttgagcagtcgttgttttctcgtctcgtgcgcttaggcataccagtcatcatacttgatcaacaaggtcgtgctcgaccgtcgattgcagcactgtatcaatggaggtatcctagtcttggcaatttgccacacgttgagactcttcccgaattccagtttgccaatgctggatttaagtacgactatcagtttatcaatgtgccagactataaaggtcacggagagatggaaccaacgccgcatttcatacaaaatttgggagaggctgaatacgccgttgcgctctatcaatacatgcggctactaggatatccagcctcgaagataagcatcctaacaacatatgccggtcaaagagcactcattagagacgttttgtcgtttcggtgtgagaatgatgcgatctttggaatgcctaagatcgtttcgacggtcgacaagtatcagggcgaacaaaacgactatattattctttcacttacccgtacgtctcgagtcggctatctgcgagatattcgccgcctgaccgttgcactttcacgtgcacgccttggtctttatattgttggtcgaagagaggtcttcgaagcgtgttacgaactgaagtcagcatttgagcttttgcttcagcgaccggacaagcttgtgctgtccactggcgagatgtggccatccagtcgtgtactggctgaagaagaggggaccgcagcgcctaacgaagcagccatggagggtgtggagcatctgggacagtttgtttacgagatgacactttcaaaagttaagcagtggcgagccgacaacggcctaccgccggacgaggaaattgatccgcaggaaaagctacagcccatccgggaggaggatgaagttcagtacgtgggtgcggaaagcgatgaggaagatgaggaggaagatgaggaggaagatgggcagcaagagcctgatggcgaggcagcggtgtaatgcgaagtgtaaaaatcaaggacatatatatcatgggtttagatcaattcgcttcgtgtatatggagaccaaaaagcgagggaacttatgttgaagctagaatgacaaatgagctcgagccaaagtattcaaggcgaataatgcagctgcaattgaagctctatggctattacgtctcaaatgacatctaggagttgtgattg

SEQ ID NO: 3107 - DNA, 630 bp, Muscodor strobelii
  misc_feature: SGI cDNA ID NO. 560684
  misc_feature: Encodes the peptide sequence at SEQ ID NO 3108
atggcaacgactctggaaaatctcctttgcagtgaaccttgggtctgggactcaaatggctcatgtcaaattgcattccactcaaatggaactggccagctgatatgtcgctcagaagcgagcacgttcatagccgcagagctgggctgggagcttgccccatcaccgtcttcatcaagttcaacgacgactttagcagcgatatcagttgatcctgactcaactaaccatttcgttacattatcactcagaatcactttgaagaagcagcggatccccagctacgaaacgggaaagttgaacgaagattttctagacgaaagcgcattcaagcctagaatccacaccgtaaagcttgagcgtggtgattttatacctatagcagacgcgagatatcatgcgatatccaaaagcacagccccagggcataccccacgcttcaagtcgaagcttgtcttcgagccgtcaccatatccgccagtcgagacctggaaggatccgaatgcagggcctgtaagtttcaaagtatgggaattcaatgaattttgcgcccggcggtctggtactatcggggatcaggatcaggggtttagctggaacaagatgtttagtgggcttgtcggaaaatag

SEQ ID NO: 3108 - protein, 209 aa, Muscodor strobelii
  misc_feature: SGI Peptide ID NO. 560684
  misc_feature (4)..(185): NCBI GI: 145244162 Blast Desc: An11g05990 [Aspergillus niger] gi|134079273|emb|CAK40755.1| [Aspergillus niger]
  misc_feature (9)..(185): NCBI GI: 169846277 Blast Desc: [Coprinopsis cinerea okayama7#130] gi|116509043|gb|EAU91938.1| [Coprinopsis cinerea okayama7#130]
  misc_feature (38)..(165): NCBI GI: 238837936 Blast Desc: conserved [Microsporum canis CBS 113480]
  misc_feature (9)..(164): NCBI GI: 169846232 Blast Desc: [Coprinopsis cinerea okayama7#130] gi|116509159|gb|EAU92054.1| [Coprinopsis cinerea okayama7#130]
  misc_feature (39)..(165): NCBI GI: 238845989 Blast Desc: conserved [Microsporum canis CBS 113480]
  misc_feature (9)..(164): NCBI GI: 169846196 Blast Desc: [Coprinopsis cinerea okayama7#130] gi|116509141|gb|EAU92036.1| [Coprinopsis cinerea okayama7#130]
  misc_feature (1)..(192): NCBI GI: 145610839 Blast Desc: [Magnaporthe grisea 70-15] gi|145018185|gb|EDK02464.1| [Magnaporthe grisea 70-15]
MATTLENLLCSEPWVWDSNGSCQIAFHSNGTGQLICRSEASTFIAAELGWELAPSPSSSSSTTTLAAISVDPDSTNHFVTLSLRITLKKQRIPSYETGKLNEDFLDESAFKPRIHTVKLERGDFIPIADARYHAISKSTAPGHTPRFKSKLVFEPSPYPPVETWKDPNAGPVSFKVWEFNEFCARRSGTIGDQDQGFSWNKMFSGLVGK

SEQ ID NO: 3109 - DNA, 1314 bp, Muscodor strobelii
  misc_feature: SGI cDNA ID NO. 560685
  misc_feature: Encodes the peptide sequence at SEQ ID NO 3110
atggcaactgatgtctccaaggtttatggtatagggttcgcccacgaaaccaatactctaacattggaggtatatttcatcaaaagaagaccaagactagtcattgagttcttttgcgagagaggaaatgggacattggcaattatcaaaccgcgatcttttgtcagccgcagtccaatatcacgggatgcgctacaatgggtaaagtcccatattgataattgtgcaaaacagcatgagtgtccgaagaatgctgtatcacctttgcctttgcggacacttgtcatcgacaatgccaagggtggagaatttagtgttagagtcgcggaacaccagaaagaatacggcaaatatgcagctctgagctattgctggggatcgaataacacatgcacaatgaccgtgaataatcgcgcccagaggatgcgtggcgttccttgggaggaccttccgcacgcttttcgcgacgcgatacggtattgcgcactgatgggcttatcgcatttgtggatcgacgccctttgcattttgcaggattgtgataatgattgggaagtcgaatcgtctagaatggcagacacctaccagaattcttatatcacgttggcggccacttcatgtgcctcgagcgatgttgggtttttaccaattcaacggtccgaggcttacattgcgaaatcattcgaaattcagcaagatgaaacacaaatgagaatccatgtccgccataagatatcccactggagcatgccaccgtcaatggaaatgactcaggagtatcccctgttctccagaggttgggcgttgcaagagcgcgtgttagcgccgcgagtcttgcatttcggcaagaacgaacttctctgggactgtgccgaagggactgagtgcgaatgtagcggctttctctctagccgaaacttgaagaaacaattcgctctcgcggcgcggttcgatcagacagaccagctgcaatatgaattcgagaaagcctttggatccaaaattgacgatgatgtggagcttgaaacgacagcaagtgagagtgaagacgaatccgaggaagagcttgatgactatgatgttgataacgttaggagggaacggagacgccagttgtctcggctagtccatacagcctctagatccgtacacagagaagctatcgaccaatggcacggcattgtagagcaatactctggtttgaagctatcaaggaagacagaccgtctacctgcactgtccggtcttgcagaacatttctcggaaatccagtacgcaatgaagaagggaaggtaccctgggttgatccggtag

SEQ ID NO: 3110 - protein, 437 aa, Muscodor strobelii
  misc_feature: SGI Peptide ID NO. 560685
  misc_feature (118)..(271): Pfam Id: PF06985 Pfam Desc: Heterokaryon incompatibility protein (HET)
  misc_feature (118)..(213): Pfam Id: PF06985 Pfam Desc: Heterokaryon incompatibility protein (HET)
  misc_feature (5)..(417): NCBI GI: 256730657 Blast Desc: NECHADRAFT_73983 [Nectria haematococca mpVI 77-13-4]
  misc_feature (59)..(421): NCBI GI: 256721585 Blast Desc: NECHADRAFT_78531 [Nectria haematococca mpVI 77-13-4]
  misc_feature (30)..(299): NCBI GI: 256724649 Blast Desc: NECHADRAFT_84415 [Nectria haematococca mpVI 77-13-4]
  misc_feature (24)..(432): NCBI GI: 225558616 Blast Desc: HET domain-containing protein [Ajellomyces capsulatus G186AR]
  misc_feature (24)..(421): NCBI GI: 154286502 Blast Desc: [Ajellomyces capsulatus NAm1] gi|150407687|gb|EDN03228.1| [Ajellomyces capsulatus NAm1]
  misc_feature (72)..(417): NCBI GI: 116206180 Blast Desc: CHGG_02383 [Chaetomium globosum CBS 148.51] gi|88182980|gb|EAQ90448.1| CHGG_02383 [Chaetomium globosum CBS 148.51]
  misc_feature (24)..(432): NCBI GI: 226286490 Blast Desc: conserved [Paracoccidioides brasiliensis Pb01]
  misc_feature (24)..(432): NCBI GI: 225680144 Blast Desc: conserved [Paracoccidioides brasiliensis Pb03]
  misc_feature (70)..(307): NCBI GI: 85090613 Blast Desc: NCU09282 [Neurospora crassa OR74A] gi|28919868|gb|EAA29265.1| [Neurospora crassa OR74A]
  misc_feature (24)..(432): NCBI GI: 226291939 Blast Desc: conserved [Paracoccidioides brasiliensis Pb18]
MATDVSKVYGIGFAHETNTLTLEVYFIKRRPRLVIEFFCERGNGTLAIIKPRSFVSRSPISRDALQWVKSHIDNCAKQHECPKNAVSPLPLRTLVIDNAKGGEFSVRVAEHQKEYGKYAALSYCWGSNNTCTMTVNNRAQRMRGVPWEDLPHAFRDAIRYCALMGLSHLWIDALCILQDCDNDWEVESSRMADTYQNSYITLAATSCASSDVGFLPIQRSEAYIAKSFEIQQDETQMRIHVRHKISHWSMPPSMEMTQEYPLFSRGWALQERVLAPRVLHFGKNELLWDCAEGTECECSGFLSSRNLKKQFALAARFDQTDQLQYEFEKAFGSKIDDDVELETTASESEDESEEELDDYDVDNVRRERRRQLSRLVHTASRSVHREAIDQWHGIVEQYSGLKLSRKTDRLPALSGLAEHFSEIQYAMKKGRYPGLIR

SEQ ID NO: 3111 - DNA, 981 bp, Muscodor strobelii
  misc_feature: SGI cDNA ID NO. 560686
  misc_feature: Encodes the peptide sequence at SEQ ID NO 3112
atgtcttcctcgacaggctccagcaaagatagctggctagctccaagtgttccactgagcaagggtgtcgtcaggaagacagcgaaggtgctgcctcggcgaggacacgagagtgagcccgccgaatacgattgggacggactagaagatgccaaagaaaggcggaagagacagaatcgccgaaatgtgcgagcacatagactccgtaaggctcatgcagcaacagtagaggctcgtacatgtgaaagaattagggattcagcattcgtctcgcgcgcattactctattcgtacactggagacgcaagcgctacatccataatggttcatgcgaataatgacactaatcaagcccttgcacagccgaatgaactcttcaaatatttctgctggctatcatctcagactgacctggcccattccggctcaagtatcaaaatgagcagactaatgctaccgctctcacgagatcaccttcttcctcttgtacaatttaatgtcatgcgagctgcagtgacaaatatgattatcatgggtatgggtgactacagcaccgatgtatgcaatcttttctggaacgcgctgccacccttttcacctcctgtcgcggtaccagacaatcttcttcctacggcactacaactagctactccacatcagcgatggatcgacttacttcctcatccacgaatgcgagacaacgccattcgcgcgcaagatattttcagtttcgaagatcttgaggacgatctgatgggatacgtctgcagcgatgcagtcttgcctgacgatggcaatagtggcgaattcattgacagaggattggtcgtatgggctgatccctggcgaccccaaagctatgagctaacgccggggttcttgacaaaatgggggtttctcgttgacggatgcgatgagatgttgattgcaaccaatcggtggcgtgcgctgagaggcgaagggcctttgcctaccgaataa

SEQ ID NO: 3112 - protein, 326 aa, Muscodor strobelii
  misc_feature: SGI Peptide ID NO. 560686
  misc_feature (37)..(323): NCBI GI: 212544802 Blast Desc: conserved [Penicillium marneffei ATCC 18224] gi|210065524|gb|EEA19618.1| conserved [Penicillium marneffei ATCC 18224]
  misc_feature (42)..(326): NCBI GI: 154322294 Blast Desc: BC1G_01294 [Botryotinia fuckeliana B05.10] gi|150850541|gb|EDN25734.1| BC1G_01294 [Botryotinia fuckeliana B05.10]
  misc_feature (37)..(323): NCBI GI: 242821991 Blast Desc: conserved [Talaromyces stipitatus ATCC 10500] gi|218712714|gb|EED12139.1| conserved [Talaromyces stipitatus ATCC 10500]
  misc_feature (37)..(323): NCBI GI: 242813908 Blast Desc: conserved [Talaromyces stipitatus ATCC 10500] gi|218714601|gb|EED14024.1| conserved [Talaromyces stipitatus ATCC 10500]
  misc_feature (42)..(323): NCBI GI: 256724364 Blast Desc: NECHADRAFT_88103 [Nectria haematococca mpVI 77-13-4]
  misc_feature (44)..(326): NCBI GI: 212546953 Blast Desc: conserved [Penicillium marneffei ATCC 18224] gi|210065150|gb|EEA19245.1| conserved [Penicillium marneffei ATCC 18224]
  misc_feature (42)..(323): NCBI GI: 255931371 Blast Desc: Pc12g03590 [Penicillium chrysogenum Wisconsin 54-1255] gi|211581861|emb|CAP79986.1| Pc12g03590 [Penicillium chrysogenum Wisconsin 54-1255]
  misc_feature (44)..(323): NCBI GI: 46127813 Blast Desc: FG08284.1 [Gibberella zeae PH-1]
  misc_feature (44)..(323): NCBI GI: 242810752 Blast Desc: TSTA_051290 [Talaromyces stipitatus ATCC 10500] gi|218716271|gb|EED15693.1| TSTA_051290 [Talaromyces stipitatus ATCC 10500]
  misc_feature (42)..(323): NCBI GI: 238503722 Blast Desc: conserved [Aspergillus flavus NRRL3357] gi|220690564|gb|EED46913.1| conserved [Aspergillus flavus NRRL3357]
MSSSTGSSKDSWLAPSVPLSKGVVRKTAKVLPRRGHESEPAEYDWDGLEDAKERRKRQNRRNVRAHRLRKAHAATVEARTCERIRDSAFVSRALLYSYTGDASATSIMVHANNDTNQALAQPNELFKYFCWLSSQTDLAHSGSSIKMSRLMLPLSRDHLLPLVQFNVMRAAVTNMIIMGMGDYSTDVCNLFWNALPPFSPPVAVPDNLLPTALQLATPHQRWIDLLPHPRMRDNAIRAQDIFSFEDLEDDLMGYVCSDAVLPDDGNSGEFIDRGLVVWADPWRPQSYELTPGFLTKWGFLVDGCDEMLIATNRWRALRGEGPLPTE

SEQ ID NO: 3113 - DNA, 1508 bp, Muscodor strobelii
  misc_feature: SGI EST ID NO. CUFF.7690.0
  misc_feature: Variant of the nucleotide sequence at SEQ ID NO 3111
gccctttgaggccttcgcctcccactctagactcatgaccactttagatgtcaagcattctatcgcacgactaggctcacacagaaattctgattgccggcagaatcatgtcttcctcgacaggctccagcaaagatagctggctagctccaagtgttccactgagcaagggtgtcgtcaggaagacagcgaaggtgctgcctcggcgaggacacgagagtgagcccgccgaatacgattgggacggactagaagatgccaaagaaaggcggaagagacagaatcgccgaaatgtgcgagcacatagactccgtaaggctcatgcagcaacagtagaggctcgtacatgtgaaagaattagggattcagcattcgtctcgcgcgcattactctattcgtacactggagacgcaagcgctacatccataatggttcatgcgaataatgacactaatcaagcccttgcacagccgaatgaactcttcaaatatttctgctggctatcatctcagactgacctggcccattccggctcaagtatcaaaatgagcagactaatgctaccgctctcacgagatcaccttcttcctcttgtacaatttaatgtcatgcgagctgcagtgacaaatatgattatcatgggtatgggtgactacagcaccgatgtatgcaatcttttctggaacgcgctgccacccttttcacctcctgtcgcggtaccagacaatcttcttcctacggcactacaactagctactccacatcagcgatggatcgacttacttcctcatccacgaatgcgagacaacgccattcgcgcgcaagatattttcagtttcgaagatcttgaggacgatctgatgggatacgtctgcagcgatgcagtcttgcctgacgatggcaatagtggcgaattcattgacagaggattggtcgtatgggctgatccctggcgaccccaaagctatgagctaacgccggggttcttgacaaaatgggggtttctcgttgacggatgcgatgagatgttgattgcaaccaatcggtggcgtgcgctgagaggcgaagggcctttgcctaccgaataattcccaatcgttttcaacaaaacgtacaatatacgtcatacacttcaatgatatacaggtccgaagcacatccgtaagatgtcgcgacctggtagacaaattactcatggccaaacctctactgtgctctgttcggtgctggctcaactagctgagtgatcgtccgattggagataattgttgtctctagacaattgaaatagtctctattgtcgagccttcgtacaagttgactgagtaattagtccctaattcagacggtagcttaataatacctatgcgcctccaacgtcgggcattgacaatagatgatcccgtctgtatgaggaccagagcaatgttagggaagagcataaagagtttgacagtaggtcttccaacctctcttctactgggcagaatgtcgtcggcgcaaaaatc

SEQ ID NO: 3114 - DNA, 1002 bp, Muscodor strobelii
  misc_feature: SGI cDNA ID NO. 560687
  misc_feature: Elevated expression when VOC is produced
  misc_feature: Encodes the peptide sequence at SEQ ID NO 3115
atggcttcagcaactgagctactatctgcccttggttcctacttcaactctcatctattcgtcaccttaccttacccaactcgtagttttgccagccaagtcataattgtcacaggttccaacactggtctcgggcttgaagctgctcgtcatttcgttcgtcttggcgccactaaggtcatcataactagccgtagtatcaaacgtgcacaagaagccgcagaaaacatcgccaaaaccacgaacagacccggtgtcgcggagggttgggagctcgacttggctatatacgcatcggtcaaggcattcgctaaccgtgccgagaccgagctcccacgtcttgatgttatactgaacaacgcagcatcttttaatcatcattttgatgtggcagaggacaatgagcttagtattacggtcaacgttataagccccttgcttctcagtctacttctacttccaaaattgagacaaacctctatcagttacgagacacgcgtcgtagtcacagttgttacatccttcttgcacgctcttacgtcttttccggagagcaaagcggaaaatattctcgacaccctggcggacgaaaagcaggcccgaatgaatgacaggtataatgtaaataaacttatggagatactcgcggttcgtgagctcgcggaccaagtcgacaagtcgacgaaaggcggtcgaatcttagtctcgtctgtcaatccaggatcagctaagaaatctacccctgaccgcgagactgcgacaggtttggccaatatcattagaaagatgattcagcgaagtacagaagtgggaagccgaacactcgtgcatgccgcggaaggagatgtcgcaacacatggccaatatctcaacgattgtaaagtcgggcgtgcctccaagtacgtcaccagcccgaatggtgctgcaactcaacagaagctttggtcggagatgggagcgaagttggagcgcattcaaccaggcatcatggggaacatatga

SEQ ID NO: 3115 - protein, 333 aa, Muscodor strobelii
  misc_feature: SGI Peptide ID NO. 560687
  misc_feature (33)..(191): Pfam Id: PF00106 Pfam Desc: short chain dehydrogenase
  misc_feature (33)..(122): Pfam Id: PF00106 Pfam Desc: short chain dehydrogenase
  misc_feature (34)..(66): Pfam Id: PF08659 Pfam Desc: KR domain
  misc_feature (14)..(333): NCBI GI: 242813903 Blast Desc: short-chain dehydrogenase/reductase family protein, [Talaromyces stipitatus ATCC 10500] gi|218714600|gb|EED14023.1| short-chain dehydrogenase/reductase family protein, [Talaromyces
  misc_feature (11)..(333): NCBI GI: 212544800 Blast Desc: short-chain dehydrogenase, [Penicillium marneffei ATCC 18224] gi|210065523|gb|EEA19617.1| short-chain dehydrogenase, [Penicillium marneffei ATCC 18224]
  misc_feature (14)..(333): NCBI GI: 121703447 Blast Desc: conserved [Aspergillus clavatus NRRL 1] gi|119398131|gb|EAW08562.1| conserved [Aspergillus clavatus NRRL 1]
  misc_feature (8)..(333): NCBI GI: 239609457 Blast Desc: short-chain dehydrogenase/reductase [Ajellomyces dermatitidis ER-3]
  misc_feature (14)..(333): NCBI GI: 212529402 Blast Desc: short-chain dehydrogenase, [Penicillium marneffei ATCC 18224] gi|210074256|gb|EEA28343.1| short-chain dehydrogenase, [Penicillium marneffei ATCC 18224]
  misc_feature (8)..(329): NCBI GI: 212538669 Blast Desc: short-chain dehydrogenase/reductase family protein, [Penicillium marneffei ATCC 18224] gi|210069232|gb|EEA23323.1| short-chain dehydrogenase/reductase family protein, [Penicillium
  misc_feature (8)..(333): NCBI GI: 261196470 Blast Desc: short-chain dehydrogenase/reductase [Ajellomyces dermatitidis SLH14081] gi|239595883|gb|EEQ78464.1| short-chain dehydrogenase/reductase [Ajellomyces dermatitidis SLH14081]
  misc_feature (14)..(333): NCBI GI: 119497485 Blast Desc: NFIA_023150 [Neosartorya fischeri NRRL 181] gi|119413663|gb|EAW23604.1| conserved [Neosartorya fischeri NRRL 181]
  misc_feature (8)..(333): NCBI GI: 238840116 Blast Desc: conserved [Microsporum canis CBS 113480]
  misc_feature (14)..(329): NCBI GI: 256725472 Blast Desc: NECHADRAFT_83140 [Nectria haematococca mpVI 77-13-4]
  misc_feature (29)..(279): SWISSPROT Homolog: EC 1.1.1.184 Carbonyl reductase (NADPH)
  misc_feature: Useful for introducing or modulating the production of volatile compounds
MASATELLSALGSYFNSHLFVTLPYPTRSFASQVIIVTGSNTGLGLEAARHFVRLGATKVIITSRSIKRAQEAAENIAKTTNRPGVAEGWELDLAIYASVKAFANRAETELPRLDVILNNAASFNHHFDVAEDNELSITVNVISPLLLSLLLLPKLRQTSISYETRVVVTVVTSFLHALTSFPESKAENILDTLADEKQARMNDRYNVNKLMEILAVRELADQVDKSTKGGRILVSSVNPGSAKKSTPDRETATGLANIIRKMIQRSTEVGSRTLVHAAEGDVATHGQYLNDCKVGRASKYVTSPNGAATQQKLWSEMGAKLERIQPGIMGNI

SEQ ID NO: 3116 - DNA, 1280 bp, Muscodor strobelii
  misc_feature: SGI EST ID NO. CUFF.7695.0
  misc_feature: Variant of the nucleotide sequence at SEQ ID NO 3114
gttggcatcagtgcgtcacccttcacgttctttgcattgcttcctcattatctcgagctcctgctttacacttatagttgaacccttagacagagttacgccaggtcaagatggcttcagcaactgagctactatctgcccttggttcctacttcaactctcatctattcgtcaccttaccttacccaactcgtagttttgccagccaagtcataattgtcacaggttccaacactggtctcgggcttgaagctgctcgtcatttcgttcgtcttggcgccactaaggtcatcataactagccgtagtatcaaacgtgcacaagaagccgcagaaaacatcgccaaaaccacgaacagacccggtgtcgcggagggttgggagctcgacttggctatatacgcatcggtcaaggcattcgctaaccgtgccgagaccgagctcccacgtcttgatgttatactgaacaacgcagcatcttttaatcatcattttgatgtggcagaggacaatgagcttagtattacggtcaacgttataagccccttgcttctcagtctacttctacttccaaaattgagacaaacctctatcagttacgagacacgcgtcgtagtcacagttgttacatccttcttgcacgctcttacgtcttttccggagagcaaagcggaaaatattctcgacaccctggcggacgaaaagcaggcccgaatgaatgacaggtataatgtaaataaacttatggagatactcgcggttcgtgagctcgcggaccaagtcgacaagtcgacgaaaggcggtcgaatcttagtctcgtctgtcaatccaggatcagctaagaaatctacccctgaccgcgagactgcgacaggtttggccaatatcattagaaagatgattcagcgaagtacagaagtgggaagccgaacactcgtgcatgccgcggaaggagatgtcgcaacacatggccaatatctcaacgattgtaaagtcgggcgtgcctccaagtacgtcaccagcccgaatggtgctgcaactcaacagaagctttggtcggagatgggagcgaagttggagcgcattcaaccaggcatcatggggaacatatgatgcgtcaaaccaattctttcacgtcgcagggtggcattcataagcgtagaatatgtatctcccaccttgtatacttgtttgtatttggatctcgatagaattgccatctagcgacatcaatagcagcgcacaaaatcgatacaccctactttcctttcctgtggccat

SEQ ID NO: 3117 - DNA, 1281 bp, Muscodor strobelii
  misc_feature: SGI cDNA ID NO. 560689
  misc_feature: Encodes the peptide sequence at SEQ ID NO 3118
atgcgtgccgcgttgctagccagtcttggcgttgctgtcgtcaatgctttgcctaccatcttgaccgttggcaacaagttcttcaccagtgatggcgaccagttcttcctcaaggggatcgcttatcagctcactcctgacgaccccctgattaataaggctcaatgccagcgagatgctgacctcatgaagactctgggcgttaattcgattcgcgtctatcatgtcgatcccgacgccgaccatgacggctgtatgggcgtatttgatgatgcgggtatctacacgctcattgatcttgacacgtttgacagctacattctgccagaagatccctactggaaccagactcagtacgatgcctacgccaaggtcatggatactttcgctggttacgataacctccttggtgtcttcatcggtaacgagatcatcgcgcaagctaaccaatcgctcgctgctccgttcatcaaggccgctgttagagacatgaaggcctatcgtaactctaagaactaccgcaagttccctattggttattctgccgccgatattgccgagctgcgaccctaccttcaagattacttgacctgtggcggaaattcttcagataatgtcgactttttcggacttaattcctaccagtggtgtgatcctaccgactataagacttcaggctatgccaaccttgaggatggtgcgaaggactttcccgtgcctatatttttcagcgagacaggatgcaacaaaccaggccctcgcctcttcgaggatcaagcctcgatctttgggcctgaaatgagcaaggactggagcggtgcgatcatttacgaatggattgaagaggccaaccattacgggttgatttcgtacggccccactgtcgccccgactgcaactggcgccaacatcgaaggcggttactctagggctggtacccctactcccgtgtcgcctgatttcaacaacttgagtaagcagtgggcaaccctctctcctacaggcgtcaaaagttcggattacaaggcttcggtgtcaactcgcgagtgcccggcctcgacctccggtggttggcttgtcgatggaaatgtcaaggttcccacactgggcgcaagcctcggcaccaacacgtacacccccgcggcgtctgctactggcagctctacggatgatgccagcaacccgacagatactcctaacgctgtccctgaggtcgagagaatcacgggggtggctgctggtcttatgggtgtcatgatggtgttcacattttggctgtag

SEQ ID NO: 3118 - protein, 426 aa, Muscodor strobelii
  misc_feature: SGI Peptide ID NO. 560689
  misc_feature (4)..(332): Pfam Id: PF03198 Pfam Desc: Glycolipid anchored surface protein (GAS1)
  misc_feature (4)..(291): Pfam Id: PF03198 Pfam Desc: Glycolipid anchored surface protein (GAS1)
  misc_feature (1)..(426): NCBI GI: 164424630 Blast Desc: NCU06850 [Neurospora crassa OR74A] gi|157070595|gb|EAA34088.2| NCU06850 [Neurospora crassa OR74A]
  misc_feature (1)..(426): NCBI GI: 28881197 Blast Desc: related to beta (1-3) glucanosyltransferase [Neurospora crassa]
  misc_feature (1)..(425): NCBI GI: 145608314 Blast Desc: MGG_03208 [Magnaporthe grisea 70-15] gi|145015802|gb|EDK00292.1| MGG_03208 [Magnaporthe grisea 70-15]
  misc_feature (2)..(426): NCBI GI: 156040555 Blast Desc: SS1G_12294 [Sclerotinia sclerotiorum 1980] gi|154696350|gb|EDN96088.1| SS1G_12294 [Sclerotinia sclerotiorum 1980]
  misc_feature (14)..(426): NCBI GI: 171689326 Blast Desc: protein product [Podospora anserina] gi|170944625|emb|CAP70736.1| protein product [Podospora anserina]
  misc_feature (1)..(370): NCBI GI: 242781914 Blast Desc: 1,3-beta-glucanosyltransferase, [Talaromyces stipitatus ATCC 10500] gi|218720043|gb|EED19462.1| 1,3-beta-glucanosyltransferase, [Talaromyces stipitatus ATCC
  misc_feature (1)..(370): NCBI GI: 212526826 Blast Desc: 1,3-beta-glucanosyltransferase, [Penicillium marneffei ATCC 18224] gi|210072968|gb|EEA27055.1| 1,3-beta-glucanosyltransferase, [Penicillium marneffei ATCC
  misc_feature (5)..(404): NCBI GI: 255937597 Blast Desc: Pc13g14170 [Penicillium chrysogenum Wisconsin 54-1255] gi|211584445|emb|CAP92486.1| Pc13g14170 [Penicillium chrysogenum Wisconsin 54-1255]
  misc_feature (4)..(417): NCBI GI: 169605391 Blast Desc: SNOG_05720 [Phaeosphaeria nodorum SN15] gi|111065664|gb|EAT86784.1| SNOG_05720 [Phaeosphaeria nodorum SN15]
  misc_feature (4)..(414): NCBI GI: 115391525 Blast Desc: conserved [Aspergillus terreus NIH2624] gi|114194191|gb|EAU35891.1| conserved [Aspergillus terreus NIH2624]
MRAALLASLGVAVVNALPTILTVGNKFFTSDGDQFFLKGIAYQLTPDDPLINKAQCQRDADLMKTLGVNSIRVYHVDPDADHDGCMGVFDDAGIYTLIDLDTFDSYILPEDPYWNQTQYDAYAKVMDTFAGYDNLLGVFIGNEIIAQANQSLAAPFIKAAVRDMKAYRNSKNYRKFPIGYSAADIAELRPYLQDYLTCGGNSSDNVDFFGLNSYQWCDPTDYKTSGYANLEDGAKDFPVPIFFSETGCNKPGPRLFEDQASIFGPEMSKDWSGAIIYEWIEEANHYGLISYGPTVAPTATGANIEGGYSRAGTPTPVSPDFNNLSKQWATLSPTGVKSSDYKASVSTRECPASTSGGWLVDGNVKVPTLGASLGTNTYTPAASATGSSTDDASNPTDTPNAVPEVERITGVAAGLMGVMMVFTFWL

SEQ ID NO: 3119 - DNA, 2300 bp, Muscodor strobelii
  misc_feature: SGI EST ID NO. CUFF.7712.0
  misc_feature: Variant of the nucleotide sequence at SEQ ID NO 3117
gatttgcggcacgtctggagaagctctaggttgcatacaccctgggagctgccccggttcctgctgacctgcggcctatcactgatggtatccgctcttggattgaaacgtttatggcaatccacaagtgaatgtagaaatgacgggggagctagcacgattcgcaccctctcgacgaacaaggttgtttaatttcttgattggggtttctattttcccatttcctcttttcactctgccctcactttgtcgtcttgtcgcacacacttgtgccagccgtgttgagagccgcttcaagttgaacaaggtcgcagagccggcgaggcaaacacacactcgtttgttgtcttttgaaaggtgcccttcctgtcgctgaggtcctacgcccactcgttcgagatccgctctctctggtgcccacctgcgacttactgagtgtccctacgatccaatctctgtagagcctgccaattagcatctgcaatcgtttgctctctcctgcggccgtactaccaactcaagatcacagcataagcttaatttcgtgtgtgaataaggctgccgaaacttcaaactcactctagacagcttcgtcttctaatcgacacggctcggttcgaggagtagaactgtgactttggacctcgattattactttctatcatagttcaaaaagcctggacttggattgagaatcttcaatattcgacatcttcatctactgttcgttctcgacacttgttcaagatgcgtgccgcgttgctagccagtcttggcgttgctgtcgtcaatgctttgcctaccatcttgaccgttggcaacaagttcttcaccagtgatggcgaccagttcttcctcaaggggatcgcttatcagctcactcctgacgaccccctgattaataaggctcaatgccagcgagatgctgacctcatgaagactctgggcgttaattcgattcgcgtctatcatgtcgatcccgacgccgaccatgacggctgtatgggcgtatttgatgatgcgggtatctacacgctcattgatcttgacacgtttgacagctacattctgccagaagatccctactggaaccagactcagtacgatgcctacgccaaggtcatggatactttcgctggttacgataacctccttggtgtcttcatcggtaacgagatcatcgcgcaagctaaccaatcgctcgctgctccgttcatcaaggccgctgttagagacatgaaggcctatcgtaactctaagaactaccgcaagttccctattggttattctgccgccgatattgccgagctgcgaccctaccttcaagattacttgacctgtggcggaaattcttcagataatgtcgactttttcggacttaattcctaccagtggtgtgatcctaccgactataagacttcaggctatgccaaccttgaggatggtgcgaaggactttcccgtgcctatatttttcagcgagacaggatgcaacaaaccaggccctcgcctcttcgaggatcaagcctcgatctttgggcctgaaatgagcaaggactggagcggtgcgatcatttacgaatggattgaagaggccaaccattacgggttgatttcgtacggccccactgtcgccccgactgcaactggcgccaacatcgaaggcggttactctagggctggtacccctactcccgtgtcgcctgatttcaacaacttgagtaagcagtgggcaaccctctctcctacaggcgtcaaaagttcggattacaaggcttcggtgtcaactcgcgagtgcccggcctcgacctccggtggttggcttgtcgatggaaatgtcaaggttcccacactgggcgcaagcctcggcaccaacacgtacacccccgcggcgtctgctactggcagctctacggatgatgccagcaacccgacagatactcctaacgctgtccctgaggtcgagagaatcacgggggtggctgctggtcttatgggtgtcatgatggtgttcacattttggctgtagagcggatatttcaggctgtgcctctcaacagggggttttcagatggtttgtatgagaaaactgggctttcgttctggttataatgataccaaggcatcgtatacggcgttcgtgtcttgcattttgagagactacttggttccaaacgtatagaactggcaggggagagaaacgaatgaaaaacatgagaattattcatccctgtgttgtgtgaacaactgcggccggcgatgtgagagaaaatacaaaacaagaagctaagttctgtcccg

SEQ ID NO: 3120 - DNA, 1353 bp, Muscodor strobelii
  misc_feature: SGI cDNA ID NO. 560690
  misc_feature: Encodes the peptide sequence at SEQ ID NO 3121
atgctcatatcttcacagaagatcaaagcgctcagtcggtcggtggcgagctaccaaacgcctgggacctcagcccccaaagcccccaggaatttggacccctctatgcaccaatttgagagagcacgagaatacacgcgagcactcaatgccgtgaagctggagcgaatgttcgctgctccttttattgcccaactgggaaatggtcatgttgacggtgtctacaccttcgctaaagatccaaacaacttaacccgctttgccagtggtgcgggagacggtgttgtaaaatgctgggacttgacaagtagagatgaagtgtggtcaaccactgcggcagagaacatcgtcaaaggcatggcctggacaacagaccaaaaattgctgacgtgttcgtccgattccacaatcaaaatctacgatccttacagtacaccgaatgcatctccgccactgcattcatggctaggaagccatccatacacaagtctcagcgtgcatcgtgatggtaaatcattcgccgcctcaacggactgtgtgtccattcacgatttgaacaactacactgctgcacctcaggttctcaagtggcccgcttccggagaaactatcactacttgcgcattcaaccagagtgagaccagcgttcttgcgagcgctgcaacagatcgttctgtcattctctatgatctgagaacctcgatgccattaaccaagaccactctaaacttcagctccaataagatcgtgtggaatccaatggagccaatgaatttcgcatgtgccaacgaagatcacaactgctacatattcgacatgagaaacctcggccgggccttgaacattttgaaaggacatgttgcagctgttatggacgttgactggtcacccactggtaaagagcttgtaacaggctcctacgaccggactatacgattgtggaatcgcgacgaaggacactcccgagatatatatcacacgaagagacaacaacgagtcttctcggtcgcttggtcttctgacaatcattatgttttgtcaggttcggatgacggtaacgtaaggctttggcgagcacaagcctccaagagagaggggattaagtcgactcgccatcgtcaagccctcgagtacaacgacgctttagtcgaaagatacagtcacatgcctgaaatccggcgcatcaaaagacacagacatatccccaaggttgtgaagaaggcaggcgaaatcaagtcagaagaactcaaagcaatcaagagaagggaggagaacgaacgcaagcactctaagaagcaattcgagaaaaggcagagtgagcgtgacaaggttgttctcgctagggagaaatga

SEQ ID NO: 3121 - protein, 450 aa, Muscodor strobelii
  misc_feature: SGI Peptide ID NO. 560690
  misc_feature (277)..(315): Pfam Id: PF00400 Pfam Desc: WD domain, G-beta repeat
  misc_feature (319)..(358): Pfam Id: PF00400 Pfam Desc: WD domain, G-beta repeat
  misc_feature (104)..(141): Pfam Id: PF00400 Pfam Desc: WD domain, G-beta repeat
  misc_feature (359)..(446): Pfam Id: PF04158 Pfam Desc: Sof1-like domain
  misc_feature (359)..(432): Pfam Id: PF04158 Pfam Desc: Sof1-like domain
  misc_feature (333)..(358): Pfam Id: PF00400 Pfam Desc: WD domain, G-beta repeat
  misc_feature (191)..(230): Pfam Id: PF00400 Pfam Desc: WD domain, G-beta repeat
  misc_feature (69)..(100): Pfam Id: PF00400 Pfam Desc: WD domain, G-beta repeat
  misc_feature (7)..(450): NCBI GI: 156053792 Blast Desc: SS1G_05744 [Sclerotinia sclerotiorum 1980] gi|154703524|gb|EDO03263.1| SS1G_05744 [Sclerotinia sclerotiorum 1980]
  misc_feature (7)..(450): NCBI GI: 154321357 Blast Desc: U3 small nucleolar RNA associated protein [Botryotinia fuckeliana B05.10] gi|150852091|gb|EDN27283.1| U3 small nucleolar RNA associated protein [Botryotinia fuckeliana B05.10]
  misc_feature (7)..(450): NCBI GI: 256730610 Blast Desc: [Nectria haematococca mpVI 77-13-4]
  misc_feature (7)..(450): NCBI GI: 261356849 Blast Desc: SOF1 [Verticillium albo-atrum VaMs.102]
  misc_feature (7)..(438): NCBI GI: 46109128 Blast Desc: FG01446.1 [Gibberella zeae PH-1]
  misc_feature (3)..(450): NCBI GI: 240108386 Blast Desc: WD domain, G-beta repeat containing protein [Coccidioides posadasii C735 delta SOWgp]
  misc_feature (7)..(450): NCBI GI: 119186931 Blast Desc: conserved [Coccidioides immitis RS]
  misc_feature (7)..(450): NCBI GI: 258563584 Blast Desc: protein SOF1 [Uncinocarpus reesii 1704] gi|237908044|gb|EEP82445.1| protein SOF1 [Uncinocarpus reesii 1704]
  misc_feature (3)..(450): NCBI GI: 67527968 Blast Desc: AN4226.2 [Aspergillus nidulans FGSC A4] gi|40740135|gb|EAA59325.1| AN4226.2 [Aspergillus nidulans FGSC A4]
  misc_feature (7)..(450): NCBI GI: 259481165 Blast Desc: TPA: small nucleolar ribonucleoprotein complex subunit (SOF1), (AFU_orthologue; AFUA_1G06290) [Aspergillus nidulans FGSC A4]
  misc_feature (93)..(357): SWISSPROT Homolog: EC 2.7.11.1 Non-specific serine/threonine protein kinase
MLISSQKIKALSRSVASYQTPGTSAPKAPRNLDPSMHQFERAREYTRALNAVKLERMFAAPFIAQLGNGHVDGVYTFAKDPNNLTRFASGAGDGVVKCWDLTSRDEVWSTTAAENIVKGMAWTTDQKLLTCSSDSTIKIYDPYSTPNASPPLHSWLGSHPYTSLSVHRDGKSFAASTDCVSIHDLNNYTAAPQVLKWPASGETITTCAFNQSETSVLASAATDRSVILYDLRTSMPLTKTTLNFSSNKIVWNPMEPMNFACANEDHNCYIFDMRNLGRALNILKGHVAAVMDVDWSPTGKELVTGSYDRTIRLWNRDEGHSRDIYHTKRQQRVFSVAWSSDNHYVLSGSDDGNVRLWRAQASKREGIKSTRHRQALEYNDALVERYSHMPEIRRIKRHRHIPKVVKKAGEIKSEELKAIKRREENERKHSKKQFEKRQSERDKVVLAREK

SEQ ID NO: 3122 - DNA, 1696 bp, Muscodor strobelii
  misc_feature: SGI EST ID NO. CUFF.7708.0
  misc_feature: Variant of the nucleotide sequence at SEQ ID NO 3120
cagacttctcaatctcatcagctcgattgactacctaatcaactgattgatgagtttgacgacatcatgaagatcaaagcgctcagtcggtcggtggcgagctaccaaacgcctgggacctcagcccccaaagcccccaggaatttggacccctctatgcaccaatttgagagagcacgagaatacacgcgagcactcaatgccgtgaagctggagcgaatgttcgctgctccttttattgcccaactgggaaatggtcatgttgacggtgtctacaccttcgctaaagatccaaacaacttaacccgctttgccagtggtgcgggagacggtgttgtaaaatgctgggacttgacaagtagagatgaagtgtggtcaaccactgcggcagagaacatcgtcaaaggcatggcctggacaacagaccaaaaattgctgacgtgttcgtccgattccacaatcaaaatctacgatccttacagtacaccgaatgcatctccgccactgcattcatggctaggaagccatccatacacaagtctcagcgtgcatcgtgatggtaaatcattcgccgcctcaacggactgtgtgtccattcacgatttgaacaactacactgctgcacctcaggttctcaagtggcccgcttccggagaaactatcactacttgcgcattcaaccagagtgagaccagcgttcttgcgagcgctgcaacagatcgttctgtcattctctatgatctgagaacctcgatgccattaaccaagaccactctaaacttcagctccaataagatcgtgtggaatccaatggagccaatgaatttcgcatgtgccaacgaagatcacaactgctacatattcgacatgagaaacctcggccgggccttgaacattttgaaaggacatgttgcagctgttatggacgttgactggtcacccactggtaaagagcttgtaacaggctcctacgaccggactatacgattgtggaatcgcgacgaaggacactcccgagatatatatcacacgaagagacaacaacgagtcttctcggtcgcttggtcttctgacaatcattatgttttgtcaggttcggatgacggtaacgtaaggctttggcgagcacaagcctccaagagagaggggattaagtcgactcgccatcgtcaagccctcgagtacaacgacgctttagtcgaaagatacagtcacatgcctgaaatccggcgcatcaaaagacacagacatatccccaaggttgtgaagaaggcaggcgaaatcaagtcagaagaactcaaagcaatcaagagaagggaggagaacgaacgcaagcactctaagaagcaattcgagaaaaggcagagtgagcgtgacaaggttgttctcgctagggagaaatgatgcaatgttttcaacgtatgtaccggactgctttgcatttgatggcgttttagggctgggaaaactcggataccataaaagcacacatgtgcttcatagtcaggcgttcatgatatttgtactgatgaacggaggtcatcctcgctattagaagctgcccaaggtgagggctgtcaattttcgacaaacttgctgcaaaatagaaatttattttaaattacattagatctattgagcgagtattgagccctgtggctattcatctgccatagggtttacgaaacaagacgca

SEQ ID NO: 3123 - DNA, 1008 bp, Muscodor strobelii
  misc_feature: SGI cDNA ID NO. 560691
  misc_feature: Elevated expression when VOC is produced
  misc_feature: Encodes the peptide sequence at SEQ ID NO 3124
atgtctgtcggctttggattcagcgtaggggacttcgtcgctgtcattgaattagttgcaaaagtaggcgatgccctgagcgaatctggcggctcgtccgaggaatttcaagacgtcgcaaaggagttacagagcttccgctctgtcatcgaaagcattcaaacggttacccataggtcgggcgcaataagtgagcatgctgcaacacaattgttgcttgtcctcagcagctgtcaaaaggctctgaatgattttggtcgttttcttgccagtcagcgtggaatgaaaactaccttcaagaagatctcgtgggccacacgagggaaaccgaagcttgaagcattccgatcgagaatattaagtaatatgatgttgctttctttgattcagcaagatctgaatagacactcactagaagacacacagaaagaaataaatagggtgaggaatgatgtttcgcaggaaataagcaagactcgggatgagctcctgtctgtgcgaaatgcagtgtcgcacgatatacagaggagtgtgcaagatttgcaagctaatgtgatatcctcaattgcatggtcgtatgatcaacagcctataaaatttcaggatcctcgaggtcgtcgttttccagtgcctttggagatttgtataaacttccaggatttccttgacttcctaaagttttctttcaaagatagtccaattcatcagctcctcgttgaaacaggcaacatttggctttttactccaggcggtcagcacgtaacctggtggtacctgattcaagaagcagactggacccaaattgctcgaccagggatcacgctcggcatgtcattcaatagcccggacacagaaattgtcaagtctgaagtcaatactcatgcttacccatcagaccacatggacgcgtgttgtcaagatgatgcttgtacgtgcgttgttgagttcgtgaagccgctacctcctaacatctcgtacgatccaaataccaagttccgctacttgtag

SEQ ID NO: 3124 - protein, 335 aa, Muscodor strobelii
  misc_feature: SGI Peptide ID NO. 560691
  misc_feature (1)..(230): NCBI GI: 116201235 Blast Desc: CHGG_08502 [Chaetomium globosum CBS 148.51] gi|88177020|gb|EAQ84488.1| CHGG_08502 [Chaetomium globosum CBS 148.51]
  misc_feature (1)..(254): NCBI GI: 240107045 Blast Desc: CPC735_018360 [Coccidioides posadasii C735 delta SOWgp]
  misc_feature (1)..(130): NCBI GI: 156044975 Blast Desc: [Sclerotinia sclerotiorum 1980] gi|154694071|gb|EDN93809.1| [Sclerotinia sclerotiorum 1980]
  misc_feature (1)..(288): NCBI GI: 238844501 Blast Desc: conserved [Microsporum canis CBS 113480]
  misc_feature (3)..(147): NCBI GI: 116206132 Blast Desc: [Chaetomium globosum CBS 148.51] gi|88182956|gb|EAQ90424.1| [Chaetomium globosum CBS 148.51]
  misc_feature (1)..(131): NCBI GI: 116214415 Blast Desc: CHGG_11048 [Chaetomium globosum CBS 148.51] gi|88175403|gb|EAQ82872.1| CHGG_11048 [Chaetomium globosum CBS 148.51]
  misc_feature (1)..(184): NCBI GI: 119175134 Blast Desc: CIMG_09468 [Coccidioides immitis RS]
  misc_feature (1)..(128): NCBI GI: 119172594 Blast Desc: [Coccidioides immitis RS]
  misc_feature (3)..(126): NCBI GI: 242816900 Blast Desc: TSTA_052530 [Talaromyces stipitatus ATCC 10500] gi|218713307|gb|EED12731.1| TSTA_052530 [Talaromyces stipitatus ATCC 10500]
  misc_feature (3)..(102): NCBI GI: 256720834 Blast Desc: NECHADRAFT_85540 [Nectria haematococca mpVI 77-13-4]
  misc_feature: Useful for introducing or modulating the production of volatile compounds
MSVGFGFSVGDFVAVIELVAKVGDALSESGGSSEEFQDVAKELQSFRSVIESIQTVTHRSGAISEHAATQLLLVLSSCQKALNDFGRFLASQRGMKTTFKKISWATRGKPKLEAFRSRILSNMMLLSLIQQDLNRHSLEDTQKEINRVRNDVSQEISKTRDELLSVRNAVSHDIQRSVQDLQANVISSIAWSYDQQPIKFQDPRGRRFPVPLEICINFQDFLDFLKFSFKDSPIHQLLVETGNIWLFTPGGQHVTWWYLIQEADWTQIARPGITLGMSFNSPDTEIVKSEVNTHAYPSDHMDACCQDDACTCVVEFVKPLPPNISYDPNTKFRYL

SEQ ID NO: 3125 - DNA, 4439 bp, Muscodor strobelii
  misc_feature: SGI EST ID NO. CUFF.7835.0
  misc_feature: Variant of the nucleotide sequence at SEQ ID NO 3123
ggcgagcttttcttttgcataagtacatcagtgattgctaaggtcgaatgggctcgttgcaggcccacatcgtaatgggtgacaatgattgagacagtcaacacccctgctccttgtgcttttcgtatactgattctcccccatctggccatatgtaagagtgcggagttgtgtggagttgtgagtcacgccgatgctatccatgtaggcttcacgtagggaacaagacattaacagtagcattccttcaaatgatcaagatcgttcagagaaataattcacttttagaacgattagctcaatagcatgttgtaattccgagctacatgatctgatacgtactctccaaacctgttgtccaaacctattgtatcacgatggcacacaacaacgtctcgagaagcgctgctccgaccgaggctatagatgggccacggcatatcatcccgaccgaagaagagcagcgccgggagcggtacggaaataaaaatgtgaagcaggcgttggaagccctccaccaggacggtctcgttgtgctcaagtccatagtagatcccgagcatgtgcgcctgctgcgtgagtatatggcaaaagaggccgatgacctcgtgaaaagcaacgcaaagcctttcaatcagggtgtgaactccaatattctccaggggccgccgctcacgaactcggacctgctctttgacgatgtattcttcaatccgtttgtgatacagatcatgaatgtgtacctgggtgctcgacccagctggggtttcgtgacaggcaacactgcacttcctcatacgaacggcatgcgacagccggttcataaagatattatcttcttccatcctcagtgcccgttctacgccattgcgaatttgcctctatgcccctttcgcgccgagaatgggtcgactgagttctggcttggatctcatgctcatacaaggggcgaagaccaaattattgcgggcgagcagaataccctcgctaatgctaaacttcgtattggggaacccatgtgcgatgtgcggccagacgttgtagaggcaaggcgtgctgtgaggccgccagtgcagccagagatagagccaggtgatttcttgattcgagatctccgcacttggcatgctggtatgcccaatgagacagctgaatatcgcaccatgttagcattggggtaccgtgcatcctggtatgagaactatgggctacgggcgaaactccctcggggacaagccaacttcttcgcacgagcgggcggacagccaattgaggtcgctgccgacttcttgccagacgatgcaaactttggaatactgaatgatgtgtttagtttcagacacaccactgactaatataccagccgcgaattatgcaaacgagcaaggtagtgcaaaacttagcaagcagcacttaagaggtactagatgtctagttcagatgaggagccactacttaccgtagcttcgtaagtcgctgctcgccacgacaagaataatcaaagcacacagtccgtggctttacttatgctagtgtaccatgtttcagtatccttctcttagcgaacaatggtccagtattgccttttttcttttgctcttcgataatgggacgagcccttcaccgcctatgcgaaaagtgcattgtctacattggttattctattgctaaccgtcaactcatctctgtgccagaaataggtcctctaggtctcgtcaagttcggttgttgactaggttgcaaacttttagatatggcattttgaacaaggactaggagttgcgtcctgcccttatcccatgtagcgagccagttagatggaatacactcccagtgagtgcggtctcgtcttgggagctacggcatcgaggatcacgaggcggtcctggtcaatttatttgacttcggctcgcacttcgagcagccgagcgccacactcattaggagaggaaccaacgaagtcattatcaaactcttcgtcgtcgctcatttcatctctgagtaactctctgggcggtacgccttggcgagactctgacaaacattaaggactggtctcccttttggacgcagtgtgacgatgttgtcgtgacaggttgaggctctgtctatcgctttagcctcctcatcaatgcaatacgggatgagtttggtcaatgaggcgtgcttgcaggatgagtgctgacggggtacggtgatgaggcacgtgaagtggccttggctgccgacaaacgttgacccggcggtgatctaattcgaaatatggccctaggtctgagccctacgcgtcggttcagacgccttttaatcgagacgtcgaataataagcctgcatacctcacgattgtaattgtgttttgacaagaaagtgtcaccttagggtttaggctggcaaagttagctattgtagtggacatttccaactaaccgttatgtatcacgggtgctctgccttgccaagacttgcccctgcatatttgaggcgcagtccatccagcatagtgcatgaggtcactgatggcctcttctgggcagattcagtggttcacggttgcctcttcttgtggaagcattcatctagccattgcaatgatgagaagattctaaactcctagcaaacatgcattattattagtgagaaattcatgcatagcctttgttacagcaacgagggctttttcacagttcaatcattgtccgaacctcgcaatgtctgtcggctttggattcagcgtaggggacttcgtcgctgtcattgaattagttgcaaaagtaggcgatgccctgagcgaatctggcggctcgtccgaggaatttcaagacgtcgcaaaggagttacagagcttccgctctgtcatcgaaagcattcaaacggttacccataggtcgggcgcaataagtgagcatgctgcaacacaattgttgcttgtcctcagcagctgtcaaaaggctctgaatgattttggtcgttttcttgccagtcagcgtggaatgaaaactaccttcaagaagatctcgtgggccacacgagggaaaccgaagcttgaagcattccgatcgagaatattaagtaatatgatgttgctttctttgattcagcaagatctgaatagacactcactagaagacacacagaaagaaataaatagggtgaggaatgatgtttcgcaggaaataagcaagactcgggatgagctcctgtctgtgcgaaatgcagtgtcgcacgatatacagaggagtgtgcaagatttgcaagctaatgtgatatcctcaattgcatggtcgtatgatcaacagcctataaaatttcaggatcctcgaggtcgtcgttttccagtgcctttggagatttgtataaacttccaggatttccttgacttcctaaagttttctttcaaagatagtccaattcatcagctcctcgttgaaacaggcaacatttggctttttactccaggcggtcagcacgtaacctggtggtacctgattcaagaagcagactggacccaaattgctcgaccagggatcacgctcggcatgtcattcaatagcccggacacagaaattgtcaagtctgaagtcaatactcatgcttacccatcagaccacatggacgcgtgttgtcaagatgatgcttgtacgtgcgttgttgagttcgtgaagccgctacctcctaacatctcgtacgatccaaataccaagttccgctacttgagccccccaaataccaaagccggagttaacatgagttccgacgtgaccgagtattgcgtggcgtgtgagaaggcaacttcacttcgatgttcacactgtaaaactactccttattgctcacgagcatgccagcaacatgactccgacgttcataagcttctctgcgccaattcggacattagagagcgtgaaaccaaagtggataatagagtatctactccgtcttttaccaaagaaatcatagatgagagagaccgcatcgaggctcctgaaacatcagacaggcagatgacgaaaagccgtttggcctacgttgactcggaagccacagatcacgaaagaaaggcgttcgttctatctctttataagaaaaaattcaaacaggacgtagttagtagttttcattgttactgcggaataggtttctattgtggttactgtcgtcgcaaatatacccacttgtgggagaggctcacaaaagaagacgaactcactgaaagttaaacctgaatcagacgagtcgctgtactgagaatgaatgtattcgttgatcatctagctctagattgaagggcgcgtcttaagagatgaatctgcaagagaaaatgccagaaacgttagtcgctgttctgcgctccgtcttgatataaaagcattattcctacgctttaggtggtacattataaccacctaatgctgagccatgaggtgtcgaattgtgtgag

SEQ ID NO: 3126 - DNA, 978 bp, Muscodor strobelii
  misc_feature: SGI cDNA ID NO. 560692
  misc_feature: Elevated expression when VOC is produced
  misc_feature: Encodes the peptide sequence at SEQ ID NO 3127
atggcacacaacaacgtctcgagaagcgctgctccgaccgaggctatagatgggccacggcatatcatcccgaccgaagaagagcagcgccgggagcggtacggaaataaaaatgtgaagcaggcgttggaagccctccaccaggacggtctcgttgtgctcaagtccatagtagatcccgagcatgtgcgcctgctgcgtgagtatatggcaaaagaggccgatgacctcgtgaaaagcaacgcaaagcctttcaatcagggtgtgaactccaatattctccaggggccgccgctcacgaactcggacctgctctttgacgatgtattcttcaatccgtttgtgatacagatcatgaatgtgtacctgggtgctcgacccagctggggtttcgtgacaggcaacactgcacttcctcatacgaacggcatgcgacagccggttcataaagatattatcttcttccatcctcagtgcccgttctacgccattgcgaatttgcctctatgcccctttcgcgccgagaatgggtcgactgagttctggcttggatctcatgctcatacaaggggcgaagaccaaattattgcgggcgagcagaataccctcgctaatgctaaacttcgtattggggaacccatgtgcgatgtgcggccagacgttgtagaggcaaggcgtgctgtgaggccgccagtgcagccagagatagagccaggtgatttcttgattcgagatctccgcacttggcatgctggtatgcccaatgagacagctgaatatcgcaccatgttagcattggggtaccgtgcatcctggtatgagaactatgggctacgggcgaaactccctcggggacaagccaacttcttcgcacgagcgggcggacagccaattgaggtcgctgccgacttcttgccagacgatgcaaactttggaatactgaatgatgtgtttagtttcagacacaccactgactaa

SEQ ID NO: 3127 - protein, 325 aa, Muscodor strobelii
  misc_feature: SGI Peptide ID NO. 560692
  misc_feature (44)..(263): Pfam Id: PF05721 Pfam Desc: Phytanoyl-CoA dioxygenase (PhyH)
  misc_feature (145)..(263): Pfam Id: PF05721 Pfam Desc: Phytanoyl-CoA dioxygenase (PhyH)
  misc_feature (1)..(285): NCBI GI: 134114496 Blast Desc: CNBH0030 [Cryptococcus neoformans var. neoformans B-3501A] gi|50256710|gb|EAL19431.1| CNBH0030 [Cryptococcus neoformans var. neoformans B-3501A]
  misc_feature (19)..(275): NCBI GI: 189205983 Blast Desc: phytanoyl-CoA dioxygenase family protein [Pyrenophora tritici-repentis Pt-1C-BFP] gi|187975419|gb|EDU42045.1| phytanoyl-CoA dioxygenase family protein [Pyrenophora Pt-1C-BFP]
  misc_feature (19)..(275): NCBI GI: 169610882 Blast Desc: SNOG_08549 [Phaeosphaeria nodorum SN15] gi|111062597|gb|EAT83717.1| SNOG_08549 [Phaeosphaeria nodorum SN15]
  misc_feature (19)..(275): NCBI GI: 242771455 Blast Desc: conserved [Talaromyces stipitatus ATCC 10500] gi|218721464|gb|EED20882.1| conserved [Talaromyces stipitatus ATCC 10500]
  misc_feature (25)..(289): NCBI GI: 115383854 Blast Desc: conserved [Aspergillus terreus NIH2624] gi|114196166|gb|EAU37866.1| conserved [Aspergillus terreus NIH2624]
  misc_feature (19)..(275): NCBI GI: 255931097 Blast Desc: Pc12g02120 [Penicillium chrysogenum Wisconsin 54-1255] gi|211581724|emb|CAP79839.1| Pc12g02120 [Penicillium chrysogenum Wisconsin 54-1255]
  misc_feature (7)..(275): NCBI GI: 169785817 Blast Desc: [Aspergillus oryzae RIB40] gi|238506719|ref|XP_002384561.1| conserved [Aspergillus flavus NRRL3357] gi|83776117|dbj|BAE66236.1| protein product oryzae]
  misc_feature (19)..(275): NCBI GI: 119467047 Blast Desc: phytanoyl-CoA dioxygenase, [Neosartorya fischeri NRRL 181] gi|119405482|gb|EAW15433.1| phytanoyl-CoA dioxygenase, [Neosartorya fischeri NRRL 181]
  misc_feature (19)..(275): NCBI GI: 115433236 Blast Desc: conserved [Aspergillus terreus NIH2624] gi|114189607|gb|EAU31307.1| conserved [Aspergillus terreus NIH2624]
  misc_feature (7)..(275): NCBI GI: 85109970 Blast Desc: NCU09596 [Neurospora crassa OR74A] gi|28881117|emb|CAD70289.1| conserved [Neurospora crassa] gi|28924840|gb|EAA33938.1| conserved [Neurospora crassa OR74A]
  misc_feature: Useful for introducing or modulating the production of volatile compounds
MAHNNVSRSAAPTEAIDGPRHIIPTEEEQRRERYGNKNVKQALEALHQDGLVVLKSIVDPEHVRLLREYMAKEADDLVKSNAKPFNQGVNSNILQGPPLTNSDLLFDDVFFNPFVIQIMNVYLGARPSWGFVTGNTALPHTNGMRQPVHKDIIFFHPQCPFYAIANLPLCPFRAENGSTEFWLGSHAHTRGEDQIIAGEQNTLANAKLRIGEPMCDVRPDVVEARRAVRPPVQPEIEPGDFLIRDLRTWHAGMPNETAEYRTMLALGYRASWYENYGLRAKLPRGQANFFARAGGQPIEVAADFLPDDANFGILNDVFSFRHTTD

SEQ ID NO: 3128 - DNA, 4439 bp, Muscodor strobelii; identical to SEQ ID NO: 3125
  misc_feature: SGI EST ID NO. CUFF.7835.0
  misc_feature: Variant of the nucleotide sequence at SEQ ID NO 3126

SEQ ID NO: 3129 - DNA, 963 bp, Muscodor strobelii
  misc_feature: SGI cDNA ID NO. 560693
  misc_feature: Encodes the peptide sequence at SEQ ID NO 3130
atgactatcatcgcagtggctggcggttccgggagcattggcaggactatagtcaatgctctcatatcttcgcgcaaacatgaagtgacgatattggccagagaagcgaatcctggactcgagtcgacacttggagctcctgtcgtcccagccaactatgcagatgttgagactgtcaaaaacattttcgagactcgcaatgttcacactgttatatctaccattaacatgcagcccagcctagatggcgtgcgtccccaggagattgagctgattcaagccgccaatctctcgaaagtcacgaagcgtttcattgcgagcggttggggcttgagttacacggaagcgcacgcgccccagctcgaatccgctgcagagaaacttctctcagctgccgaattgaagaaggcggcgaatcttgaaggaaccatcttcacgaatggtcttctcatggactacttcggtttaggttctccgagtgttcaaacgacgatggccccattgacggttttcctagatatagctcacaatgcagccgctatcccgggcgatggcaacactccaatggcattgactcacacaacagatgttgccaaatacgttctggctgtgcttgagaaggagaagtgggaaccgcactacaacgttgctggagataggctgtccggtaatcaactagtaaagctcgcagaagagattaagggcacaccaatcaacgttactcatgatagcattgagatgttgaaaaaagggaccgtcactgagttacccagtatgcttatcagttacgagtttatccccgagaagctgtatcgacgcatcatggccacttttggcatttggcttgtggatggatccatagatatatctccagaagacctacacaataaccacttccccgaggtcaagcccatgacgatgagacagttcttggagcaagcttggaagaacactacagagtag

SEQ ID NO: 3130 - protein, 320 aa, Muscodor strobelii
  misc_feature: SGI Peptide ID NO. 560693
  misc_feature (4)..(217): Pfam Id: PF01370 Pfam Desc: NAD dependent epimerase/dehydratase family
  misc_feature (4)..(242): Pfam Id: PF05368 Pfam Desc: NmrA-like family
  misc_feature (4)..(38): Pfam Id: PF05368 Pfam Desc: NmrA-like family
  misc_feature (1)..(312): NCBI GI: 256725155 Blast Desc: NECHADRAFT_73228 [Nectria haematococca mpVI 77-13-4]
  misc_feature (4)..(316): NCBI GI: 116204097 Blast Desc: CHGG_09932 [Chaetomium globosum CBS 148.51] gi|88176060|gb|EAQ83528.1| CHGG_09932 [Chaetomium globosum CBS 148.51]
  misc_feature (1)..(312): NCBI GI: 261357174 Blast Desc: conserved [Verticillium albo-atrum VaMs.102]
  misc_feature (2)..(317): NCBI GI: 261353740 Blast Desc: conserved [Verticillium albo-atrum VaMs.102]
  misc_feature (1)..(317): NCBI GI: 256721577 Blast Desc: NECHADRAFT_92336 [Nectria haematococca mpVI 77-13-4]
  misc_feature (4)..(315): NCBI GI: 256725502 Blast Desc: NECHADRAFT_70763 [Nectria haematococca mpVI 77-13-4]
  misc_feature (2)..(316): NCBI GI: 256723616 Blast Desc: NECHADRAFT_52062 [Nectria haematococca mpVI 77-13-4]
  misc_feature (1)..(315): NCBI GI: 256723448 Blast Desc: NECHADRAFT_42269 [Nectria haematococca mpVI 77-13-4]
  misc_feature (1)..(317): NCBI GI: 256727905 Blast Desc: NECHADRAFT_46266 [Nectria haematococca mpVI 77-13-4]
  misc_feature (8)..(311): NCBI GI: 242811967 Blast Desc: conserved [Talaromyces stipitatus ATCC 10500] gi|218714201|gb|EED13624.1| conserved [Talaromyces stipitatus ATCC 10500]
MTIIAVAGGSGSIGRTIVNALISSRKHEVTILAREANPGLESTLGAPVVPANYADVETVKNIFETRNVHTVISTINMQPSLDGVRPQEIELIQAANLSKVTKRFIASGWGLSYTEAHAPQLESAAEKLLSAAELKKAANLEGTIFTNGLLMDYFGLGSPSVQTTMAPLTVFLDIAHNAAAIPGDGNTPMALTHTTDVAKYVLAVLEKEKWEPHYNVAGDRLSGNQLVKLAEEIKGTPINVTHDSIEMLKKGTVTELPSMLISYEFIPEKLYRRIMATFGIWLVDGSIDISPEDLHNNHFPEVKPMTMRQFLEQAWKNTTE

SEQ ID NO: 3131 - DNA, 3147 bp, Muscodor strobelii
  misc_feature: SGI cDNA ID NO. 560694
  misc_feature: Encodes the peptide sequence at SEQ ID NO 3132
atgacactgactaatgtgtacgcttacgggcgacggctcatgccctgtgttctcgatgagcttgcacgacaggacaagcctaagctctatggctcaattcctaaagctaaccacgatctcagtcaaggcttccgtgacatcagtgtagctgatatggcccgctgcgtcgacttcatggctgcttggatcaaaaaccgatttggatcagtctacaagaacgagaccatgacgtatgtggggttgcaagacttcagaggcgttgtcatattctatgcgtcagtcaaatgcggatataagttactgttgccatcacctagaaacccagcatccacaaatgtctctcttatgaagcagacagatagtaccatcttactatatgcagctgaaattgtgccaattgtgaagccactgctggctgaggatggggtgcgaggtgcagagatcccaactttcgaggaaatgttcgagagcaggcccgaccctttcccttatgacaaaattttcgatgaagtgtgtaacgaacccgtacttgtgctccactcatcaggctcgacaggtgtgccgaaaccaataaccatgacccattcgtcattcgcagtcctcgataatgaaaagaactactcagagattccgggacgtaagaggtttgacttctcgtcgtataacctcaagggcgagggtcgcatattcactgtctttccattcttccatgtcagatgctccgctcgcttagttaacccaatattgaacaatgcttgtcccgtattgggttctccccacgtcatgccagacgccagcctgatcaatgccattcggaagcagtacaaactacaggcgctaatactcactccatcaatcgtggagcaactcctccatgagcccgacgtgacggaacttctcgaagggctggagttcctcaatacgagcggtgcgccattgagtcggcctatcggggaccgcctaagtaaaactgtacctcttctcatgtcaccgtttggcacaacagaagtcttcatactaccagagatagtaacggatccggaagactgggagtggcacgagttcaatccgtatttcgagcatgaaatgcggcccttcgatgctgatgagggaacgtacgagctgattgtatttgctaatgacgataacaaagacagaacagcagtgtatcataacttgccgggcgtcaaggagtaccacacgaaggacctgttcctcaagcacccgacaaagcccggactattcaaatactatgggagatgcgatgacattcttgtcctagcgaacggccacaagctaaatccgataccgttagaagctcgaatgcagagccatgcgtctttgtcaggagcattgctgactggcaacgccaagagccaaacggcgttgattgttgagccaaggacagcgctcgatgaatcggggcaggaccagctaattgaggagctgtggccactagtagaggaggccaacctactcatcgcaagccaaggccgtgttcagaaaggcatgattctctgtactaaacctgacaagaaattcgtcagaacggttaagacgacgatcatccgcgaattctcggaggcgctctatcaagctgaactcgacaagctgtatgagagcctgtcatccggcgacaagacaattatgatcgacctcatgcctaaagtgaaggcagaatttgagctgacagatatcaccaccttcgtgcgccaagtcctctctttttcattctgcgcagccagtaccataggagaggatgaggactttttctcatacggccttgactcggttacgacgctggagattgtaagtaacttaagacgtaacctgtccaagcaccagtcgcagggcgccgattgggtgtcttctcggaccatctatctccattcgaatatcgcagcgctatcgcggcttctctgtgagttcttgaacagcggtttggtaccaacaaacgatgtgaacgccgaacagatgagtgctgccaatgaattcgtcaataaattctcgagcgacttaccgctgagtggaggacggaatggggcgtccgcatctcagagtcctttgatagtggcactggtaggttcaaccggatatcttgggtcgcacatgatcgcagcaatgatcgggaactcatcaatcacttgcatctattgcctgaatcggtccagcaatgcccaagagcgacaagaagcagccttgagcgagatatcagctgatctccagcccctcttagggaagttgcgctacatgaacatgaaaatcggtagtccgaaactcggcctgagtgctaccgactacgacattctcgtcaacacggtagatgtgattgtctacaacgcttggcgtttggacttcggcctttctgtgcgttctttcgagcccttcctgaaagcaactcgcgacatcattcatctatcggctttaagtcgccgatcggctcggatcgtcttcataagttcgatctcttcggtggcaaagatggcacataagcccgaagaggctgtagaagaccctcttgcagcgcttgggactgggtatgcacaatcgaagcttgtcgcggagcgcattctatcaaaggcgtgtgatatatctggccttcctgttcgcatcgtgcgggttggtcaagttggtgggccaatagcggaaggaaaaggaaagtggcaagaccaagaccaggcctggatatccgcagtcctgaggacgtcgaagactcttaattgtatgcctgaaaggcttgctccaatagactgggtccctgtcaacgtcgcagcttcgatgttgagcaagattgtcagcattcccgaaacccccacaggggaaagtgagatccaggtttatcatatctatcccacccagccgctgccctggagcgatctcattgccatcatgcgcgagaggcacaatgtcaccgagacggcgcctttaacatactggatcaagaaactccggacaatcaaggaaccgtccccggacgacattgcgaggatgccggcgctgaagttgctcgatcattatgacgcgctgcaagggggagcaaatgacttcggtgttgcgacagaaaagacgcgcgcgtttactcagattgacacgcccgccttggataaagctactgtagttcggtggttgggagattggggcctttaa

SEQ ID NO: 3132 - protein, 1048 aa, Muscodor strobelii
  misc_feature: SGI Peptide ID NO. 560694
  misc_feature (693)..(928): Pfam Id: PF07993 Pfam Desc: Male sterility protein
  misc_feature (87)..(336): Pfam Id: PF00501 Pfam Desc: AMP-binding enzyme
  misc_feature (581)..(611): Pfam Id: PF00550 Pfam Desc: Phosphopantetheine attachment site
  misc_feature (9)..(1009): NCBI GI: 242771974 Blast Desc: NRPS-like enzyme, [Talaromyces stipitatus ATCC 10500] gi|218721568|gb|EED20986.1| NRPS-like enzyme, [Talaromyces stipitatus ATCC 10500]
  misc_feature (9)..(1034): NCBI GI: 212527160 Blast Desc: NRPS-like enzyme, [Penicillium marneffei ATCC 18224] gi|210073135|gb|EEA27222.1| NRPS-like enzyme, [Penicillium marneffei ATCC 18224]
  misc_feature (9)..(1046): NCBI GI: 238506833 Blast Desc: NRPS-like enzyme, [Aspergillus flavus NRRL3357] gi|220689331|gb|EED45682.1| NRPS-like enzyme, [Aspergillus flavus NRRL3357]
  misc_feature (9)..(1046): NCBI GI: 169785917 Blast Desc: [Aspergillus oryzae RIB40] gi|83776167|dbj|BAE66286.1| protein product [Aspergillus oryzae]
  misc_feature (4)..(1048): NCBI GI: 121701267 Blast Desc: nonribosomal peptide synthetase, [Aspergillus clavatus NRRL 1] gi|119397041|gb|EAW07472.1| nonribosomal peptide synthetase, [Aspergillus clavatus NRRL 1]
  misc_feature (10)..(1046): NCBI GI: 145248269 Blast Desc: An13g02460 [Aspergillus niger] gi|134081134|emb|CAK41644.1| protein product [Aspergillus niger]
  misc_feature (11)..(1046): NCBI GI: 159128271 Blast Desc: nonribosomal peptide synthetase, [Aspergillus fumigatus A1163]
  misc_feature (11)..(1046): NCBI GI: 146323205 Blast Desc: NRPS-like enzyme [Aspergillus fumigatus Af293] gi|129556517|gb|EAL86551.2| NRPS-like enzyme, [Aspergillus fumigatus Af293]
  misc_feature (11)..(1046): NCBI GI: 255938806 Blast Desc: Pc14g01790 [Penicillium chrysogenum Wisconsin 54-1255] gi|211584794|emb|CAP74320.1| Pc14g01790 [Penicillium chrysogenum Wisconsin 54-1255]
  misc_feature (10)..(1048): NCBI GI: 115437254 Blast Desc: conserved [Aspergillus terreus NIH2624] gi|114188579|gb|EAU30279.1| conserved [Aspergillus terreus NIH2624]
MTLTNVYAYGRRLMPCVLDELARQDKPKLYGSIPKANHDLSQGFRDISVADMARCVDFMAAWIKNRFGSVYKNETMTYVGLQDFRGVVIFYASVKCGYKLLLPSPRNPASTNVSLMKQTDSTILLYAAEIVPIVKPLLAEDGVRGAEIPTFEEMFESRPDPFPYDKIFDEVCNEPVLVLHSSGSTGVPKPITMTHSSFAVLDNEKNYSEIPGRKRFDFSSYNLKGEGRIFTVFPFFHVRCSARLVNPILNNACPVLGSPHVMPDASLINAIRKQYKLQALILTPSIVEQLLHEPDVTELLEGLEFLNTSGAPLSRPIGDRLSKTVPLLMSPFGTTEVFILPEIVTDPEDWEWHEFNPYFEHEMRPFDADEGTYELIVFANDDNKDRTAVYHNLPGVKEYHTKDLFLKHPTKPGLFKYYGRCDDILVLANGHKLNPIPLEARMQSHASLSGALLTGNAKSQTALIVEPRTALDESGQDQLIEELWPLVEEANLLIASQGRVQKGMILCTKPDKKFVRTVKTTIIREFSEALYQAELDKLYESLSSGDKTIMIDLMPKVKAEFELTDITTFVRQVLSFSFCAASTIGEDEDFFSYGLDSVTTLEIVSNLRRNLSKHQSQGADWVSSRTIYLHSNIAALSRLLCEFLNSGLVPTNDVNAEQMSAANEFVNKFSSDLPLSGGRNGASASQSPLIVALVGSTGYLGSHMIAAMIGNSSITCIYCLNRSSNAQERQEAALSEISADLQPLLGKLRYMNMKIGSPKLGLSATDYDILVNTVDVIVYNAWRLDFGLSVRSFEPFLKATRDIIHLSALSRRSARIVFISSISSVAKMAHKPEEAVEDPLAALGTGYAQSKLVAERILSKACDISGLPVRIVRVGQVGGPIAEGKGKWQDQDQAWISAVLRTSKTLNCMPERLAPIDWVPVNVAASMLSKIVSIPETPTGESEIQVYHIYPTQPLPWSDLIAIMRERHNVTETAPLTYWIKKLRTIKEPSPDDIARMPALKLLDHYDALQGGANDFGVATEKTRAFTQIDTPALDKATVVRWLGDWGL

SEQ ID NO: 3133 - DNA, 531 bp, Muscodor strobelii
  misc_feature: SGI cDNA ID NO. 560695
  misc_feature: Encodes the peptide sequence at SEQ ID NO 3134
atgcgtacctcttcccaagttcttctctcttttgtggccaccgttgcagcttggcacccgagcaccggcccggatgacggagatgttaccattacagtcggaggagattcgagcttagccggttatcagctagttggtgttaagggtgactcgacgcccttcccagctcttgtcactgcggacaaggccgccgaatatcaacccatttggcagttgaactacatcaactatgttcacttcggatggtattctattttcactaatatcgatggtgcgtcctacggaattgacgaggttgtcacaaatggaggctatgatgggctgtccgttctcattgacgcagctacctatggtgacaacatttgggatgccttgactgcctctggagacttgaactggactgctgatttcgctcaatctccctttggctgcaccagagacgatggcaagatccagcttgggatcttcaaacccgctgatgcccctaaaggctgtgtggagatcaagctgcagttcgctgcggtcgcttag

SEQ ID NO: 3134 - protein, 176 aa, Muscodor strobelii
  misc_feature: SGI Peptide ID NO. 560695
MRTSSQVLLSFVATVAAWHPSTGPDDGDVTITVGGDSSLAGYQLVGVKGDSTPFPALVTADKAAEYQPIWQLNYINYVHFGWYSIFTNIDGASYGIDEVVTNGGYDGLSVLIDAATYGDNIWDALTASGDLNWTADFAQSPFGCTRDDGKIQLGIFKPADAPKGCVEIKLQFAAVA

SEQ ID NO: 3135 - DNA, 1719 bp, Muscodor strobelii
  misc_feature: SGI cDNA ID NO. 560696
  misc_feature: Encodes the peptide sequence at SEQ ID NO 3136
atggagggggcgatcattagtattctagaagatgatgactttggccgagtcaattcgacaaatcctcggtctaccatgagaacgactgctttctttcaacgcaaccatgacgagcacacccgtttgcccgacttcgtcgacattctctcatatgtagccattttgtatagacagcatgcgcggcccatggaacttttcaccgactgggacatggagcctattgacagtggcgcgatctttcacgtctcctctcgtagaaatgagacaacagcctcttcccggcatcgttcgcaactccagaaggttgtgataaaaagatcgcctgctttgaaattcaaggcgaatgggaccgttcaccaaactcaggactgcaagttcgctgtgcagggtactttgcgagaattgcaagttctgaccacagccgagatcaagcgacaaccaaatgtggtggatattcttggcgtggcatggagctacgaacctcaccctgatggatgcccagaaatcggattaatcctcgaggaagcaaactgtaacttaggcggatatctcctaagactcttgtctggtgctactgaagaggatcgcatgatcgagctacagaggctgaaagaggaagattgcttaaagtctgtcattctcgatgaatgctatggagcaatggataaagacgtgtccatgacatcgaatgatctcatgatggtggagatatggctgagcgataccctagggttacagcctgaacggcgtcgccttgagtccgtacttggcaatacgctcgggatcgatagtcatttgcccgagaagccatataagccgaagccatgggaccctgatctcgttgacataccataccaagctttgaacagtcttagcaatgttttgaaaagccatattatacaaaacttaaggatggtcgtggagaatgctggaggaaagcagaccaaagcccgaatcgcggcatgcgccttcgaactgtgcgtttgctacggagctggttttggtgtccattcggacaaaacacaggctcgagattggctcattttcgctgcgcgggaaggcgaaatgactgcgcaatcagtcagccttcgagttcttgaggctttgggtcaagacaacgctgttgacttgcctgaaatcgatacgtggcttaccaatgctgctgccagaggctcctggactgcgattgagagcctgctgatcaagggatactctgaggtcatcaatgatttgtcagaagccgagattttggccccgaaggacctgaatgttggggactgcaatggaaacacgcctctcatttacgcatgtcgctcaggatggtatcagattgccaagaatctggtttcaatgggcgccagcgctagccactctaatctggcgaacgagaacgctctgcattttcttcacagcattggggatgaacaagcgggtgcattagctgaacttcttgtcgaacatggcgcagatgtcatgcaggagtccaaagccaactccatcaacaacacaatctttgatcttagggtgaccgttcctggaactccaattctccgggccatcactatgaacgcgttgaccctagcgaaaacgttgatagcattgaaaatcaagcattgtcccgccaatactacgcgagagaagatgctatggcgactgaactgttacaagatcatcgacttcggttccatgacacgggctttactctaccccaactgctga

SEQ ID NO: 3136 - protein, 572 aa, Muscodor strobelii
  misc_feature: SGI Peptide ID NO. 560696
  misc_feature (428)..(460): Pfam Id: PF00023 Pfam Desc: Ankyrin repeat
  misc_feature (431)..(534): NCBI GI: 225557070 Blast Desc: serine/threonine-protein kinase [Ajellomyces capsulatus G186AR]
  misc_feature (387)..(489): NCBI GI: 224064794 Blast Desc: : ankyrin repeat domain 27 (VPS9 domain) [Taeniopygia guttata]
  misc_feature (431)..(534): NCBI GI: 240277615 Blast Desc: serine/threonine protein kinase [Ajellomyces capsulatus H143]
  misc_feature (431)..(534): NCBI GI: 154285344 Blast Desc: [Ajellomyces capsulatus NAm1] gi|150407108|gb|EDN02649.1| [Ajellomyces capsulatus NAm1]
  misc_feature (431)..(534): NCBI GI: 239612311 Blast Desc: serine/threonine protein kinase Japonica Group [Ajellomyces dermatitidis ER-3]
  misc_feature (431)..(534): NCBI GI: 261202550 Blast Desc: serine/threonine protein kinase Japonica Group [Ajellomyces dermatitidis SLH14081] gi|239590586|gb|EEQ73167.1| serine/threonine protein kinase Japonica Group [Ajellomyces
  misc_feature (386)..(512): NCBI GI: 73948544 Blast Desc: : similar to ankyrin repeat domain 27 (VPS9 domain) [Canis familiaris]
  misc_feature (402)..(571): NCBI GI: 126296072 Blast Desc: [Monodelphis domestica]
  misc_feature (386)..(523): NCBI GI: 194578821 Blast Desc: ankyrin repeat and kinase domain containing 1 [Danio rerio] gi|190337382|gb|AAI63064.1| Ankyrin repeat and kinase domain containing 1 [Danio rerio] gi|190339782|gb|AAI62817.1| and
  misc_feature (410)..(506): NCBI GI: 86130883 Blast Desc: Ankyrin [Dokdonia donghaensis MED134] gi|85818294|gb|EAQ39454.1| Ankyrin [Dokdonia donghaensis MED134]
MEGAIISILEDDDFGRVNSTNPRSTMRTTAFFQRNHDEHTRLPDFVDILSYVAILYRQHARPMELFTDWDMEPIDSGAIFHVSSRRNETTASSRHRSQLQKVVIKRSPALKFKANGTVHQTQDCKFAVQGTLRELQVLTTAEIKRQPNVVDILGVAWSYEPHPDGCPEIGLILEEANCNLGGYLLRLLSGATEEDRMIELQRLKEEDCLKSVILDECYGAMDKDVSMTSNDLMMVEIWLSDTLGLQPERRRLESVLGNTLGIDSHLPEKPYKPKPWDPDLVDIPYQALNSLSNVLKSHIIQNLRMVVENAGGKQTKARIAACAFELCVCYGAGFGVHSDKTQARDWLIFAAREGEMTAQSVSLRVLEALGQDNAVDLPEIDTWLTNAAARGSWTAIESLLIKGYSEVINDLSEAEILAPKDLNVGDCNGNTPLIYACRSGWYQIAKNLVSMGASASHSNLANENALHFLHSIGDEQAGALAELLVEHGADVMQESKANSINNTIFDLRVTVPGTPILRAITMNALTLAKTLIALKIKHCPANTTREKMLWRLNCYKIIDFGSMTRALLYPNC

SEQ ID NO: 3137 - DNA, 2163 bp, Muscodor strobelii
  misc_feature: SGI cDNA ID NO. 560697
  misc_feature: Reduced expression when VOC is produced
  misc_feature: Encodes the peptide sequence at SEQ ID NO 3138
atgccttcatatttctaccacttgaaatttgagctctatcctactcctccgccagacttcaacttcagttcgcaaattggcgctgctcccggcgaaccggtctggattccgcaccaagcttcgagcatcttcgacgccttcccgtcacatccacgaagcattaccatccagcagggcgacaatccaacaaagcttcgaatccagcctctcgacccgcctgccacacccatttccaaagtggacagaggtgtcatcgactgtggtgctccgcggcctgcagaacaccgtgacaaacgtaatcttgttgcgctccacgaccgcccgcggaagccacgaacgctgagcctaccgccgccgccgcccttcgcagccatccacccggagacggccgccaaagactggcgatttgggcagatcagaatcgagagcatagacttcgacagctacgaagaggcagagaccatggcacctgcggccacgagcagtgctgccgctgctagtgttggcccctctctcggctccgcaggcaaggccacgaaggccaagtatctccctatcactccagcgaagaatacaaacattggatggggtattgtgcatttataccgggaggggaacgagagccccgagctcgacatcacgcctccaacagattcggaaggagagggtgacggggcccagacggactgtactatcatctgtataccggctgtgccgagctatctgaccccgagcgacttcctcggcttcataggaaacaagtggagagaccatatcagtcactttcgcatggtcatgacggcgcggatgaacaggtatctagtcctcatgaagtttcgcgacaacaagcgagcacttttgttcggacaggaattcgacggcagggtattcaaccatattgagccagaatcttgcaatgtcgctttcattcgatctatcaccttcgatacccctactgcgcccaacacgagtttccccgacttgaaccacgatcccttcgcacctagcaccggaaccgattaccaatcgctaaaacccttcccgccgccgacaccagatctgatcgagctccccacttgccccgtttgtctggagcgcatggacgatacgacgggcttacttacgatcctctgccaacacgtcttccattgctcctgcttgcagaagtggaaaggctctggatgtccggtgtgtcgccatacgaaccattctcatatcggcacgaattcgcaccacgggcccagttcggcggcaacgacaccttacgatcctgacaaccattacactccttttggctccaacgtgaccaacctctgcgcggtgtgcgattgcgcagacgacctatggatctgtctggtgtgcggcaacgttggttgtggacggtacaaaggaggacacgcgaaagaacattggaagaacacgtcacatacattctcactcgagctcgacacacagcatgtctgggactacgcgggcgacatgtgggttcatcgcctgatccgggataagggcgacggaaaggtcgtcgaactcccgggccaccagcaagagcatgggcgccgcgaaaacgaggatgtcgttcccagggagaagttggagaacatgggaatcgagtatacgcatctccttaccagccaactggagagtcagcgtctctattttgaggagatgctgtctaaagctgccgacaaggccgcacaggccgcagccgccgccgagaaagcaacggcgcaagctacggaggcactgaacgaactacgagaaatcaaggcggagcaccagaagctgacgacggagacgataccttttctcgaaaaagacttggagcgagctcgcacacgcacggagaagtcggcggaactggcgaggaagttcacttcgagctatcaggaggagaagaaagtgtccgagggcctgatgaagcgcatcgaacacatgaacaaggagagcattaacttcacggcgcaactcgaagcgctgaagctggagaatgctgatctgaaagatcagaatcacgatttgacgatgttcatctcggggcaggagaagctcaaagagcttgaggcagagggacaactggacgaggcagaggttcaggagggtagcgtttcggtgcctgaggagaagaagcggaggaaaggaaagggaaaggctacgaagtga

SEQ ID NO: 3138 - protein, 720 aa, Muscodor strobelii
  misc_feature: SGI Peptide ID NO. 560697
  misc_feature (360)..(398): Pfam Id: PF00097 Pfam Desc: Zinc finger, C3HC4 type (RING finger)
  misc_feature (218)..(324): Pfam Id: PF07576 Pfam Desc: BRCA1-associated protein 2
  misc_feature (439)..(510): Pfam Id: PF02148 Pfam Desc: Zn-finger in ubiquitin-hydrolases and other protein
  misc_feature (231)..(324): Pfam Id: PF07576 Pfam Desc: BRCA1-associated protein 2
  misc_feature (1)..(715): NCBI GI: 46128779 Blast Desc: FG08767.1 [Gibberella zeae PH-1]
  misc_feature (1)..(715): NCBI GI: 116090831 Blast Desc: RING-10 protein [Gibberella zeae]
  misc_feature (1)..(715): NCBI GI: 256733516 Blast Desc: [Nectria haematococca mpVI 77-13-4]
  misc_feature (1)..(664): NCBI GI: 261359483 Blast Desc: RING finger protein [Verticillium albo-atrum VaMs.102]
  misc_feature (1)..(707): NCBI GI: 116202447 Blast Desc: CHGG_09108 [Chaetomium globosum CBS 148.51] gi|88177626|gb|EAQ85094.1| CHGG_09108 [Chaetomium globosum CBS 148.51]
  misc_feature (1)..(707): NCBI GI: 171682238 Blast Desc: protein product [Podospora anserina] gi|170941078|emb|CAP66728.1| protein product [Podospora anserina]
  misc_feature (1)..(685): NCBI GI: 156064329 Blast Desc: SS1G_00172 [Sclerotinia sclerotiorum 1980] gi|154691034|gb|EDN90772.1| SS1G_00172 [Sclerotinia sclerotiorum 1980]
  misc_feature (1)..(648): NCBI GI: 154312180 Blast Desc: BC1G_06123 [Botryotinia fuckeliana B05.10] gi|150850086|gb|EDN25279.1| BC1G_06123 [Botryotinia fuckeliana B05.10]
  misc_feature (1)..(706): NCBI GI: 164428238 Blast Desc: NCU11215 [Neurospora crassa OR74A] gi|157072067|gb|EDO65346.1| conserved [Neurospora crassa OR74A]
  misc_feature (1)..(707): NCBI GI: 189193289 Blast Desc: RING-10 protein [Pyrenophora tritici-repentis Pt-1C-BFP] gi|187978547|gb|EDU45173.1| RING-10 protein [Pyrenophora tritici-repentis Pt-1C-BFP]
  misc_feature: Useful for introducing or modulating the production of volatile compounds
MPSYFYHLKFELYPTPPPDFNFSSQIGAAPGEPVWIPHQASSIFDAFPSHPRSITIQQGDNPTKLRIQPLDPPATPISKVDRGVIDCGAPRPAEHRDKRNLVALHDRPRKPRTLSLPPPPPFAAIHPETAAKDWRFGQIRIESIDFDSYEEAETMAPAATSSAAAASVGPSLGSAGKATKAKYLPITPAKNTNIGWGIVHLYREGNESPELDITPPTDSEGEGDGAQTDCTIICIPAVPSYLTPSDFLGFIGNKWRDHISHFRMVMTARMNRYLVLMKFRDNKRALLFGQEFDGRVFNHIEPESCNVAFIRSITFDTPTAPNTSFPDLNHDPFAPSTGTDYQSLKPFPPPTPDLIELPTCPVCLERMDDTTGLLTILCQHVFHCSCLQKWKGSGCPVCRHTNHSHIGTNSHHGPSSAATTPYDPDNHYTPFGSNVTNLCAVCDCADDLWICLVCGNVGCGRYKGGHAKEHWKNTSHTFSLELDTQHVWDYAGDMWVHRLIRDKGDGKVVELPGHQQEHGRRENEDVVPREKLENMGIEYTHLLTSQLESQRLYFEEMLSKAADKAAQAAAAAEKATAQATEALNELREIKAEHQKLTTETIPFLEKDLERARTRTEKSAELARKFTSSYQEEKKVSEGLMKRIEHMNKESINFTAQLEALKLENADLKDQNHDLTMFISGQEKLKELEAEGQLDEAEVQEGSVSVPEEKKRRKGKGKATK

SEQ ID NO: 3139 - DNA, 3538 bp, Muscodor strobelii
  misc_feature: SGI EST ID NO. CUFF.8484.1
  misc_feature: Variant of the nucleotide sequence at SEQ ID NO 3137
ggccgcactctgagcgactacaacatccagaaggagtcgacgttgcacttggtgctgcgcctccgtggcggccagtagacgtggtcgctggaacaatgataacgataccctcacttgacatgactcggcgttctctcggttgtcaccctactacgggcgactggaattgattttatgacagcataagcacgatgctttggcctcattacggccaccagacggagagcgtccagcttcataattagctagctatgatggacttgactgtccaatcaatacaatagttcccgtcacctatctacgttttctttcctggtatcttgcatgcctcagtgtagtgactgtaaatgtaaaaaacagcaacctaatagttatcttggagtgattgtagtagaggtttagacagacaaacacagtaatagcatggcgagtacgatgggtcattgtgtgagcaatgacgccgatagccaaccccaccaaatgcgccagacgagcctacccacttgtctgtggcagcggcctgatgtgaaattattgcaatctttcctctggtaaacatgtaggaagtcagcctagccaccatccacatcctttgacgatgcgttctgctgctttgaagcagactgtgcttgtcctcaagatattcctaccgccttgacagaggctacttctttgaaggcatccgatgccttgtggattaagcaaccttgtgtccatgtgagctgctgtacacatctctgtgggctatgccttcatatttctaccacttgaaatttgagctctatcctactcctccgccagacttcaacttcagttcgcaaattggcgctgctcccggcgaaccggtctggattccgcaccaagcttcgagcatcttcgacgccttcccgtcacatccacgaagcattaccatccagcagggcgacaatccaacaaagcttcgaatccagcctctcgacccgcctgccacacccatttccaaagtggacagaggtgtcatcgactgtggtgctccgcggcctgcagaacaccgtgacaaacgtaatcttgttgcgctccacgaccgcccgcggaagccacgaacgctgagcctaccgccgccgccgcccttcgcagccatccacccggagacggccgccaaagactggcgatttgggcagatcagaatcgagagcatagacttcgacagctacgaagaggcagagaccatggcacctgcggccacgagcagtgctgccgctgctagtgttggcccctctctcggctccgcaggcaaggccacgaaggccaagtatctccctatcactccagcgaagaatacaaacattggatggggtattgtgcatttataccgggaggggaacgagagccccgagctcgacatcacgcctccaacagattcggaaggagagggtgacggggcccagacggactgtactatcatctgtataccggctgtgccgagctatctgaccccgagcgacttcctcggcttcataggaaacaagtggagagaccatatcagtcactttcgcatggtcatgacggcgcggatgaacaggtatctagtcctcatgaagtttcgcgacaacaagcgagcacttttgttcggacaggaattcgacggcagggtattcaaccatattgagccagaatcttgcaatgtcgctttcattcgatctatcaccttcgatacccctactgcgcccaacacgagtttccccgacttgaaccacgatcccttcgcacctagcaccggaaccgattaccaatcgctaaaacccttcccgccgccgacaccagatctgatcgagctccccacttgccccgtttgtctggagcgcatggacgatacgacgggcttacttacgatcctctgccaacacgtcttccattgctcctgcttgcagaagtggaaaggctctggatgtccggtgtgtcgccatacgaaccattctcatatcggcacgaattcgcaccacgggcccagttcggcggcaacgacaccttacgatcctgacaaccattacactccttttggctccaacgtgaccaacctctgcgcggtgtgcgattgcgcagacgacctatggatctgtctggtgtgcggcaacgttggttgtggacggtacaaaggaggacacgcgaaagaacattggaagaacacgtcacatacattctcactcgagctcgacacacagcatgtctgggactacgcgggcgacatgtgggttcatcgcctgatccgggataagggcgacggaaaggtcgtcgaactcccgggccaccagcaagagcatgggcgccgcgaaaacgaggatgtcgttcccagggagaagttggagaacatgggaatcgagtatacgcatctccttaccagccaactggagagtcagcgtctctattttgaggagatgctgtctaaagctgccgacaaggccgcacaggccgcagccgccgccgagaaagcaacggcgcaagctacggaggcactgaacgaactacgagaaatcaaggcggagcaccagaagctgacgacggagacgataccttttctcgaaaaagacttggagcgagctcgcacacgcacggagaagtcggcggaactggcgaggaagttcacttcgagctatcaggaggagaagaaagtgtccgagggcctgatgaagcgcatcgaacacatgaacaaggagagcattaacttcacggcgcaactcgaagcgctgaagctggagaatgctgatctgaaagatcagaatcacgatttgacgatgttcatctcggggcaggagaagctcaaagagcttgaggcagagggacaactggacgaggcagaggttcaggagggtagcgtttcggtgcctgaggagaagaagcggaggaaaggaaagggaaaggctacgaagtgagatgggctgcatcgcgatgaattcaccacggttgcatgatgactgtgtaggcagccgttagaagcagtttagtgttcaaggtacgggtcagaggagtagcacgctgcgggacccgtttacagatcatggtccgctcgcaaccggcgcagcgcatcgggccgggacctgccatgacccgacggcgagcccggatagacgattcacctcgtaccttgctagacaaatcaaaagaaacgtcgcaaatatctttcgataatggcgagatatttgatatgaatgcgctaaatgtggtgtacacttcgtatagtttcgcgttttccctgggcctgggaccatgaggctccatcaaggtctcttgtagaccgaggtgaatatttggcttgtgatcgagccgtgcagattcgatatgggcattagagagaaaaatactttgcatcgtgcttgaagctattaggtaaaagtcaaatgctcattcaaaacccgataatgacattaccatatgaattgagtttcgaattggacgatgatactgatagagccaaggttcaagttgctcgtgaatggttgaagatatggtgttagggtcttgggcgcatgcttcatcccgcaacggtccaccacatgccgca

SEQ ID NO: 3140 - DNA, 2247 bp, Muscodor strobelii
  misc_feature: SGI cDNA ID NO. 560698
  misc_feature: Reduced expression when VOC is produced
  misc_feature: Encodes the peptide sequence at SEQ ID NO 3141
atgggggggccaccttccggccccccgaagacgaagaaccagaaagaactataccccatgacaccgtggaaatacgacgccttcatccacactttctcgctgctcgtcgatctcttcttccgcgaagtccacccccgaggcgcctggcgcgtccccagatccggccccatcttattcgtcgccgcaccccacgcgaaccaatttgtcgacggtctcgtcctacagcgatctctaaaacaagaggcgaaccgtcgcgttggcctgctcatcgccgagaaatccgtacatggcttcatcggctggggttcgcgacagacgggcagtgtgcctgtcggaagggcgcaggacaaagccaaagctgccaagggcacagtgtatatccccgatcccatcaacgaccccaccttgatccgtggtattggaaccgactttgagaacgaggctgaagtgggaggtatgatcttccttccctctatcaagggccagtcgggcagctctatcgacatcgccaaggtcttgggccctaatgaactccgagtaaaacgtgcgctgaaaggaaagcttgctgtttcgcagctcactggaagagatgatattgataatgacgggaatctgaccaatcgcgatgtgaatggaccaaaagatgggtacgagggaaccaagtacaagctggctccccatacagatcagactgaagtctacaaggccgtcttcaaccgcctcaaatcgggcggctgcatagggattttccccgagggtggtagtcatgacaggacggagttgttgcccctgaaggctggcgtggctatcatggctttgggtactctcgctgaggatccggattgtgggctccagattgtacctgtcggcatgaactacttccatgctcacaagtttcgatcgagggccgtcgtcgaattcggctaccccttcaaaatcccccaagatctggtcgacaaatacaagaataaccagcgacgagatgccatcggtcagacactcgatatggtccatcaagcgctcaactccgtcactgtgtctgcccctgactacgacaccttgatgtgtatccaagctgcgagacggctctacaatacagggaagaaactgcctctacccatggtcgttgaactcaacagaagactcgctgtgggcttctctaaatacggggatgaccaacggatcgtggacttgatggataacctcaaagactacaacaaacaacttcgctacctcaacatcaaagatcaccagcttaactacgccaaaaagaacatacccctcgttatcttcaccctattctaccgcatcgccaagcttctcgtgctatccatcggcgtcgtccccggtctcatcctattcgctcccgtcttcatagtcacgaaatacatcagccaccaaaaggctaaagaagcgctcgccggctcctccgtcaagatccagggacgtgatgtcatggctacctggaaattactcgtcgccatggcctttgcgccgatactctaccacttctacgctgctgcgctcgcgttcaaggtctatcaggatcacctctggggatacatccctgccatcgtgccggtctgggttgtctacgtcattgcgtggatcatcttccccgccatcacattcgccgctttccgtatcggagaagtgggcatggatattctgaagagtcttcgacctttagtgctatgcttgagcccgacgagcagctacagtatccaaaagctaagagagagacgaatacagttatctgaacaagtcgtcactaccatcaatgatctaggtccggagatgtatgaggacttcgataaagcgcgcttagtctctgatccattcagaaacgacgagttcatccagagcttagaactgaggagaggtagtgccgcgggcagcgaggcgagtgtcgagtctaagacgccgccggatagcccccatatgagtagacggaatacgacgatgagtagcagggcgatcccgaggaatgagagcttcagtaatattggggcggtcggcattttccctacgaggccgccgagtaggagtaggagtcgcagttctagtgcgggtggtggtgcgggactgggcgggtttccggtccagggttttacgagcttggatagtgaggaggggtttcatgaggttaatggacggattagggatgctatgagggagaggggattactaagacggaggaagagtgggactagggttggtgagagtgaggaggaggatggggagtag

SEQ ID NO: 3141 - protein, 748 aa, Muscodor strobelii
  misc_feature: SGI Peptide ID NO. 560698
  misc_feature (42)..(292): Pfam Id: PF01553 Pfam Desc: Acyltransferase
  misc_feature (228)..(292): Pfam Id: PF01553 Pfam Desc: Acyltransferase
  misc_feature (14)..(747): NCBI GI: 116202445 Blast Desc: CHGG_09107 [Chaetomium globosum CBS 148.51] gi|88177625|gb|EAQ85093.1| CHGG_09107 [Chaetomium globosum CBS 148.51]
  misc_feature (3)..(745): NCBI GI: 85090897 Blast Desc: NCU05985 [Neurospora crassa OR74A] gi|28920015|gb|EAA29402.1| NCU05985 [Neurospora crassa OR74A]
  misc_feature (14)..(735): NCBI GI: 256733517 Blast Desc: [Nectria haematococca mpVI 77-13-4]
  misc_feature (13)..(727): NCBI GI: 46128777 Blast Desc: FG08766.1 [Gibberella zeae PH-1]
  misc_feature (1)..(723): NCBI GI: 39951229 Blast Desc: MGG_01291 [Magnaporthe grisea 70-15] gi|145020895|gb|EDK05024.1| MGG_01291 [Magnaporthe grisea 70-15]
  misc_feature (12)..(747): NCBI GI: 171682240 Blast Desc: protein product [Podospora anserina] gi|170941079|emb|CAP66729.1| protein product [Podospora anserina]
  misc_feature (9)..(747): NCBI GI: 154322925 Blast Desc: BC1G_00805 [Botryotinia fuckeliana B05.10] gi|150848139|gb|EDN23332.1| BC1G_00805 [Botryotinia fuckeliana B05.10]
  misc_feature (9)..(747): NCBI GI: 156064639 Blast Desc: SS1G_00327 [Sclerotinia sclerotiorum 1980] gi|154691189|gb|EDN90927.1| SS1G_00327 [Sclerotinia sclerotiorum 1980]
  misc_feature (16)..(724): NCBI GI: 238843882 Blast Desc: glycerol-3-phosphate O-acyltransferase [Microsporum canis CBS 113480]
  misc_feature (19)..(747): NCBI GI: 119194367 Blast Desc: glycerol-3-phosphate O-acyltransferase [Coccidioides immitis RS]
  misc_feature (11)..(652): SWISSPROT Homolog: EC 2.3.1.15 Glycerol-3-phosphate O-acyltransferase
  misc_feature (11)..(652): SWISSPROT Homolog: EC 2.3.1.42 Glycerone-phosphate O-acyltransferase
  misc_feature: Useful for introducing or modulating the production of volatile compounds
MGGPPSGPPKTKNQKELYPMTPWKYDAFIHTFSLLVDLFFREVHPRGAWRVPRSGPILFVAAPHANQFVDGLVLQRSLKQEANRRVGLLIAEKSVHGFIGWGSRQTGSVPVGRAQDKAKAAKGTVYIPDPINDPTLIRGIGTDFENEAEVGGMIFLPSIKGQSGSSIDIAKVLGPNELRVKRALKGKLAVSQLTGRDDIDNDGNLTNRDVNGPKDGYEGTKYKLAPHTDQTEVYKAVFNRLKSGGCIGIFPEGGSHDRTELLPLKAGVAIMALGTLAEDPDCGLQIVPVGMNYFHAHKFRSRAVVEFGYPFKIPQDLVDKYKNNQRRDAIGQTLDMVHQALNSVTVSAPDYDTLMCIQAARRLYNTGKKLPLPMVVELNRRLAVGFSKYGDDQRIVDLMDNLKDYNKQLRYLNIKDHQLNYAKKNIPLVIFTLFYRIAKLLVLSIGVVPGLILFAPVFIVTKYISHQKAKEALAGSSVKIQGRDVMATWKLLVAMAFAPILYHFYAAALAFKVYQDHLWGYIPAIVPVWVVYVIAWIIFPAITFAAFRIGEVGMDILKSLRPLVLCLSPTSSYSIQKLRERRIQLSEQVVTTINDLGPEMYEDFDKARLVSDPFRNDEFIQSLELRRGSAAGSEASVESKTPPDSPHMSRRNTTMSSRAIPRNESFSNIGAVGIFPTRPPSRSRSRSSSAGGGAGLGGFPVQGFTSLDSEEGFHEVNGRIRDAMRERGLLRRRKSGTRVGESEEEDGE

SEQ ID NO: 3142 - DNA, 3260 bp, Muscodor strobelii
  misc_feature: SGI EST ID NO. CUFF.8508.0
  misc_feature: Variant of the nucleotide sequence at SEQ ID NO 3140
cggacgacgggcaaggccaaaagctggaccaagttggaggggcaggtcgggccttcattcgctcactccaaattttatgacgcttctgacgatgcacttttgccccacggaaaccctcaacaattcagagccgagctgtcaactattacctcccctgcttcatattcccacgatagcttcttcccagtgtttccagtcttgatttgcttgagccacaacccttttgtgtattgtgcctgcctgatgcttgtgtcactttgaagcagcgcatccttgtttccttgttcaatgattataccccaaaagcatccttgagagtgcagaccccgcagtgtcgctacttatttacctacaagtccctgatctacagtacctgcctgtctacatttgctgttgcgctgagaaccataacttgctcttagcttttacacgacgaaggaacacacacatatacacatgcgtgcgatcgaaactagctgtccaacgtcctctcatccactttgccaatcatggcagatggattaaacccttccaatgggggggccaccttccggccccccgaagacgaagaaccagaaagaactataccccatgacaccgtggaaatacgacgccttcatccacactttctcgctgctcgtcgatctcttcttccgcgaagtccacccccgaggcgcctggcgcgtccccagatccggccccatcttattcgtcgccgcaccccacgcgaaccaatttgtcgacggtctcgtcctacagcgatctctaaaacaagaggcgaaccgtcgcgttggcctgctcatcgccgagaaatccgtacatggcttcatcggctggggttcgcgacagacgggcagtgtgcctgtcggaagggcgcaggacaaagccaaagctgccaagggcacagtgtatatccccgatcccatcaacgaccccaccttgatccgtggtattggaaccgactttgagaacgaggctgaagtgggaggtatgatcttccttccctctatcaagggccagtcgggcagctctatcgacatcgccaaggtcttgggccctaatgaactccgagtaaaacgtgcgctgaaaggaaagcttgctgtttcgcagctcactggaagagatgatattgataatgacgggaatctgaccaatcgcgatgtgaatggaccaaaagatgggtacgagggaaccaagtacaagctggctccccatacagatcagactgaagtctacaaggccgtcttcaaccgcctcaaatcgggcggctgcatagggattttccccgagggtggtagtcatgacaggacggagttgttgcccctgaaggctggcgtggctatcatggctttgggtactctcgctgaggatccggattgtgggctccagattgtacctgtcggcatgaactacttccatgctcacaagtttcgatcgagggccgtcgtcgaattcggctaccccttcaaaatcccccaagatctggtcgacaaatacaagaataaccagcgacgagatgccatcggtcagacactcgatatggtccatcaagcgctcaactccgtcactgtgtctgcccctgactacgacaccttgatgtgtatccaagctgcgagacggctctacaatacagggaagaaactgcctctacccatggtcgttgaactcaacagaagactcgctgtgggcttctctaaatacggggatgaccaacggatcgtggacttgatggataacctcaaagactacaacaaacaacttcgctacctcaacatcaaagatcaccagcttaactacgccaaaaagaacatacccctcgttatcttcaccctattctaccgcatcgccaagcttctcgtgctatccatcggcgtcgtccccggtctcatcctattcgctcccgtcttcatagtcacgaaatacatcagccaccaaaaggctaaagaagcgctcgccggctcctccgtcaagatccagggacgtgatgtcatggctacctggaaattactcgtcgccatggcctttgcgccgatactctaccacttctacgctgctgcgctcgcgttcaaggtctatcaggatcacctctggggatacatccctgccatcgtgccggtctgggttgtctacgtcattgcgtggatcatcttccccgccatcacattcgccgctttccgtatcggagaagtgggcatggatattctgaagagtcttcgacctttagtgctatgcttgagcccgacgagcagctacagtatccaaaagctaagagagagacgaatacagttatctgaacaagtcgtcactaccatcaatgatctaggtccggagatgtatgaggacttcgataaagcgcgcttagtctctgatccattcagaaacgacgagttcatccagagcttagaactgaggagaggtagtgccgcgggcagcgaggcgagtgtcgagtctaagacgccgccggatagcccccatatgagtagacggaatacgacgatgagtagcagggcgatcccgaggaatgagagcttcagtaatattggggcggtcggcattttccctacgaggccgccgagtaggagtaggagtcgcagttctagtgcgggtggtggtgcgggactgggcgggtttccggtccagggttttacgagcttggatagtgaggaggggtttcatgaggttaatggacggattagggatgctatgagggagaggggattactaagacggaggaagagtgggactagggttggtgagagtgaggaggaggatggggagtaggttggcgggaatgggggagaaaatgggggataatgggagagcggcagggaaaggggaggaagcgagagggtggtaaatctgagttcttgttgaatattgttaggttgggcatacccgttgtttagttattgtatttgatctcgttctttaactggttgttttgtgatgggtactttgacttcagggtgtgaagcttttagtaatttgactgagatggacttatcgagatagatatagtggccgtcttgctccttggtgtacttgaaacaaactaccttaggattggagtgggcggtacttattttaggtcttcgtattgggagcgtcgcgagccactcgaattgatatgcaagtccacgaatgtctcgaattgagttttgtgtgggcgtcgccgtcatgaacagggcatatttctttcgtgacacccgtaacgctcgggatagagtattctttggggtttctcagacactgttggaaag

SEQ ID NO: 3143 - DNA, 1131 bp, Muscodor strobelii
  misc_feature: SGI cDNA ID NO. 560699
  misc_feature: Encodes the peptide sequence at SEQ ID NO 3144
atgggggggccaccttccggccccccgaagacgaagaaccagaaagaactataccccatgacaccgtggaaatacgacgccttcatccacactttctcgctgctcgtcgatctcttcttccgcgaagtccacccccgaggcgcctggcgcgtccccagatccggccccatcttattcgtcgccgcaccccacgcgaaccaatttgtcgacggtctcgtcctacagcgatctctaaaacaagaggcgaaccgtcgcgttggcctgctcatcgccgagaaatccgtacatggcttcatcggctggggttcgcgacagacgggcagtgtgcctgtcggaagggcgcaggacaaagccaaagctgccaagggcacagtgtatatccccgatcccatcaacgaccccaccttgatccgtggtattggaaccgactttgagaacgaggctgaagtgggaggtatgatcttccttccctctatcaagggccagtcgggcagctctatcgacatcgccaaggtcttgggccctaatgaactccgagtaaaacgtgcgctgaaaggaaagcttgctgtttcgcagctcactggaagagatgatattgataatgacgggaatctgaccaatcgcgatgtgaatggaccaaaagatgggtacgagggaaccaagtacaagctggctccccatacagatcagactgaagtctacaaggccgtcttcaaccgcctcaaatcgggcggctgcatagggattttccccgagggtggtagtcatgacaggacggagttgttgcccctgaaggctggcgtggctatcatggctttgggtactctcgctgaggatccggattgtgggctccagattgtacctgtcggcatgaactacttccatgctcacaagtttcgatcgagggccgtcgtcgaattcggctaccccttcaaaatcccccaagatctggtcgacaaatacaagaataaccagcgacgagatgccatcggtcagacactcgatatggtccatcaagcgctcaactccgtcactgtgtctgcccctgactacgacaccttgatgtgtatccaagctgcgagacggctctacaatacagggaagaaactgcctctacccatggtcgttgaa

SEQ ID NO: 3144 - protein, 377 aa, Muscodor strobelii
  misc_feature: SGI Peptide ID NO. 560699
  misc_feature (42)..(292): Pfam Id: PF01553 Pfam Desc: Acyltransferase
  misc_feature (228)..(292): Pfam Id: PF01553 Pfam Desc: Acyltransferase
  misc_feature (14)..(377): NCBI GI: 116202445 Blast Desc: CHGG_09107 [Chaetomium globosum CBS 148.51] gi|88177625|gb|EAQ85093.1| CHGG_09107 [Chaetomium globosum CBS 148.51]
  misc_feature (14)..(377): NCBI GI: 256733517 Blast Desc: [Nectria haematococca mpVI 77-13-4]
  misc_feature (13)..(377): NCBI GI: 46128777 Blast Desc: FG08766.1 [Gibberella zeae PH-1]
  misc_feature (2)..(377): NCBI GI: 85090897 Blast Desc: NCU05985 [Neurospora crassa OR74A] gi|28920015|gb|EAA29402.1| NCU05985 [Neurospora crassa OR74A]
  misc_feature (1)..(377): NCBI GI: 39951229 Blast Desc: MGG_01291 [Magnaporthe grisea 70-15] gi|145020895|gb|EDK05024.1| MGG_01291 [Magnaporthe grisea 70-15]
  misc_feature (12)..(377): NCBI GI: 171682240 Blast Desc: protein product [Podospora anserina] gi|170941079|emb|CAP66729.1| protein product [Podospora anserina]
  misc_feature (9)..(377): NCBI GI: 154322925 Blast Desc: BC1G_00805 [Botryotinia fuckeliana B05.10] gi|150848139|gb|EDN23332.1| BC1G_00805 [Botryotinia fuckeliana B05.10]
  misc_feature (9)..(377): NCBI GI: 156064639 Blast Desc: SS1G_00327 [Sclerotinia sclerotiorum 1980] gi|154691189|gb|EDN90927.1| SS1G_00327 [Sclerotinia sclerotiorum 1980]
  misc_feature (19)..(377): NCBI GI: 255947694 Blast Desc: Pc22g05820 [Penicillium chrysogenum Wisconsin 54-1255] gi|211591631|emb|CAP97870.1| Pc22g05820 [Penicillium chrysogenum Wisconsin 54-1255]
  misc_feature (1)..(377): NCBI GI: 242769352 Blast Desc: glycerol-3-phosphate acyltransferase Sct1, [Talaromyces stipitatus ATCC 10500] gi|218724947|gb|EED24364.1| glycerol-3-phosphate acyltransferase Sct1, [Talaromyces ATCC
  misc_feature (11)..(377): SWISSPROT Homolog: EC 2.3.1.15 Glycerol-3-phosphate O-acyltransferase
  misc_feature (11)..(377): SWISSPROT Homolog: EC 2.3.1.42 Glycerone-phosphate O-acyltransferase
MGGPPSGPPKTKNQKELYPMTPWKYDAFIHTFSLLVDLFFREVHPRGAWRVPRSGPILFVAAPHANQFVDGLVLQRSLKQEANRRVGLLIAEKSVHGFIGWGSRQTGSVPVGRAQDKAKAAKGTVYIPDPINDPTLIRGIGTDFENEAEVGGMIFLPSIKGQSGSSIDIAKVLGPNELRVKRALKGKLAVSQLTGRDDIDNDGNLTNRDVNGPKDGYEGTKYKLAPHTDQTEVYKAVFNRLKSGGCIGIFPEGGSHDRTELLPLKAGVAIMALGTLAEDPDCGLQIVPVGMNYFHAHKFRSRAVVEFGYPFKIPQDLVDKYKNNQRRDAIGQTLDMVHQALNSVTVSAPDYDTLMCIQAARRLYNTGKKLPLPMVVE

SEQ ID NO: 3145 - DNA, 3260 bp, Muscodor strobelii; identical to SEQ ID NO: 3142
  misc_feature: SGI EST ID NO. CUFF.8508.0
  misc_feature: Variant of the nucleotide sequence at SEQ ID NO 3143

SEQ ID NO: 3146 - DNA, 225 bp, Muscodor strobelii
  misc_feature: SGI cDNA ID NO. 560700
  misc_feature: Encodes the peptide sequence at SEQ ID NO 3147
atggcgaccgctaaggccgcagccgaaaatctcgcgcgttttcttcataccaaatttgatatacagtattccgcgattgctcacttgctacatctcaaggccgagcgtggccgggccattatgacatccctacaagaccgcggtcatggcacgcacgaaggtgacgaggaggaagggggtgaggaagaggaagatacgaacggcagttacgccctctggtattag

SEQ ID NO: 3147 - protein, 74 aa, Muscodor strobelii
  misc_feature: SGI Peptide ID NO. 560700
MATAKAAAENLARFLHTKFDIQYSAIAHLLHLKAERGRAIMTSLQDRGHGTHEGDEEEGGEEEEDTNGSYALWY

SEQ ID NO: 3148 - DNA, 1098 bp, Muscodor strobelii
  misc_feature: SGI cDNA ID NO. 560701
  misc_feature: Encodes the peptide sequence at SEQ ID NO 3149
atggagtcattcgaatattttcctgctctgccgacagagctaagacttatgatatgggaggaagcactcgcagaggaaatcagcaaccgcatcgtcctgttatttgatacctatatcattccaactaaggatattttgagcccccttttaggcgtcaaccgcgaaagtcgacgttgcgctctcaaactttacactgcaaaggctcccatctataaggtgcctacgccgcagccaaacggctatctttatgagatatattctcattggaagcgacacaatatagactctcttgatgtctctatgctttctccgtctgaattctgcgcaacaattcccgaaattcgcgacgaatgcgagttcgacgtggaggtattcagcgactccctcctaaaggccatcgatgaaccaatgaatatgaaaatccagaattattccggaatagtccacttcagtaccaaatacgatagattcctcatctgcggcaataaagaataccctgatgcaggcggtcgggttcgatacgataggccctgcgagatgctggagcccttttggaccaaagcggcggctgaaatacgtggtgagcccatcgaacgcaaccgcttgctatgggaacacatctccgcaaagctcgaggttccagatcttcgagccatccgaactgtggtatgtgccgaaagtgtggcttactacgatcaagtaattcccaacccgagatatcgggtcctcggtatcaagtacaatgttccccactcaatgccattctcaagcgctcgaaatgcttggaagattgacgtattcactggacttcgaaactgggagcatatctggtttcaagatggcatgaagaacttcctgtggagtgtcgcgcatgaacccgtgaaaggcctgggcattcgtcaatggtcaaggactcgccgaatcgtggacccttctcatcaatgggatgaaaatgattggatcgaagaacactgggtcgaagatgtcaaagtgcacaaaaataaggcgtactattgggaagaatgggcagaatttcctggcttgttggatggacttgaggacgaattcagggtggatgaaaaccagacaacactttga

SEQ ID NO: 3149 - protein, 365 aa, Muscodor strobelii
  misc_feature: SGI Peptide ID NO. 560701
MESFEYFPALPTELRLMIWEEALAEEISNRIVLLFDTYIIPTKDILSPLLGVNRESRRCALKLYTAKAPIYKVPTPQPNGYLYEIYSHWKRHNIDSLDVSMLSPSEFCATIPEIRDECEFDVEVFSDSLLKAIDEPMNMKIQNYSGIVHFSTKYDRFLICGNKEYPDAGGRVRYDRPCEMLEPFWTKAAAEIRGEPIERNRLLWEHISAKLEVPDLRAIRTVVCAESVAYYDQVIPNPRYRVLGIKYNVPHSMPFSSARNAWKIDVFTGLRNWEHIWFQDGMKNFLWSVAHEPVKGLGIRQWSRTRRIVDPSHQWDENDWIEEHWVEDVKVHKNKAYYWEEWAEFPGLLDGLEDEFRVDENQTTL

SEQ ID NO: 3150 - DNA, 176 bp, Muscodor strobelii
  misc_feature: SGI EST ID NO. CUFF.7795.0
  misc_feature: Variant of the nucleotide sequence at SEQ ID NO 3148
tctccgtctgaattctgcgcaacaattcccgaaattcgcgacgaatgcgagttcgacgtggaggtattcagcgactccctcctaaaggccatcgatgaaccaatgaatatgaaaatccagaattattccggaatagtccacttcagtaccaaatacgatagattcctcatctgcgg

SEQ ID NO: 3151 - DNA, 942 bp, Muscodor strobelii
  misc_feature: SGI cDNA ID NO. 560702
  misc_feature: Encodes the peptide sequence at SEQ ID NO 3152
atgggtctttccttcagtatatggaatgcagtaggttgtctaccacctggtatcaccgatcctaacattgaaggcggatgtccattaagcgcagcgacagctatgacttccaaccaggcatttacaatgtccgcgggcaaaggctgccatgagaatgtatccattgattccccgaccaagtcggacaatgtttgttacctcggtttcgcaacgtacggaaggactagtgactacccggtcctcgacaagattcagtgtcaaatagcgttcaaatcgtacgacttcctagtatctgtcaacgcgacatcgaaagttattgcggtcgagccgcagaacgccacagccgcgtttccgaacgcagaagaactagcgaaacaggtcatgtttcaaataggagatatgggggcagtgatgcagacgacacaatggacttcggtcttaggtgatatgtttctcaacaacgtctacaacagtggcctgagtaacggatcgtctaacgcgactatactctacggagtagagacggctatcgagtcaattgtagacaacatcttagaagctgtttcagctgcccagataatcattgcgcaagacaaccagactgtcaccgctgatgtgcagtctactagcttcgtccttggtagctcggagttcgtatatagtattctgggcgttaatctgttggtctcgataattttcatcgcccagctgattcatacacgcctatggcgtaaggcaccgttcttcgacttttcggacatcaaggccgtcattctcaactcgtccattcccggcaatggtatagcggcggaagctgaagcaattaaaaaacactcttcttcaggttctttatccaagaatctggggaaagttggtattgcttttgttgatacagacgaaggcagcaggctctatgttcccactccttcgtacttagcttag

SEQ ID NO: 3152 - protein, 313 aa, Muscodor strobelii
  misc_feature: SGI Peptide ID NO. 560702
  misc_feature (78)..(301): NCBI GI: 256729032 Blast Desc: NECHADRAFT_93222 [Nectria haematococca mpVI 77-13-4]
  misc_feature (73)..(300): NCBI GI: 115390597 Blast Desc: [Aspergillus terreus NIH2624] gi|114193727|gb|EAU35427.1| [Aspergillus terreus NIH2624]
  misc_feature (76)..(295): NCBI GI: 255948896 Blast Desc: Pc22g12720 [Penicillium chrysogenum Wisconsin 54-1255] gi|211592232|emb|CAP98560.1| Pc22g12720 [Penicillium chrysogenum Wisconsin 54-1255]
  misc_feature (66)..(269): NCBI GI: 46138845 Blast Desc: FG10937.1 [Gibberella zeae PH-1]
  misc_feature (41)..(284): NCBI GI: 159125199 Blast Desc: conserved [Aspergillus fumigatus A1163]
  misc_feature (76)..(300): NCBI GI: 156048738 Blast Desc: SS1G_09101 [Sclerotinia sclerotiorum 1980] gi|154693497|gb|EDN93235.1| SS1G_09101 [Sclerotinia sclerotiorum 1980]
  misc_feature (76)..(300): NCBI GI: 154294695 Blast Desc: BC1G_13474 [Botryotinia fuckeliana B05.10] gi|150844609|gb|EDN19802.1| BC1G_13474 [Botryotinia fuckeliana B05.10]
  misc_feature (78)..(288): NCBI GI: 189191170 Blast Desc: [Pyrenophora tritici-repentis Pt-1C-BFP] gi|187973530|gb|EDU41029.1| [Pyrenophora tritici-repentis Pt-1C-BFP]
  misc_feature (78)..(284): NCBI GI: 169622218 Blast Desc: SNOG_14326 [Phaeosphaeria nodorum SN15] gi|160704725|gb|EAT78197.2| SNOG_14326 [Phaeosphaeria nodorum SN15]
  misc_feature (95)..(293): NCBI GI: 145257671 Blast Desc: An04g04500 [Aspergillus niger] gi|134058730|emb|CAK38714.1| protein product [Aspergillus niger]
MGLSFSIWNAVGCLPPGITDPNIEGGCPLSAATAMTSNQAFTMSAGKGCHENVSIDSPTKSDNVCYLGFATYGRTSDYPVLDKIQCQIAFKSYDFLVSVNATSKVIAVEPQNATAAFPNAEELAKQVMFQIGDMGAVMQTTQWTSVLGDMFLNNVYNSGLSNGSSNATILYGVETAIESIVDNILEAVSAAQIIIAQDNQTVTADVQSTSFVLGSSEFVYSILGVNLLVSIIFIAQLIHTRLWRKAPFFDFSDIKAVILNSSIPGNGIAAEAEAIKKHSSSGSLSKNLGKVGIAFVDTDEGSRLYVPTPSYLA

SEQ ID NO: 3153 - DNA, 235 bp, Muscodor strobelii
  misc_feature: SGI EST ID NO. CUFF.7798.0
  misc_feature: Variant of the nucleotide sequence at SEQ ID NO 3151
cggatgtccattaagcgcagcgacagctatgacttccaaccaggcatttacaatgtccgcgggcaaaggctgccatgagaatgtatccattgattccccgaccaagtcggacaatgtttgttacctcggtttcgcaacgtacggaaggactagtgactacccggtcctcgacaagattcagtgtcaaatagcgttcaaatcgtacgacttcctagtatctgtcaacgcgacatcg

SEQ ID NO: 3154 - DNA, 705 bp, Muscodor strobelii
  misc_feature: SGI cDNA ID NO. 560703
  misc_feature: Encodes the peptide sequence at SEQ ID NO 3155
atgcctgctcaactcacccgactcatccaggacactgtcatgcccgtctaccttaagggccaggaagaagtcatgaatgtcaaggagatcaacaccaagacccgtgctaccgccaacggaggcagagccatcatgaagggacctatcaacaatgtcacccctcaagagtctcaggccgccagtaagaagcgtcgcagcactgcctctaccgaaatttctcaaccagccaagagacaacgccgagagccccttccagttgatgacgccggcactgatgaagatggcgacacatcttctgacagcgaagaagaggaagattacaccaatgtccctgctggatggaccatggatcccttcaccaacagaccagagcagcgcaaacgcaccatgatggatgatctctgggcacgctgcaggaaggacaaccctcagaagttcaaggccgaggctcttcgccgtgccaggaaccttcgccgcatcgacataatctctgacagcgaatcttctgacagcgaagcctcagatagcgaagacgagaaagactgccccataattcctgctggcgggaccatagatcctttcacgaacgaaccagtacagcgaagacgcaccatcacggatgatcaatgggcccgctgcaagaaggataatcctcagaaatttcaggctgagcttagccgccgccgccgcttgttgacgatttga

SEQ ID NO: 3155 - protein, 234 aa, Muscodor strobelii
  misc_feature: SGI Peptide ID NO. 560703
MPAQLTRLIQDTVMPVYLKGQEEVMNVKEINTKTRATANGGRAIMKGPINNVTPQESQAASKKRRSTASTEISQPAKRQRREPLPVDDAGTDEDGDTSSDSEEEEDYTNVPAGWTMDPFTNRPEQRKRTMMDDLWARCRKDNPQKFKAEALRRARNLRRIDIISDSESSDSEASDSEDEKDCPIIPAGGTIDPFTNEPVQRRRTITDDQWARCKKDNPQKFQAELSRRRRLLTI

SEQ ID NO: 3156 - DNA, 146 bp, Muscodor strobelii
  misc_feature: SGI EST ID NO. CUFF.7807.0
  misc_feature: Variant of the nucleotide sequence at SEQ ID NO 3154
ccgagagccccttccagttgatgacgccggcactgatgaagatggcgacacatcttctgacagcgaagaagaggaagattacaccaatgtccctgctggatggaccatggatcccttcaccaacagaccagagcagcgcaaacgca

SEQ ID NO: 3157 - DNA, 1950 bp, Muscodor strobelii
  misc_feature: SGI cDNA ID NO. 560704
  misc_feature: Encodes the peptide sequence at SEQ ID NO 3158
atgggagacacccgcgagagcaagcgagcccgcaacggggctgaagttgtcgatggcgaggtagaagaggagtggttcgtcggggctattgaccaaggcaccacttcatcccgcttcatcatcttcaaccgctacgccgatcccgtagcaggccaccagatcgagtttgagaaccaccaccctcactctggatggcatgaacagaatcctcaagacctcgtagaatcggtcgagacttgtattgaagaggctgtgaagaaattcctcgagaaaggctaccaaaagtcgcaaatcaagtcgatcgggatcaccaaccagcgtgagaccataattacctgggacaagcagacgggcgaactgttatctagggccattgcctggccagatactcggaccaaggacttagttcgagacctcaaggctcagcctggcgcagagaaactccaagacctttgcggtctgccgctgagtacttatccctcaagcgtgaaacttgcctggctcctccggaaccacgagccagtccgagtagcctacgaagacgggcgcctcgctattggcaccgtggacacgtggctgatctaccagctcaacggtggcatcgataaggatattcacgtcacagataccacaaatgccagcagaactatgttcatgaacctgcatacatgcaaatacgatgaccagttgtttgaatttttcggcatcgagcaatctaaaattcacttgcccaagatcgtcccttcttcggacgccgaagcatttggggctatggcttctgggcctttacaaggggttaagatccgaggttgtctaggagatcaatccagtgcattggtcggccattgtggtttcaagcctggccatgccaagaacacttacggcactggctgtttcttgctctacaatgtcggcgacaagcccgttgtgtccaagtatggtttactagcaacggtggcatacgatttctcccatatgggcatgaaacccgtctatgccttggagggcagtattgccgtggctggctctggcgtcaaattcttgatgaacaacctgggttttgtccaccagtcggacaaagttggtgaactggcgcgtaccgtcaatgataatggtggcgttgttttcgttactgccttcagtggcttattcgcaccgtattggatagacgacgcgaaaggcacattatttggaatcacccagcatacgcaaaagggccacattgcccgcgcaacactggagtcagtatgtttccagacacgtgccatcttagaagccatggagaaagactcaggccataaacttgagggtctggccgttgatggcggcatgtccaattcaaactttacgatgcaaacacaagccgatgtatgcgatatccgcgtcgaacggccggagatgcgagagactacctccttgggagcggctatcgctgccggattggcgaccgaaggctgctggaatagtctagatgaacttttctcaatcactcataagaaaccaggcaggaagatgttcgagcctgttacgaacaagaaaaaggttgagcgcatgtatatgaggtgggaacacgcagtggaaatgagtcgaggttgggttacggaggtgctagaagaggaagaagaagatttttacactactctccaggaagaggcgaacatgacacctgctatcactccgggcggaactccagggactaccacgcccgctgccagtacacccggtgtgatttctgggcctccaagtttcgcaaacacaccaggccttactcccgtcacaacgcctggtgtcaatccacttgcggctgcaggtgtgttcccaatggcccgccctggtgctcaaccaataaatccactgaatcccgtgaacccgatgatacccgcggcgatgaacccattggctcctacatcacgtcccggagctaatagaatggctacttcgggagtctga

SEQ ID NO: 3158 - protein, 649 aa, Muscodor strobelii
  misc_feature: SGI Peptide ID NO. 560704
  misc_feature (284)..(516): Pfam Id: PF02782 Pfam Desc: FGGY family of carbohydrate kinases, C-terminal domain
  misc_feature (26)..(281): Pfam Id: PF00370 Pfam Desc: FGGY family of carbohydrate kinases, N-terminal domain
  misc_feature (20)..(543): NCBI GI: 156064883 Blast Desc: SS1G_00451 [Sclerotinia sclerotiorum 1980] gi|154691311|gb|EDN91049.1| SS1G_00451 [Sclerotinia sclerotiorum 1980]
  misc_feature (20)..(535): NCBI GI: 154322623 Blast Desc: BC1G_00654 [Botryotinia fuckeliana B05.10] gi|150847988|gb|EDN23181.1| BC1G_00654 [Botryotinia fuckeliana B05.10]
  misc_feature (8)..(542): NCBI GI: 171682260 Blast Desc: protein product [Podospora anserina] gi|170941089|emb|CAP66739.1| protein product [Podospora anserina]
  misc_feature (17)..(533): NCBI GI: 169606316 Blast Desc: SNOG_06196 [Phaeosphaeria nodorum SN15] gi|111064907|gb|EAT86027.1| SNOG_06196 [Phaeosphaeria nodorum SN15]
  misc_feature (26)..(533): NCBI GI: 242769236 Blast Desc: glycerol kinase, [Talaromyces stipitatus ATCC 10500] gi|218724925|gb|EED24342.1| glycerol kinase, [Talaromyces stipitatus ATCC 10500]
  misc_feature (20)..(540): NCBI GI: 256734111 Blast Desc: NECHADRAFT_67500 [Nectria haematococca mpVI 77-13-4]
  misc_feature (26)..(533): NCBI GI: 212542293 Blast Desc: glycerol kinase, [Penicillium marneffei ATCC 18224] gi|210066208|gb|EEA20301.1| glycerol kinase, [Penicillium marneffei ATCC 18224]
  misc_feature (26)..(533): NCBI GI: 67538838 Blast Desc: AN5589.2 [Aspergillus nidulans FGSC A4] gi|40743042|gb|EAA62232.1| AN5589.2 [Aspergillus nidulans FGSC A4] gi|259484949|tpe|CBF81606.1| TPA: conserved : glycerol kinase
  misc_feature (24)..(570): NCBI GI: 238501538 Blast Desc: glycerol kinase, [Aspergillus flavus NRRL3357] gi|220692240|gb|EED48587.1| glycerol kinase, [Aspergillus flavus NRRL3357]
  misc_feature (26)..(533): NCBI GI: 145257797 Blast Desc: An04g04890 [Aspergillus niger] gi|61696880|gb|AAX53113.1| glycerol kinase [Aspergillus niger] gi|134074456|emb|CAK38751.1| protein product [Aspergillus niger]
  misc_feature (26)..(533): SWISSPROT Homolog: EC 2.7.1.30 Glycerol kinase
MGDTRESKRARNGAEVVDGEVEEEWFVGAIDQGTTSSRFIIFNRYADPVAGHQIEFENHHPHSGWHEQNPQDLVESVETCIEEAVKKFLEKGYQKSQIKSIGITNQRETIITWDKQTGELLSRAIAWPDTRTKDLVRDLKAQPGAEKLQDLCGLPLSTYPSSVKLAWLLRNHEPVRVAYEDGRLAIGTVDTWLIYQLNGGIDKDIHVTDTTNASRTMFMNLHTCKYDDQLFEFFGIEQSKIHLPKIVPSSDAEAFGAMASGPLQGVKIRGCLGDQSSALVGHCGFKPGHAKNTYGTGCFLLYNVGDKPVVSKYGLLATVAYDFSHMGMKPVYALEGSIAVAGSGVKFLMNNLGFVHQSDKVGELARTVNDNGGVVFVTAFSGLFAPYWIDDAKGTLFGITQHTQKGHIARATLESVCFQTRAILEAMEKDSGHKLEGLAVDGGMSNSNFTMQTQADVCDIRVERPEMRETTSLGAAIAAGLATEGCWNSLDELFSITHKKPGRKMFEPVTNKKKVERMYMRWEHAVEMSRGWVTEVLEEEEEDFYTTLQEEANMTPAITPGGTPGTTTPAASTPGVISGPPSFANTPGLTPVTTPGVNPLAAAGVFPMARPGAQPINPLNPVNPMIPAAMNPLAPTSRPGANRMATSGV

SEQ ID NO: 3159 - DNA, 3064 bp, Muscodor strobelii
  misc_feature: SGI EST ID NO. CUFF.7816.0
  misc_feature: Variant of the nucleotide sequence at SEQ ID NO 3157
cgaaaccccagcacgggccccggttcgcggctcagccataaccacattgactgaccagggcgcgccaggcgtgtcgcattggatgaattgcccaatccgcaaacacgcgcagcgcaaacgctgcaggccatttgttgctaccttgcccactcgctatgtcatgcagcaccaagcgacttgcagcaacccactctccaccggcagcctgttcaaatccacccggttaaagcaggtcgacatcagacagatgtacttgtagcacattggcagcatggcgatgtctcccctccctgtccgactcggtcaactgggtcgttttcacatgtgctcttccttctgctcctctgtccgctttcatcacacatcctcccgagcctccaatactctgaagtctgcaacaccacatccagcacacggccttccatcctcccaccgtgcctctcccgctcagtcatcctccaaactctatgctaagacgattgtaacggctgttaccactgctacggccactactgctactccatataaatctgctatcccttatatcgccgcatctaacgtctcaactgtcactgcttggaatacacccgctccgcgatctggttgctgacattcggcctgcttgcctcgccagtcctcccatttacatagtcacaaggcagctgccgcatcacgaacatattcgtcaataggttccatgcgccaagctcgtcactacacgataatgggagacacccgcgagagcaagcgagcccgcaacggggctgaagttgtcgatggcgaggtagaagaggagtggttcgtcggggctattgaccaaggcaccacttcatcccgcttcatcatcttcaaccgctacgccgatcccgtagcaggccaccagatcgagtttgagaaccaccaccctcactctggatggcatgaacagaatcctcaagacctcgtagaatcggtcgagacttgtattgaagaggctgtgaagaaattcctcgagaaaggctaccaaaagtcgcaaatcaagtcgatcgggatcaccaaccagcgtgagaccataattacctgggacaagcagacgggcgaactgttatctagggccattgcctggccagatactcggaccaaggacttagttcgagacctcaaggctcagcctggcgcagagaaactccaagacctttgcggtctgccgctgagtacttatccctcaagcgtgaaacttgcctggctcctccggaaccacgagccagtccgagtagcctacgaagacgggcgcctcgctattggcaccgtggacacgtggctgatctaccagctcaacggtggcatcgataaggatattcacgtcacagataccacaaatgccagcagaactatgttcatgaacctgcatacatgcaaatacgatgaccagttgtttgaatttttcggcatcgagcaatctaaaattcacttgcccaagatcgtcccttcttcggacgccgaagcatttggggctatggcttctgggcctttacaaggggttaagatccgaggttgtctaggagatcaatccagtgcattggtcggccattgtggtttcaagcctggccatgccaagaacacttacggcactggctgtttcttgctctacaatgtcggcgacaagcccgttgtgtccaagtatggtttactagcaacggtggcatacgatttctcccatatgggcatgaaacccgtctatgccttggagggcagtattgccgtggctggctctggcgtcaaattcttgatgaacaacctgggttttgtccaccagtcggacaaagttggtgaactggcgcgtaccgtcaatgataatggtggcgttgttttcgttactgccttcagtggcttattcgcaccgtattggatagacgacgcgaaaggcacattatttggaatcacccagcatacgcaaaagggccacattgcccgcgcaacactggagtcagtatgtttccagacacgtgccatcttagaagccatggagaaagactcaggccataaacttgagggtctggccgttgatggcggcatgtccaattcaaactttacgatgcaaacacaagccgatgtatgcgatatccgcgtcgaacggccggagatgcgagagactacctccttgggagcggctatcgctgccggattggcgaccgaaggctgctggaatagtctagatgaacttttctcaatcactcataagaaaccaggcaggaagatgttcgagcctgttacgaacaagaaaaaggttgagcgcatgtatatgaggtgggaacacgcagtggaaatgagtcgaggttgggttacggaggtgctagaagaggaagaagaagatttttacactactctccaggaagaggcgaacatgacacctgctatcactccgggcggaactccagggactaccacgcccgctgccagtacacccggtgtgatttctgggcctccaagtttcgcaaacacaccaggccttactcccgtcacaacgcctggtgtcaatccacttgcggctgcaggtgtgttcccaatggcccgccctggtgctcaaccaataaatccactgaatcccgtgaacccgatgatacccgcggcgatgaacccattggctcctacatcacgtcccggagctaatagaatggctacttcgggagtctgagcgaagaaatttgaaagcagggcaattttgcccggccttaagtcgacccatctaaacatggctgaagttgttcggcttcaatcagagtacggcttgaatcatagctgtgtcacgattgcaattacgacaagagcgaagtagaccgcagggctgagtcgtttcgaggcatcgcaatttcgcattggtatcgtatcgcagagcgggagtcttgcggtaattgtacatgttggttcgagaatgtgcgctggctcccatgcggccgcgctggcgttggggtatatgtttatacaaatataatcaatgatattaacatagctgcgtggatcgtttcccatttgtcgtccgagcttgtgggctaagtacctggccattgctgttgtagtgtgcctc

SEQ ID NO: 3160 - DNA, 1842 bp, Muscodor strobelii
  misc_feature: SGI cDNA ID NO. 560705
  misc_feature: Reduced expression when VOC is produced
  misc_feature: Encodes the peptide sequence at SEQ ID NO 3161
atgaaccgcacatccagaacggatgagcccttgaaggggacgggccataaccagagccccaaccctctctctaacgaccttattacgaatgaggacctgaatggaaaagccaatgcaagggagcataagggcggcaagtctcggagcatggacaattccggtcagcctatagcgcacgaaagtccgccgaatatcgacgacgaagacggcggattgggaacagcgcgcaataaaggactggcacctagggacggccagtcacctgacacgagcgcaactccaattccatcgtatcaggccgatccctcggaggcgtctagcattcgccagccctccgagatccctacccgcaagggtcctccgcatggaatgctgcagaagctggcttaccacttcgttacgcttggaaaattcgttggacccgggtttatggtagctgtcgcgtacatagaccccggcaattactcgacggatatcagtgcgggtgctgagtacaggtttcgactactgttcatcgttcttgcttccaatctcttcgccatcgtattgcagtgtcttgctgttaaattgggaactgtcacgggattgaacttggctgaggcatgtcgtgcattcctacccaaatggttaaatatcttcttgtatcttttggcggaggccgcaatcattgccactgatatcgctgaggttattggtacagccatcggactcaacctgctgattccagcgataccccttgtcgcgggttgcgccctctcgatcttagatgtcttcgctattctgtttttctatcggcctaatgggccaatgactgggctcagaatctttgaaatattcgtcatgatccttgttctcattgtagtaattagcttcgcgatccaattgtctttgatcaaagatacatcgcctggggaggtgctcaagggatacctaccaaacgacgctatcacggagtccagtgggttgtaccaggcctgcggtattcttggcgctaccgtgatgccccattcgctgttcctgggctcaggcatcgtacaaagccgtctccgcgattatgatacgaaaaaaggtcttctacccgaaggttcgacgggtcatactgtggaggatcccaagacaggcgaaaagcaattctacgtaccatctctcgctgctgtgaagcattctctgaaatactcctataccgaggtctccgtatcgctctttacatttgctctcttcgtcaacagcgcaatcctaatcgtggccggtgcatcactttacggaaatcccgaagcgcttgatgcggatatttttgggatccatgaccttctctcgcgttcgatctctccctttgctggaaccatcttcgctttagcactattgttttccggtatcagtgcaggcattgtctgcacgattgcgggacaaatggtatgcgagggagccctgaattggaagatgaaaccatgggttcgacgactcgtcacgagaagtattgccattactccgagtattatcattgcgggtgccactgggaagagcactttgaatgctgcgttgaacggatcccaagtggtgttgagtatcgtcttgccgtttgtgagcgcgccgctgatctggtttacgtgcttcaacaagtatatgactactgcacctggaagggccagagtcagggtccagaacagtaagagaaacggcggtatcacgaatactgctctggatgaggagcaaggccaagaacagggactgatcgtcaagatggcgaattcatggccgattgctgtcgccgcagtcattatttggctgcttatcgttatactgaatgtcgccaatctagttttgcttggcatgggacagtga

SEQ ID NO: 3161 - protein, 613 aa, Muscodor strobelii
  misc_feature: SGI Peptide ID NO. 560705
  misc_feature (155)..(546): Pfam Id: PF01566 Pfam Desc: Natural resistance-associated macrophage protein
  misc_feature (1)..(610): NCBI GI: 256725431 Blast Desc: NECHADRAFT_101135 [Nectria haematococca mpVI 77-13-4]
  misc_feature (1)..(613): NCBI GI: 156064889 Blast Desc: SS1G_00454 [Sclerotinia sclerotiorum 1980] gi|154691314|gb|EDN91052.1| SS1G_00454 [Sclerotinia sclerotiorum 1980]
  misc_feature (5)..(612): NCBI GI: 85091727 Blast Desc: NCU07530 [Neurospora crassa OR74A] gi|28920440|gb|EAA29807.1| NCU07530 [Neurospora crassa OR74A]
  misc_feature (1)..(612): NCBI GI: 238841558 Blast Desc: transporter protein smf2 [Microsporum canis CBS 113480]
  misc_feature (1)..(611): NCBI GI: 46137903 Blast Desc: FG10466.1 [Gibberella zeae PH-1]
  misc_feature (1)..(613): NCBI GI: 261359170 Blast Desc: manganese transporter pdt1 [Verticillium albo-atrum VaMs.102]
  misc_feature (1)..(613): NCBI GI: 256857812 Blast Desc: natural resistance-associated macrophage protein [Sporothrix schenckii]
  misc_feature (1)..(613): NCBI GI: 169771487 Blast Desc: [Aspergillus oryzae RIB40] gi|238485940|ref|XP_002374208.1| transporter protein smf2 [Aspergillus flavus NRRL3357] gi|83768072|dbj|BAE58211.1| protein
  misc_feature (125)..(613): NCBI GI: 154322617 Blast Desc: BC1G_00651 [Botryotinia fuckeliana B05.10] gi|150847985|gb|EDN23178.1| BC1G_00651 [Botryotinia fuckeliana B05.10]
  misc_feature (1)..(613): NCBI GI: 145258063 Blast Desc: An04g05680 [Aspergillus niger] gi|134074537|emb|CAK38830.1| protein product [Aspergillus niger]
  misc_feature: Useful for introducing or modulating the production of volatile compounds
MNRTSRTDEPLKGTGHNQSPNPLSNDLITNEDLNGKANAREHKGGKSRSMDNSGQPIAHESPPNIDDEDGGLGTARNKGLAPRDGQSPDTSATPIPSYQADPSEASSIRQPSEIPTRKGPPHGMLQKLAYHFVTLGKFVGPGFMVAVAYIDPGNYSTDISAGAEYRFRLLFIVLASNLFAIVLQCLAVKLGTVTGLNLAEACRAFLPKWLNIFLYLLAEAAIIATDIAEVIGTAIGLNLLIPAIPLVAGCALSILDVFAILFFYRPNGPMTGLRIFEIFVMILVLIVVISFAIQLSLIKDTSPGEVLKGYLPNDAITESSGLYQACGILGATVMPHSLFLGSGIVQSRLRDYDTKKGLLPEGSTGHTVEDPKTGEKQFYVPSLAAVKHSLKYSYTEVSVSLFTFALFVNSAILIVAGASLYGNPEALDADIFGIHDLLSRSISPFAGTIFALALLFSGISAGIVCTIAGQMVCEGALNWKMKPWVRRLVTRSIAITPSIIIAGATGKSTLNAALNGSQVVLSIVLPFVSAPLIWFTCFNKYMTTAPGRARVRVQNSKRNGGITNTALDEEQGQEQGLIVKMANSWPIAVAAVIIWLLIVILNVANLVLLGMGQ

SEQ ID NO: 3162 - DNA, 2683 bp, Muscodor strobelii
  misc_feature: SGI EST ID NO. CUFF.7844.0
  misc_feature: Variant of the nucleotide sequence at SEQ ID NO 3160
ctttcaagccggcagccggtttctcacagatctaaaacgtcttgtgcaaatcatcttcaacaatcacatcagacatcaactcctcggttgcgtcctcttccagcctgcaggctgcagattttaatcgagtgctgactctcgttctcgctcttactctcgtagttgttccacaccgtagttttacctgcctaagccagccgggtaccttgaaggaaagcgtccacggctgctcaaagagtgaataaaggtttacaaataagccttaaagtttaaacggcatgatataaaggctctgtccctgcgtgcctgctcaaactctataaaattttctcggcgaacgataccgatttcaatcttcaattggcctacgattcgcttcaacttctcgtgacagaatgaaccgcacatccagaacggatgagcccttgaaggggacgggccataaccagagccccaaccctctctctaacgaccttattacgaatgaggacctgaatggaaaagccaatgcaagggagcataagggcggcaagtctcggagcatggacaattccggtcagcctatagcgcacgaaagtccgccgaatatcgacgacgaagacggcggattgggaacagcgcgcaataaaggactggcacctagggacggccagtcacctgacacgagcgcaactccaattccatcgtatcaggccgatccctcggaggcgtctagcattcgccagccctccgagatccctacccgcaagggtcctccgcatggaatgctgcagaagctggcttaccacttcgttacgcttggaaaattcgttggacccgggtttatggtagctgtcgcgtacatagaccccggcaattactcgacggatatcagtgcgggtgctgagtacaggtttcgactactgttcatcgttcttgcttccaatctcttcgccatcgtattgcagtgtcttgctgttaaattgggaactgtcacgggattgaacttggctgaggcatgtcgtgcattcctacccaaatggttaaatatcttcttgtatcttttggcggaggccgcaatcattgccactgatatcgctgaggttattggtacagccatcggactcaacctgctgattccagcgataccccttgtcgcgggttgcgccctctcgatcttagatgtcttcgctattctgtttttctatcggcctaatgggccaatgactgggctcagaatctttgaaatattcgtcatgatccttgttctcattgtagtaattagcttcgcgatccaattgtctttgatcaaagatacatcgcctggggaggtgctcaagggatacctaccaaacgacgctatcacggagtccagtgggttgtaccaggcctgcggtattcttggcgctaccgtgatgccccattcgctgttcctgggctcaggcatcgtacaaagccgtctccgcgattatgatacgaaaaaaggtcttctacccgaaggttcgacgggtcatactgtggaggatcccaagacaggcgaaaagcaattctacgtaccatctctcgctgctgtgaagcattctctgaaatactcctataccgaggtctccgtatcgctctttacatttgctctcttcgtcaacagcgcaatcctaatcgtggccggtgcatcactttacggaaatcccgaagcgcttgatgcggatatttttgggatccatgaccttctctcgcgttcgatctctccctttgctggaaccatcttcgctttagcactattgttttccggtatcagtgcaggcattgtctgcacgattgcgggacaaatggtatgcgagggagccctgaattggaagatgaaaccatgggttcgacgactcgtcacgagaagtattgccattactccgagtattatcattgcgggtgccactgggaagagcactttgaatgctgcgttgaacggatcccaagtggtgttgagtatcgtcttgccgtttgtgagcgcgccgctgatctggtttacgtgcttcaacaagtatatgactactgcacctggaagggccagagtcagggtccagaacagtaagagaaacggcggtatcacgaatactgctctggatgaggagcaaggccaagaacagggactgatcgtcaagatggcgaattcatggccgattgctgtcgccgcagtcattatttggctgcttatcgttatactgaatgtcgccaatctagttttgcttggcatgggacagtgagctgtctagcctagctgcattggaaggacgaagatgggtagcacaacgagaatacggaggaataagatctgctacttcaacatggcaaatcgaactttgcggttaagccaaagggcgagtcgccatactccaaattgggagacaggagggcagtagtttaacaagcgagtctaggattttggaagaagtttttagctggcgtggtttgaaggcttgaggtatttcctacagtacatgttttcttggtagtatcacagtatgcgtttttgcaattcattctatatccccaatgagatgaacaccatactccgtattgtgtctatccgtgttacgttctcgatcccgagatttcgccgctgcgtaaaagtctctacgccagtagcgaaccgtctacgatacgatcttgttcatcctttgggatacggaatatactgggttgatccggg

SEQ ID NO: 3163 - DNA, 624 bp, Muscodor strobelii
  misc_feature: SGI cDNA ID NO. 560706
  misc_feature: Encodes the peptide sequence at SEQ ID NO 3164
atggcaccctacgagatacctgccagtaagctggtggactttgaccagaagagcctattgttttcggcggcagccatcgctttcaatcctcttttctggaacatcgtcgcgagacaagagtaccacaacaaagtcctcactaagctcttcggcggacgctcgcaggcagcctgttacggccttgcagcgactatcttttccctcggcctcgtccgcgattatctttacgaacgcgccctaagacaccagccgtcccacccgttgctcgaagaccccaacgtcaactatctggcctacgccctcatcgccatcggtaatacgctcgtaatctcgtctacatggcaattaggtatcactggcaccttcctgggtgattacttcggcatattgatggatcacattgtaacggggttcccattcaacgtcactgatgcgccgatgtactatggctccacctgcagcttccttggtactgcactcctgtatggaaaacctgcgggcttcttgttgacggcttgggtttacgttgtctacaagatcgctttgagctatgagaatcccttcacggccggtatctatgccaagagagaccgggagagagctgagggcaagaaggccaggtga

SEQ ID NO: 3164 - protein, 207 aa, Muscodor strobelii
  misc_feature: SGI Peptide ID NO. 560706
  misc_feature (9)..(206): Pfam Id: PF04191 Pfam Desc: Phospholipid methyltransferase
  misc_feature (1)..(207): NCBI GI: 145613874 Blast Desc: MGG_01295 [Magnaporthe grisea 70-15] gi|145020891|gb|EDK05020.1| MGG_01295 [Magnaporthe grisea 70-15]
  misc_feature (12)..(202): NCBI GI: 171682038 Blast Desc: protein product [Podospora anserina] gi|170940978|emb|CAP66628.1| protein product [Podospora anserina]
  misc_feature (1)..(197): NCBI GI: 256734045 Blast Desc: NECHADRAFT_103763 [Nectria haematococca mpVI 77-13-4]
  misc_feature (12)..(203): NCBI GI: 46128471 Blast Desc: FG08613.1 [Gibberella zeae PH-1]
  misc_feature (10)..(202): NCBI GI: 85095863 Blast Desc: methylene-fatty-acyl-phospholipid synthase [Neurospora crassa OR74A] gi|28921640|gb|EAA30926.1| methylene-fatty-acyl-phospholipid synthase [Neurospora crassa
  misc_feature (11)..(207): NCBI GI: 154303995 Blast Desc: BC1G_09633 [Botryotinia fuckeliana B05.10] gi|150854268|gb|EDN29460.1| BC1G_09633 [Botryotinia fuckeliana B05.10]
  misc_feature (12)..(205): NCBI GI: 189189670 Blast Desc: phosphatidylethanolamine N-methyltransferase [Pyrenophora tritici-repentis Pt-1C-BFP] gi|187972780|gb|EDU40279.1| phosphatidylethanolamine [Pyrenophora
  misc_feature (10)..(205): NCBI GI: 116202225 Blast Desc: conserved [Chaetomium globosum CBS 148.51] gi|88177515|gb|EAQ84983.1| conserved [Chaetomium globosum CBS 148.51]
  misc_feature (12)..(205): NCBI GI: 242785904 Blast Desc: phospholipid methyltransferase [Talaromyces stipitatus ATCC 10500] gi|218720841|gb|EED20260.1| phospholipid methyltransferase [Talaromyces stipitatus ATCC 10500]
  misc_feature (9)..(205): NCBI GI: 119184821 Blast Desc: methylene-fatty-acyl-phospholipid synthase [Coccidioides immitis RS]
  misc_feature (12)..(200): SWISSPROT Homolog: EC 2.1.1.16 Methylene-fatty-acyl-phospholipid synthase
MAPYEIPASKLVDFDQKSLLFSAAAIAFNPLFWNIVARQEYHNKVLTKLFGGRSQAACYGLAATIFSLGLVRDYLYERALRHQPSHPLLEDPNVNYLAYALIAIGNTLVISSTWQLGITGTFLGDYFGILMDHIVTGFPFNVTDAPMYYGSTCSFLGTALLYGKPAGFLLTAWVYVVYKIALSYENPFTAGIYAKRDRERAEGKKAR

SEQ ID NO: 3165 - DNA, 1370 bp, Muscodor strobelii
  misc_feature: SGI EST ID NO. CUFF.7966.1
  misc_feature: Variant of the nucleotide sequence at SEQ ID NO 3163
ttctttgttgcgttcacctctacacaggcaatttttcagctcctcatctctatttcttctaattttctactgccgatccgcagtgcagaaagagaaaattatcggcggcaataatggcaccctacgagatacctgccagtaagctggtggactttgaccagaagagcctattgttttcggcggcagccatcgctttcaatcctcttttctggaacatcgtcgcgagacaagagtaccacaacaaagtcctcactaagctcttcggcggacgctcgcaggcagcctgttacggccttgcagcgactatcttttccctcggcctcgtccgcgattatctttacgaacgcgccctaagacaccagccgtcccacccgttgctcgaagaccccaacgtcaactatctggcctacgccctcatcgccatcggtaatacgctcgtaatctcgtctacatggcaattaggtatcactggcaccttcctgggtgattacttcggcatattgatggatcacattgtaacggggttcccattcaacgtcactgatgcgccgatgtactatggctccacctgcagcttccttggtactgcactcctgtatggaaaacctgcgggcttcttgttgacggcttgggtttacgttgtctacaagatcgctttgagctatgagaatcccttcacggccggtatctatgccaagagagaccgggagagagctgagggcaagaaggccaggtgatgagttctgacgctagagaatgtcatcatggttagccagacttgtcaatcgctattgtggccctggccgccgcgcgggacaagagagcacggtaggcctatgcatatcttgtgttatgcacaggcccatggcaaatactagtagattggggaaacgcaaacgaaaccgctcaggcttccggaagttgtaaacaaagtcaaagagttgtggtagcctggcgctgggcaccggatgctgttggtccagcagaacagaccaagaaaaggcggtatacgagtgcagcaaaacaggggatggaaatacgtgtatctgcagtgtataacggatggtctaataaaaggcaagacgcacgtcttcgcatctctgctctgtattcaatgtcatagtatcctattacgatagcctgtaagcttattctacatggtcaactactatatctttgtcaatcatctggcgactagaatactcggtgcttatcaccatatttgtcacgctagaaatcggcaagctgccgttccgaccgatcttcgtcaaatatagtgtcggaaagcaaagactcctttacctccaaaaactgcatggttagctaattaaaatccggccaaatggataacacatgaaactacatttcaa

SEQ ID NO: 3166 - DNA, 921 bp, Muscodor strobelii
  misc_feature: SGI cDNA ID NO. 560707
  misc_feature: Encodes the peptide sequence at SEQ ID NO 3167
atgaccaccaccacaccacaaacgccaggctcccgcctgcgttccctcctagaagacgactctcagatcctcatctgcccaggggtatacgacggtttcagcgcccgcatagtcctaaacaccgggcacttccgcgcgctctacatgaccggagccgggaccacaatgtccctactcggcaccgcagacctcggtctaacaaccctcactgaaatgtcgtccaacgcatcaatgatcgcctccctctccccctccacccccttaatagcagacgcagacaccggattcggcggcccgctaaacatccgccgaacaacacacgcctacagccggggaggcgtagcaggcttccacatcgaagaccaagtcacgacgaagcgctgcggtcacctagcaggcaaagaattagtctccgaacaagtcttctcatcccgcatccgtgccgcgaaactagctagggaggaaatagggagtgatatagtcatcatcgcacgaacagacgccttagcaaccctaggatatgactccgccatctcccgcttacgcgctgccatatctgccggcgcagacgtagcgtttctcgaagcgccgcagacgcgggagcagatgagtcgtatatgcgctgacttggctcccacacccgtcctactaaatatggtggaggaaggccgaacacccatcatcacccccgacgaagcgaaggagttgggattcaggattattattttccctgttttcgcactgggacccgtgtatactgctattaagggcgcggcggaggcactacacaagtacggcaaggtgaagagtcgcgagggcgatggaattggaccgaaggagttgtttgaggtttgtgggttgcgtgagagcatggcttttgacgaggcggcgggtgggagtgcttataccgatggtgtttaa

SEQ ID NO: 3167 - protein, 306 aa, Muscodor strobelii
  misc_feature: SGI Peptide ID NO. 560707
  misc_feature (86)..(168): Pfam Id: PF00463 Pfam Desc: Isocitrate lyase family
  misc_feature (11)..(305): NCBI GI: 189207655 Blast Desc: carboxyvinyl-carboxyphosphonate phosphorylmutase [Pyrenophora tritici-repentis Pt-1C-BFP] gi|187976254|gb|EDU42880.1| carboxyvinyl-carboxyphosphonate
  misc_feature (11)..(306): NCBI GI: 115442646 Blast Desc: ATEG_09508 [Aspergillus terreus NIH2624] gi|114187999|gb|EAU29699.1| ATEG_09508 [Aspergillus terreus NIH2624]
  misc_feature (8)..(306): NCBI GI: 119479973 Blast Desc: carboxyphosphonoenolpyruvate phosphonomutase, [Neosartorya fischeri NRRL 181] gi|119408169|gb|EAW18118.1| carboxyphosphonoenolpyruvate phosphonomutase, [Neosartorya NRRL
  misc_feature (8)..(306): NCBI GI: 159128925 Blast Desc: carboxyphosphonoenolpyruvate phosphonomutase, [Aspergillus fumigatus A1163]
  misc_feature (8)..(306): NCBI GI: 70989329 Blast Desc: carboxyphosphonoenolpyruvate phosphonomutase [Aspergillus fumigatus Af293] gi|66847145|gb|EAL87476.1| carboxyphosphonoenolpyruvate phosphonomutase, [Aspergillus Af293]
  misc_feature (8)..(306): NCBI GI: 222143177 Blast Desc: carboxyphosphonoenolpyruvate phosphonomutase [Aspergillus fumigatus Af293] gi|66847145|gb|EAL87476.1| carboxyphosphonoenolpyruvate phosphonomutase, [Aspergillus Af293]
  misc_feature (8)..(306): NCBI GI: 145238534 Blast Desc: An07g08390 [Aspergillus niger] gi|85691197|gb|ABC73717.1| oxaloacetate hydrolase class protein [Aspergillus niger] gi|89521424|gb|ABD76556.1| conserved niger]
  misc_feature (13)..(306): NCBI GI: 255943139 Blast Desc: Pc18g05100 [Penicillium chrysogenum Wisconsin 54-1255] gi|211587071|emb|CAP94734.1| Pc18g05100 [Penicillium chrysogenum Wisconsin 54-1255]
  misc_feature (11)..(306): NCBI GI: 145251559 Blast Desc: An15g07720 [Aspergillus niger] gi|85691199|gb|ABC73718.1| oxaloacetate hydrolase class protein [Aspergillus niger] gi|134082828|emb|CAK42659.1| protein product
  misc_feature (11)..(306): NCBI GI: 242788330 Blast Desc: carboxyphosphonoenolpyruvate mutase, [Talaromyces stipitatus ATCC 10500] gi|218721344|gb|EED20763.1| carboxyphosphonoenolpyruvate mutase, [Talaromyces stipitatus ATCC
  misc_feature (8)..(284): SWISSPROT Homolog: EC 2.7.8.23 Carboxyvinyl-carboxyphosphonate phosphorylmutase
MTTTTPQTPGSRLRSLLEDDSQILICPGVYDGFSARIVLNTGHFRALYMTGAGTTMSLLGTADLGLTTLTEMSSNASMIASLSPSTPLIADADTGFGGPLNIRRTTHAYSRGGVAGFHIEDQVTTKRCGHLAGKELVSEQVFSSRIRAAKLAREEIGSDIVIIARTDALATLGYDSAISRLRAAISAGADVAFLEAPQTREQMSRICADLAPTPVLLNMVEEGRTPIITPDEAKELGFRIIIFPVFALGPVYTAIKGAAEALHKYGKVKSREGDGIGPKELFEVCGLRESMAFDEAAGGSAYTDGV

SEQ ID NO: 3168 - DNA, 1538 bp, Muscodor strobelii
  misc_feature: SGI EST ID NO. CUFF.7867.0
  misc_feature: Variant of the nucleotide sequence at SEQ ID NO 3166
gccaccacctacccagcatccgggagagcgggtaaggtcgttagaaaacccatcccgcaatcgggtcgcagaaaccctcctattggtctactacgtcactccgctcacggcgaaacacccggcaccttaacggtccccctccggcacctcgcctcggtacgtctcctcacgagcagcatactacttggagaagcatttttgaagaacgtaaagaaccatgtaataacgtatatatgtcaacctggggtcttagaccccgacccaacaagtgtttctggtacaggtaatcaagagatatctcatcggtacaagattcagaacaccacagaaactgcgtaatatctacctattcactgcatgtatgagaaccaaatatcgccttatcccaacatcatcaacacacaaccctcgacatcaaccactcccaaactcaaacctaacaatgaccaccaccacaccacaaacgccaggctcccgcctgcgttccctcctagaagacgactctcagatcctcatctgcccaggggtatacgacggtttcagcgcccgcatagtcctaaacaccgggcacttccgcgcgctctacatgaccggagccgggaccacaatgtccctactcggcaccgcagacctcggtctaacaaccctcactgaaatgtcgtccaacgcatcaatgatcgcctccctctccccctccacccccttaatagcagacgcagacaccggattcggcggcccgctaaacatccgccgaacaacacacgcctacagccggggaggcgtagcaggcttccacatcgaagaccaagtcacgacgaagcgctgcggtcacctagcaggcaaagaattagtctccgaacaagtcttctcatcccgcatccgtgccgcgaaactagctagggaggaaatagggagtgatatagtcatcatcgcacgaacagacgccttagcaaccctaggatatgactccgccatctcccgcttacgcgctgccatatctgccggcgcagacgtagcgtttctcgaagcgccgcagacgcgggagcagatgagtcgtatatgcgctgacttggctcccacacccgtcctactaaatatggtggaggaaggccgaacacccatcatcacccccgacgaagcgaaggagttgggattcaggattattattttccctgttttcgcactgggacccgtgtatactgctattaagggcgcggcggaggcactacacaagtacggcaaggtgaagagtcgcgagggcgatggaattggaccgaaggagttgtttgaggtttgtgggttgcgtgagagcatggcttttgacgaggcggcgggtgggagtgcttataccgatggtgtttaagggggtggatttgtttccgctttgtgtgtgatggaggtgactgatgttaatggttcatgacaagccttgaataggtgcctagtgaggggatacatgctctttgtagcgagtgtcctaaaaattattgagtggacacaaacatattagcatcttagatgcggtttatggattacaa

SEQ ID NO: 3169 - DNA, 1404 bp, Muscodor strobelii
  misc_feature: SGI cDNA ID NO. 560708
  misc_feature: Reduced expression when VOC is produced
  misc_feature: Encodes the peptide sequence at SEQ ID NO 3170
atggcctcccaacagattgtcttcaaggagacaatcatagccatgaagaaggccaggaagaggagagcttatgaatccgactccgactccgagatcgacaaccatggcaatcgcgggcgcaagatgcagaagaaggctagattcgcccaccagggccagctagcaccccccggaggtcctgagttttacagagaaatcgtgaatcatgccggttaccaccgggccatcatcagccgcaaccctcccctcctcgacgacgaaggctacgagctcaacagcagcgacgacgatgacctcatcctcgacgtcgccaacgccgccgccgagttcgacccctacagcaacattcgattggagaatatcctcgctcctctgaccgccgtcaccgaccttcccacacatcccaccctatcgcgaccatacacttccaagaccctcaccgagctgaccaagcagggctgcaacatcatgcaaaaggagaatgcagccctgtggcgggtcaaacatctccagaccaagatcataggcgaccacaactgggccccctgcgagctcatgatcggccccaacgacatcgacctataccgtgatgactacctcgaccaaccacaaggctccgtcaagtcggaaggtagtgtccggctacttgaaaatggaccgacggaaaatagtgcgaatgggccagagcccaccaacggcgaagaagcccaagagcatggtaatgctgatgtaagcatggccgatgcgcaaactcctccagaagcaaattcgaacgcaaagacaaaaggcagcagctcgaaaggcaaaggcaaagagaaaaaggaaacgcgcgaaaagtctaccgaacgaagtggaagcgtggagcccactgaaaaagagacagacccttccctgtccaaagctgtaaatggcgcagtggtgaacggcgccaataagtctggtgatgtcgagatgtcggatgtgcggaatcaggaagcggccaaacaagtgaccaatggagcgagtcggcccatgtccataaactcggaaacttcaaacgatgttcccatacatcccatctttctaccaccgcggacggcccggcctgacagagatttgggcattccagaaagcgaggccgaagacatgaggcggatgctgcagctatacgtccagaaacaagaggaggtgtgcagaggaaccaagcgtctatacgaagggctcctccgcgccgaccgaatgcgcaagacagtgttgtcgtggtccaagcatgaggcccatgtgggaccgaaccgcgacatgtcggacggcgaggactggtacgacaaggaggaatggggtctcgaagaagacctgaagaaaggtgccgacgaagaggaagaagaaacgccccagacaactaagaaaacgagagctcgtcgctag

SEQ ID NO: 3170 - protein, 467 aa, Muscodor strobelii
  misc_feature: SGI Peptide ID NO. 560708
  misc_feature (35)..(177): Pfam Id: PF08595 Pfam Desc: RXT2-like, N-terminal
  misc_feature (1)..(467): NCBI GI: 46128469 Blast Desc: FG08612.1 [Gibberella zeae PH-1]
  misc_feature (1)..(467): NCBI GI: 256734046 Blast Desc: NECHADRAFT_99636 [Nectria haematococca mpVI 77-13-4]
  misc_feature (4)..(467): NCBI GI: 85090885 Blast Desc: NCU05979 [Neurospora crassa OR74A] gi|28920009|gb|EAA29396.1| [Neurospora crassa OR74A]
  misc_feature (1)..(467): NCBI GI: 154303997 Blast Desc: BC1G_09634 [Botryotinia fuckeliana B05.10] gi|150854269|gb|EDN29461.1| BC1G_09634 [Botryotinia fuckeliana B05.10]
  misc_feature (37)..(467): NCBI GI: 171682172 Blast Desc: protein product [Podospora anserina] gi|170941045|emb|CAP66695.1| protein product [Podospora anserina]
  misc_feature (65)..(467): NCBI GI: 145610631 Blast Desc: MGG_01035 [Magnaporthe grisea 70-15] gi|145018009|gb|EDK02288.1| MGG_01035 [Magnaporthe grisea 70-15]
  misc_feature (4)..(467): NCBI GI: 116202421 Blast Desc: CHGG_09095 [Chaetomium globosum CBS 148.51] gi|88177613|gb|EAQ85081.1| CHGG_09095 [Chaetomium globosum CBS 148.51]
  misc_feature (1)..(455): NCBI GI: 242785899 Blast Desc: conserved [Talaromyces stipitatus ATCC 10500] gi|218720840|gb|EED20259.1| conserved [Talaromyces stipitatus ATCC 10500]
  misc_feature (1)..(456): NCBI GI: 212543179 Blast Desc: conserved [Penicillium marneffei ATCC 18224] gi|210066651|gb|EEA20744.1| conserved [Penicillium marneffei ATCC 18224]
  misc_feature (1)..(467): NCBI GI: 67521836 Blast Desc: AN1375.2 [Aspergillus nidulans FGSC A4] gi|40746049|gb|EAA65205.1| AN1375.2 [Aspergillus nidulans FGSC A4] gi|259488288|tpe|CBF87619.1| TPA: conserved [Aspergillus FGSC
  misc_feature: Useful for introducing or modulating the production of volatile compounds
MASQQIVFKETIIAMKKARKRRAYESDSDSEIDNHGNRGRKMQKKARFAHQGQLAPPGGPEFYREIVNHAGYHRAIISRNPPLLDDEGYELNSSDDDDLILDVANAAAEFDPYSNIRLENILAPLTAVTDLPTHPTLSRPYTSKTLTELTKQGCNIMQKENAALWRVKHLQTKIIGDHNWAPCELMIGPNDIDLYRDDYLDQPQGSVKSEGSVRLLENGPTENSANGPEPTNGEEAQEHGNADVSMADAQTPPEANSNAKTKGSSSKGKGKEKKETREKSTERSGSVEPTEKETDPSLSKAVNGAVVNGANKSGDVEMSDVRNQEAAKQVTNGASRPMSINSETSNDVPIHPIFLPPRTARPDRDLGIPESEAEDMRRMLQLYVQKQEEVCRGTKRLYEGLLRADRMRKTVLSWSKHEAHVGPNRDMSDGEDWYDKEEWGLEEDLKKGADEEEEETPQTTKKTRARR

SEQ ID NO: 3171 - DNA, 2093 bp, Muscodor strobelii
  misc_feature: SGI EST ID NO. CUFF.7875.2
  misc_feature: Variant of the nucleotide sequence at SEQ ID NO 3169
gggcagatggctccatgcgttcgctttgctggtgcttggcggcgcccgcggtgtgtgtgcagcgtaacagcaggttgctggctgccgcttgtttggacgcagactgcgggcagcttcgctttttgggggctctgctctcgtctttcttcccaccacccgccgtccgatctaccttaccagctcttctctccttgcgatcaagatattcccctcttatgtgcattagatcgaatttacactcttgcgctcttagaatcactcctatttgttcactagactgccgaattactcgccattcccagcgtcgcatgtgcccgtcgtcatcttagcaatccttcgcatcgtcatcctcgacacggcctctgtttcccttggccaccgctcgatccggcccaaatagaccagtccaacctcatacataccctcccggatactcaaatacactatccacgccttatttttctctccaatcctaagagtctactcacgctccattcgccgattgtctcatacagagcctgacaagcacgacaccgtctgaaggcggttgatggtcaccatggcctcccaacagattgtcttcaaggagacaatcatagccatgaagaaggccaggaagaggagagcttatgaatccgactccgactccgagatcgacaaccatggcaatcgcgggcgcaagatgcagaagaaggctagattcgcccaccagggccagctagcaccccccggaggtcctgagttttacagagaaatcgtgaatcatgccggttaccaccgggccatcatcagccgcaaccctcccctcctcgacgacgaaggctacgagctcaacagcagcgacgacgatgacctcatcctcgacgtcgccaacgccgccgccgagttcgacccctacagcaacattcgattggagaatatcctcgctcctctgaccgccgtcaccgaccttcccacacatcccaccctatcgcgaccatacacttccaagaccctcaccgagctgaccaagcagggctgcaacatcatgcaaaaggagaatgcagccctgtggcgggtcaaacatctccagaccaagatcataggcgaccacaactgggccccctgcgagctcatgatcggccccaacgacatcgacctataccgtgatgactacctcgaccaaccacaaggctccgtcaagtcggaaggtagtgtccggctacttgaaaatggaccgacggaaaatagtgcgaatgggccagagcccaccaacggcgaagaagcccaagagcatggtaatgctgatgtaagcatggccgatgcgcaaactcctccagaagcaaattcgaacgcaaagacaaaaggcagcagctcgaaaggcaaaggcaaagagaaaaaggaaacgcgcgaaaagtctaccgaacgaagtggaagcgtggagcccactgaaaaagagacagacccttccctgtccaaagctgtaaatggcgcagtggtgaacggcgccaataagtctggtgatgtcgagatgtcggatgtgcggaatcaggaagcggccaaacaagtgaccaatggagcgagtcggcccatgtccataaactcggaaacttcaaacgatgttcccatacatcccatctttctaccaccgcggacggcccggcctgacagagatttgggcattccagaaagcgaggccgaagacatgaggcggatgctgcagctatacgtccagaaacaagaggaggtgtgcagaggaaccaagcgtctatacgaagggctcctccgcgccgaccgaatgcgcaagacagtgttgtcgtggtccaagcatgaggcccatgtgggaccgaaccgcgacatgtcggacggcgaggactggtacgacaaggaggaatggggtctcgaagaagacctgaagaaaggtgccgacgaagaggaagaagaaacgccccagacaactaagaaaacgagagctcgtcgctagaaacggaggaaacgaacgaagatttgatgactaaataaatattccagcctgtttgctacaattagatacccatcatggacttttggtgtcccaatcgaatatattttgcgaaacccatgtgcaataccaa

SEQ ID NO: 3172 - DNA, 3702 bp, Muscodor strobelii
  misc_feature: SGI cDNA ID NO. 560709
  misc_feature: Encodes the peptide sequence at SEQ ID NO 3173
atggatgcatatcctccgtccagtctggaccacaatgtccccctcctcgccgtctccggcctaggccccagccggaacagccagctcttgaccgacccggagctcaaggagcgcggcatcctcgtccgctctgaactgcctcccgtccaaggcaaagaggcaaaggccgtgctccgcttcatacaggatgccgatgccgcgagcctgccctgggccacccgcgacaccaacaggagacacaagttcaagatcaagatcatcgggagggacttcctgctacctccgcgccgtgccaagctgccagacgatttggatgatgctccagcttctgccgtcgtcctacactcgcccttctccccgctcagccccggctcgacgttgtacccggatggcctcatagatgtccgctggatccagaagcaccaagaacagatccccagcatatgtctgtgcttctacgagctgacctccgacccgaccctcgccactctgcaagacaacaagctcaagacagacatcaatgccatcaagattgccatcagccagtccggctacaggtgccgcttggctgtcgtcatcctcagcgaccagtcccccagtggcgtcgctcagttccaggaacgactagaaaacatacggaggagcactggtctggatcccaaagcctctcttttcgtcatgcccacgaggcggcccgacgcggagctggaaactgccgtgggcaatgtcctcaacgccatctacgatcaagctgtcgactactatcgcgatctcggacgtcactcgcgtaagaagcgtggacggggtattgcaccgccgcccacggttcctcccacaaccggcacctctcacactctgtctctccaggactggaatgtccgttacgacttcaagaccgccgtctttgccgagtttcgccaagagtttgacgccgccttgcggtcatatgaacaggcatacgaaacattgctgggagctgatgttttggagctcatcccagcctggaactcgagattcaacgatgcccgacttttggccgatatactagccatcagagcacttaaatgtctactactgagtgggcagagcactgcggccgtgcggcgatggcaagcccaccacgacaggatttgtgacatcgtggacagaaaaggccgcggcactaacagctatggcttcaaggcatggcaagcaacatggagcactgttatggccaacctcatcgacaaggtcaatttccccgagttggacccttcaaacctgacactgtttcgccctccagaaaagaatctgtcggccgagcgattgcagccgtgggagcttcttcatcattctggatattggtatcgaacggctgctcatcatctgctcgaccgccggaagctcgccctcttgatttccgaggatcaccgcaagcctccagagcgctcggcccaagctggaaactctgccaaggcgtacagttacgatacttatctatgtcccgagccatatgaagagtatccgctcgaaggggcgggcgtaaatcacgcccagctcatttacaatcatctgatgctcgcgcgagcagaatttcagaaacggcggcaaacgcgagtagccatggaactgacactcagctgctgcagggaattagacaagatgcgcaagtggcaacagctcgttgaacttcttacgccgatatggagagataaagcattccgatcagaaacatggtcggatgtcatggaatcagtaagctggacgctcagaaatgcggcagtcaagaccggtcaaaaggatctgattgtggctatagattgggagctcatgaaccggcgattcaccaaacgcgaaaattggcattatgatgtgctgaaatcactagagggaatccccgtagacgagccactagccatccatcttgacaatagcagttcaacatcagccttgaccgctgagttcaccttcaaaaacaaagaaggaaaagctggcgaaacttgtcctgttcagctagagctgaagtatgatgcaatccctagcgccgctccgttacctttgcagtttatcgatgtgcatttcgaaggcggcatcaggactttacgtttggagcatgatgaaaatagcacaacacagacaacgatcactgacctcgtacacgtgccactcaaagaaacggtcatcgaaaatgacgatagctctagcaatgcttcggactcggaccaacatcagccagtttccacgaggcttgaaggagcgcacagtctgacgatgtctccgggacagacgcgtgtcttcgagatggatatccccttgagagaagcaggagatgcccaagcggtctcggtacaagccactatcgatgccaagacatttgtgctcaaatataccatgaagcttgattcctttatacagcatagtcgatggcacacaagcccatcctccgcaagacagttccacagatctgatccacgaagcgttcacatactaccgaggcccccgaaaatgcaaatagaggcacaagagctgctggagcagtactacgccaacgaaaaaatccagcttgatcttaatataatcaatcaggaagacagcgaggctgttgcaagaatggaggtcgtcacaagtggtagtgtcagaccaaagcatacgattcgtcttgccgatggtgaacccgcttcaggaccacttagcatagattcgattaaggcgtctgaagcaacgaaggctgtgatcagttttgaccccatcgatgcgcctaccgaggtggacgtgaccgtcaaaatatcgtatcatcttgtcactgatccatcgacacctattgtccaagaagcgtctttccacctccacgtcgtctctccattcgaatatagctacgagcttcaaccaagattacactcagagtggccgagtctatttaacacggataatatccaagactcttcccacgaagatggcacttcgtcaagacctcgcggactagcacagaagtgggctctggtcacacgctacgcatcgtttgcccatgaagacgtctcggtactggatctcgacatccaagttgtcgcaacgcaaaacaatgtgagctgcacagctatcaagacgcagcccctaccgcccagcggacagactctcagtcccaagacgatgcaagaagccgagttccatctcatcgcgcagaaattcagtctcgacgatcgatcccctgcttctgccgatctggcgttcatcattaaatggcgtcgggccagcgcctcatccgatactattaacataaccacactccctctcccacgacacttcatcaccactgcagaacctcgcgtcctggcctcaatatcctactcctcgtcgccaccaccatccccagacccttctaccatgccttcatctcaacctccacaattaatcttcctcgacctgacaatcgagaacccgtcttcgcatttcttgactttcggtataacgatggaccccagcgatgagtttgcgttctccggagcgaagatcacgacgctgaatgtactgccgctggcgagacgcagcctgacgtataggattgtgccgatggtggatgggaagtggattcgaccgatggttacggtgagggataagtattttcagaaggtactcaagattttaccgacggagggggttaagggcgataaggagggggtgctgctttgggttccgagtgttgaggatggagagccgagtgactag

SEQ ID NO: 3173 - protein, 1233 aa, Muscodor strobelii
  misc_feature: SGI Peptide ID NO. 560709
  misc_feature (215)..(1228): NCBI GI: 154303999 Blast Desc: BC1G_09635 [Botryotinia fuckeliana B05.10] gi|150854270|gb|EDN29462.1| BC1G_09635 [Botryotinia fuckeliana B05.10]
  misc_feature (191)..(1228): NCBI GI: 156030647 Blast Desc: SS1G_14419 [Sclerotinia sclerotiorum 1980] gi|154700810|gb|EDO00549.1| SS1G_14419 [Sclerotinia sclerotiorum 1980]
  misc_feature (243)..(1230): NCBI GI: 116202195 Blast Desc: CHGG_08982 [Chaetomium globosum CBS 148.51] gi|88177500|gb|EAQ84968.1| CHGG_08982 [Chaetomium globosum CBS 148.51]
  misc_feature (1)..(1223): NCBI GI: 225678269 Blast Desc: conserved [Paracoccidioides brasiliensis Pb03]
  misc_feature (1)..(1223): NCBI GI: 145239059 Blast Desc: An08g00580 [Aspergillus niger] gi|134076679|emb|CAK45210.1| protein product [Aspergillus niger]
  misc_feature (1)..(1222): NCBI GI: 258568620 Blast Desc: [Uncinocarpus reesii 1704] gi|237906500|gb|EEP80901.1| [Uncinocarpus reesii 1704]
  misc_feature (1)..(1223): NCBI GI: 119496169 Blast Desc: NFIA_016570 [Neosartorya fischeri NRRL 181] gi|119413020|gb|EAW22961.1| conserved [Neosartorya fischeri NRRL 181]
  misc_feature (1)..(1221): NCBI GI: 119184807 Blast Desc: CIMG_07161 [Coccidioides immitis RS]
  misc_feature (1)..(1223): NCBI GI: 239609876 Blast Desc: conserved [Ajellomyces dermatitidis ER-3]
  misc_feature (1)..(1221): NCBI GI: 240109989 Blast Desc: CPC735_034940 [Coccidioides posadasii C735 delta SOWgp]
MDAYPPSSLDHNVPLLAVSGLGPSRNSQLLTDPELKERGILVRSELPPVQGKEAKAVLRFIQDADAASLPWATRDTNRRHKFKIKIIGRDFLLPPRRAKLPDDLDDAPASAVVLHSPFSPLSPGSTLYPDGLIDVRWIQKHQEQIPSICLCFYELTSDPTLATLQDNKLKTDINAIKIAISQSGYRCRLAVVILSDQSPSGVAQFQERLENIRRSTGLDPKASLFVMPTRRPDAELETAVGNVLNAIYDQAVDYYRDLGRHSRKKRGRGIAPPPTVPPTTGTSHTLSLQDWNVRYDFKTAVFAEFRQEFDAALRSYEQAYETLLGADVLELIPAWNSRFNDARLLADILAIRALKCLLLSGQSTAAVRRWQAHHDRICDIVDRKGRGTNSYGFKAWQATWSTVMANLIDKVNFPELDPSNLTLFRPPEKNLSAERLQPWELLHHSGYWYRTAAHHLLDRRKLALLISEDHRKPPERSAQAGNSAKAYSYDTYLCPEPYEEYPLEGAGVNHAQLIYNHLMLARAEFQKRRQTRVAMELTLSCCRELDKMRKWQQLVELLTPIWRDKAFRSETWSDVMESVSWTLRNAAVKTGQKDLIVAIDWELMNRRFTKRENWHYDVLKSLEGIPVDEPLAIHLDNSSSTSALTAEFTFKNKEGKAGETCPVQLELKYDAIPSAAPLPLQFIDVHFEGGIRTLRLEHDENSTTQTTITDLVHVPLKETVIENDDSSSNASDSDQHQPVSTRLEGAHSLTMSPGQTRVFEMDIPLREAGDAQAVSVQATIDAKTFVLKYTMKLDSFIQHSRWHTSPSSARQFHRSDPRSVHILPRPPKMQIEAQELLEQYYANEKIQLDLNIINQEDSEAVARMEVVTSGSVRPKHTIRLADGEPASGPLSIDSIKASEATKAVISFDPIDAPTEVDVTVKISYHLVTDPSTPIVQEASFHLHVVSPFEYSYELQPRLHSEWPSLFNTDNIQDSSHEDGTSSRPRGLAQKWALVTRYASFAHEDVSVLDLDIQVVATQNNVSCTAIKTQPLPPSGQTLSPKTMQEAEFHLIAQKFSLDDRSPASADLAFIIKWRRASASSDTINITTLPLPRHFITTAEPRVLASISYSSSPPPSPDPSTMPSSQPPQLIFLDLTIENPSSHFLTFGITMDPSDEFAFSGAKITTLNVLPLARRSLTYRIVPMVDGKWIRPMVTVRDKYFQKVLKILPTEGVKGDKEGVLLWVPSVEDGEPSD

SEQ ID NO: 3174 - DNA, 4447 bp, Muscodor strobelii
  misc_feature: SGI EST ID NO. CUFF.7883.1
  misc_feature: Variant of the nucleotide sequence at SEQ ID NO 3172
ttttggacccctgacctggggatcaattagcccaaggttcctggtgccaggtgaggtcactgcagcccgccgcccactcccaaatcacatggattagagccgacgacaggaagcaacaaccagaaaaatgcagtgtagattaggtaccttccaatcttcaagccgtagcgatgcaagttgtgtgagtggtagtcctaggtacttactctacagtcaatgacagattataccacggcttgagtcgaatcgtcttttgcccactcatggccgccttgggcacgaaattatagctccatagcttcacgaatagcttcaatcgcatggcttaaatcacgtacctgtccaattttggtgtgcattcgcatcacatctgttgtctccctccccgcgcatttgcaattcttgggaagagcagagatatggatgcatatcctccgtccagtctggaccacaatgtccccctcctcgccgtctccggcctaggccccagccggaacagccagctcttgaccgacccggagctcaaggagcgcggcatcctcgtccgctctgaactgcctcccgtccaaggcaaagaggcaaaggccgtgctccgcttcatacaggatgccgatgccgcgagcctgccctgggccacccgcgacaccaacaggagacacaagttcaagatcaagatcatcgggagggacttcctgctacctccgcgccgtgccaagctgccagacgatttggatgatgctccagcttctgccgtcgtcctacactcgcccttctccccgctcagccccggctcgacgttgtacccggatggcctcatagatgtccgctggatccagaagcaccaagaacagatccccagcatatgtctgtgcttctacgagctgacctccgacccgaccctcgccactctgcaagacaacaagctcaagacagacatcaatgccatcaagattgccatcagccagtccggctacaggtgccgcttggctgtcgtcatcctcagcgaccagtcccccagtggcgtcgctcagttccaggaacgactagaaaacatacggaggagcactggtctggatcccaaagcctctcttttcgtcatgcccacgaggcggcccgacgcggagctggaaactgccgtgggcaatgtcctcaacgccatctacgatcaagctgtcgactactatcgcgatctcggacgtcactcgcgtaagaagcgtggacggggtattgcaccgccgcccacggttcctcccacaaccggcacctctcacactctgtctctccaggactggaatgtccgttacgacttcaagaccgccgtctttgccgagtttcgccaagagtttgacgccgccttgcggtcatatgaacaggcatacgaaacattgctgggagctgatgttttggagctcatcccagcctggaactcgagattcaacgatgcccgacttttggccgatatactagccatcagagcacttaaatgtctactactgagtgggcagagcactgcggccgtgcggcgatggcaagcccaccacgacaggatttgtgacatcgtggacagaaaaggccgcggcactaacagctatggcttcaaggcatggcaagcaacatggagcactgttatggccaacctcatcgacaaggtcaatttccccgagttggacccttcaaacctgacactgtttcgccctccagaaaagaatctgtcggccgagcgattgcagccgtgggagcttcttcatcattctggatattggtatcgaacggctgctcatcatctgctcgaccgccggaagctcgccctcttgatttccgaggatcaccgcaagcctccagagcgctcggcccaagctggaaactctgccaaggcgtacagttacgatacttatctatgtcccgagccatatgaagagtatccgctcgaaggggcgggcgtaaatcacgcccagctcatttacaatcatctgatgctcgcgcgagcagaatttcagaaacggcggcaaacgcgagtagccatggaactgacactcagctgctgcagggaattagacaagatgcgcaagtggcaacagctcgttgaacttcttacgccgatatggagagataaagcattccgatcagaaacatggtcggatgtcatggaatcagtaagctggacgctcagaaatgcggcagtcaagaccggtcaaaaggatctgattgtggctatagattgggagctcatgaaccggcgattcaccaaacgcgaaaattggcattatgatgtgctgaaatcactagagggaatccccgtagacgagccactagccatccatcttgacaatagcagttcaacatcagccttgaccgctgagttcaccttcaaaaacaaagaaggaaaagctggcgaaacttgtcctgttcagctagagctgaagtatgatgcaatccctagcgccgctccgttacctttgcagtttatcgatgtgcatttcgaaggcggcatcaggactttacgtttggagcatgatgaaaatagcacaacacagacaacgatcactgacctcgtacacgtgccactcaaagaaacggtcatcgaaaatgacgatagctctagcaatgcttcggactcggaccaacatcagccagtttccacgaggcttgaaggagcgcacagtctgacgatgtctccgggacagacgcgtgtcttcgagatggatatccccttgagagaagcaggagatgcccaagcggtctcggtacaagccactatcgatgccaagacatttgtgctcaaatataccatgaagcttgattcctttatacagcatagtcgatggcacacaagcccatcctccgcaagacagttccacagatctgatccacgaagcgttcacatactaccgaggcccccgaaaatgcaaatagaggcacaagagctgctggagcagtactacgccaacgaaaaaatccagcttgatcttaatataatcaatcaggaagacagcgaggctgttgcaagaatggaggtcgtcacaagtggtagtgtcagaccaaagcatacgattcgtcttgccgatggtgaacccgcttcaggaccacttagcatagattcgattaaggcgtctgaagcaacgaaggctgtgatcagttttgaccccatcgatgcgcctaccgaggtggacgtgaccgtcaaaatatcgtatcatcttgtcactgatccatcgacacctattgtccaagaagcgtctttccacctccacgtcgtctctccattcgaatatagctacgagcttcaaccaagattacactcagagtggccgagtctatttaacacggataatatccaagactcttcccacgaagatggcacttcgtcaagacctcgcggactagcacagaagtgggctctggtcacacgctacgcatcgtttgcccatgaagacgtctcggtactggatctcgacatccaagttgtcgcaacgcaaaacaatgtgagctgcacagctatcaagacgcagcccctaccgcccagcggacagactctcagtcccaagacgatgcaagaagccgagttccatctcatcgcgcagaaattcagtctcgacgatcgatcccctgcttctgccgatctggcgttcatcattaaatggcgtcgggccagcgcctcatccgatactattaacataaccacactccctctcccacgacacttcatcaccactgcagaacctcgcgtcctggcctcaatatcctactcctcgtcgccaccaccatccccagacccttctaccatgccttcatctcaacctccacaattaatcttcctcgacctgacaatcgagaacccgtcttcgcatttcttgactttcggtataacgatggaccccagcgatgagtttgcgttctccggagcgaagatcacgacgctgaatgtactgccgctggcgagacgcagcctgacgtataggattgtgccgatggtggatgggaagtggattcgaccgatggttacggtgagggataagtattttcagaaggtactcaagattttaccgacggagggggttaagggcgataaggagggggtgctgctttgggttccgagtgttgaggatggagagccgagtgactaggagacggggcttgaggcacgaattggaaagagtggtgtgtatgatgatagatgcggtgttgggtagatggcttgtcttatgtgtcttagggggttgggtatgagatgaattggtgttcgagagtagtgtaaagaatgagctacatgtctgacgattccgccggtcctcagtgatgcttcaggtgagctgcacgtcgcgtacatctcgagcttccagtctgtttccccgactggacagtacagaaagatgatagtagagtagaaattcttaagataaggcaggcattgattattcattcagtggcacctatctacctacctacccct

SEQ ID NO: 3175 - DNA, 1185 bp, Muscodor strobelii
  misc_feature: SGI cDNA ID NO. 560710
  misc_feature: Encodes the peptide sequence at SEQ ID NO 3176
atgcaaggcttcaacatgggccggtacgtgccgccggagcacgaaggcgtcctctccgccaacaccgcctcctcaaagggccacgccctcggcgcacgagcgcgcaaactaaaaaccgagggtatcctaaccgtccgtttcgaattgcccttcgcagtctggtgtagcacctgtcccaagcccaccatcatcggtcaaggcgtacgcttcaacgcggagaagaagaaaatcgggaactactactcaacgccgatcttcagttttcgaatccgacacacagaatgtggtggtgcgttggagatcaggacagatccacagaatgcggagtatgtcgtccatgagggtgggaagagaagagatacgggggatgagaaagatgacagtctagtcacgcactctgggttgatgagtattgaggagtttgtagccggggagagagaggagaagaggaaggatgcttttgcgcatttggagaagactattgaggataggggtgtgcttattgagcgcagtcaccgcattacggagctggaggatgcgagtgcgagggcgtgggatgatccttatgcactgaataggaagctgagagctacgtttcgcgaggggaggaaggagagggagagagaggcgaaggggacggaggagttgagggataggatgagtctgggaattgagctcttaccgggcacggaggaagacgttaggagggcgagacttgtggactttggtgttgatgcggcggttgagggtttgggaggtgggagggataaggcgcttgtgaagccgcttttctctacttctacttctgcatcggccttgaaatccaataccaaagacgaaaagacgccgcaaaagaagcgactcaaatcagaagtcaaagcgtcgcagacacgcacctcgctcgcctcggagatcgtgggtaatacacgagcgtctcacgatccgttcctcgcctcttttggtgcgaattctgcttcttcaagcggcccctcgatggtgaagtcaatacaagggatcaaacggaggagggcagacgatcgttgctcgtcagatataagaccgagacaggaaatggacaagatggaagaaggagaaaaagaagaggagaccggtctcaggaacgctggcgaagcgaacggacttgaggctactactgcgatactggtagaatacgactcggattag

SEQ ID NO: 3176 - protein, 394 aa, Muscodor strobelii
  misc_feature: SGI Peptide ID NO. 560710
  misc_feature (6)..(347): Pfam Id: PF04502 Pfam Desc: Family of function (DUF572)
  misc_feature (28)..(239): Pfam Id: PF04502 Pfam Desc: Family of function (DUF572)
  misc_feature (1)..(394): NCBI GI: 85090767 Blast Desc: NCU05961 [Neurospora crassa OR74A] gi|28919948|gb|EAA29339.1| conserved [Neurospora crassa OR74A]
  misc_feature (1)..(394): NCBI GI: 46134931 Blast Desc: FG09314.1 [Gibberella zeae PH-1]
  misc_feature (6)..(344): NCBI GI: 154292640 Blast Desc: BC1G_14646 [Botryotinia fuckeliana B05.10] gi|150845860|gb|EDN21053.1| BC1G_14646 [Botryotinia fuckeliana B05.10]
  misc_feature (1)..(343): NCBI GI: 256727712 Blast Desc: NECHADRAFT_105923 [Nectria haematococca mpVI 77-13-4]
  misc_feature (1)..(317): NCBI GI: 212531461 Blast Desc: DUF455 domain protein [Penicillium marneffei ATCC 18224] gi|210071251|gb|EEA25340.1| DUF455 domain protein [Penicillium marneffei ATCC 18224]
  misc_feature (6)..(345): NCBI GI: 156060297 Blast Desc: SS1G_02287 [Sclerotinia sclerotiorum 1980] gi|154699695|gb|EDN99433.1| SS1G_02287 [Sclerotinia sclerotiorum 1980]
  misc_feature (1)..(394): NCBI GI: 242772991 Blast Desc: DUF455 domain protein [Talaromyces stipitatus ATCC 10500] gi|218721767|gb|EED21185.1| DUF455 domain protein [Talaromyces stipitatus ATCC 10500]
  misc_feature (1)..(321): NCBI GI: 255932947 Blast Desc: Pc12g11260 [Penicillium chrysogenum Wisconsin 54-1255] gi|211582563|emb|CAP80753.1| Pc12g11260 [Penicillium chrysogenum Wisconsin 54-1255]
  misc_feature (1)..(353): NCBI GI: 169769142 Blast Desc: [Aspergillus oryzae RIB40] gi|83766899|dbj|BAE57039.1| protein product [Aspergillus oryzae]
  misc_feature (1)..(394): NCBI GI: 116202395 Blast Desc: CHGG_09082 [Chaetomium globosum CBS 148.51] gi|88177600|gb|EAQ85068.1| CHGG_09082 [Chaetomium globosum CBS 148.51]
MQGFNMGRYVPPEHEGVLSANTASSKGHALGARARKLKTEGILTVRFELPFAVWCSTCPKPTIIGQGVRFNAEKKKIGNYYSTPIFSFRIRHTECGGALEIRTDPQNAEYVVHEGGKRRDTGDEKDDSLVTHSGLMSIEEFVAGEREEKRKDAFAHLEKTIEDRGVLIERSHRITELEDASARAWDDPYALNRKLRATFREGRKEREREAKGTEELRDRMSLGIELLPGTEEDVRRARLVDFGVDAAVEGLGGGRDKALVKPLFSTSTSASALKSNTKDEKTPQKKRLKSEVKASQTRTSLASEIVGNTRASHDPFLASFGANSASSSGPSMVKSIQGIKRRRADDRCSSDIRPRQEMDKMEEGEKEEETGLRNAGEANGLEATTAILVEYDSD

SEQ ID NO: 3177 - DNA, 1773 bp, Muscodor strobelii
  misc_feature: SGI EST ID NO. CUFF.7880.0
  misc_feature: Variant of the nucleotide sequence at SEQ ID NO 3175
agtcggtgttgataccagtgggctggtaggctgcaggtaacattgaagctgccaggtaacaagctggaaacatggacctcaaggttgtcgcactaagccccaccattagcctaacgtcttgcatttcttggaatgcgtcacagcttcgactattcaacgacctcttgcgaacaagcctcgggccacggtcagcggcgacgtctgaccatacgactgcaatacacgagctaaatgaccaacagcatctgcgcctaggctctcacctcggcaacagcgccagaacgagccgcccaacctcatcaccgccgtgaatccacgacctacgctttgcgcaaatcgcaagaagcgccctctccaaaccgcctgccttcctacccttgtcccagtcgcgctgaccagcgcaccccagccgccataatgcaaggcttcaacatgggccggtacgtgccgccggagcacgaaggcgtcctctccgccaacaccgcctcctcaaagggccacgccctcggcgcacgagcgcgcaaactaaaaaccgagggtatcctaaccgtccgtttcgaattgcccttcgcagtctggtgtagcacctgtcccaagcccaccatcatcggtcaaggcgtacgcttcaacgcggagaagaagaaaatcgggaactactactcaacgccgatcttcagttttcgaatccgacacacagaatgtggtggtgcgttggagatcaggacagatccacagaatgcggagtatgtcgtccatgagggtgggaagagaagagatacgggggatgagaaagatgacagtctagtcacgcactctgggttgatgagtattgaggagtttgtagccggggagagagaggagaagaggaaggatgcttttgcgcatttggagaagactattgaggataggggtgtgcttattgagcgcagtcaccgcattacggagctggaggatgcgagtgcgagggcgtgggatgatccttatgcactgaataggaagctgagagctacgtttcgcgaggggaggaaggagagggagagagaggcgaaggggacggaggagttgagggataggatgagtctgggaattgagctcttaccgggcacggaggaagacgttaggagggcgagacttgtggactttggtgttgatgcggcggttgagggtttgggaggtgggagggataaggcgcttgtgaagccgcttttctctacttctacttctgcatcggccttgaaatccaataccaaagacgaaaagacgccgcaaaagaagcgactcaaatcagaagtcaaagcgtcgcagacacgcacctcgctcgcctcggagatcgtgggtaatacacgagcgtctcacgatccgttcctcgcctcttttggtgcgaattctgcttcttcaagcggcccctcgatggtgaagtcaatacaagggatcaaacggaggagggcagacgatcgttgctcgtcagatataagaccgagacaggaaatggacaagatggaagaaggagaaaaagaagaggagaccggtctcaggaacgctggcgaagcgaacggacttgaggctactactgcgatactggtagaatacgactcggattaggtcctcatgatcaacgactacttacatacgagcatttacggcgtttttgtgatcataatcacaaggggaaatatgcaatttttatagacaggcaggcagagatacccataacatagcataacatagcataacatagcataacatcgtcgacagttttcatctcattctctc

SEQ ID NO: 3178 - DNA, 882 bp, Muscodor strobelii
  misc_feature: SGI cDNA ID NO. 560711
  misc_feature: Reduced expression when VOC is produced
  misc_feature: Encodes the peptide sequence at SEQ ID NO 3179
atgaatgaagaacgccggaggctactaaataagccaatctacattgccatacccatcctcatcggacttctcttttcacgctcgccattcttcatgtcgataggtccgccagcagaggccaagccgtgggctgacagcccgataagtctcatcaccacaccacaatatgagacgaaacaaacagatatcttcacaacgggagctacgcacatggcattgttgcacaactccatcttccggggctacaattctatctaccaacaagctacccatattaaggatatcgatgtcaacgacttcatcggatactcgttgacatggcataaattcgtcatttcgcaccacgacgatgaggagcagaatttatttacgaaagtcgaggaagtgttgaacgacaagactgtatttgaggaaacgcataaagagcatcaagccttcctccccggcctagcagagttcgaaaaatacctgaagaccgtctccgccgcacccgcaacctactcgggcaccgaactccagcgcatcatgaaatccttcgaagagccattctcctctcacttccacagcgagatccgcaccatctccgctctctccaagcacccgaatgcgcccaaacccggatcagaagaggaagcagcagcgtccctcctattcaagacgtggggcaagaagacagtcacgaaagcagggacatttgacgtcgtaccgtttttcctgctgaacctcgatgggacgggcgaggatggaatgtgggagaactggccgccgatcccggcaccgatcaaatggggtctggtgaatatcggtggtgcatatcataaccggtggtggaagtttgctagctgtgcgaatgggaagcctaagcaactttatgctgtctag

SEQ ID NO: 3179 - protein, 293 aa, Muscodor strobelii
  misc_feature: SGI Peptide ID NO. 560711
  misc_feature (13)..(292): NCBI GI: 171695548 Blast Desc: protein product [Podospora anserina] gi|170948016|emb|CAP60180.1| protein product [Podospora anserina]
  misc_feature (38)..(293): NCBI GI: 164428650 Blast Desc: NCU00867 [Neurospora crassa OR74A] gi|157072229|gb|EAA35547.2| conserved [Neurospora crassa OR74A]
  misc_feature (13)..(293): NCBI GI: 261361330 Blast Desc: conserved [Verticillium albo-atrum VaMs.102]
  misc_feature (6)..(293): NCBI GI: 256734785 Blast Desc: [Nectria haematococca mpVI 77-13-4]
  misc_feature (6)..(275): NCBI GI: 46107772 Blast Desc: FG00769.1 [Gibberella zeae PH-1]
  misc_feature (71)..(292): NCBI GI: 116181340 Blast Desc: CHGG_01298 [Chaetomium globosum CBS 148.51] gi|88185595|gb|EAQ93063.1| CHGG_01298 [Chaetomium globosum CBS 148.51]
  misc_feature (32)..(292): NCBI GI: 242808174 Blast Desc: conserved [Talaromyces stipitatus ATCC 10500] gi|218715733|gb|EED15155.1| conserved [Talaromyces stipitatus ATCC 10500]
  misc_feature (43)..(292): NCBI GI: 212537829 Blast Desc: conserved [Penicillium marneffei ATCC 18224] gi|210068812|gb|EEA22903.1| conserved [Penicillium marneffei ATCC 18224]
  misc_feature (43)..(290): NCBI GI: 154279068 Blast Desc: [Ajellomyces capsulatus NAm1] gi|150412290|gb|EDN07677.1| [Ajellomyces capsulatus NAm1]
  misc_feature (43)..(290): NCBI GI: 225562331 Blast Desc: hemerythrin HHE cation binding domain-containing protein [Ajellomyces capsulatus G186AR]
  misc_feature: Useful for introducing or modulating the production of volatile compounds
MNEERRRLLNKPIYIAIPILIGLLFSRSPFFMSIGPPAEAKPWADSPISLITTPQYETKQTDIFTTGATHMALLHNSIFRGYNSIYQQATHIKDIDVNDFIGYSLTWHKFVISHHDDEEQNLFTKVEEVLNDKTVFEETHKEHQAFLPGLAEFEKYLKTVSAAPATYSGTELQRIMKSFEEPFSSHFHSEIRTISALSKHPNAPKPGSEEEAAASLLFKTWGKKTVTKAGTFDVVPFFLLNLDGTGEDGMWENWPPIPAPIKWGLVNIGGAYHNRWWKFASCANGKPKQLYAV

SEQ ID NO: 3180 - DNA, 1384 bp, Muscodor strobelii
  misc_feature: SGI EST ID NO. CUFF.7932.0
  misc_feature: Variant of the nucleotide sequence at SEQ ID NO 3178
tgcaactaagggcaagctccgtgaaacttagctgtcagtggtatgacctcgcatgatatacaaaaattctgtctgatttgaccaatccatcgacaacctttgaagcaacccgggcttcccctcattgtgtcttttaaaagagagaacccctcttatcccgctactgaacattcaaagtcgtcgccatgaatgaagaacgccggaggctactaaataagccaatctacattgccatacccatcctcatcggacttctcttttcacgctcgccattcttcatgtcgataggtccgccagcagaggccaagccgtgggctgacagcccgataagtctcatcaccacaccacaatatgagacgaaacaaacagatatcttcacaacgggagctacgcacatggcattgttgcacaactccatcttccggggctacaattctatctaccaacaagctacccatattaaggatatcgatgtcaacgacttcatcggatactcgttgacatggcataaattcgtcatttcgcaccacgacgatgaggagcagaatttatttacgaaagtcgaggaagtgttgaacgacaagactgtatttgaggaaacgcataaagagcatcaagccttcctccccggcctagcagagttcgaaaaatacctgaagaccgtctccgccgcacccgcaacctactcgggcaccgaactccagcgcatcatgaaatccttcgaagagccattctcctctcacttccacagcgagatccgcaccatctccgctctctccaagcacccgaatgcgcccaaacccggatcagaagaggaagcagcagcgtccctcctattcaagacgtggggcaagaagacagtcacgaaagcagggacatttgacgtcgtaccgtttttcctgctgaacctcgatgggacgggcgaggatggaatgtgggagaactggccgccgatcccggcaccgatcaaatggggtctggtgaatatcggtggtgcatatcataaccggtggtggaagtttgctagctgtgcgaatgggaagcctaagcaactttatgctgtctaggcgtgaggaattggtagagaataagatgaagagggtgagaggcgagagggaagtctaagtacatatgacgaacatgttgaaggtgggtatgttcgttgtctattatcacggcaaagcgatgggcgtttgttcggataggcgtggattcggaggtcaaattgatcaactcaatgttttatctaccagggatcggagtctggctgttcgtggagctatcacaagattgcagcaattgtaccattctggcaacattttaggataagtggcactgtctgtttgtcgaaacgacaaaataaaactctacatttacaagtaca

SEQ ID NO: 3181 - DNA, 1467 bp, Muscodor strobelii
  misc_feature: SGI cDNA ID NO. 560712
  misc_feature: Elevated expression when VOC is produced
  misc_feature: Encodes the peptide sequence at SEQ ID NO 3182
atgaaccctactaagatcatcccgagcgatgatgacggcggtttgggctcgagtgtaagccacggggctgcagaaaatagacctgagtccgtagagtctgtccgctgtgatgttgattctcatgggaatactggggcgcagccggcatccacaatgtcttcaccttttgatgagactatcactgactacaaatcatctgactctaaacggcgcattttctctactattgaaaacttccgaagttcccacgaagcagacgaagccgtgcttctcgatacattaaccaaaaccgaggcgccgtcgcgagtctcgctcgaaacccgggcttatgagaccactgacttatctcggaggcgcaggttccttcaacacccggttacaatgtatttactgtaccttttgggtattcttggcgccataagccatcatctatactataatagtttagacggtgaaccggccgatgaccagcttaataaactccgctacggtgtcgttttggcgtttgtaagtccgagcaataagattctaaccgcggacgcccttgattcactgtttgctgcgacggatagtttcactgcaatgttcaacatagaagtctacaagcatgctgaagttgctatgctgcttgcgatattcgtttggggaacccctttattacttgtcattacgagtacgactctcaccgtggcccgaccgactgaaaatacgacctgcttgggcatccagacgttgaacttctctcaagaagaaattgaagactggagagcccctacatacatcgatggcgtcccgaagatatcactctctaaatggaacacgacaataaatgactcctcttcggagaacgtgtcgactcattccgagtggttcgactactataatgcttcgcaggaagcatacactcagctagcaagctttgccgtttatagtaaaaagccaatcattcgtgacacacccgtagccgatatttgcggctcaggctggagctgtagttatataatcaagtttattggcccgagttacaaatgtgaagaggtcgccagtggtgtcggttcgcatgttcagtctcttggggaccagaagccgccacaagggttaacaactgatctattacttcccaacggcgactacagttattatgtcgatgctttcggcggcgagtactcagaacaccaatttgacaaagttgattattttggggtacccgaatcgaagcctccttacccaaagaatgcgggagcatggcgtacagaacctgtgatttgggttggatacgcgatgaagatcagcgatgatccgttatcagagaaccacaccataccagggtggagagatttgtttcttccaaaagtgctcgcgtgtgagaactgggaaacggaatataccgttcagttcaatctctcagatgcaggtcaaacaatggaagttaaagatcatcaatatttgcgcaaggtccttaagtag

SEQ ID NO: 3182 - protein, 488 aa, Muscodor strobelii
  misc_feature: SGI Peptide ID NO. 560712
  misc_feature (120)..(487): NCBI GI: 170940117 Blast Desc: protein product [Podospora anserina]
  misc_feature (127)..(487): NCBI GI: 256725671 Blast Desc: NECHADRAFT_42939 [Nectria haematococca mpVI 77-13-4]
  misc_feature (127)..(487): NCBI GI: 46111615 Blast Desc: FG02689.1 [Gibberella zeae PH-1]
  misc_feature (157)..(487): NCBI GI: 261361514 Blast Desc: conserved [Verticillium albo-atrum VaMs.102]
  misc_feature (128)..(487): NCBI GI: 39967501 Blast Desc: MGG_01996 [Magnaporthe grisea 70-15] gi|145012862|gb|EDJ97503.1| MGG_01996 [Magnaporthe grisea 70-15]
  misc_feature (121)..(487): NCBI GI: 256730443 Blast Desc: NECHADRAFT_95095 [Nectria haematococca mpVI 77-13-4]
  misc_feature (128)..(487): NCBI GI: 116196690 Blast Desc: CHGG_04943 [Chaetomium globosum CBS 148.51] gi|88180856|gb|EAQ88324.1| CHGG_04943 [Chaetomium globosum CBS 148.51]
  misc_feature (121)..(487): NCBI GI: 55823919 Blast Desc: Eqi8 [Fusarium heterosporum]
  misc_feature (120)..(487): NCBI GI: 256722021 Blast Desc: NECHADRAFT_51205 [Nectria haematococca mpVI 77-13-4]
  misc_feature (121)..(487): NCBI GI: 171676924 Blast Desc: protein product [Podospora anserina] gi|170936529|emb|CAP61189.1| protein product [Podospora anserina]
  misc_feature: Useful for introducing or modulating the production of volatile compounds
MNPTKIIPSDDDGGLGSSVSHGAAENRPESVESVRCDVDSHGNTGAQPASTMSSPFDETITDYKSSDSKRRIFSTIENFRSSHEADEAVLLDTLTKTEAPSRVSLETRAYETTDLSRRRRFLQHPVTMYLLYLLGILGAISHHLYYNSLDGEPADDQLNKLRYGVVLAFVSPSNKILTADALDSLFAATDSFTAMFNIEVYKHAEVAMLLAIFVWGTPLLLVITSTTLTVARPTENTTCLGIQTLNFSQEEIEDWRAPTYIDGVPKISLSKWNTTINDSSSENVSTHSEWFDYYNASQEAYTQLASFAVYSKKPIIRDTPVADICGSGWSCSYIIKFIGPSYKCEEVASGVGSHVQSLGDQKPPQGLTTDLLLPNGDYSYYVDAFGGEYSEHQFDKVDYFGVPESKPPYPKNAGAWRTEPVIWVGYAMKISDDPLSENHTIPGWRDLFLPKVLACENWETEYTVQFNLSDAGQTMEVKDHQYLRKVLK

SEQ ID NO: 3183 - DNA, 179 bp, Muscodor strobelii
  misc_feature: SGI EST ID NO. CUFF.7908.0
  misc_feature: Variant of the nucleotide sequence at SEQ ID NO 3181
gcggacgcccttgattcactgtttgctgcgacggatagtttcactgcaatgttcaacatagaagtctacaagcatgctgaagttgctatgctgcttgcgatattcgtttggggaacccctttattacttgtcattacgagtacgactctcaccgtggcccgaccgactgaaaatacggt

SEQ ID NO: 3184 - DNA, 1746 bp, Muscodor strobelii
  misc_feature: SGI cDNA ID NO. 560713
  misc_feature: Encodes the peptide sequence at SEQ ID NO 3185
atgggcctcaataacttctccttagcagaagagggagaaggcgagatccgatcgctcgctgaatggtccgccgcacattatgggcgaaccggcaagcccttgcgcattgcggttgacgagggtaattggtggtttagaaacgtgacagaagaggaagatgctcgtatcaagatacaaagccccggttctcacatgaaggagagaaacattatggatcgccttttcatcctcctacggttaaatatccaagttgtactcgtcttcgatgggcccaacaagccacaaaagttagaccgtaggacgccaggtgccgtgaagaagaccaatcttaacgacgcgagagtgaggcttctaattgaccttctgcgttttctcggcgtgccctaccatcgggccccaggtgaggccgaggctgagtgcgttcgcttggaaacgtgcggtatcgtcgacgccgtctggactgatgactctgacgcattccttttcggagcaacgactattgttcaattctacaaggctccaggccgaaaacctaatagtgatagcgaggtcatgatatattgtgctaacaaactgaaacaatcgcgcaccagccttctcatgtgggcgattcttgtgggctgcgactacaccgacggtcttgatcgatttgcaaaagaaagtttcaaagccattcaaaagcatgataaactcgctacagtagccgatcagcttgaaaaggctgcggaagcaagcgacgaggcgtttgaccgtgagtcgtcaaagtggcgtgctatgctgacgcaaattgtgtgtagcatcccgggcagacagaactttcaggcgcccaacaagacgtttccaaacaaacaggccctcaaagcttgcgcccacccgaccgtatctcccgaccacgaaatcaagaattggtgctcgcgccagaactggtctcaacggtatggactagagatggaatcacgatataagttctttttctgtaacttttactcgcgaaagccggaaatctgggttgcgcaggccctcgtccctatccagcttaatgcaatgctacgagaaatcaaaggccagccgggcaaacaactttcagatggcatagttcggagtacggtgattagagagagaaaaggggcgatcacgacaatcaccgtcaaccccttagcagtcatcccggagcttgcatcagaattcccgcaggatctcgtgcgaggaaacggacagaggattttggcaccggcgttcagccctgtggatgtggagatcctagactgcgtatttcgacacggcttgccagaaagtgtctatcagagacttatagaaaacttacaaaagaaccttgaagcagggaaagaggcaaaagcgaatgcgaagcggaagaagacgcttttgaaaggaggcaatgaagattcgactccgaagcgaggacgtggcaggccccggaaggacgcgggccagaacgacgcagcctcaacgagcggtcagaagagatctgcagacaacggagacgagtcacagcgagcacaaagccggcgacgaaaggaagatgtccagcagagcggccttgcgcgcagtgaccccgctgtattccgaggcgtacagaatcaggctgtgaaccgaggactaaaccgagagtccggcacaacatcacaaggagtctcccagcaggagaagacgagttttgttaaagcttcagacgatctacgtccccaattcaagatgcctgaagatcttccagactgggatgattga

SEQ ID NO: 3185 - protein, 581 aa, Muscodor strobelii
  misc_feature: SGI Peptide ID NO. 560713
  misc_feature (123)..(213): Pfam Id: PF00867 Pfam Desc: XPG I-region
  misc_feature (19)..(435): NCBI GI: 189198980 Blast Desc: conserved [Pyrenophora tritici-repentis Pt-1C-BFP] gi|187982926|gb|EDU48414.1| conserved [Pyrenophora tritici-repentis Pt-1C-BFP]
  misc_feature (12)..(328): NCBI GI: 239607122 Blast Desc: conserved [Ajellomyces dermatitidis ER-3]
  misc_feature (1)..(165): NCBI GI: 169614377 Blast Desc: SNOG_10329 [Phaeosphaeria nodorum SN15] gi|111061544|gb|EAT82664.1| SNOG_10329 [Phaeosphaeria nodorum SN15]
  misc_feature (12)..(301): NCBI GI: 145233351 Blast Desc: An02g09150 [Aspergillus niger] gi|134056976|emb|CAK44323.1| protein product [Aspergillus niger]
  misc_feature (1)..(210): NCBI GI: 169616754 Blast Desc: SNOG_11552 [Phaeosphaeria nodorum SN15] gi|111060140|gb|EAT81260.1| SNOG_11552 [Phaeosphaeria nodorum SN15]
  misc_feature (12)..(328): NCBI GI: 225560221 Blast Desc: conserved [Ajellomyces capsulatus G186AR]
  misc_feature (12)..(316): NCBI GI: 225681808 Blast Desc: conserved [Paracoccidioides brasiliensis Pb03]
  misc_feature (12)..(316): NCBI GI: 226288989 Blast Desc: conserved [Paracoccidioides brasiliensis Pb18]
  misc_feature (12)..(374): NCBI GI: 67525457 Blast Desc: AN3186.2 [Aspergillus nidulans FGSC A4] gi|40743763|gb|EAA62950.1| AN3186.2 [Aspergillus nidulans FGSC A4] gi|259485857|tpe|CBF83236.1| TPA: Rad2-like endonuclease, A4]
  misc_feature (12)..(328): NCBI GI: 154276716 Blast Desc: [Ajellomyces capsulatus NAm1] gi|150414276|gb|EDN09641.1| [Ajellomyces capsulatus NAm1]
MGLNNFSLAEEGEGEIRSLAEWSAAHYGRTGKPLRIAVDEGNWWFRNVTEEEDARIKIQSPGSHMKERNIMDRLFILLRLNIQVVLVFDGPNKPQKLDRRTPGAVKKTNLNDARVRLLIDLLRFLGVPYHRAPGEAEAECVRLETCGIVDAVWTDDSDAFLFGATTIVQFYKAPGRKPNSDSEVMIYCANKLKQSRTSLLMWAILVGCDYTDGLDRFAKESFKAIQKHDKLATVADQLEKAAEASDEAFDRESSKWRAMLTQIVCSIPGRQNFQAPNKTFPNKQALKACAHPTVSPDHEIKNWCSRQNWSQRYGLEMESRYKFFFCNFYSRKPEIWVAQALVPIQLNAMLREIKGQPGKQLSDGIVRSTVIRERKGAITTITVNPLAVIPELASEFPQDLVRGNGQRILAPAFSPVDVEILDCVFRHGLPESVYQRLIENLQKNLEAGKEAKANAKRKKTLLKGGNEDSTPKRGRGRPRKDAGQNDAASTSGQKRSADNGDESQRAQSRRRKEDVQQSGLARSDPAVFRGVQNQAVNRGLNRESGTTSQGVSQQEKTSFVKASDDLRPQFKMPEDLPDWDD

SEQ ID NO: 3186 - DNA, 2028 bp, Muscodor strobelii
  misc_feature: SGI cDNA ID NO. 560714
  misc_feature: Encodes the peptide sequence at SEQ ID NO 3187
atggcgtcaacgccaagaaacaagttagagaatgatgagttctccttgtccaggtcatgggcaggtaagacccagtcacttgcagaatgctcttcagagcacttcgaacgaactggaaagcctttgcgcatcgctgtcgacgagaaatgctggtggctgaacaagctgtgggctaccgccgcgctcaacaccaagaagaaatttcctcaatctcctgttgaagagacaacaatcatgaaacatatcctgttcgttctccgtttgaatgtgcaacttgtatttattgccgacggtccacacaagcccgagaaaaaagtctcggcaaagaccacgaagtacgatgaagaatgtgtcggtctacttagacgactgctgcaccatctgggagtaccgcagcataccgctcccggtgacgccgaggcagagtgcgctcgccttcagaagcttggggttgttgacgcggtctgggtcgaagattctaatgcccttctattcggggctgaaacgatcatacatttccaccagcctcagagtcgtgaatatctcaatgaacaaactgtcgacactataatgatttaccggctcgaggagctcaaaccgtggatcccaacactcctctccacaaccccgctgcgcgttagtcttctgataagggctattttaattggctcggagtattcagatggtcttgttggatgtagacgagaacactttgctcggatccggaaccatccgtcgtacgtctccctggagcacatgtttgcgatggcagtcgctagtgaggcgccagacgagtggacatctgattggcgcggtctgctagaaagtatcggtaagttttcaatcgccacgacatctccatgcacacctcgaggcgccataaggggtcgaccagccattcagctgtcatgggacgactacggagaggctcgtaaccagtgtgacgaaggtctgggcttaacatccactgacttcgatttcacagtactcgatatctggccgctttgcccatttttagattcgggtgacaactttcccctagaagagtaccgaactcttgccaaaccgattgtgtccacagacgacgtacttttggacctcccgtgcgtccgcgaaggatggatccagtcatatgcacaagatgtgtctgcccgttacgaattcttcaagcatgaattttgccccgcgcaagatagccagcagacttttccaagttggtttgcggacgcttttgctccaatcgagctgaatgctcggttgcgcgacgcaaatgacggaccaggacgcgtgaagaatgcactcgaatatcgaatcaggcccatatcagcgaacgagacggcttcgaaactcgagtgcgctgtgtgggaactcttcccggaatttttttctactatctcgagcgaatacgaggttaggcgatctcagagcatatcgatcgagattcttcgctgtgtggctcaacgtggtttacccgaagacatactcgccaatctccgccggacagaacgacgctcaggaagacgatcagtaagaccaatgacaggaaatgctgctgaaaccgtcaagaagtcaaggagacaacgcggggcatcaggcaatgcaaatagtcagcctgcaaagcggcttcgtcctgagaaaatcgtgccgttatcacacactagagacacaaagacacagcaacgacaaggagtctcgacatctgataatcgtgtccatcagacggtatttgatcctgacattgaggcaaacgtcaagaacacttcgcatgagcaggccgttgtcgatcttgcaagcactgagagacccgaaagcagtccatctgctttcaacttcgccattcccatgagacagaaagcgaatctggatcttgctgaatgttcacatagagcgcatgctagtgaggtgtcagctgaccgtcatcccttcacactccccttcaacctgaggagtgaaccccccttgcagatatctcaatccaccactgctgagaaagggaaaggcgaggagaaaatgagcaagacgacctag

SEQ ID NO: 3187 - protein, 675 aa, Muscodor strobelii
  misc_feature: SGI Peptide ID NO. 560714
  misc_feature (126)..(229): Pfam Id: PF00867 Pfam Desc: XPG I-region
  misc_feature (126)..(173): Pfam Id: PF00867 Pfam Desc: XPG I-region
  misc_feature (27)..(233): NCBI GI: 189198980 Blast Desc: conserved [Pyrenophora tritici-repentis Pt-1C-BFP] gi|187982926|gb|EDU48414.1| conserved [Pyrenophora tritici-repentis Pt-1C-BFP]
  misc_feature (26)..(173): NCBI GI: 156049863 Blast Desc: SS1G_08639 [Sclerotinia sclerotiorum 1980] gi|154693037|gb|EDN92775.1| SS1G_08639 [Sclerotinia sclerotiorum 1980]
  misc_feature (27)..(166): NCBI GI: 169614377 Blast Desc: SNOG_10329 [Phaeosphaeria nodorum SN15] gi|111061544|gb|EAT82664.1| SNOG_10329 [Phaeosphaeria nodorum SN15]
  misc_feature (22)..(173): NCBI GI: 156049867 Blast Desc: SS1G_08641 [Sclerotinia sclerotiorum 1980] gi|154693039|gb|EDN92777.1| SS1G_08641 [Sclerotinia sclerotiorum 1980]
  misc_feature (27)..(233): NCBI GI: 169616754 Blast Desc: SNOG_11552 [Phaeosphaeria nodorum SN15] gi|111060140|gb|EAT81260.1| SNOG_11552 [Phaeosphaeria nodorum SN15]
  misc_feature (22)..(233): NCBI GI: 256729264 Blast Desc: NECHADRAFT_84053 [Nectria haematococca mpVI 77-13-4]
  misc_feature (22)..(233): NCBI GI: 261352954 Blast Desc: conserved [Verticillium albo-atrum VaMs.102]
  misc_feature (21)..(233): NCBI GI: 46117088 Blast Desc: FG04386.1 [Gibberella zeae PH-1]
  misc_feature (91)..(233): NCBI GI: 154309183 Blast Desc: BC1G_07486 [Botryotinia fuckeliana B05.10] gi|150852529|gb|EDN27721.1| BC1G_07486 [Botryotinia fuckeliana B05.10]
  misc_feature (22)..(227): NCBI GI: 238838101 Blast Desc: conserved [Microsporum canis CBS 113480]
MASTPRNKLENDEFSLSRSWAGKTQSLAECSSEHFERTGKPLRIAVDEKCWWLNKLWATAALNTKKKFPQSPVEETTIMKHILFVLRLNVQLVFIADGPHKPEKKVSAKTTKYDEECVGLLRRLLHHLGVPQHTAPGDAEAECARLQKLGVVDAVWVEDSNALLFGAETIIHFHQPQSREYLNEQTVDTIMIYRLEELKPWIPTLLSTTPLRVSLLIRAILIGSEYSDGLVGCRREHFARIRNHPSYVSLEHMFAMAVASEAPDEWTSDWRGLLESIGKFSIATTSPCTPRGAIRGRPAIQLSWDDYGEARNQCDEGLGLTSTDFDFTVLDIWPLCPFLDSGDNFPLEEYRTLAKPIVSTDDVLLDLPCVREGWIQSYAQDVSARYEFFKHEFCPAQDSQQTFPSWFADAFAPIELNARLRDANDGPGRVKNALEYRIRPISANETASKLECAVWELFPEFFSTISSEYEVRRSQSISIEILRCVAQRGLPEDILANLRRTERRSGRRSVRPMTGNAAETVKKSRRQRGASGNANSQPAKRLRPEKIVPLSHTRDTKTQQRQGVSTSDNRVHQTVFDPDIEANVKNTSHEQAVVDLASTERPESSPSAFNFAIPMRQKANLDLAECSHRAHASEVSADRHPFTLPFNLRSEPPLQISQSTTAEKGKGEEKMSKTT

SEQ ID NO: 3188 - DNA, 570 bp, Muscodor strobelii
  misc_feature: SGI cDNA ID NO. 560715
  misc_feature: Encodes the peptide sequence at SEQ ID NO 3189
atgacaagcccacgacgccgcatcgagactgatgtcatgaatgtgagattctcggacaactccgccataagatcacaactcctgacattcctatctaggcaagagttctacgtccggtttaagggtccgacggagacgccttttgagaatggtgtatggaaggtacatgtcgaacttcccgatcagtatccctacaagtctccgagtatcggcttcgtaaaccgcatctttcaccccaacatcgatgagctgtccggctctgtatgcctcgacgtgatcaaccagacctggtccccgatgtttgatatgatcaatatcttcgaggtcttcctgccgcaactcctgcggtatccaaatcctgccgatccactgaacggcgaggctgctgcgctgcttatgcgagaaccgaagtcttacgatgccaaagtcaaggagtacgttcagagatacgcaaccaaggatgcagcagacgatgccggcgccgagagcgaggacgatgatgacatgtcctctgtcgctagcttcaacgacgatgacgatgagcccgccggtcagatggacgacgtataa

SEQ ID NO: 3189 - protein, 189 aa, Muscodor strobelii
  misc_feature: SGI Peptide ID NO. 560715
  misc_feature (7)..(147): Pfam Id: PF00179 Pfam Desc: Ubiquitin-conjugating enzyme
  misc_feature (1)..(189): NCBI GI: 171682296 Blast Desc: protein product [Podospora anserina] gi|170941107|emb|CAP66757.1| protein product [Podospora anserina]
  misc_feature (1)..(189): NCBI GI: 256727136 Blast Desc: [Nectria haematococca mpVI 77-13-4]
  misc_feature (25)..(189): NCBI GI: 46134929 Blast Desc: FG09313.1 [Gibberella zeae PH-1]
  misc_feature (1)..(187): NCBI GI: 261359625 Blast Desc: ubiquitin-conjugating enzyme [Verticillium albo-atrum VaMs.102]
  misc_feature (1)..(189): NCBI GI: 121699546 Blast Desc: ubiquitin-conjugating enzyme h [Aspergillus clavatus NRRL 1] gi|119396197|gb|EAW06629.1| ubiquitin-conjugating enzyme h [Aspergillus clavatus NRRL 1]
  misc_feature (1)..(189): NCBI GI: 85089442 Blast Desc: NCU10046 [Neurospora crassa OR74A] gi|28919243|gb|EAA28717.1| NCU10046 [Neurospora crassa OR74A]
  misc_feature (1)..(189): NCBI GI: 51233246 Blast Desc: ubiquitin-conjugating enzyme type E2 [Aspergillus niger]
  misc_feature (1)..(189): NCBI GI: 255932171 Blast Desc: Pc12g08100 [Penicillium chrysogenum Wisconsin 54-1255] gi|211582261|emb|CAP80437.1| Pc12g08100 [Penicillium chrysogenum Wisconsin 54-1255]
  misc_feature (1)..(189): NCBI GI: 259487105 Blast Desc: TPA: ubiquitin conjugating enzyme Ubc8, (AFU_orthologue; AFUA_6G09160) [Aspergillus nidulans FGSC A4]
  misc_feature (1)..(189): NCBI GI: 145244768 Blast Desc: An11g06900 [Aspergillus niger] gi|134079358|emb|CAK96987.1| protein product [Aspergillus niger]
  misc_feature (1)..(153): SWISSPROT Homolog: EC 6.3.2.19 Ubiquitin--protein ligase
MTSPRRRIETDVMNVRFSDNSAIRSQLLTFLSRQEFYVRFKGPTETPFENGVWKVHVELPDQYPYKSPSIGFVNRIFHPNIDELSGSVCLDVINQTWSPMFDMINIFEVFLPQLLRYPNPADPLNGEAAALLMREPKSYDAKVKEYVQRYATKDAADDAGAESEDDDDMSSVASFNDDDDEPAGQMDDV

SEQ ID NO: 3190 - DNA, 2039 bp, Muscodor strobelii
  misc_feature: SGI EST ID NO. CUFF.8113.2
  misc_feature: Variant of the nucleotide sequence at SEQ ID NO 3188
ctatagtaccttattgattaccaccattcatccgaatcccttcttctttcccttttcgcatagcgacattcaagcagactggtctatttcaacgccttaagaagcaaagattgcgttcccaaaccatttcacataccacctgcctaacttgcacctctgctgttctggcaacgacttccgtttctcacatctccagcgtcacgctactgaccttacaggccttcgagtggggtcctccaaacaccccgccatcgtccaacaactccgtccaacagccaacgtccgctgttcattccgaccaccacgactgcattccaaacgcccaacagcaacaactgcagccgcgatagagccgaagcactttgagaaatacatcaatacacaacaccacaggactgcacattcagtctgtcccatacttaatcctagcccgcgtgctagctatccggacttccagactagccttcgtgcgactaatcgaccttgcgaaccatcttcgatttccaaagctcaagtccgcatacgagtcgatccgccgctgatattctcaccgaaacattgttatccattttcaagtgacgaacaagctgttcaaacgtacattcccacagactcactgcattgggactgtctttcgtcccatccaaggtcatcgctgccatatatatcctgtttgtatagttcgttcgacacagacaagtcattttccaccatgacaagcccacgacgccgcatcgagactgatgtcatgaagtatgcctatacaaacagtttcacctgtgctctttgggctcgagtccacgctgacatcatataggatgtaggctcaacttacaactcttatgccgggctaggaacaattttcactaagtacactaggctcatgagcgactacgaggtcactctggtcaatgacaacagtattgtcccccttccctctctgctacctctgagctatggctaatggttctatgcagtgtgagattctcggacaactccgccataagatcacaactcctgacattcctatctaggcaagagttctacgtccggtttaagggtccgacggagacgccttttgagaatggtgtatggaaggtacatgtcgaacttcccgatcagtatccctacaagtctccgagtatcggcttcgtaaaccgcatctttcaccccaacatcgatgagctgtccggctctgtatgcctcgacgtgatcaaccagacctggtccccgatgtttgatatgatcaatatcttcgaggtcttcctgccgcaactcctgcggtatccaaatcctgccgatccactgaacggcgaggctgctgcgctgcttatgcgagaaccgaagtcttacgatgccaaagtcaaggagtacgttcagagatacgcaaccaaggatgcagcagacgatgccggcgccgagagcgaggacgatgatgacatgtcctctgtcgctagcttcaacgacgatgacgatgagcccgccggtcagatggacgacgtataaccatccccacgaccagtctgtgattttcggagcattgtagatcaggggtgagaatgggcgcctgctgccattatgaacaagtaggcaggcgaatcaggcgttcggaagcataggagcatcttatcatttcatggcaggtgggtgttcgataggttgcgtagtccgtaaatgaataggcggacattgtttgcatagggaaatgcgcgggagcctgaggggaaacaatctccacttcggtgttatatggagtatacctcagcctgatatttcagagttgggggatcgggacggcacaggattgatttacggctgtggccgtattgtatggacacactagcagattcaagagttcacgaaattctattacgacgcttgctaggtgatgtgcgttttctacacgatggtatggttcgtattggttcgtattgagcagtgcgcatttgtgattcggagctggcttcaataatatgtcccgtggcaaccttgactgtgccttggagatacgaatatcggccttaatgacatgaatagtc

SEQ ID NO: 3191 - DNA, 930 bp, Muscodor strobelii
  misc_feature: SGI cDNA ID NO. 560716
  misc_feature: Encodes the peptide sequence at SEQ ID NO 3192
atggctaattggaacgaccttccgcaggagctcaaagacatggtcttcgagttcgtggatctgctcatcgctaacacctcaggcaagcacccccgatccaagctcgtcactgttgccaaagattttcaagacttctttgagcacaataacttcaagtcactcgctttgtcatattccgatgttcgctgggtcaacacacccaacagccctggattccgtcaacgcattggtgtctctctgaagacaaccatagcccggactacccctcactggcctgcgtcagtcaagaaagtcaccctagtccgcaacataggctcggcaagagtttccccttatcctgaccattacatgctcagcgaagtcgaagagagcatgttgcagcgaataggacaattggaagagtatcatgacttcttctacatcaactcgacacgtttgagagctaaaaatgggccatggcatcgtcttacccgactcacagtcacatcgtggtatgcgagagatgaaccggatccatcccgagcgatcaacgacctccttgtccagaacgcgaatattgcgctctccatgcctaacgcgcagtctattgatataatcatctacgacttcttcggcagatgtatcagacccgagaacgcgccatttagacaaatcaagtttgcctatttttcctgtcaaatcagccgcgatgagctcgaaatccgtttccgaagtaactttgactgtccagtcttcggtactgtgatcaatggctggcatgaagcagtccgtgctgccactggcaaagacaggaagctgtctcactcaaccgccaggctcccccagggcctacatctgatgacattcatcgagagtaactggcacgacaagccagacgtcctccatccggctctcctggagtcattgactaccgattgtagatggccttga

SEQ ID NO: 3192 - protein, 309 aa, Muscodor strobelii
  misc_feature: SGI Peptide ID NO. 560716
MANWNDLPQELKDMVFEFVDLLIANTSGKHPRSKLVTVAKDFQDFFEHNNFKSLALSYSDVRWVNTPNSPGFRQRIGVSLKTTIARTTPHWPASVKKVTLVRNIGSARVSPYPDHYMLSEVEESMLQRIGQLEEYHDFFYINSTRLRAKNGPWHRLTRLTVTSWYARDEPDPSRAINDLLVQNANIALSMPNAQSIDIIIYDFFGRCIRPENAPFRQIKFAYFSCQISRDELEIRFRSNFDCPVFGTVINGWHEAVRAATGKDRKLSHSTARLPQGLHLMTFIESNWHDKPDVLHPALLESLTTDCRWP

SEQ ID NO: 3193 - DNA, 1542 bp, Muscodor strobelii
  misc_feature: SGI cDNA ID NO. 560717
  misc_feature: Elevated expression when VOC is produced
  misc_feature: Encodes the peptide sequence at SEQ ID NO 3194
atgcatctcctcgatctacccctcgagctgcttgatcagatattctcagaagccgtcgaagaccggacgttcaaacgtgttatgagactcagattagtgaacaaacattttagatgcttaaccgatgaagccatattcagctcacacatgctggatgagatagctttcggtcaagacctcagagtaaacgcggctgagcatcatgatgatccatggtcgttataccttcggacgtatttgggtcggcgaatctaccaggagcgtaacgcgaagacggtcagagggcagtaccgccgcgtagcagagtacctttggattgccggcagcaaggtcttccctggtcttactttcgacgactgtgtttacgacctaagcggtgtcgcattttttatcaactcgtctttggagacgtcatctctagtgaactcgaaatcacagaaagatgcattcagtcaacccgaattaacaacactctttctcaatgccgtcgtctacatgggtctggagccattcgccaaggcgcttctctccgatgacccgaatgattattggcaatatcccactgttgccgccagtgctaaacccagtatgcgcagacttatcgagatcgctgcattcaaagggcatttgagtctcttacagcacctcgtctatgttgacaagaagatgcttaacgacacatcctcgccaatgagcgcaagcgtagcctcaagtatattacgttatgcctcgattggtcgccacatcgatgttatggagtatgctttagacaacagcgatcttctcaactcccaccttaccacggcaataagtcagaatatcgaaacggccctcggcttcacgcattcgccaaaggtctacagccgacttgcctccattctggagcacggtatgaatccgttcgacgagacgatgcacaaagccctcctcgcccgcatcgacgaagctgctcgtcaatgcaatacggagatggtacgataccatctacgccatggtatcgacctgaacgtcactgagacggagagtaaaaaggaagtcgaatctgatcagaaactggctcaggctcaggctccacctcgaccactcatcggcgctattgaaggcggcagtttcgactcgttagaaatgctgctttggcatggcgccgatccgaatttatatccatctacccaaacgccgctaatggccgcggcacacaaaggcgatctgcaaatggtgcggacgcttgtcgaatacggagcgaacgtaacagttggtacaccaccgccgcttgtagtagcggtacagcaagaaaattcagacgtatttcatttcttggagtctaaaggtgcattgcttgagccacaaacaggagcatgggcaatggcatatgcaagggcgtacgggctggacagcatggtcaatctcctttgtaaacatggtgtcaaacgcgacgatgtagtacatcataccatctcgcaggaagaacaccaaaacgggcggtacttgtttaaggacaaccagtatggcataggggcgtcggaattttgtttacctgattga

SEQ ID NO: 3194 - protein, 513 aa, Muscodor strobelii
  misc_feature: SGI Peptide ID NO. 560717
  misc_feature (389)..(421): Pfam Id: PF00023 Pfam Desc: Ankyrin repeat
  misc_feature (346)..(476): NCBI GI: 39978181 Blast Desc: MGG_06975 [Magnaporthe grisea 70-15] gi|145013449|gb|EDJ98090.1| MGG_06975 [Magnaporthe grisea 70-15]
  misc_feature (201)..(470): NCBI GI: 189199064 Blast Desc: conserved [Pyrenophora tritici-repentis Pt-1C-BFP] gi|187982968|gb|EDU48456.1| conserved [Pyrenophora tritici-repentis Pt-1C-BFP]
  misc_feature (323)..(474): NCBI GI: 225620939 Blast Desc: ankyrin repeat-containing protein [Brachyspira hyodysenteriae WA1] gi|225215759|gb|ACN84493.1| ankyrin repeat-containing protein [Brachyspira hyodysenteriae WA1]
  misc_feature (316)..(474): NCBI GI: 123480489 Blast Desc: ankyrin repeat protein [Trichomonas vaginalis G3] gi|121906205|gb|EAY11119.1| ankyrin repeat protein, [Trichomonas vaginalis G3]
  misc_feature (323)..(484): NCBI GI: 228001646 Blast Desc: ankyrin repeat-containing protein [Brachyspira murdochii DSM 12563] gi|227971766|gb|EEK06419.1| ankyrin repeat-containing protein [Brachyspira murdochii DSM 12563]
  misc_feature (3)..(470): NCBI GI: 156047703 Blast Desc: [Sclerotinia sclerotiorum 1980] gi|154693936|gb|EDN93674.1| [Sclerotinia sclerotiorum 1980]
  misc_feature (239)..(492): NCBI GI: 115748385 Blast Desc: : similar to FLJ00246 protein, partial [Strongylocentrotus purpuratus] gi|115920314|ref|XP_001188096.1| : similar to FLJ00246 protein, partial [Strongylocentrotus
  misc_feature (269)..(476): NCBI GI: 257063583 Blast Desc: ankyrin repeat-containing protein [Slackia heliotrinireducens DSM 20476] gi|256791236|gb|ACV21906.1| ankyrin repeat-containing protein [Slackia heliotrinireducens DSM 20476]
  misc_feature (316)..(475): NCBI GI: 119483910 Blast Desc: Ankyrin repeat protein [Neosartorya fischeri NRRL 181] gi|119410014|gb|EAW19961.1| Ankyrin repeat protein [Neosartorya fischeri NRRL 181]
  misc_feature (204)..(485): NCBI GI: 255580917 Blast Desc: ankyrin repeat-containing protein, [Ricinus communis] gi|223529110|gb|EEF31090.1| ankyrin repeat-containing protein, [Ricinus communis]
  misc_feature: Useful for introducing or modulating the production of volatile compounds
MHLLDLPLELLDQIFSEAVEDRTFKRVMRLRLVNKHFRCLTDEAIFSSHMLDEIAFGQDLRVNAAEHHDDPWSLYLRTYLGRRIYQERNAKTVRGQYRRVAEYLWIAGSKVFPGLTFDDCVYDLSGVAFFINSSLETSSLVNSKSQKDAFSQPELTTLFLNAVVYMGLEPFAKALLSDDPNDYWQYPTVAASAKPSMRRLIEIAAFKGHLSLLQHLVYVDKKMLNDTSSPMSASVASSILRYASIGRHIDVMEYALDNSDLLNSHLTTAISQNIETALGFTHSPKVYSRLASILEHGMNPFDETMHKALLARIDEAARQCNTEMVRYHLRHGIDLNVTETESKKEVESDQKLAQAQAPPRPLIGAIEGGSFDSLEMLLWHGADPNLYPSTQTPLMAAAHKGDLQMVRTLVEYGANVTVGTPPPLVVAVQQENSDVFHFLESKGALLEPQTGAWAMAYARAYGLDSMVNLLCKHGVKRDDVVHHTISQEEHQNGRYLFKDNQYGIGASEFCLPD

SEQ ID NO: 3195 - DNA, 1812 bp, Muscodor strobelii
  misc_feature: SGI EST ID NO. CUFF.7941.0
  misc_feature: Variant of the nucleotide sequence at SEQ ID NO 3193
aatctcggctcgatcctcgcctcctcgaatccctcagaacttcaatatcacctgtataatctagaagagacgaatcatttggtctcttaattctctgtacactgtaacttaatacccactgacacacctacgacttacatccgaagccagcacacaaaatgcatctcctcgatctacccctcgagctgcttgatcagatattctcagaagccgtcgaagaccggacgttcaaacgtgttatgagactcagattagtgaacaaacattttagatgcttaaccgatgaagccatattcagctcacacatgctggatgagatagctttcggtcaagacctcagagtaaacgcggctgagcatcatgatgatccatggtcgttataccttcggacgtatttgggtcggcgaatctaccaggagcgtaacgcgaagacggtcagagggcagtaccgccgcgtagcagagtacctttggattgccggcagcaaggtcttccctggtcttactttcgacgactgtgtttacgacctaagcggtgtcgcattttttatcaactcgtctttggagacgtcatctctagtgaactcgaaatcacagaaagatgcattcagtcaacccgaattaacaacactctttctcaatgccgtcgtctacatgggtctggagccattcgccaaggcgcttctctccgatgacccgaatgattattggcaatatcccactgttgccgccagtgctaaacccagtatgcgcagacttatcgagatcgctgcattcaaagggcatttgagtctcttacagcacctcgtctatgttgacaagaagatgcttaacgacacatcctcgccaatgagcgcaagcgtagcctcaagtatattacgttatgcctcgattggtcgccacatcgatgttatggagtatgctttagacaacagcgatcttctcaactcccaccttaccacggcaataagtcagaatatcgaaacggccctcggcttcacgcattcgccaaaggtctacagccgacttgcctccattctggagcacggtatgaatccgttcgacgagacgatgcacaaagccctcctcgcccgcatcgacgaagctgctcgtcaatgcaatacggagatggtacgataccatctacgccatggtatcgacctgaacgtcactgagacggagagtaaaaaggaagtcgaatctgatcagaaactggctcaggctcaggctccacctcgaccactcatcggcgctattgaaggcggcagtttcgactcgttagaaatgctgctttggcatggcgccgatccgaatttatatccatctacccaaacgccgctaatggccgcggcacacaaaggcgatctgcaaatggtgcggacgcttgtcgaatacggagcgaacgtaacagttggtacaccaccgccgcttgtagtagcggtacagcaagaaaattcagacgtatttcatttcttggagtctaaaggtgcattgcttgagccacaaacaggagcatgggcaatggcatatgcaagggcgtacgggctggacagcatggtcaatctcctttgtaaacatggtgtcaaacgcgacgatgtagtacatcataccatctcgcaggaagaacaccaaaacgggcggtacttgtttaaggacaaccagtatggcataggggcgtcggaattttgtttacctgattgacttcattgaactactagcattgcgcatgggaggcggtataccacatagctccgaggagcttccgatgataccactattttcttaatatgacacacagtttgtccaactcaca

SEQ ID NO: 3196 - DNA, 894 bp, Muscodor strobelii
  misc_feature: SGI cDNA ID NO. 560718
  misc_feature: Reduced expression when VOC is produced
  misc_feature: Encodes the peptide sequence at SEQ ID NO 3197
atggcagatatcgcaagtatcgaggacgatatcaagcaatatcaagaacagcttgacgtcgtgaacgccggtcttcgagacgacgctggaaatgcagagctgctggctctcaagtctgagttagatgatgcgcttgagctgttgaacgagacgcttgctgaactgaagccgaccaaggcacctcccaagcccaaggccgccaccccgccaccaccagttcaggagaagtggtcgcgcgagaaccaccctgccttcaaaaaggctgtccccgtcgaggagaaggaagtcgaccccgctcccgtcaactatcaggtgaacgacaatgtcatggctaagtgggtgtcgggcgacagggccttctacccggctcgcatcacgtccatcactggctcctccacggcgcccatctatgtcgtcaagttcaagagctacgacaacaccgagcagctgcgcgccaaagacattcgacccgtcgcccagaagcgcaaggccgacggtactcccatcaacgccagcactccgttcagcgcccccgcgcaacccccgcctccagcatctacttcgaccaaccctggcgtcatatcggccgccgccagcatcaaccccgagctggctcagaagaacagggaaagtctcgtgaacgacaccggtgacggcaagcccaaggctaagaagatcaaggccaagaaagaactcgaagccggcaagaacaaatggcaggaattcagcaccaagtctaagttcgccaaggccaacaaggccaaaaaggacagcatgttccgaacaccagagggtgtccatggaagagttggattcacgggctccggacaggcgatgcgcaaagatccctcgaggacacgtcatatctaccaagccaatgaggatgtggactaa

SEQ ID NO: 3197 - protein, 297 aa, Muscodor strobelii
  misc_feature: SGI Peptide ID NO. 560718
  misc_feature (1)..(297): NCBI GI: 256733933 Blast Desc: NECHADRAFT_91722 [Nectria haematococca mpVI 77-13-4]
  misc_feature (2)..(297): NCBI GI: 261360737 Blast Desc: conserved [Verticillium albo-atrum VaMs.102]
  misc_feature (3)..(296): NCBI GI: 240105479 Blast Desc: CPC735_050420 [Coccidioides posadasii C735 delta SOWgp]
  misc_feature (1)..(297): NCBI GI: 46128011 Blast Desc: FG08383.1 [Gibberella zeae PH-1]
  misc_feature (2)..(295): NCBI GI: 225681253 Blast Desc: conserved [Paracoccidioides brasiliensis Pb03] gi|226292034|gb|EEH47454.1| conserved [Paracoccidioides brasiliensis Pb18]
  misc_feature (2)..(295): NCBI GI: 212531157 Blast Desc: conserved [Penicillium marneffei ATCC 18224] gi|210071099|gb|EEA25188.1| conserved [Penicillium marneffei ATCC 18224]
  misc_feature (2)..(291): NCBI GI: 242772156 Blast Desc: conserved [Talaromyces stipitatus ATCC 10500] gi|218721603|gb|EED21021.1| conserved [Talaromyces stipitatus ATCC 10500]
  misc_feature (1)..(297): NCBI GI: 154292642 Blast Desc: BC1G_14647 [Botryotinia fuckeliana B05.10] gi|150845861|gb|EDN21054.1| BC1G_14647 [Botryotinia fuckeliana B05.10]
  misc_feature (3)..(296): NCBI GI: 258575221 Blast Desc: conserved [Uncinocarpus reesii 1704] gi|237902058|gb|EEP76459.1| conserved [Uncinocarpus reesii 1704]
  misc_feature (2)..(295): NCBI GI: 226282798 Blast Desc: conserved [Paracoccidioides brasiliensis Pb01]
  misc_feature: Useful for introducing or modulating the production of volatile compounds
MADIASIEDDIKQYQEQLDVVNAGLRDDAGNAELLALKSELDDALELLNETLAELKPTKAPPKPKAATPPPPVQEKWSRENHPAFKKAVPVEEKEVDPAPVNYQVNDNVMAKWVSGDRAFYPARITSITGSSTAPIYVVKFKSYDNTEQLRAKDIRPVAQKRKADGTPINASTPFSAPAQPPPPASTSTNPGVISAAASINPELAQKNRESLVNDTGDGKPKAKKIKAKKELEAGKNKWQEFSTKSKFAKANKAKKDSMFRTPEGVHGRVGFTGSGQAMRKDPSRTRHIYQANEDVD

SEQ ID NO: 3198 - DNA, 2444 bp, Muscodor strobelii
  misc_feature: SGI EST ID NO. CUFF.8084.0
  misc_feature: Variant of the nucleotide sequence at SEQ ID NO 3196
cggccgtgtactagtttccattgttccgcgctgcttgcatcattcatccaacgacctgtcgcggaactgattgcggcaacgaaactatctacacaaggtcgcatcgaaaattgtactctacgctgaccaatatatcgtcgactactcgaaaatggcagatatcgcaagtatcgaggacgatatcaagcaatatcaagaacagcttgacgtcgtgaacgccggtcttcgagacgacgctggaaatgcagagctgctggctctcaagtctgagttagatgatgcgcttgagctgttgaacgagacgcttgctgaactgaagccgaccaaggcacctcccaagcccaaggccgccaccccgccaccaccagttcaggagaagtggtcgcgcgagaaccaccctgccttcaaaaaggctgtccccgtcgaggagaaggaagtcgaccccgctcccgtcaactatcaggtgaacgacaatgtcatggctaagtgggtgtcgggcgacagggccttctacccggctcgcatcacgtccatcactggctcctccacggcgcccatctatgtcgtcaagttcaagagctacgacaacaccgagcagctgcgcgccaaagacattcgacccgtcgcccagaagcgcaaggccgacggtactcccatcaacgccagcactccgttcagcgcccccgcgcaacccccgcctccagcatctacttcgaccaaccctggcgtcatatcggccgccgccagcatcaaccccgagctggctcagaagaacagggaaagtctcgtgaacgacaccggtgacggcaagcccaaggctaagaagatcaaggccaagaaagaactcgaagccggcaagaacaaatggcaggaattcagcaccaagtctaagttcgccaaggccaacaaggccaaaaaggacagcatgttccgaacaccagagggtgtccatggaagagttggattcacgggctccggacaggcgatgcgcaaagatccctcgaggacacgtcatatctaccaagccaatgaggatgtggactaatgtcggttgcaggccaagtgaattatagttggtagcctcggctaccttgatctgcatgcgatcaggttatcggtcggcgttggtggtgcaaaggatggcgcttggagttcgtgtcttcaggctttgtgattctctctcctaactctcacgtttcgtagttatggatgctaacgtagccttctgagtatcaccgctttcgccttgctttcagtgtgggccagcgaagctctcgacggcgagactcaatttcaatacaaaacatcatgatacaaatcctgttttattgccctcacgacccacttcctgacgttgaaatgctaaatattcgtctcagcaggactcaaatacagaagtgtgcacttctacttcaggtattggtgggcactagagaccgatactttctgagtcttcggtctttttcgccatgactagctcttcgatacgccgaccgtgtttcgctcgtagtgttcctttgaccctgatatcattgtagtaatgattctgcatatagctgtaatcaaaatgtgccgcatccttgctttcttcctctactacagctacacgattttttacttgtaattcatgtaacttaagaggcacgataatttaggactacttttgccattgatctccggttctacttcagaaaattcgaataccagatctaaaagtattggaatatggatgaacatagatagcacaggacatttcgcaggccctgtgcgttttgtcataccccgtcgtatgttgacacagtatcctacataatatacatcagaacatacaaacccccagtatctatcttacatcccaatcttcgtagccacctgccgggcaatatccatgaacgccaaccccctatgagattccggctcagagacgacagtcggctttccattctgcccatcatcaccaatactctgatgcaatggtacatcgccaagtaaatcaatcgcatgatccgcgcaaagccccttaacgcgctcattagacccaaatacaggcgtcgactcgttgcagtgcggacagcagaatagagacatgttctgtacgagaccgagcagtggcacgttgacttttttgaacatgtttataccttttactgcgtcttttactgctagggtgtgaggggtcgttactattacggatcctaaagtcctacattagccttatgtcttcttgagtttgtatggacgggaatgcttaccatctaaaacaatctgctgcgtaacgctaagctgtgtatcacccgtccctggcggtaagtcaagaacgaggatatccaagccgccccattcaacttcgtgcagcagttgttgtagtgccttcatgaccatcaacccgcgccagactacgggtgcgtcttcaccgactaggtagcccatggacattgttttta

SEQ ID NO: 3199 - DNA, 885 bp, Muscodor strobelii
  misc_feature: SGI cDNA ID NO. 560719
  misc_feature: Encodes the peptide sequence at SEQ ID NO 3200
atgaggccatcaccacaccgtctattccacaatctacgagctctacaacatgaaaatccgctgggtctgccccgaacgggttcaatcccccgaatgcaacgaggactccccgagcgtcgcaaaatcaaagacgtcgctaaggtagtcgccgtctcatcagcaaaaggcggcgtaggaaaaagcaccgtagctgccaatctctcactcgcgtttgcacgcatgggttaccgctccggcatattggacacagatatcttcgggccctccatcccaacgctcttcgatttatcaggggagcctagattatcatccaataaccaactcgttcctctcacgaactacggtgtaaaaacaatgtccatgggctacctagtcggtgaagacgcacccgtagtctggcgcgggttgatggtcatgaaggcactacaacaactgctgcacgaagttgaatggggcggcttggatatcctcgttcttgacttaccgccagggacgggtgatacacagcttagcgttacgcagcagattgttttagatggatccgtaatagtaacgacccctcacaccctagcagtaaaagacgcagtaaaaggtataaacatgttcaaaaaagtcaacgtgccactgctcggtctcgtacagaacatgtctctattctgctgtccgcactgcaacgagtcgacgcctgtatttgggtctaatgagcgcgttaaggggctttgcgcggatcatgcgattgatttacttggcgatgtaccattgcatcagagtattggtgatgatgggcagaatggaaagccgactgtcgtctctgagccggaatctcatagggggttggcgttcatggatattgcccggcaggtggctacgaagattgggatgtaa

SEQ ID NO: 3200 - protein, 294 aa, Muscodor strobelii
  misc_feature: SGI Peptide ID NO. 560719
  misc_feature (1)..(292): NCBI GI: 46128009 Blast Desc: FG08382.1 [Gibberella zeae PH-1]
  misc_feature (1)..(294): NCBI GI: 256733446 Blast Desc: [Nectria haematococca mpVI 77-13-4]
  misc_feature (7)..(294): NCBI GI: 189201581 Blast Desc: cytosolic Fe-S cluster assembling factor NBP35 [Pyrenophora tritici-repentis Pt-1C-BFP] gi|187984226|gb|EDU49714.1| cytosolic Fe-S cluster assembling
  misc_feature (5)..(292): NCBI GI: 171681914 Blast Desc: protein product [Podospora anserina] gi|170940916|emb|CAP66566.1| protein product [Podospora anserina]
  misc_feature (1)..(294): NCBI GI: 85097286 Blast Desc: NCU11285 [Neurospora crassa OR74A] gi|28921905|gb|EAA31178.1| conserved [Neurospora crassa OR74A]
  misc_feature (7)..(294): NCBI GI: 169619794 Blast Desc: SNOG_13094 [Phaeosphaeria nodorum SN15] gi|111058301|gb|EAT79421.1| SNOG_13094 [Phaeosphaeria nodorum SN15]
  misc_feature (7)..(294): NCBI GI: 255946457 Blast Desc: Pc20g15220 [Penicillium chrysogenum Wisconsin 54-1255] gi|211588731|emb|CAP86851.1| Pc20g15220 [Penicillium chrysogenum Wisconsin 54-1255]
  misc_feature (32)..(294): NCBI GI: 154292644 Blast Desc: BC1G_14648 [Botryotinia fuckeliana B05.10] gi|150845862|gb|EDN21055.1| BC1G_14648 [Botryotinia fuckeliana B05.10]
  misc_feature (1)..(294): NCBI GI: 25309592 Blast Desc: BC1G_14648 [Botryotinia fuckeliana B05.10] gi|150845862|gb|EDN21055.1| BC1G_14648 [Botryotinia fuckeliana B05.10]
  misc_feature (7)..(294): NCBI GI: 70992043 Blast Desc: nucleotide binding protein [Aspergillus fumigatus Af293] gi|66848503|gb|EAL88832.1| nucleotide binding protein, [Aspergillus fumigatus Af293]
MRPSPHRLFHNLRALQHENPLGLPRTGSIPRMQRGLPERRKIKDVAKVVAVSSAKGGVGKSTVAANLSLAFARMGYRSGILDTDIFGPSIPTLFDLSGEPRLSSNNQLVPLTNYGVKTMSMGYLVGEDAPVVWRGLMVMKALQQLLHEVEWGGLDILVLDLPPGTGDTQLSVTQQIVLDGSVIVTTPHTLAVKDAVKGINMFKKVNVPLLGLVQNMSLFCCPHCNESTPVFGSNERVKGLCADHAIDLLGDVPLHQSIGDDGQNGKPTVVSEPESHRGLAFMDIARQVATKIGM

SEQ ID NO: 3201 - DNA, 3150 bp, Muscodor strobelii
  misc_feature: SGI EST ID NO. CUFF.8085.1
  misc_feature: Variant of the nucleotide sequence at SEQ ID NO 3199
tagcggcctacagtgcatgttggcgctaagcggctgagctaaacttgccccgtttggaagcgtcaacttccgaattggagctgtcttcccgcatcgaaaatgaataagcctctcataataagagcacgatgaaatgtcactatcgtaatacttgtttgacgactatccgcaatatttataatgtgattgtacgatttttctagcattttcaggcatctaggtcgttgtacactacagtaaccggccttcgagcacatcgatttatttgcagccctcatctcataagcatttcctcatcatgaggccatcaccacaccgtctattccacaatctacgagctctacaacatgaaaatccgctgggtctgccccgaacgggttcaatcccccgaatgcaacgaggactccccgagcgtcgcaaaatcaaagacgtcgctaaggtagtcgccgtctcatcagcaaaaggcggcgtaggaaaaagcaccgtagctgccaatctctcactcgcgtttgcacgcatgggttaccgctccggcatattggacacagatatcttcgggccctccatcccaacgctcttcgatttatcaggggagcctagattatcatccaataaccaactcgttcctctcacgaactacggtgtaaaaacaatgtccatgggctacctagtcggtgaagacgcacccgtagtctggcgcgggttgatggtcatgaaggcactacaacaactgctgcacgaagttgaatggggcggcttggatatcctcgttcttgacttaccgccagggacgggtgatacacagcttagcgttacgcagcagattgttttagatggatccgtaatagtaacgacccctcacaccctagcagtaaaagacgcagtaaaaggtataaacatgttcaaaaaagtcaacgtgccactgctcggtctcgtacagaacatgtctctattctgctgtccgcactgcaacgagtcgacgcctgtatttgggtctaatgagcgcgttaaggggctttgcgcggatcatgcgattgatttacttggcgatgtaccattgcatcagagtattggtgatgatgggcagaatggaaagccgactgtcgtctctgagccggaatctcatagggggttggcgttcatggatattgcccggcaggtggctacgaagattgggatgtaagatagatactgggggtttgtatgttctgatgtatattatgtaggatactgtgtcaacatacgacggggtatgacaaaacgcacagggcctgcgaaatgtcctgtgctatctatgttcatccatattccaatacttttagatctggtattcgaattttctgaagtagaaccggagatcaatggcaaaagtagtcctaaattatcgtgcctcttaagttacatgaattacaagtaaaaaatcgtgtagctgtagtagaggaagaaagcaaggatgcggcacattttgattacagctatatgcagaatcattactacaatgatatcagggtcaaaggaacactacgagcgaaacacggtcggcgtatcgaagagctagtcatggcgaaaaagaccgaagactcagaaagtatcggtctctagtgcccaccaatacctgaagtagaagtgcacacttctgtatttgagtcctgctgagacgaatatttagcatttcaacgtcaggaagtgggtcgtgagggcaataaaacaggatttgtatcatgatgttttgtattgaaattgagtctcgccgtcgagagcttcgctggcccacactgaaagcaaggcgaaagcggtgatactcagaaggctacgttagcatccataactacgaaacgtgagagttaggagagagaatcacaaagcctgaagacacgaactccaagcgccatcctttgcaccaccaacgccgaccgataacctgatcgcatgcagatcaaggtagccgaggctaccaactataattcacttggcctgcaaccgacattagtccacatcctcattggcttggtagatatgacgtgtcctcgagggatctttgcgcatcgcctgtccggagcccgtgaatccaactatcgccaggttagcaaccatctgaagagcagggtaggggtcacgcacctcttccatggacaccctctggtgttcggaacatgctgtcctttttggccttgttggccttggcgaacttagacttggtgctgaattcctgccatttgttcttgccggcttcgagttctttcttggccttgatcttcttagccttgggcttgccgtcaccggtgtcgttcacgagactttccctgttcttctgagccagctcggggttgatgctggcggcggccgatatgacgccagggttggtcgaagtagatgctggaggcgggggttgcgcgggggcgctgaacggagtgctggcgttgatgggagtaccgtcggccttgcgcttctgggcgacgggtcgaatgtctttggcgcgcagctgctcggtgttgtcgtagctcttgaacttgacgacatagatgggcgccgtggaggagccagtgatggacgtgatgcgagccgggtagaaggccctgtcgcccgacacccacttagccatgacattgtcgttcacctgatagttgacgggagcggggtcgacttccttctcctcgacggggacagcctttttgaaggcagggtggttctcgcgcgaccacttctcctgaactggtggtggcggggtggcggccttgggcttgggaggtgccttggtcggcttcagttcagcaagcgtctcgttcaacagctcaagcgcatcatctaactcagacttgagagccagcagctctgcatttccagcgtcgtctcgaagaccggcgttcacgacgtcaagctatgcggtatctagtgattagtcacgggactctctagggatgggcagtggggggcagcgaagcgcgtacctgttcttgatattgcttgatatcgtcctcgatacttgcgatatctgccattttcgagtagtcgacgatatattggtcagcgtagagtacaattttcgatgcgaccttgtgtagatagtttcgttgccgcaatcagttccgcgacaggtcgttggatgaatgatgcaagcagcgcggaacaatggaaactagtacacggccg

SEQ ID NO: 3202 - DNA, 1824 bp, Muscodor strobelii
  misc_feature: SGI cDNA ID NO. 560720
  misc_feature: Encodes the peptide sequence at SEQ ID NO 3203
atgggtagtaggagtcacgcccgtcagctggccgacctagtcgaaaagcctgtcaaagacttcgacccagaacaggacgtcgtgccccgcgattccgacgacagtgacgccgagagcatcgaagagaatgctggaacagaacactatgtctccgtcggaaaaagcaagctccgtcgcaacgatcccctctccctaggacctcagtaccgaggcgcaaaagtgtcccgcgcagctctcgaggccgactctgggagcgacgacggcgcagaggatgaggaagaagacgaagacgaaggcgaagaggatgcgaccggaaaccagcggagtagcagcgacgcctcctccgactacgaagatgctcgcgaagaattcgacgacccagaccaagtagacttcgacgtcgaagcgcaggatcaggatgaagatgatgacgccgaaatcgacagtggcgatgcattcggcgagagcgatgaagagaaattcagagactttgtcttccgtggaagctccatacctacgcctaataagaacaaacatgctaagcgagctactgctgctgacttcatgcaatcggaagaagaagaggaggaggagggagaagatatgattggatccgcggaagatgatgaagacgaagacgatgagatgctcgatgaggatgacgaagaagaggaagatgaagagggctcagagctcgatggcttcatcgacgacgaggcagaagagtccgacgaggacgaaagagactccgaagacgaggaaatcggcctctctgatgatggaagccccgatgccagtgaagatgaagaaaccgacgaagacaatctcatgcgcccgaagaaatggctgcgcgagcactccgggcttacagcatctatcgtgaaagaggccatggccgccgacaagaacagccgtgcgaacatgtcaggaaaccagatggaggcagacatacagaaaggaaaaagtgtccagcgacaacgccaaaagtttgatgcgttgctaaatatccgcatacgactacagaaatctcttgttgccatgaactccctcaattacgtagaagaaagcgaaaaccaggaggctgagccttatgaggcggctgaaagatccgctctgcaactctggaacgcactcgacgagttccggacaagcattcaaaggggcaagaaacgtaaacacgccgagactgaagatacctcaacgcaagcgttatgggaatcgatgcaaaggcacgagaaagcccaagagagccgcaggaaacagacattggagaaatggtcacgggaggcgggcaagatgagcttgacgtctaactcgggctctaagttcagtaacaagaaggaaacgcccattgtttctatgctaagtgccgagatggcggaccctgagagactcatcaagcgaacacggactcctcgatcttgtgcgccactgcaagctgccaaaaaggtcaatcaggacgaatccatatttgacgacgccgacttctaccagctaatgttgaaagaactggtcgaccaacgttccgacaactctggtctcggcttgcaggcggctaccgttcgctacactgcagtcaaggaagccaaagcgaagcgacatgtagacacaaaagctagcaaaggtcgcaaaatgcgctttactgtcatgcctaaattacaaaacttcatggctccagaagatcgcagaacctgggagcagagcgccatagatcgatttttcggcacactattcggtcagaagctagcgttgcaagaggagccatctgatgaggagatgggaggcgcatcggttgaagaaaatggtggattccgactcttttag

SEQ ID NO: 3203 - protein, 607 aa, Muscodor strobelii
  misc_feature: SGI Peptide ID NO. 560720
  misc_feature (497)..(578): Pfam Id: PF08164 Pfam Desc: TRAUB (NUC102) domain
  misc_feature (29)..(607): NCBI GI: 145614536 Blast Desc: MGG_04641 [Magnaporthe grisea 70-15] gi|145021443|gb|EDK05572.1| MGG_04641 [Magnaporthe grisea 70-15]
  misc_feature (3)..(607): NCBI GI: 46128007 Blast Desc: FG08381.1 [Gibberella zeae PH-1] gi|84027764|sp|Q4I327.1|BFR2_GIBZE RecName: Full=Protein BFR2
  misc_feature (3)..(607): NCBI GI: 154292646 Blast Desc: BC1G_14649 [Botryotinia fuckeliana B05.10] gi|150845863|gb|EDN21056.1| BC1G_14649 [Botryotinia fuckeliana B05.10]
  misc_feature (294)..(607): NCBI GI: 164426031 Blast Desc: protein BFR2 [Neurospora crassa OR74A] gi|157071172|gb|EAA31177.2| protein BFR2 [Neurospora crassa OR74A]
  misc_feature (294)..(607): NCBI GI: 74616177 Blast Desc: BFR2_NEUCR RecName: Full=Protein bfr-2 gi|25466172|pir||T51893 related to Che-1 protein [imported] - Neurospora crassa gi|39979194|emb|CAE85565.1| related to Che-1
  misc_feature (291)..(607): NCBI GI: 171681912 Blast Desc: protein product [Podospora anserina] gi|170940915|emb|CAP66565.1| protein product [Podospora anserina]
  misc_feature (288)..(587): NCBI GI: 116202117 Blast Desc: CHGG_08943 [Chaetomium globosum CBS 148.51] gi|88177461|gb|EAQ84929.1| CHGG_08943 [Chaetomium globosum CBS 148.51]
  misc_feature (294)..(607): NCBI GI: 256733932 Blast Desc: NECHADRAFT_91720 [Nectria haematococca mpVI 77-13-4]
  misc_feature (291)..(586): NCBI GI: 189201583 Blast Desc: traub transcription factor family protein [Pyrenophora tritici-repentis Pt-1C-BFP] gi|187984227|gb|EDU49715.1| traub transciption factor family protein [Pyrenophora tritici-repentis
  misc_feature (4)..(580): NCBI GI: 226292032 Blast Desc: transcription factor AATF/Che-1 [Paracoccidioides brasiliensis Pb18]
MGSRSHARQLADLVEKPVKDFDPEQDVVPRDSDDSDAESIEENAGTEHYVSVGKSKLRRNDPLSLGPQYRGAKVSRAALEADSGSDDGAEDEEEDEDEGEEDATGNQRSSSDASSDYEDAREEFDDPDQVDFDVEAQDQDEDDDAEIDSGDAFGESDEEKFRDFVFRGSSIPTPNKNKHAKRATAADFMQSEEEEEEEGEDMIGSAEDDEDEDDEMLDEDDEEEEDEEGSELDGFIDDEAEESDEDERDSEDEEIGLSDDGSPDASEDEETDEDNLMRPKKWLREHSGLTASIVKEAMAADKNSRANMSGNQMEADIQKGKSVQRQRQKFDALLNIRIRLQKSLVAMNSLNYVEESENQEAEPYEAAERSALQLWNALDEFRTSIQRGKKRKHAETEDTSTQALWESMQRHEKAQESRRKQTLEKWSREAGKMSLTSNSGSKFSNKKETPIVSMLSAEMADPERLIKRTRTPRSCAPLQAAKKVNQDESIFDDADFYQLMLKELVDQRSDNSGLGLQAATVRYTAVKEAKAKRHVDTKASKGRKMRFTVMPKLQNFMAPEDRRTWEQSAIDRFFGTLFGQKLALQEEPSDEEMGGASVEENGGFRLF

SEQ ID NO: 3204 - DNA, 3391 bp, Muscodor strobelii
  misc_feature: SGI EST ID NO. CUFF.7968.0
  misc_feature: Variant of the nucleotide sequence at SEQ ID NO 3202
cttgtgtaaaatttgatactcaaccatgggtagtaggagtcacgcccgtcagctggccgacctagtcgaaaagcctgtcaaagacttcgacccagaacaggacgtcgtgccccgcgattccgacgacagtgacgccgagagcatcgaagagaatgctggaacagaacactatgtctccgtcggaaaaagcaagctccgtcgcaacgatcccctctccctaggacctcagtaccgaggcgcaaaagtgtcccgcgcagctctcgaggccgactctgggagcgacgacggcgcagaggatgaggaagaagacgaagacgaaggcgaagaggatgcgaccggaaaccagcggagtagcagcgacgcctcctccgactacgaagatgctcgcgaagaattcgacgacccagaccaagtagacttcgacgtcgaagcgcaggatcaggatgaagatgatgacgccgaaatcgacagtggcgatgcattcggcgagagcgatgaagagaaattcagagactttgtcttccgtggaagctccatacctacgcctaataagaacaaacatgctaagcgagctactgctgctgacttcatgcaatcggaagaagaagaggaggaggagggagaagatatgattggatccgcggaagatgatgaagacgaagacgatgagatgctcgatgaggatgacgaagaagaggaagatgaagagggctcagagctcgatggcttcatcgacgacgaggcagaagagtccgacgaggacgaaagagactccgaagacgaggaaatcggcctctctgatgatggaagccccgatgccagtgaagatgaagaaaccgacgaagacaatctcatgcgcccgaagaaatggctgcgcgagcactccgggcttacagcatctatcgtgaaagaggccatggccgccgacaagaacagccgtgcgaacatgtcaggaaaccagatggaggcagacatacagaaaggaaaaagtgtccagcgacaacgccaaaagtttgatgcgttgctaaatatccgcatacgactacagaaatctcttgttgccatgaactccctcaattacgtagaagaaagcgaaaaccaggaggctgagccttatgaggcggctgaaagatccgctctgcaactctggaacgcactcgacgagttccggacaagcattcaaaggggcaagaaacgtaaacacgccgagactgaagatacctcaacgcaagcgttatgggaatcgatgcaaaggcacgagaaagcccaagagagccgcaggaaacagacattggagaaatggtcacgggaggcgggcaagatgagcttgacgtctaactcgggctctaagttcagtaacaagaaggaaacgcccattgtttctatgctaagtgccgagatggcggaccctgagagactcatcaagcgaacacggactcctcgatcttgtgcgccactgcaagctgccaaaaaggtcaatcaggacgaatccatatttgacgacgccgacttctaccagctaatgttgaaagaactggtcgaccaacgttccgacaactctggtctcggcttgcaggcggctaccgttcgctacactgcagtcaaggaagccaaagcgaagcgacatgtagacacaaaagctagcaaaggtcgcaaaatgcgctttactgtcatgcctaaattacaaaacttcatggctccagaagatcgcagaacctgggagcagagcgccatagatcgatttttcggcacactattcggtcagaagctagcgttgcaagaggagccatctgatgaggagatgggaggcgcatcggttgaagaaaatggtggattccgactcttttagtagaagagaaacaaaattcacagacaggatatcatacaacttgaaaccattcctctacgaatattgcgataggtggtttcggaaaataaagcatcatatcattatatccatgaaagcggtccgccttttgatcgacgtgatcgaccttggtccgggatgccatcccaaccgccagtcccagtaggacgcagatcctcaaacgcagatcttcacctgtgcagctatgaatacgaggtggagcgtgaacgaacttcatacttatttccagctcatcctaagcaagtctttttcacttcttcatgccctttcgtgtcaaaagtggtcgcaagcaaatcgcacaacatggagacaattcatggagtctttaatccctaggaacgcatcgcaatcgaactacagcctccagactaatgaatagtcttccgacgggaatcttcggttcactctatcatcgttacacatcgtgacattctcacttccgagctcactaccgaagcggtaactttccgttatttctaccatggctttcggttcacgacgaccataatgaatcttctactcaccaaatcgcaatcttgactcgattctgccaaactctttaacaccgacatgcacgcaacgtatgcatgtcggtcccaagaccaccgcgattgcaccgatcccagcatttcggtcactcatgcgaactgataaaaagtcgagctgccattttgggtgacagcgagtatcaatactatccttactcttggagatattggtcatcatgggacgaataggagagtgacaaatatgtggatgcttcttgatccttcaaacccctttcaatgaggctatctcgaacaagcgcaatgttgggggccagatatgccgacgccaagatgatgtccagtccttgctgatgcaaactacggtcgaatctagcatactatggtcttttgaataagggcacatgattagaaatggagtcggacgttcggcggataacacttgtctcccatcgtggtgtcgaacgctggtcccaaaacgataccttctatgcgagcacttccttctaaaccccaccagatcacggacagggcacatggttcaggcagttggaaatagtgatcaatctggtgaggcaccccgcaagattctcctctaagctctactgcaggtcttgaaagtcaggcgatgagagacaacagatacgttaccttacccattgcaatatggactttgggatgcatgttcactgctctcggagcgctaaatctgcagagtgtatgcatttttgcagccatttcgctgctacatcggcgtccgattttggcttccaagctatctccttgtggtttgaaacacccaaatgagaagttgtgaccgaaatgagaggcacgacatcgaggtttaaagtgagaattcctcgcagaagaccacttatttagctcaagtttcaggggtcttttcgtccttaattctggtgaagtgccgtccggcgcttcctcggtccaccccgagcttcccaatcgggaacgcccaagatcttagcgtagatttgcg

SEQ ID NO: 3205 - DNA, 849 bp, Muscodor strobelii
  misc_feature: SGI cDNA ID NO. 560721
  misc_feature: Encodes the peptide sequence at SEQ ID NO 3206
atgttctccaagctattaactattgcttcggcagtggcgtccgtcgctgccactggtgtgccatcgtacggtggatggaacttaatctggcaggagaacttctacggcgctgctggaacttccccgaacacgggcaactggaacattattcagagcagcaacaacgccaacggcgagtgggaaacatacacgaactcgaaccagaacgttcagctttccggtggcgatacgctccagcttgtgccacaaaataacaacggcgcttggacatccggccgcatcgagtcgaaatacgtgttcacccccgtgaggggtggacagactatggtcgaggcccagatccgcatgggagacatccctcaagccaacaagcaaggtatttggccggctttctggatgctcggtgactcaatccgccatggtactccttggccccagtgcggtgagatcgatattttggagcaggtcgatggcattctgaccggctacggcaccatccactgcgatgtctaccccggtggtctctgcaatgagagcaatggtattggtggcaacatcaacattcccgacaacgggtggcacacttggcgagtcgttatcgttaattcctccggttcttggactaccgattctatcaactggtaccgcgacggtatccagttcttccaggtcactggtgctcgcgttggcaaccagaatgtgtggaacacactcgtcaactctcccctctacttcatcctcaacgtcgctgttggtggcagctggcccggtgcccccaacggcgcaactacaagcggatggggcaactacatggaagtagcctacgttgcccattacaaccaccaataa

SEQ ID NO: 3206 - protein, 282 aa, Muscodor strobelii
  misc_feature: SGI Peptide ID NO. 560721
  misc_feature (57)..(277): Pfam Id: PF00722 Pfam Desc: Glycosyl hydrolases family 16
  misc_feature (57)..(154): Pfam Id: PF00722 Pfam Desc: Glycosyl hydrolases family 16
  misc_feature (1)..(279): NCBI GI: 242769808 Blast Desc: endo-1,3(4)-beta-glucanase, [Talaromyces stipitatus ATCC 10500] gi|218725045|gb|EED24462.1| endo-1,3(4)-beta-glucanase, [Talaromyces stipitatus ATCC 10500]
  misc_feature (21)..(279): NCBI GI: 212542069 Blast Desc: endo-1,3(4)-beta-glucanase, [Penicillium marneffei ATCC 18224] gi|210066096|gb|EEA20189.1| endo-1,3(4)-beta-glucanase, [Penicillium marneffei ATCC 18224]
  misc_feature (5)..(279): NCBI GI: 70986272 Blast Desc: endo-1,3(4)-beta-glucanase [Aspergillus fumigatus Af293] gi|66846259|gb|EAL86592.1| endo-1,3(4)-beta-glucanase, [Aspergillus fumigatus Af293] gi|159128225|gb|EDP53340.1| A1163]
  misc_feature (1)..(279): NCBI GI: 119474307 Blast Desc: secreted glucosidase [Neosartorya fischeri NRRL 181] gi|119407182|gb|EAW17132.1| secreted glucosidase [Neosartorya fischeri NRRL 181]
  misc_feature (20)..(280): NCBI GI: 145602777 Blast Desc: MGG_09861 [Magnaporthe grisea 70-15] gi|145011166|gb|EDJ95822.1| MGG_09861 [Magnaporthe grisea 70-15]
  misc_feature (1)..(279): NCBI GI: 119473375 Blast Desc: secreted glucosidase [Neosartorya fischeri NRRL 181] gi|119406739|gb|EAW16690.1| secreted glucosidase [Neosartorya fischeri NRRL 181]
  misc_feature (1)..(279): NCBI GI: 46119371 Blast Desc: FG04768.1 [Gibberella zeae PH-1]
  misc_feature (21)..(279): NCBI GI: 70992959 Blast Desc: endo-1,3(4)-beta-glucanase [Aspergillus fumigatus Af293] gi|66848961|gb|EAL89290.1| endo-1,3(4)-beta-glucanase, [Aspergillus fumigatus Af293] gi|159130220|gb|EDP55333.1| A1163]
  misc_feature (1)..(279): NCBI GI: 46116344 Blast Desc: FG04014.1 [Gibberella zeae PH-1]
  misc_feature (20)..(279): NCBI GI: 145608022 Blast Desc: MGG_09733 [Magnaporthe grisea 70-15] gi|145015487|gb|EDK00024.1| MGG_09733 [Magnaporthe grisea 70-15]
  misc_feature (21)..(282): SWISSPROT Homolog: EC 3.2.1.39 Glucan endo-1,3-beta-D-glucosidase
MFSKLLTIASAVASVAATGVPSYGGWNLIWQENFYGAAGTSPNTGNWNIIQSSNNANGEWETYTNSNQNVQLSGGDTLQLVPQNNNGAWTSGRIESKYVFTPVRGGQTMVEAQIRMGDIPQANKQGIWPAFWMLGDSIRHGTPWPQCGEIDILEQVDGILTGYGTIHCDVYPGGLCNESNGIGGNINIPDNGWHTWRVVIVNSSGSWTTDSINWYRDGIQFFQVTGARVGNQNVWNTLVNSPLYFILNVAVGGSWPGAPNGATTSGWGNYMEVAYVAHYNHQ

SEQ ID NO: 3207 - DNA, 3100 bp, Muscodor strobelii
  misc_feature: SGI EST ID NO. CUFF.8022.0
  misc_feature: Variant of the nucleotide sequence at SEQ ID NO 3205
caatcagcaggtccgacgatggtctcaatcaagctgccgcgcgggattctgtacctgtacgccatgaacgcgcgcagccgaggtcttgcgcaggtacaggccgtagatcagatggtagggccttctaccccaaatgcacgctgatccttgagcctaccaagacatcggaaagacattccccaggtcacaaaatgcagaataaggtagccaagtctatcgaatccaccagtcacgggtcgcacagcatcaactctaccgcacggggacaatggtgggtgtcaccagtctcaatcactctcaaccagcaaccgacacgtcggcgcgcatctgcagtcgcctcactgactgactttccatcatcaatgctgagcgtgcttagaagatgctcatgatctgatgctcgcatcttgtgttactcgagtgcgcgcgcattctgtccatgcttatgaacatgtcacgatcattctgatctgagcatgtgcagaacctaaatccccacaagatgttcgcaagtttgtaccatgcatgcagcttatcctgctctgtaccccaatggggttgacggtattgacgcgacagaaagcgtgatcaagtcgccgctctgcttacaaggggcaaactggaactgcaagacgatttcgcctaatacagtaaacagaccaatcaggaccctagctttgtcagagcatgaacgttcatctcatgtttgctccagtaaacgggacggatcgcaatgtatattcgcaaaattttgccgcacactcaaaaaagaagcaataggggcgccaaaaccactataccaagaccttatgtttctctctatctgcaagctacatctttagctttccatgtgtaatttgccatcaatctgtctatcgtcttcgcagcacaacgactagttgacgagaatccttttcggataccttccggatcttcgattcctgacaaactcaatctatatcaaatcccaaattctatataatcagagactaaatatcctggggttccattggcactaacaacctaagccggcgccagcaccgagaagggaactcatcaacccctgagcctgtcggtacgttacatgtttcctgtcttagctaagagacatcttccaatccccttcaacggatcttagctctcatttgcgtgttacattctacctggccagaccacgcgggcgagagtcaaacccgtggttaggattatcaacttccctctttgcgttaagggcagcacaaggcacatgtaccccctgctcatctttttatcctatggagggccacgagaacctcatccggtcagttgtttcgggagctatggcgcaatgcgagataccttccttgtcaactcctgttgacatataagaagatgtttcccgcctcatcgagtgatgatcttcctatactgtccatcgtgaatagtctcgaacgcagctagctgcctacattccttatatattcatttcgatcgtgcatattgcactcatattccctccttataaacttctaacaacatgttctccaagctattaactattgcttcggcagtggcgtccgtcgctgccactggtgtgccatcgtacggtggatggaacttaatctggcaggagaacttctacggcgctgctggaacttccccgaacacgggcaactggaacattattcagagcagcaacaacgccaacggcgagtgggaaacatacacgaactcgaaccagaacgttcagctttccggtggcgatacgctccagcttgtgccacaaaataacaacggcgcttggacatccggccgcatcgagtcgaaatacgtgttcacccccgtgaggggtggacagactatggtcgaggcccagatccgcatgggagacatccctcaagccaacaagcaaggtatttggccggctttctggatgctcggtgactcaatccgccatggtactccttggccccagtgcggtgagatcgatattttggagcaggtcgatggcattctgaccggctacggcaccatccactgcgatgtctaccccggtggtctctgcaatgagagcaatggtattggtggcaacatcaacattcccgacaacgggtggcacacttggcgagtcgttatcgttaattcctccggttcttggactaccgattctatcaactggtaccgcgacggtatccagttcttccaggtcactggtgctcgcgttggcaaccagaatgtgtggaacacactcgtcaactctcccctctacttcatcctcaacgtcgctgttggtggcagctggcccggtgcccccaacggcgcaactacaagcggatggggcaactacatggaagtagcctacgttgcccattacaaccaccaataagctctccgcctccacacatataaatacatatacgaaactttataaaacatataaagccgtcatatgagcatgggaaaggcgtttccgaattgcatgcctgcattttcaaatcttcttgtgtttttttaaagtcgttcagttcatgcacatgcaagcgacgcattcatcggagtttaaaggccaaatgggataggcaagggggcagggcatgggagtttcggggtgggtgtggtttgcgagcgccgcattttgcatacttacactcgcttcgcaagtctacttttccatccgcttttgcacatacacttctcttcttgcacatactttacatcgagcccttcttgagagcggctttacgacggcgcttatttgggtaagccgtgtatttgctgcgacttcttggacatagcttttatcctctgaggaggactttcattgtatatattgcgctatgctctcgactcttccgcgtacccggtcaaaatgctgaactgggttgggatttgttgatacctatctatgaatatactccgctttgctgagttaacagctattctgttcctttcgatgtcgtgatcatgacttgccatgcatagctactttagtcgcggaactgcccctgaggctcgtaccgccatcgtgagaaatatgccggcgtcgatccattattcccattcgtcgtgcagtagatgcccagtataacacctaccacaattcgcatcagccttcctcgcc

SEQ ID NO: 3208 - DNA, 1782 bp, Muscodor strobelii
  misc_feature: SGI cDNA ID NO. 560722
  misc_feature: Encodes the peptide sequence at SEQ ID NO 3209
atgcgcgccgtcatagcttcggcgcttgtcgcattagacttcgtcgtgaactcagtcgtcgcctcctcattgagcgccaatgctccaaattcgacctactacaaccccatccttcccggcttctacccagatccgagctgtatattcgttccagaatggaatgaaacattcttctgcgtctcttcaagcttcaatgcctttccgggaattccaattcataccagcaaagatcttagacaatggactctcgcaggtcacgtactaaatagaaaagaacagttgcctcgccttgccgaaaccaataggtcgactagtggtatatgggcgccgacaattcgctataacgacggaaccttctggcttgtgacaacgctcgtagatgatgatcgagcgacagaagatacatctcgatgggataatgtcattttcaaatcaaacgaccccctcgaccccctggcctggacagaagccgtccatttcgacttcgagggctacgatacttcgcctgtctttgagagtgatgggaagacgtatatagtcggtgcacatgcatggaaggtgttaagccccggcatactcctcgctgaagcagatttggaaaccggtgaggtaggcgaatggaaagcaatttggaacggcacgggcggtactgcccctgaaggacctcatatcttccagaaagatgactggtactatctttcggcggcagaaggaggaacgggacttcaacacatggtgacaatggcaagatcgaagttcctcttcggtccatatgaggccaatccattaaaccccgtgctcacaaacgccaatacgaccgaatattttcagactgtcggacacgcagacttattccacgactcggccggtaattggtggggagtagcactctctactcgttcagggccagaatatctcatctaccctatgggccgcgaaacggtaatggtcccagtcacatgggaaactggcgaattcccaatttgggacccagtaagaggcaagatgaacggttggccaatgccaggacaaaatcaggacgccgatgatgagaacctacccagcgaccccatcagcatcggcgacacaatcgacttcacaccaaacacggccctacccgcccatttcacatactggcgctaccccctcccagactcctacacagtctcccctcccgaacaaccgcacaccctccgcctcaccccctcaatcctaaacctcacagcactaaacggtaactacgccgggccctcaggccagacattcgtcgggcgacgacaaaccgatacactcttcacattcagcgtcgatctctcgttcggcgcaacgtcaaattcacactcgaactcaacatcaacaccaggtctagaatcagaggccggtgtatcagtattccttacgcaaaaccaccatctagatctcggcgtcgtctatctacaatcggcaaactcaacagccttatctccgtatttcagatttcgggggatatcatatatccccgtgccagccgacgttatagtcccagtcccagaggcgtggcagggtaagaatctgcatttagagatcaaagcgagtaatgcgacgcattactcattttctgctgggcctgccgacgctatgtcgcagatgatgaccgtgatgactgtgtcgaatgaggctgtcagttggggttttactggtgttatactgggcatctactgcacgacgaatgggaataatggatcgacgccggcatatttctcacgatggcggtacgagcctcaggggcagttccgcgactaa

SEQ ID NO: 3209 - protein, 593 aa, Muscodor strobelii
  misc_feature: SGI Peptide ID NO. 560722
  misc_feature (33)..(327): Pfam Id: PF04616 Pfam Desc: Glycosyl hydrolases family 43
  misc_feature (26)..(593): NCBI GI: 171682300 Blast Desc: protein product [Podospora anserina] gi|170941109|emb|CAP66759.1| protein product [Podospora anserina]
  misc_feature (37)..(593): NCBI GI: 169859306 Blast Desc: CC1G_06378 [Coprinopsis cinerea okayama7#130] gi|116502582|gb|EAU85477.1| CC1G_06378 [Coprinopsis cinerea okayama7#130]
  misc_feature (30)..(591): NCBI GI: 169776119 Blast Desc: [Aspergillus oryzae RIB40] gi|83771261|dbj|BAE61393.1| protein product [Aspergillus oryzae]
  misc_feature (32)..(591): NCBI GI: 256723450 Blast Desc: NECHADRAFT_13630 [Nectria haematococca mpVI 77-13-4]
  misc_feature (1)..(593): NCBI GI: 119481499 Blast Desc: xylosidase : arabinofuranosidase [Neosartorya fischeri NRRL 181] gi|119408932|gb|EAW18881.1| xylosidase : arabinofuranosidase [Neosartorya fischeri NRRL 181]
  misc_feature (19)..(593): NCBI GI: 159129709 Blast Desc: xylosidase : arabinofuranosidase [Aspergillus fumigatus A1163]
  misc_feature (19)..(593): NCBI GI: 71001940 Blast Desc: xylosidase : arabinofuranosidase [Aspergillus fumigatus Af293] gi|66853289|gb|EAL93613.1| xylosidase : arabinofuranosidase [Aspergillus fumigatus Af293]
  misc_feature (8)..(590): NCBI GI: 238496851 Blast Desc: xylosidase : arabinofuranosidase [Aspergillus flavus NRRL3357] gi|220694541|gb|EED50885.1| xylosidase : arabinofuranosidase [Aspergillus flavus NRRL3357]
  misc_feature (30)..(590): NCBI GI: 145239325 Blast Desc: An08g01900 [Aspergillus niger] gi|134076816|emb|CAK39870.1| protein product [Aspergillus niger]
  misc_feature (20)..(347): NCBI GI: 116202393 Blast Desc: CHGG_09081 [Chaetomium globosum CBS 148.51] gi|88177599|gb|EAQ85067.1| CHGG_09081 [Chaetomium globosum CBS 148.51]
  misc_feature (35)..(586): SWISSPROT Homolog: EC 3.2.1.55 Alpha-N-arabinofuranosidase
  misc_feature (35)..(586): SWISSPROT Homolog: EC 3.2.1.37 Xylan 1,4-beta-xylosidase
MRAVIASALVALDFVVNSVVASSLSANAPNSTYYNPILPGFYPDPSCIFVPEWNETFFCVSSSFNAFPGIPIHTSKDLRQWTLAGHVLNRKEQLPRLAETNRSTSGIWAPTIRYNDGTFWLVTTLVDDDRATEDTSRWDNVIFKSNDPLDPLAWTEAVHFDFEGYDTSPVFESDGKTYIVGAHAWKVLSPGILLAEADLETGEVGEWKAIWNGTGGTAPEGPHIFQKDDWYYLSAAEGGTGLQHMVTMARSKFLFGPYEANPLNPVLTNANTTEYFQTVGHADLFHDSAGNWWGVALSTRSGPEYLIYPMGRETVMVPVTWETGEFPIWDPVRGKMNGWPMPGQNQDADDENLPSDPISIGDTIDFTPNTALPAHFTYWRYPLPDSYTVSPPEQPHTLRLTPSILNLTALNGNYAGPSGQTFVGRRQTDTLFTFSVDLSFGATSNSHSNSTSTPGLESEAGVSVFLTQNHHLDLGVVYLQSANSTALSPYFRFRGISYIPVPADVIVPVPEAWQGKNLHLEIKASNATHYSFSAGPADAMSQMMTVMTVSNEAVSWGFTGVILGIYCTTNGNNGSTPAYFSRWRYEPQGQFRD

SEQ ID NO: 3210 - DNA, 544 bp, Muscodor strobelii
  misc_feature: SGI EST ID NO. CUFF.8026.1
  misc_feature: Variant of the nucleotide sequence at SEQ ID NO 3208
gttggccaatgccaggacaaaatcaggacgccgatgatgagaacctacccagcgaccccatcagcatcggcgacacaatcgacttcacaccaaacacggccctacccgcccatttcacatactggcgctaccccctcccagactcctacacagtctcccctcccgaacaaccgcacaccctccgcctcaccccctcaatcctaaacctcacagcactaaacggtaactacgccgggccctcaggccagacattcgtcgggcgacgacaaaccgatacactcttcacattcagcgtcgatctctcgttcggcgcaacgtcaaattcacactcgaactcaacatcaacaccaggtctagaatcagaggccggtgtatcagtattccttacgcaaaaccaccatctagatctcggcgtcgtctatctacaatcggcaaactcaacagccttatctccgtatttcagatttcgggggatatcatatatccccgtgccagccgacgttatagtcccagtcccagaggcgtggcagggtaagaatctgca

SEQ ID NO: 3211 - DNA, 1821 bp, Muscodor strobelii
  misc_feature: SGI cDNA ID NO. 560723
  misc_feature: Encodes the peptide sequence at SEQ ID NO 3212
atggcgcccggcaagagacctaacttccttatcgccctggccgatgatttgggcttctccgatattggtccctttggcggcgagatcaacacgccgaatcttgacaagttggccaaggacagtattctctttacagacttccatgccgcagcagcatgttcgccgtcaagagccatgatcatgaccggcactgaccaccacatcgctggtctgggcaatctaatcgagtggaccaacatttccggtcagaacgaccctaatggaaccatgtcaacagctgtccagcgtggtatgcctgggtacgaaggatatctgaatgagaaagtagctgccttgcctgagatattacgggacaatggctatcatacgatcatggctgggaagtggcatttgggcctcaccccggaacgtagcccgaaggttcgcgggttcgaaagaagctttgcccatttgccagcatgcagcaatcattatgcgtatgagccgcagctgcaggcagcggaccaaatccccgatttcatgactatgagcttcattgcattgcataacgaggatggcgaatacatcaagaagcttcccgatggctggtactcttctgacgggtacggtgacaagatgctgtcatacctgaaagactggaaaaagagcggagatgatcggccattctttggatacttgccctttacagcaccgcattggcctttgcaagcacctcaggagtacattaagaaataccgtggtgtctacgatgatggcccagaggcgttgcgacaaaagcgtctccagcgtctcaaggatctggggatggtcccacaagatgtcgaacctcatccggttgttgcagatgaggtcaaagagtggaatgagctaagtgatgttgagcgtgccaattcatgtcgagcgatggaatgcttcgcaggcatggtcgaagccattgatgcaaacgttggcaagatcactaagtatttagaagagatcggcgagctcgacaacactttcatctgcttcttatcagacaatggtgcagaaggcgctgcatatgaagcttaccccattgtgcagagcaccatgctcacacacttacaaaagtactacaacaaccacatcgataatcttggaaatggagattcgttcatctggtacggcccgagatgggctcaggcagcaacggcaccgagcagactgtataaggcctatactaccgaaggaggtgtgcgtgtcccatatctgatgaagcctccgtcttctttcagtggcaacatcgctggtggaagcattacgcaccagttcgcaacagttatggatcttgcaccaaccatattagacatggccggcgtgacgcatccggctccgaactaccaggggcgccaaatcgtacacatgcgtggaaggtcaatggtcccatatctacaaaaacaagccgagacgattcacgagaaggacttcatcaatggttgggaaacctgtggacgagccgcatgtcgtcgcggcgattggaagatcgtcttcatccccaagcctaagggtccagaaaaatggcagctgtacaatttggcaaaggacccgggcgaggtacacgacctagccgaggaggaacctgacaagcttaaggagcttatcaagctttgggatatatatgttcttgaaactggtgttatacctttatcgcccgaattaggcaactggatggccgcaatggaagagcagatgccggaaaatgcatggatcgagtatgagtattggaaagacggtgcccgtgacgatccggccaagttcaccaagaagatccccagattccaacgacacgtttcggcgatgtga

SEQ ID NO: 3212 - protein, 606 aa, Muscodor strobelii
  misc_feature: SGI Peptide ID NO. 560723
  misc_feature (5)..(527): Pfam Id: PF00884 Pfam Desc: Sulfatase
  misc_feature (5)..(606): NCBI GI: 256723099 Blast Desc: NECHADRAFT_42498 [Nectria haematococca mpVI 77-13-4]
  misc_feature (1)..(603): NCBI GI: 169779331 Blast Desc: [Aspergillus oryzae RIB40] gi|83772869|dbj|BAE62997.1| protein product [Aspergillus oryzae]
  misc_feature (5)..(603): NCBI GI: 238499969 Blast Desc: arylsulfatase, [Aspergillus flavus NRRL3357] gi|220692972|gb|EED49318.1| arylsulfatase, [Aspergillus flavus NRRL3357]
  misc_feature (5)..(603): NCBI GI: 70997211 Blast Desc: arylsulfatase [Aspergillus fumigatus Af293] gi|66850995|gb|EAL91321.1| arylsulfatase, [Aspergillus fumigatus Af293]
  misc_feature (5)..(603): NCBI GI: 159126916 Blast Desc: arylsulfatase, [Aspergillus fumigatus A1163]
  misc_feature (5)..(603): NCBI GI: 255954243 Blast Desc: Pc21g08350 [Penicillium chrysogenum Wisconsin 54-1255] gi|211589585|emb|CAP95732.1| Pc21g08350 [Penicillium chrysogenum Wisconsin 54-1255]
  misc_feature (1)..(599): NCBI GI: 145229559 Blast Desc: An01g06640 [Aspergillus niger] gi|134055196|emb|CAK43783.1| protein product [Aspergillus niger]
  misc_feature (5)..(603): NCBI GI: 119478586 Blast Desc: arylsulfatase, [Neosartorya fischeri NRRL 181] gi|119407549|gb|EAW17498.1| arylsulfatase, [Neosartorya fischeri NRRL 181]
  misc_feature (4)..(603): NCBI GI: 121713928 Blast Desc: arylsulfatase, [Aspergillus clavatus NRRL 1] gi|119402728|gb|EAW13149.1| arylsulfatase, [Aspergillus clavatus NRRL 1]
  misc_feature (1)..(603): NCBI GI: 67541354 Blast Desc: AN6847.2 [Aspergillus nidulans FGSC A4] gi|40739056|gb|EAA58246.1| AN6847.2 [Aspergillus nidulans FGSC A4]
  misc_feature (5)..(553): SWISSPROT Homolog: EC 3.1.6.1 Arylsulfatase
MAPGKRPNFLIALADDLGFSDIGPFGGEINTPNLDKLAKDSILFTDFHAAAACSPSRAMIMTGTDHHIAGLGNLIEWTNISGQNDPNGTMSTAVQRGMPGYEGYLNEKVAALPEILRDNGYHTIMAGKWHLGLTPERSPKVRGFERSFAHLPACSNHYAYEPQLQAADQIPDFMTMSFIALHNEDGEYIKKLPDGWYSSDGYGDKMLSYLKDWKKSGDDRPFFGYLPFTAPHWPLQAPQEYIKKYRGVYDDGPEALRQKRLQRLKDLGMVPQDVEPHPVVADEVKEWNELSDVERANSCRAMECFAGMVEAIDANVGKITKYLEEIGELDNTFICFLSDNGAEGAAYEAYPIVQSTMLTHLQKYYNNHIDNLGNGDSFIWYGPRWAQAATAPSRLYKAYTTEGGVRVPYLMKPPSSFSGNIAGGSITHQFATVMDLAPTILDMAGVTHPAPNYQGRQIVHMRGRSMVPYLQKQAETIHEKDFINGWETCGRAACRRGDWKIVFIPKPKGPEKWQLYNLAKDPGEVHDLAEEEPDKLKELIKLWDIYVLETGVIPLSPELGNWMAAMEEQMPENAWIEYEYWKDGARDDPAKFTKKIPRFQRHVSAM

SEQ ID NO: 3213 - DNA, 899 bp, Muscodor strobelii
  misc_feature: SGI EST ID NO. CUFF.7998.0
  misc_feature: Variant of the nucleotide sequence at SEQ ID NO 3211
gcagaaggcgctgcatatgaagcttaccccattgtgcagagcaccatgctcacacacttacaaaagtactacaacaaccacatcgataatcttggaaatggagattcgttcatctggtacggcccgagatgggctcaggcagcaacggcaccgagcagactgtataaggcctatactaccgaaggaggtgtgcgtgtcccatatctgatgaagcctccgtcttctttcagtggcaacatcgctggtggaagcattacgcaccagttcgcaacagttatggatcttgcaccaaccatattagacatggccggcgtgacgcatccggctccgaactaccaggggcgccaaatcgtacacatgcgtggaaggtcaatggtcccatatctacaaaaacaagccgagacgattcacgagaaggacttcatcaatggttgggaaacctgtggacgagccgcatgtcgtcgcggcgattggaagatcgtcttcatccccaagcctaagggtccagaaaaatggcagctgtacaatttggcaaaggacccgggcgaggtacacgacctagccgaggaggaacctgacaagcttaaggagcttatcaagctttgggatatatatgttcttgaaactggtgttatacctttatcgcccgaattaggcaactggatggccgcaatggaagagcagatgccggaaaatgcatggatcgagtatgagtattggaaagacggtgcccgtgacgatccggccaagttcaccaagaagatccccagattccaacgacacgtttcggcgatgtgaaacatccaagcttgaataagtccgaaggcttatatcatgaaataattgtatttgataaaattaggtatgcatgaacaaaagcaaatattgaataagtcatc

SEQ ID NO: 3214 - DNA, 618 bp, Muscodor strobelii
  misc_feature: SGI cDNA ID NO. 560724
  misc_feature: Encodes the peptide sequence at SEQ ID NO 3215
atgactgactcacgagatgttgttggcactcatgaacgagctgatgttgaagatgagagccgtcagtctcaagtgaccattgcggatcgggattccggctccttaaaaagcgaacgcaaaattgaaaatgaatgttcttcctcggtaagtccccatggtcaagctccaacagaaacaccatcacagacagactgttctgcggatgtcttgcaaactgaggatgtaaagaagatgagattgatcattcccagaatttacggcagtcgacatcatcgcactcagaaggttagcgatgtcggccaagaccaggcctatctgagtgaagaggagtgggttgaagttcaattgagtatcagtggctttgagagctccgacagggacagagaggacctaggtggtcacgacttccttacaaagttagacgatctagaggcagcacgaccgatcccgacaaaagagacgacattgatgccgggggataggagtggtatatgggaacagccaaactttactcagcgcgcgcctgtgcaaaatttcgaaagctgggcagacgaagccgactctctagaagctaatgcttcaatgcccgaaggcactaggttttacaaggtagaataa

SEQ ID NO: 3215 - protein, 205 aa, Muscodor strobelii
  misc_feature: SGI Peptide ID NO. 560724
MTDSRDVVGTHERADVEDESRQSQVTIADRDSGSLKSERKIENECSSSVSPHGQAPTETPSQTDCSADVLQTEDVKKMRLIIPRIYGSRHHRTQKVSDVGQDQAYLSEEEWVEVQLSISGFESSDRDREDLGGHDFLTKLDDLEAARPIPTKETTLMPGDRSGIWEQPNFTQRAPVQNFESWADEADSLEANASMPEGTRFYKVE

SEQ ID NO: 3216 - DNA, 206 bp, Muscodor strobelii
  misc_feature: SGI EST ID NO. CUFF.8004.0
  misc_feature: Variant of the nucleotide sequence at SEQ ID NO 3214
gtggtcacgacttccttacaaagttagacgatctagaggcagcacgaccgatcccgacaaaagagacgacattgatgccgggggataggagtggtatatgggaacagccaaactttactcagcgcgcgcctgtgcaaaatttcgaaagctgggcagacgaagccgactctctagaagctaatgcttcaatgcccgaaggcactagg

SEQ ID NO: 3217 - DNA, 477 bp, Muscodor strobelii
  misc_feature: SGI cDNA ID NO. 560725
  misc_feature: Encodes the peptide sequence at SEQ ID NO 3218
atgggcacttcgaacggcgacttgatccaatctatcgctgagaactacggcacaaatacgtgggaagtgtttgcgtacactctactatcgacatcgtcaacttcgcagttcccggtctattcagactccaccgccgcgtcggcaggaaaccaaatcaccatgcactacacatacaacgattctacaggcaactatactcaagcagtatccatcaatggtaaccaggttgcgacactatcgacaagcgatgggcatgctcaaggatatggcacagctgtcgagtgcgcagccgaggattgtggcacagtccccgcacactcttggattaatacaaaaatcattatggacgttgctgacccaacatacaaaaacaccatggggcttggaggaggtgcgacgggtggtagtatgactaccagtgatgggggcaaaacatggacagtctcaaccatcaacatcccgcagtttacattctaa

SEQ ID NO: 3218 - protein, 158 aa, Muscodor strobelii
  misc_feature: SGI Peptide ID NO. 560725
  misc_feature (1)..(158): NCBI GI: 119494313 Blast Desc: NFIA_008320 [Neosartorya fischeri NRRL 181] gi|119412214|gb|EAW22155.1| NFIA_008320 [Neosartorya fischeri NRRL 181]
  misc_feature (1)..(158): NCBI GI: 169782510 Blast Desc: [Aspergillus oryzae RIB40] gi|83774461|dbj|BAE64584.1| protein product [Aspergillus oryzae]
  misc_feature (1)..(158): NCBI GI: 238492125 Blast Desc: conserved [Aspergillus flavus NRRL3357] gi|220695793|gb|EED52135.1| conserved [Aspergillus flavus NRRL3357]
  misc_feature (1)..(158): NCBI GI: 145256283 Blast Desc: An10g00970 [Aspergillus niger CBS 513.88] gi|134078660|emb|CAK40533.1| protein product [Aspergillus niger]
  misc_feature (1)..(158): NCBI GI: 256729252 Blast Desc: NECHADRAFT_84034 [Nectria haematococca mpVI 77-13-4]
  misc_feature (1)..(158): NCBI GI: 70996636 Blast Desc: AFUA_1G17050 [Aspergillus fumigatus Af293] gi|66850708|gb|EAL91035.1| AFUA_1G17050 [Aspergillus fumigatus Af293] gi|159131809|gb|EDP56922.1| AFUB_016440 [Aspergillus
  misc_feature (1)..(158): NCBI GI: 67904660 Blast Desc: AN9317.2 [Aspergillus nidulans FGSC A4] gi|40747228|gb|EAA66384.1| AN9317.2 [Aspergillus nidulans FGSC A4] gi|259488152|tpe|CBF87391.1| TPA: conserved [Aspergillus FGSC
  misc_feature (1)..(158): NCBI GI: 46115884 Blast Desc: FG03784.1 [Gibberella zeae PH-1]
  misc_feature (1)..(158): NCBI GI: 256723305 Blast Desc: NECHADRAFT_97189 [Nectria haematococca mpVI 77-13-4]
  misc_feature (54)..(158): NCBI GI: 169778095 Blast Desc: [Aspergillus oryzae RIB40] gi|238495362|ref|XP_002378917.1| conserved [Aspergillus flavus NRRL3357] gi|83772250|dbj|BAE62380.1| protein product oryzae]
MGTSNGDLIQSIAENYGTNTWEVFAYTLLSTSSTSQFPVYSDSTAASAGNQITMHYTYNDSTGNYTQAVSINGNQVATLSTSDGHAQGYGTAVECAAEDCGTVPAHSWINTKIIMDVADPTYKNTMGLGGGATGGSMTTSDGGKTWTVSTINIPQFTF

SEQ ID NO: 3219 - DNA, 396 bp, Muscodor strobelii
  misc_feature: SGI cDNA ID NO. 560726
  misc_feature: Encodes the peptide sequence at SEQ ID NO 3220
atgatatcgctaaagacttttcttcttctagcgacaatctctgccgcgacaatcatcccttcaggcaggttctcgcatactggtgttgagtcacaaccggacgtggatgatgtctatgccaattacaccctcggggacattgaatggcggggattcgagggctttgaggatgttgtctttacgggaaccatcgagaatgttatccaacaaatgaagaagatcaagggttcgcacttcgtaccggactttgtcaaaaaggcagagaccgagattgagactcatggcataaaaactcgagacggcccggaaccacctagcaccagtctgaagatgaactgtatccgcgatgggttgagtgctgcccttctcattccgattcgaaatggcgtcaaatag

SEQ ID NO: 3220 - protein, 131 aa, Muscodor strobelii
  misc_feature: SGI Peptide ID NO. 560726
MISLKTFLLLATISAATIIPSGRFSHTGVESQPDVDDVYANYTLGDIEWRGFEGFEDVVFTGTIENVIQQMKKIKGSHFVPDFVKKAETEIETHGIKTRDGPEPPSTSLKMNCIRDGLSAALLIPIRNGVK

SEQ ID NO: 3221 - DNA, 579 bp, Muscodor strobelii
  misc_feature: SGI cDNA ID NO. 560727
  misc_feature: Elevated expression when VOC is produced
  misc_feature: Encodes the peptide sequence at SEQ ID NO 3222
atgttaaaatcaattctttcagtcattggtacactagtcgccgtgtcggcagcatgtaaaattccgacggggccggcgttgtctaacaatatcactgaaggattctcgctccaacttcaaaatgcgtcttaccccgatattcataatcactatcttaatatctgggattggggcggtggcgaccaacacctattcgtcagtcccgcgggcaattcgacaagcgagttacagctcattaatggggtcatcacccttccatgggatccgcctcgaagggcggtgattaatggagagtatgagcctctcgacaacacaacgaagatgttcatgaccgaccgtggcgatcctcgcgctatctgggacgtcgtgtatggttgcaacccggatacagataagctgcaggtagagctcaagctcaagtccagaggcgacctcgagaatggcggccttatgggagtccgtccgttcaatgggatgtacgatttcagatggaaaggaccaggtacttcagttaatgaccccaatcgtccttggactcatgttactatggtcgttgtgcataatgccaccacgtcttga

SEQ ID NO: 3222 - protein, 192 aa, Muscodor strobelii
  misc_feature: SGI Peptide ID NO. 560727
  misc_feature (2)..(187): NCBI GI: 149209157 Blast Desc: MGCH7_ch7g71 [Magnaporthe grisea 70-15] gi|86196026|gb|EAQ70664.1| MGCH7_ch7g71 [Magnaporthe grisea 70-15]
  misc_feature (2)..(167): NCBI GI: 145614905 Blast Desc: MGG_09648 [Magnaporthe grisea 70-15] gi|145021814|gb|EDK05891.1| MGG_09648 [Magnaporthe grisea 70-15]
  misc_feature (2)..(185): NCBI GI: 145614096 Blast Desc: MGG_08971 [Magnaporthe grisea 70-15] gi|145021070|gb|EDK05199.1| MGG_08971 [Magnaporthe grisea 70-15]
  misc_feature (9)..(186): NCBI GI: 85106850 Blast Desc: NCU06555 [Neurospora crassa OR74A] gi|28923863|gb|EAA33026.1| [Neurospora crassa OR74A]
  misc_feature (3)..(186): NCBI GI: 116195086 Blast Desc: CHGG_04141 [Chaetomium globosum CBS 148.51] gi|88180054|gb|EAQ87522.1| CHGG_04141 [Chaetomium globosum CBS 148.51]
  misc_feature (2)..(186): NCBI GI: 170940138 Blast Desc: protein product [Podospora anserina]
  misc_feature (19)..(188): NCBI GI: 261360698 Blast Desc: conserved [Verticillium albo-atrum VaMs.102]
  misc_feature: Useful for introducing or modulating the production of volatile compounds
MLKSILSVIGTLVAVSAACKIPTGPALSNNITEGFSLQLQNASYPDIHNHYLNIWDWGGGDQHLFVSPAGNSTSELQLINGVITLPWDPPRRAVINGEYEPLDNTTKMFMTDRGDPRAIWDVVYGCNPDTDKLQVELKLKSRGDLENGGLMGVRPFNGMYDFRWKGPGTSVNDPNRPWTHVTMVVVHNATTS

SEQ ID NO: 3223 - DNA, 1062 bp, Muscodor strobelii
  misc_feature: SGI EST ID NO. CUFF.8011.0
  misc_feature: Variant of the nucleotide sequence at SEQ ID NO 3221
gctcaatccagaaggattgagcacctgcctatctctgcattttgcgtccttggccgagctagaagtccttcaaagagcagttgtgccaaatcattgagccccagatccgctcaagcatgcaatactatgcaagatgctgcagcgattctcgtaatagctcttggcatgcaccgacgatgcaactcttggcagtcgatctaccaccctaatagcgaaccgctgctgccaagacgtgagatggctcttaagcttaaataggctgatctttcgtgttgatgaggattgggaaaatcgtctcaatcaactgtcttcacaaactgaactagaatttacgggaactcctcaaaatgttaaaatcaattctttcagtcattggtacactagtcgccgtgtcggcagcatgtaaaattccgacggggccggcgttgtctaacaatatcactgaaggattctcgctccaacttcaaaatgcgtcttaccccgatattcataatcactatcttaatatctgggattggggcggtggcgaccaacacctattcgtcagtcccgcgggcaattcgacaagcgagttacagctcattaatggggtcatcacccttccatgggatccgcctcgaagggcggtgattaatggagagtatgagcctctcgacaacacaacgaagatgttcatgaccgaccgtggcgatcctcgcgctatctgggacgtcgtgtatggttgcaacccggatacagataagctgcaggtagagctcaagctcaagtccagaggcgacctcgagaatggcggccttatgggagtccgtccgttcaatgggatgtacgatttcagatggaaaggaccaggtacttcagttaatgaccccaatcgtccttggactcatgttactatggtcgttgtgcataatgccaccacgtcttgagatcaccattccggagttgtagatagagtactcaaagtgatgttaggatggatattccgctatcattagtgttgatttgattgagttgttatatcaataaaattctatttatcaaataaacatcgaaccataatcc

SEQ ID NO: 3224 - DNA, 216 bp, Muscodor strobelii
  misc_feature: SGI cDNA ID NO. 560728
  misc_feature: Reduced expression when VOC is produced
  misc_feature: Encodes the peptide sequence at SEQ ID NO 3225
atgtttgggatatacgatattcatgttcgactacagggcaggatggacgtcatcaagcagcatatcgcagagatcgacagtgcgattatcatagctcggcaatggctccgagaggcgaaaacggataaggagaaagccgaccggcaggcaaaactgtcgaaactcgaagccgacaaagctgcagagcaggcgaagctctcagctatgggtggctga

SEQ ID NO: 3225 - protein, 71 aa, Muscodor strobelii
  misc_feature: SGI Peptide ID NO. 560728
  misc_feature: Useful for introducing or modulating the production of volatile compounds
MFGIYDIHVRLQGRMDVIKQHIAEIDSAIIIARQWLREAKTDKEKADRQAKLSKLEADKAAEQAKLSAMGG

SEQ ID NO: 3226 - DNA, 1551 bp, Muscodor strobelii
  misc_feature: SGI EST ID NO. CUFF.8032.0
  misc_feature: Variant of the nucleotide sequence at SEQ ID NO 3224
ggagtcccgagggtgccgggggacggccagaaacctagttacgcgcccctggcgcccataagcagccaagaccgttgatttgcaagggggaacagacgcagacgaacgttatgggttgcaggctgcaggacgtttattgcttgtagattgatagatagcatacagtaccatacctagcatctcctttcctcatatatgcaagattggcactttggcgttcggtgaatggttcgctaaaaaatctagaaatctaaaaatcgagtgaccgcatacctctgatcggcacgatctggtgcgattgctgtaaaaattatctcgaacgcgacaagatcggcgctcttgttgcgaatagtttcacttacatgctagccagagatgctcgatagttgttagagtttctttggcaagaacacgcatgcttctactatcattgtaatttcaattgaaaacgccataacagacctagtctatcctcgaggcgcgggcctaagcaccaccagatttgtgaacgacgtcagcgtttgcttcgatatactggtcctaccgatgacacgcgaggagccaatatgaatccgcagacagctagaaacaccaagtcgagagcgcaagaagaacaaatgaagacagtaatccggcaaagattgcttccaggatagaaaaattgaaacatctagagatttcctttccgcacaagccgcatcattgaacattacacgaacgctacaactatatatctatgtttgggatatacgatattcatgttcgactacagggcaggatggacgtcatcaagcagcatatcgcagagatcgacagtgcgattatcatagctcggcaatggctccgagaggcgaaaacggataaggagaaagccgaccggcaggcaaaactgtcgaaactcgaagccgacaaagctgcagagcaggcgaagctctcagctatgggtggctgaacaaaaaaagacaaatacaaaataggaggggcacaggcaataatggtaatggaacatgtgatagcattgcacgagctcatcactttaatactctgattttaagggagacattttggtctttctacgaaaagtttatacactcttgggaggctacatcaatgatttttagaaggtgaaaaagtcgcaagcttgaagaagaaaatggagtcaggcggcggaggcagctactcgacgctggccgcataatactgtgttctgtaatctgtagtcttgcagcctcaagcatttctattaacttctagttctccaagttctgctattccagacttttaataaattgttaacagcaagaaagaaaacagacatcgtcactctattacactctgtcatcccaacaaattacacaaaatagggcatgtaagggtgaatagcgcacgaaccatgcggacaccaagccaagccgtttgacaacgagcggagtaaattacatcctggtaccatgtggcttgtctcactaccggcagttttttagcaaacagttcattcagcccatgctagttggcgtggcaaacagagagctcgagcataacacatgttga

SEQ ID NO: 3227 - DNA, 4761 bp, Muscodor strobelii
  misc_feature: SGI cDNA ID NO. 560729
  misc_feature: Encodes the peptide sequence at SEQ ID NO 3228
atgacgagttcgagtttgtggcagtgctactgggaaaatgacatcgacaagttccgtcgattgcttcagcctgcgggttcccatcatacaccatcaaaaggtgcggctaccggcttagggaaccccggtgccttcgggagctcaccgcgctccctgccaaagtttcgtagggcatctggcttcggctcagctggcggcgccagtaagggaactactgccggcttaggcaaggcagagatcaacagtcgcgatcactgcggcctaacactgcttttacgcgccgcttcctctacgtcgccttctgcgctcgacttcgtccaggcgctactcgatcatcccactatcgatatttacatccaagacccagagagcggctggaatgccctccaccgcgccttgtacaatggcaatatatctatcgcaaggctcttgctagagaaggaacgtagagacctggtcgagtcagttggcttagtgagcaatgtgaaagtcgggcagttgatcaagacgaaagataacgaggggaacagtcccttcgatctatacaatgcgaccattgccctccgttctcttaaggctgcagaagaccattccaatgcggatgacggatctgagcctgacgagggtgccgcatccaccgagtcccaacacccgctatggtctttgggacttggaagcgaagtcttcatgttcggtagtaataacaatctctccctcggtctcggcgacgaagatgacagacagttcccggagcgcgtccatctaaaacgtactgagcatctcgttcggtacttccatgaacagcatgtcaagcaattgaaagatcgatcaatgctaggcgggcccatctcgcatgacattatagatattccggccctcgttcaaaatcgccctctggttttcgaagacgttgttttgtctaagctccatagcgccatcttaacgacagatcctatatcgaacctctatatttgcggtatcggtcgaggaggtcgcttgggtctcggcgacgagaatacccagtttagcttcattcctgttcaaggcgggctcgtggataagaaagtgtcgcaaatcgcactaggccagaatcacacgatggctgtaaccagtgatggtaaactgtggacttggggttccaacactcatgctcaacttggatatacgctaccgccgcctctcaaacccgacgaggatccaatcagtacgacaccacgccaggtatttggccccttgaagaatgagatcattgtgggtgtggctgcttcatctatacactcggttgtgcacactggctcgtcattattctgctggggcaaaaatgtgggacagctgggcctcatggacgcagattcaagatctctggaattgcaagctgtgcctcgcaaagtagctgccaccctgatttcgagccattcttcggtggtatcggctgtgtctgccattgacaaagcgacatgttgcctgttcggagatcgctctcttgtcgtctttaccagctacggatacaagatgatcaatattcagagcaatatgatgtccgctagcttagctgttcgacagtcagtacgaccatcttcgacaccttacgattccaaatgccaggagattcatcaagtagcatctggcggagatacgatcgcggtcgtaacaggcagcggtgatcttttcactatgcagttgaaccaaagactggatagtgaccaactgagcgcgtcaactaccaatcccgccaagataaaggacgcgatcacagcacctcaatgcatttggacgtctcgaaaagatggtgtcaagtctgttggcgttggcgagaatggctctgtaattatatccacgcagtctggcgccgtctggcgacgtatcaagcgagccaaggcacaagacacgaaagctcctgctgtccaagattcgaagcgcaaagccttcaagtttcagcgtgtcccatacatcactgatgtggtgagcgtgagaagctcagcttttggtgcttatgccgctgttcgtaaagactgtgatgtcacccgcgatcagctcgagatccaggagcccagtctctggcaagacgtgggtcgcttattaccactgcaagacttcaaggctcagaattacaaaaaccgacagaataaagacacttcgagtttccagaatgccgagaaattgaagagtcagatggacagtcttacctacgaagttttgacctctaccgatcttgaggatgacctgacatatcatttcaggaactggaaatttgggaatgaaactacaggtgccgctgttcgctctgcttccaactcacaccttgcactcccagttcacacctggattctttcagcgcgaagtgctgttttacgcacaggcctacaacgatttcgggagaccggacagttccagattcctgaactgctaaccatcaaggaggaatccggcgaaatcatcatcgagtttgtaagcggtattgacacgatcacgttgataaatctcgttgtttacatgtaccgcgataccgttgttcctgcttggaatttcacgcgccagtcgccacccctggcttacagataccgtcaaatccgtactgagctcatgaagatcgccactcggctagaaatgccaaaactagaggctgctgcgcgcacccagacgtatccgcctcgttccatgaaccaagactttcgcagagcacttgaagatgccgctttcttcgaagacggcgatgccttgttggagcttgatggagacgagatacctgtccatagctcgttactctcccagagatgtccctggtttgagggtctttttcacggacgctctcgagggaagtggcttgaaaccagacgagccacacaaaacaacgcggagccaatcaatattgacatgcttcacatggatccggaatcatttcattatgttctccaattcttgtacgcagacgtgggagaggacctctttgattcggttgtagcagacaatatcgacgacttttctgaactggttatggatgtgatgagcattgcgaacgagttaatgctcgatcgcctctcgcagatatgccagaaaattcttggccgttttgtctccactcggaacatatcaactcttatgaacctgatcagcccctgctccgtgaccgagttcaagaaaaagggcctcgagtacatctgtctccaaatggaggcgatgctggaaaaccacctgctcgatgacttagacgacgaacttatcctcgagctagatgaagtagtcagagacaatcaacttgcgcgatgcccattcgccaagagtggtcataatgaggcacttctgcacgaacaaaacccagagctagcacaggatatcttggaagagaggcagatccgagtcaaggagatggcattcaaggcctaccacagagatgacgacaagaagatgtcttcttcctacaaagcgcggttcggaagtcttggcgatctttccggtatttctcctactccggaacgacctcaactacgaaaaccaagagtatcccgtaacgaaccctttagccccagtcttcggccaaaggactctcatgcggatctcatcttcgatatggacgaagaagaggattccagcgtagcaagcccattgtcaccgagtccgcagcctacatcaatggttgatcgagatgaagtagatcgcctgccatcgctatccttaccccggcgtagggaaaggactgccgtaccctcagaatcacctcaaatcgtttcgacgccgcctgcaccgtcaccatcatcgaatctcgagtctcttgcgatcaggagtgaaagcgacgtgtctcaaagaccctccggtccttggaaaccctctgtactccctacttctcgtttagatcttcgagaagtgttaacagagtcgaaacctgctcagtcagccttatcagccggattggcggctgcgaatcgagaagcgggcaccagatctacgccgcaaaaggtgtcacagagagagaaaaagaagcagcttcagcaacaagccgaacagatggcacggcaagaggccgacgtcaaaacgcaatcacaaacgccatggagcaatgtcggcgaaaagaagagccacccatggaaaagctccgccccggttccgaaatcatctatctctactcttctcagccctgactccgctgccgcggcgagaccccctgatgccggggcggcttcgtcaagcaagtcgattgctagacgtgccgcatcacccgataccaggttcccaggccagcgatcaaacactacgccacaagcatccacatccacgtctaaaggcgcctcccgtgctgaacctcaacccttgaccccacactcgaaatcgtacatcaagcgggcgccgaagcacgaacaggaattcggcctcggactcgccgatatcatcggccagcaacagcgcgagcagcagagcgtcaaagaagctgtcgcgaagagaagtctacaggagatacagcaagagcaggagtttcaggagtggtgggatcaggagagtaacagggtgaaagaggaagaagccagacaagctgcgcgacttgcgagagaggagaataaggataggaagaaggagggtgggaggaggggacgaggtagtaggtcgaaagggagaggagggggcggaggcgcgaataaggagaaggagagtggtgtgggtgtggtttctggaagacctgcacaaggccagagccagaaccaagagaagggttcgacgagtgtgactacgagagggaaggggagggcgaatagaggaggcaagacatag

SEQ ID NO: 3228 - protein, 1586 aa, Muscodor strobelii
  misc_feature: SGI Peptide ID NO. 560729
  misc_feature (899)..(1025): Pfam Id: PF00651 Pfam Desc: BTB/POZ domain
  misc_feature (3)..(1577): NCBI GI: 212529146 Blast Desc: BTB domain and ankyrin repeat protein [Penicillium marneffei ATCC 18224] gi|210074128|gb|EEA28215.1| BTB domain and ankyrin repeat protein [Penicillium marneffei ATCC 18224]
  misc_feature (3)..(1568): NCBI GI: 226292063 Blast Desc: BTB domain and ankyrin repeat protein [Paracoccidioides brasiliensis Pb18]
  misc_feature (4)..(1571): NCBI GI: 119480145 Blast Desc: BTB domain and ankyrin repeat protein [Neosartorya fischeri NRRL 181] gi|119408255|gb|EAW18204.1| BTB domain and ankyrin repeat protein [Neosartorya fischeri NRRL 181]
  misc_feature (3)..(1501): NCBI GI: 242764350 Blast Desc: BTB domain and ankyrin repeat protein [Talaromyces stipitatus ATCC 10500] gi|218723949|gb|EED23366.1| BTB domain and ankyrin repeat protein [Talaromyces stipitatus ATCC 10500]
  misc_feature (3)..(1502): NCBI GI: 255932875 Blast Desc: Pc12g10880 [Penicillium chrysogenum Wisconsin 54-1255] gi|211582527|emb|CAP80715.1| Pc12g10880 [Penicillium chrysogenum Wisconsin 54-1255]
  misc_feature (3)..(1555): NCBI GI: 145243850 Blast Desc: An11g04420 [Aspergillus niger] gi|134079120|emb|CAK45932.1| protein product [Aspergillus niger]
  misc_feature (3)..(1502): NCBI GI: 121710216 Blast Desc: BTB domain and ankyrin repeat protein [Aspergillus clavatus NRRL 1] gi|119400874|gb|EAW11298.1| BTB domain and ankyrin repeat protein [Aspergillus clavatus NRRL 1]
  misc_feature (3)..(1501): NCBI GI: 225557403 Blast Desc: BTB domain and ankyrin repeat protein [Ajellomyces capsulatus G186AR]
  misc_feature (3)..(1501): NCBI GI: 154274708 Blast Desc: [Ajellomyces capsulatus NAm1] gi|150414645|gb|EDN10007.1| [Ajellomyces capsulatus NAm1]
  misc_feature (4)..(1538): NCBI GI: 159129014 Blast Desc: BTB domain and ankyrin repeat protein [Aspergillus fumigatus A1163]
MTSSSLWQCYWENDIDKFRRLLQPAGSHHTPSKGAATGLGNPGAFGSSPRSLPKFRRASGFGSAGGASKGTTAGLGKAEINSRDHCGLTLLLRAASSTSPSALDFVQALLDHPTIDIYIQDPESGWNALHRALYNGNISIARLLLEKERRDLVESVGLVSNVKVGQLIKTKDNEGNSPFDLYNATIALRSLKAAEDHSNADDGSEPDEGAASTESQHPLWSLGLGSEVFMFGSNNNLSLGLGDEDDRQFPERVHLKRTEHLVRYFHEQHVKQLKDRSMLGGPISHDIIDIPALVQNRPLVFEDVVLSKLHSAILTTDPISNLYICGIGRGGRLGLGDENTQFSFIPVQGGLVDKKVSQIALGQNHTMAVTSDGKLWTWGSNTHAQLGYTLPPPLKPDEDPISTTPRQVFGPLKNEIIVGVAASSIHSVVHTGSSLFCWGKNVGQLGLMDADSRSLELQAVPRKVAATLISSHSSVVSAVSAIDKATCCLFGDRSLVVFTSYGYKMINIQSNMMSASLAVRQSVRPSSTPYDSKCQEIHQVASGGDTIAVVTGSGDLFTMQLNQRLDSDQLSASTTNPAKIKDAITAPQCIWTSRKDGVKSVGVGENGSVIISTQSGAVWRRIKRAKAQDTKAPAVQDSKRKAFKFQRVPYITDVVSVRSSAFGAYAAVRKDCDVTRDQLEIQEPSLWQDVGRLLPLQDFKAQNYKNRQNKDTSSFQNAEKLKSQMDSLTYEVLTSTDLEDDLTYHFRNWKFGNETTGAAVRSASNSHLALPVHTWILSARSAVLRTGLQRFRETGQFQIPELLTIKEESGEIIIEFVSGIDTITLINLVVYMYRDTVVPAWNFTRQSPPLAYRYRQIRTELMKIATRLEMPKLEAAARTQTYPPRSMNQDFRRALEDAAFFEDGDALLELDGDEIPVHSSLLSQRCPWFEGLFHGRSRGKWLETRRATQNNAEPINIDMLHMDPESFHYVLQFLYADVGEDLFDSVVADNIDDFSELVMDVMSIANELMLDRLSQICQKILGRFVSTRNISTLMNLISPCSVTEFKKKGLEYICLQMEAMLENHLLDDLDDELILELDEVVRDNQLARCPFAKSGHNEALLHEQNPELAQDILEERQIRVKEMAFKAYHRDDDKKMSSSYKARFGSLGDLSGISPTPERPQLRKPRVSRNEPFSPSLRPKDSHADLIFDMDEEEDSSVASPLSPSPQPTSMVDRDEVDRLPSLSLPRRRERTAVPSESPQIVSTPPAPSPSSNLESLAIRSESDVSQRPSGPWKPSVLPTSRLDLREVLTESKPAQSALSAGLAAANREAGTRSTPQKVSQREKKKQLQQQAEQMARQEADVKTQSQTPWSNVGEKKSHPWKSSAPVPKSSISTLLSPDSAAAARPPDAGAASSSKSIARRAASPDTRFPGQRSNTTPQASTSTSKGASRAEPQPLTPHSKSYIKRAPKHEQEFGLGLADIIGQQQREQQSVKEAVAKRSLQEIQQEQEFQEWWDQESNRVKEEEARQAARLAREENKDRKKEGGRRGRGSRSKGRGGGGGANKEKESGVGVVSGRPAQGQSQNQEKGSTSVTTRGKGRANRGGKT

SEQ ID NO: 3229 - DNA, 5874 bp, Muscodor strobelii
  misc_feature: SGI EST ID NO. CUFF.8160.0
  misc_feature: Variant of the nucleotide sequence at SEQ ID NO 3227
gatcggggcttctagggtaatgactgtcgcggggtcgatcgcgacaatgacagcagcttccattcaggccgtcttcacatgatgcccactaactttaattgctgattacgagtgataaatctgtatttccctctcttccctttgttcaaagccagtcgccgacctatataccagcaaataccgttcttgacagaccaattcgagcatcctacgagtctattttcctcaacccgactactatctccagtattgtcgcacacctaggcccctacagtcaaccttatatccgatcccgatcttgccacgccaccatcttcacgaagggttcgcgattttgtcgaagagttagaaaacgaactaacctcttatcattctcgagtctagcaagcactattctaagtcattcagcattgcgattcttgagactgcgatatcgtctcctcccctggagttatttgccgaccccttctcgtccaagtccgttcgatatcacctttaaacaggctgcagtcctctagaggcttcggcgaggtgttatctgagacggcctagacatccttctgcgagattccatgacgagttcgagtttgtggcagtgctactgggaaaatgacatcgacaagttccgtcgattgcttcagcctgcgggttcccatcatacaccatcaaaaggtgcggctaccggcttagggaaccccggtgccttcgggagctcaccgcgctccctgccaaagtttcgtagggcatctggcttcggctcagctggcggcgccagtaagggaactactgccggcttaggcaaggcagagatcaacagtcgcgatcactgcggcctaacactgcttttacgcgccgcttcctctacgtcgccttctgcgctcgacttcgtccaggcgctactcgatcatcccactatcgatatttacatccaagacccagagagcggctggaatgccctccaccgcgccttgtacaatggcaatatatctatcgcaaggctcttgctagagaaggaacgtagagacctggtcgagtcagttggcttagtgagcaatgtgaaagtcgggcagttgatcaagacgaaagataacgaggggaacagtcccttcgatctatacaatgcgaccattgccctccgttctcttaaggctgcagaagaccattccaatgcggatgacggatctgagcctgacgagggtgccgcatccaccgagtcccagtaagactttgcgctatggttgtttcgacgtgcttgaactaacggtgacatgtcagacacccgctatggtctttgggacttggaagcgaagtcttcatgttcggtagtaataacaatctctccctcggtctcggcgacgaagatgacagacagttcccggagcgcgtccatctaaaacgtactgagcatctcgttcggtacttccatgaacagcatgtcaagcaattgaaagatcgatcaatgctaggcgggcccatctcgcatgacattatagatattccggccctcgttcaaaatcgccctctggttttcgaagacgttgttttgtctaagctccatagcgccatcttaacgacagatcctatatcgaacctctatatttgcggtatcggtcgaggaggtcgcttgggtctcggcgacgagaatacccagtttagcttcattcctgttcaaggcgggctcgtggataagaaagtgtcgcaaatcgcactaggccagaatcacacgatggctgtaaccagtgatggtaaactgtggacttggggttccaacactcatgctcaacttggatatacgctaccgccgcctctcaaacccgacgaggatccaatcagtacgacaccacgccaggtatttggccccttgaagaatgagatcattgtgggtgtggctgcttcatctatacactcggttgtgcacactggctcgtcattattctgctggggcaaaaatgtgggacagctgggcctcatggacgcagattcaagatctctggaattgcaagctgtgcctcgcaaagtagctgccaccctgatttcgagccattcttcggtggtatcggctgtgtctgccattgacaaagcgacatgttgcctgttcggagatcgctctcttgtcgtctttaccagctacggatacaagatgatcaatattcagagcaatatgatgtccgctagcttagctgttcgacagtcagtacgaccatcttcgacaccttacgattccaaatgccaggagattcatcaagtagcatctggcggagatacgatcgcggtcgtaacaggcagcggtgatcttttcactatgcagttgaaccaaagactggatagtgaccaactgagcgcgtcaactaccaatcccgccaagataaaggacgcgatcacagcacctcaatgcatttggacgtctcgaaaagatggtgtcaagtctgttggcgttggcgagaatggctctgtaattatatccacgcagtctggcgccgtctggcgacgtatcaagcgagccaaggcacaagacacgaaagctcctgctgtccaagattcgaagcgcaaagccttcaagtttcagcgtgtcccatacatcactgatgtggtgagcgtgagaagctcagcttttggtgcttatgccgctgttcgtaaagactgtgatgtcacccgcgatcagctcgagatccaggagcccagtctctggcaagacgtgggtcgcttattaccactgcaagacttcaaggctcagaattacaaaaaccgacagaataaagacacttcgagtttccagaatgccgagaaattgaagagtcagatggacagtcttacctacgaagttttgacctctaccgatcttgaggatgacctgacatatcatttcaggaactggaaatttgggaatgaaactacaggtgccgctgttcgctctgcttccaactcacaccttgcactcccagttcacacctggattctttcagcgcgaagtgctgttttacgcacaggcctacaacgatttcgggagaccggacagttccagattcctgaactgctaaccatcaaggaggaatccggcgaaatcatcatcgagtttgtaagcggtattgacacgatcacgttgataaatctcgttgtttacatgtaccgcgataccgttgttcctgcttggaatttcacgcgccagtcgccacccctggcttacagataccgtcaaatccgtactgagctcatgaagatcgccactcggctagaaatgccaaaactagaggctgctgcgcgcacccagacgtatccgcctcgttccatgaaccaagactttcgcagagcacttgaagatgccgctttcttcgaagacggcgatgccttgttggagcttgatggagacgagatacctgtccatagctcgttactctcccagagatgtccctggtttgagggtctttttcacggacgctctcgagggaagtggcttgaaaccagacgagccacacaaaacaacgcggagccaatcaatattgacatgcttcacatggatccggaatcatttcattatgttctccaattcttgtacgcagacgtgggagaggacctctttgattcggttgtagcagacaatatcgacgacttttctgaactggttatggatgtgatgagcattgcgaacgagttaatgctcgatcgcctctcgcagatatgccagaaaattcttggccgttttgtctccactcggaacatatcaactcttatgaacctgatcagcccctgctccgtgaccgagttcaagaaaaagggcctcgagtacatctgtctccaaatggaggcgatgctggaaaaccacctgctcgatgacttagacgacgaacttatcctcgagctagatgaagtagtcagagacaatcaacttgcgcgatgcccattcgccaagagtggtcataatgaggcacttctgcacgaacaaaacccagagctagcacaggatatcttggaagagaggcagatccgagtcaaggagatggcattcaaggcctaccacagagatgacgacaagaagatgtcttcttcctacaaagcgcggttcggaagtcttggcgatctttccggtatttctcctactccggaacgacctcaactacgaaaaccaagagtatcccgtaacgaaccctttagccccagtcttcggccaaaggactctcatgcggatctcatcttcgatatggacgaagaagaggattccagcgtagcaagcccattgtcaccgagtccgcagcctacatcaatggttgatcgagatgaagtagatcgcctgccatcgctatccttaccccggcgtagggaaaggactgccgtaccctcagaatcacctcaaatcgtttcgacgccgcctgcaccgtcaccatcatcgaatctcgagtctcttgcgatcaggagtgaaagcgacgtgtctcaaagaccctccggtccttggaaaccctctgtactccctacttctcgtttagatcttcgagaagtgttaacagagtcgaaacctgctcagtcagccttatcagccggattggcggctgcgaatcgagaagcgggcaccagatctacgccgcaaaaggtgtcacagagagagaaaaagaagcagcttcagcaacaagccgaacagatggcacggcaagaggccgacgtcaaaacgcaatcacaaacgccatggagcaatgtcggcgaaaagaagagccacccatggaaaagctccgccccggttccgaaatcatctatctctactcttctcagccctgactccgctgccgcggcgagaccccctgatgccggggcggcttcgtcaagcaagtcgattgctagacgtgccgcatcacccgataccaggttcccaggccagcgatcaaacactacgccacaagcatccacatccacgtctaaaggcgcctcccgtgctgaacctcaacccttgaccccacactcgaaatcgtacatcaagcgggcgccgaagcacgaacaggaattcggcctcggactcgccgatatcatcggccagcaacagcgcgagcagcagagcgtcaaagaagctgtcgcgaagagaagtctacaggagatacagcaagagcaggagtttcaggagtggtgggatcaggagagtaacagggtgaaagaggaagaagccagacaagctgcgcgacttgcgagagaggagaataaggataggaagaaggagggtgggaggaggggacgaggtagtaggtcgaaagggagaggagggggcggaggcgcgaataaggagaaggagagtggtgtgggtgtggtttctggaagacctgcacaaggccagagccagaaccaagagaagggttcgacgagtgtgactacgagagggaaggggagggcgaatagaggaggcaagacatagagcatcgatagactatgagacgtgtatttttagccaagtcgcgagtcgcgagtcgctgctgtgttggtcgtacctgtgtgaaaataccgtggatggttgcatcgtgaggtacatgaatgggtaaaccctgatcagatcactggcgttttcgggcgtctcgtctagaacatgagttttcttacggcgcagtcgctcttggagatggaagcaagttgattttatcatgctgttgtatatcttggtgggaatgaggggcgtgggatgaatatgtaggtaggcagatgttggggggctgcggtaacttggctgaaataacttaataggaaggtgtgaactgaatgtacagagaaggaccgcgtttatgagtcgcggtcttgtactattggtctacataccatgtcgatacttatgatgttgtgagcttcgcgagtagaagccggacttatgagttttacatgtttatccattcgaggtataggggccag

SEQ ID NO: 3230 - DNA, 921 bp, Muscodor strobelii
  misc_feature: SGI cDNA ID NO. 560730
  misc_feature: Encodes the peptide sequence at SEQ ID NO 3231
atgtcgtcagagaagcccctcggcttccaataccagttcgccgccggcgccatcgccggtgtgtccgaaatcttggtgatgtccgcgatccccagcgcccctctgtaccctttggatgttgtcaagagtcgtctgcaactccagagcagcaaggctgctggcgccgatgcctacaccggtatggtggactgcttccagaagatagtccgcagcgaaggtttctcgagactgtaccggggaattactgctcctattctgatggaagctcccaagcgtgccaccaagtttgccgccaatgacgagtgggggaagttctaccgtaaggcctttggcgccgagaagatgacccagccactgtctatcctgactggtgccactgctggcgctaccgagtcctttgtggttgtccccttcgaattggtcaagctgcgactacagagcaaggagtctgccggccagtacaagggcccgcttgatgtggtgtccaaggtcatcaagaatgagggtattctggccatgtacaacgggcttgagagcaccatgtggcgccacattctctggaatgccggctacttcggctgcatcttccaggtccgccagctactccccaaggccgagaccaagaaggctcagatcaccaacgacatcatctccggaactatcggtggtaccatcggtactgttctcaacaccccgatggatgtcgtcaagtcccgaatccagaatactcccaaagtggccggacagatccccaagtacaactgggcttggccggcgtgtggcaccgtgatgaaggaggagggttttggcgccctgtacaagggcttcttacccaaggtgctcagattgggtcctggtggtggtattctcctagttgttttcacgggcgtgatggacttctttcggacgatgcagaagtag

SEQ ID NO: 3231 - protein, 306 aa, Muscodor strobelii
  misc_feature: SGI Peptide ID NO. 560730
  misc_feature (211)..(305): Pfam Id: PF00153 Pfam Desc: Mitochondrial carrier protein
  misc_feature (116)..(206): Pfam Id: PF00153 Pfam Desc: Mitochondrial carrier protein
  misc_feature (8)..(110): Pfam Id: PF00153 Pfam Desc: Mitochondrial carrier protein
  misc_feature (1)..(306): NCBI GI: 261360748 Blast Desc: mitochondrial 2-oxodicarboxylate carrier 1 [Verticillium albo-atrum VaMs.102]
  misc_feature (1)..(303): NCBI GI: 46128223 Blast Desc: FG08489.1 [Gibberella zeae PH-1]
  misc_feature (1)..(305): NCBI GI: 145611350 Blast Desc: MGG_11577 [Magnaporthe grisea 70-15] gi|145018651|gb|EDK02930.1| MGG_11577 [Magnaporthe grisea 70-15]
  misc_feature (2)..(305): NCBI GI: 189189424 Blast Desc: mitochondrial 2-oxodicarboxylate carrier 2 [Pyrenophora tritici-repentis Pt-1C-BFP] gi|187972657|gb|EDU40156.1| mitochondrial 2-oxodicarboxylate 2
  misc_feature (1)..(306): NCBI GI: 226285254 Blast Desc: mitochondrial 2-oxodicarboxylate carrier 1 [Paracoccidioides brasiliensis Pb01]
  misc_feature (1)..(305): NCBI GI: 154292681 Blast Desc: mitochondrial 2-oxodicarboxylate transport protein [Botryotinia fuckeliana B05.10] gi|150845807|gb|EDN21000.1| mitochondrial 2-oxodicarboxylate transport protein [Botryotinia
  misc_feature (1)..(306): NCBI GI: 171681842 Blast Desc: protein product [Podospora anserina] gi|170940880|emb|CAP66530.1| protein product [Podospora anserina]
  misc_feature (1)..(305): NCBI GI: 225559757 Blast Desc: mitochondrial 2-oxodicarboxylate [Ajellomyces capsulatus G186AR]
  misc_feature (2)..(306): NCBI GI: 242767561 Blast Desc: mitochondrial 2-oxodicarboxylate carrier protein, [Talaromyces stipitatus ATCC 10500] gi|218724589|gb|EED24006.1| mitochondrial 2-oxodicarboxylate carrier protein, [Talaromyces
  misc_feature (2)..(305): NCBI GI: 67521684 Blast Desc: AN1299.2 [Aspergillus nidulans FGSC A4] gi|40746736|gb|EAA65892.1| AN1299.2 [Aspergillus nidulans FGSC A4]
MSSEKPLGFQYQFAAGAIAGVSEILVMSAIPSAPLYPLDVVKSRLQLQSSKAAGADAYTGMVDCFQKIVRSEGFSRLYRGITAPILMEAPKRATKFAANDEWGKFYRKAFGAEKMTQPLSILTGATAGATESFVVVPFELVKLRLQSKESAGQYKGPLDVVSKVIKNEGILAMYNGLESTMWRHILWNAGYFGCIFQVRQLLPKAETKKAQITNDIISGTIGGTIGTVLNTPMDVVKSRIQNTPKVAGQIPKYNWAWPACGTVMKEEGFGALYKGFLPKVLRLGPGGGILLVVFTGVMDFFRTMQK

SEQ ID NO: 3232 - DNA, 1458 bp, Muscodor strobelii
  misc_feature: SGI EST ID NO. CUFF.8048.0
  misc_feature: Variant of the nucleotide sequence at SEQ ID NO 3230
gtccgcgatccccagcgcccctctgtgaccgttgtcgcacgactaccgaccgcatggactgacctcgtacaccgctccaggtaccctttggatgttgtcaagagtcgtctgcaactccagagcagcaaggctgctggcgccgatgcctacaccggtatggtggactgcttccagaagatagtccgcagcgaaggtttctcgagactgtaccggggaattactgctcctattctgatggaagctcccaagcgtgccaccaagtttgccgccaatgacgagtgggggaagttctaccgtaaggcctttggcgccgagaagatgacccagccactgtctatcctgactggtgccactgctggcgctaccgagtcctttgtggttgtccccttcgaattggtcaagctgcgactacagagcaaggagtctgccggccagtacaagggcccgcttgatgtggtgtccaaggtcatcaagaatgagggtattctggccatgtacaacgggcttgagagcaccatgtggcgccacattctctggaatgccggctacttcggctgcatcttccaggtccgccagctactccccaaggccgagaccaagaaggctcagatcaccaacgacatcatctccggaactatcggtggtaccatcggtactgttctcaacaccccgatggatgtcgtcaagtcccgaatccagaatactcccaaagtggccggacagatccccaagtacaactgggcttggccggcgtgtggcaccgtgatgaaggaggagggttttggcgccctgtacaagggcttcttacccaaggtgctcagattgggtcctggtggtggtattctcctagttgttttcacgggcgtgatggacttctttcggacgatgcagaagtagaatgctcgaagcccagttcaaggcaagccatcggcgctgcttgatacccatactatgacagtattcggattcctaaaacgtcatgttcatgtatttggtgtaaaatgatggatagacttcaggcatgagatcttgcgatctactagaatgttttccatacaaggcaaaaggatttaatccaggcgtcagataccgagatgtggtcatagattgtatcatccccgtacatagacctagcacatcaaacatacagtatgcaacgatagttaccgacatctaatatgtccaattgtttgatcaattacgttattgagcacgaccaataacggcagacaagctacatgcatgcagctgtgaggcaggcaaacctctccactaacatgcaggcgaacgaacagctctcatagctccagattaggtaatttattgccaagtgctatcttccctgtagatcactgcaagtatgccagctgcaacccggttaaacatcccatctgccgaacacatagaactcgcaatagcttggattgaaccattcaaatgaccgtatgctctgccccg

SEQ ID NO: 3233 - DNA, 3003 bp, Muscodor strobelii
  misc_feature: SGI cDNA ID NO. 560731
  misc_feature: Encodes the peptide sequence at SEQ ID NO 3234
atgtcgatcactatccctgattccgatgatggaatgagcgacgtcggcgaccatgagaatccaacaccatgggaagggcgcgaaaaaagacgggcgaaaaaagatggtgaagaagaaggcgagggtgggggcgatgatgacgatcctgaggagcccgaggaacctgatgattccgatgactctgacgtcgacccagacgttatgcaccaaggagattccgatgacgactctgacaacgttgccgaagtccgcagactatggcataacgaggttcgcactctcaatcggcgtcatgagagagagacggcgcttttacgccgggagaaccaggctcttgaagctcggattgagcgactggagcaacgcggaaggatcgtgttcgatccttggattcctcgactttacttgttcctaaagaatgtgccgcgacgaccaaaggctgaggactatcaagcacaatacagagtcttatatcgggaatcatgccgacaaggtgtcatggccaggagcagcgctgttcatcatccagatctcaaaatcacccagaagtactactccgagaggtacatccgcaaaagcttcgatcgttggagattggatgattcacaatttcgacgtctctttctcatccttctacccaatctgttcactcagatgcgtccaactcgttttctggagggctcggtattccgtttcgaggatcttccgcgcgaagttcagtggcgtatcttcaaaaaggtctacccgacgaacgagataattcattgtctatctcgccttgacccttacaatcctccacttgacttcactgatccagctttgccgctcaaccatgaaggagagtctcttggatccggctaccccaatcgatttcatatcggaaaggggtcttgctgcatcgtcaaagccaagaagcccaatgatgtcatcggctactttctcgtgtccaaacgctggttattcctcggagctcatctattctatggaaccaatacattcgcatttagttccctaggcgaatttggccgcttctgcaatggcatcaagaaagcacgagttcagcgattggtcaacgtggagatcatgtggcgtggctctctgatgccgaaacaagataatagtatctcgctgcgcaacatcactttgacatggcttatgagagcctctcgtctgcgaacgttggtcgtccacatcaatgagagcagtaagagctacatgcgtcggaagtacgaaatgctcgatgaggccgattacgagaaggattttggcccgcttgacgagagcttggttgacccatttgtgagcggaccgcttatgacacagtcaatgactcagtctctgatcgagagcacgttctcagtgtcgtgtaacaggacagacacgcatccaaacttccgcaaaaatcgcaacatgagaacgcttcaaggcgcagacaatttctggagtttgcgcgggatgaaatggattcgtttttacgatgttgacgccggacctactaaccgtagaacacagatcagagattggtcattcaccgaaggagtcaacaacgttgtgacgctacccaagtctcggagagatactatacttgcggagcttgaaaatcttccggctctccatggactggaggtttacgactatgccgatgaagacatggaactcgtgaggcgcttttacaatattgatgtcaacgaggaatccggctcaccaagcgggtcaagtaccacccaaccttcatcttctcttgagtcgacaccagtaagagatgcctctccatcgtcctctccgccgccttcatcacgacgaccaccacgtcctccgccctctaagatggatgacgctgaggatgaaaagtcagagtcagagtcggactccaagccttcagccctgaagcagcgcaaaacacctgctcgcaaagctcgtacgcgaaaatatggtcgcgccaataagggcaagggcaagggcaagggcaaggccagtttcgtcctccagggtccgcccaggcctagcatgaccacgagaatgagtcaaaggaagagcacgagaatgagttacgatagtgaagacgacaagtacgcctcggattccgataacggcatacttcaagacagctcaatcacttctcagacagtcgtcgatctcactcaagagaaagagaaagatgatggtaattccgatgaggatgagttattcgttcggcaacatccagaggcggacgactctagcacagagagtcttttcgttagagaaggctctatcggtgcagatacagctcgcaccggcggaaccgacgcagatgccagtggcttgtttgtcccggagggctccgtcagcgcgcactcaaccagcgtaaagacaggcgctcgctttgaagtcgatattgatctcacacgcgaggataccagtagcgacgacgaaggcactcgcatggatatcgatatgaaaggttcgactagtgccagtaagtccaggtctatcggagtcaagacagcgagtgacgcaatgaccgtcaaaaccgataccgatataaaatcagatactaaggagagcgtcaaaaaggagtcatcgtctcctggcccaagtatgcctagcgttgtctcaccacgttcgctcttcaatcaacttcatgctgtacctcatgcgggtgatttcgagactattattattccctcagacaccgaggacgaggctggcgatgaagctgacgacgaagctgatgaagaaggcttagtcgttggactagctaagcatgttcagacttctcaggaagtcaactatcgagacgatgagtctattgccatcccttcggactccagcattatcaaacagcaacaccaagacgtctcttcaccatcgatcgctggctacaccacaacctcagccggtaccggcaagcgtgatcgcggcgataatgactcaagtagggacgcgggatcttacaagcgtcagaagcaaagccatggttcccaacagggcgatgaagatgacccaatttccctcaactaa

SEQ ID NO: 3234 - protein, 1000 aa, Muscodor strobelii
  misc_feature: SGI Peptide ID NO. 560731
  misc_feature (230)..(559): NCBI GI: 164426739 Blast Desc: NCU04083 [Neurospora crassa OR74A] gi|157071456|gb|EAA26843.2| [Neurospora crassa OR74A]
  misc_feature (230)..(541): NCBI GI: 171681834 Blast Desc: protein product [Podospora anserina] gi|170940876|emb|CAP66526.1| protein product [Podospora anserina]
  misc_feature (261)..(512): NCBI GI: 116202019 Blast Desc: CHGG_08894 [Chaetomium globosum CBS 148.51] gi|88177412|gb|EAQ84880.1| CHGG_08894 [Chaetomium globosum CBS 148.51]
  misc_feature (232)..(535): NCBI GI: 256733457 Blast Desc: NECHADRAFT_77584 [Nectria haematococca mpVI 77-13-4]
  misc_feature (321)..(412): NCBI GI: 261360741 Blast Desc: conserved [Verticillium albo-atrum VaMs.102]
MSITIPDSDDGMSDVGDHENPTPWEGREKRRAKKDGEEEGEGGGDDDDPEEPEEPDDSDDSDVDPDVMHQGDSDDDSDNVAEVRRLWHNEVRTLNRRHERETALLRRENQALEARIERLEQRGRIVFDPWIPRLYLFLKNVPRRPKAEDYQAQYRVLYRESCRQGVMARSSAVHHPDLKITQKYYSERYIRKSFDRWRLDDSQFRRLFLILLPNLFTQMRPTRFLEGSVFRFEDLPREVQWRIFKKVYPTNEIIHCLSRLDPYNPPLDFTDPALPLNHEGESLGSGYPNRFHIGKGSCCIVKAKKPNDVIGYFLVSKRWLFLGAHLFYGTNTFAFSSLGEFGRFCNGIKKARVQRLVNVEIMWRGSLMPKQDNSISLRNITLTWLMRASRLRTLVVHINESSKSYMRRKYEMLDEADYEKDFGPLDESLVDPFVSGPLMTQSMTQSLIESTFSVSCNRTDTHPNFRKNRNMRTLQGADNFWSLRGMKWIRFYDVDAGPTNRRTQIRDWSFTEGVNNVVTLPKSRRDTILAELENLPALHGLEVYDYADEDMELVRRFYNIDVNEESGSPSGSSTTQPSSSLESTPVRDASPSSSPPPSSRRPPRPPPSKMDDAEDEKSESESDSKPSALKQRKTPARKARTRKYGRANKGKGKGKGKASFVLQGPPRPSMTTRMSQRKSTRMSYDSEDDKYASDSDNGILQDSSITSQTVVDLTQEKEKDDGNSDEDELFVRQHPEADDSSTESLFVREGSIGADTARTGGTDADASGLFVPEGSVSAHSTSVKTGARFEVDIDLTREDTSSDDEGTRMDIDMKGSTSASKSRSIGVKTASDAMTVKTDTDIKSDTKESVKKESSSPGPSMPSVVSPRSLFNQLHAVPHAGDFETIIIPSDTEDEAGDEADDEADEEGLVVGLAKHVQTSQEVNYRDDESIAIPSDSSIIKQQHQDVSSPSIAGYTTTSAGTGKRDRGDNDSSRDAGSYKRQKQSHGSQQGDEDDPISLN

SEQ ID NO: 3235 - DNA, 1494 bp, Muscodor strobelii
  misc_feature: SGI cDNA ID NO. 560732
  misc_feature: Encodes the peptide sequence at SEQ ID NO 3236
atgccgaaacgaaagagagaacccagcctagaggagagactcgcgaactggcgcaaggaactggtccgagccttgaagaccgccaaaggattcgagcgccagcgcttgagcaaacgacttcgcgaagcagatcccgataagaagacccgcctcgaaagggagatcctcgtcttgaagagtctagacctgcaacaagcggctcatgcattcctgtgttcttcactcctgaagatcaagggaatggcggaggcgccgaagctacccgccgaaatcaaaccgattcctaagccagacctgtcagaagaagagaagggtgccctacacaatgtcacgagtgcgctttgcaatcggaaacatgtcaaagatgtcctagaggaggccatcatgggcacgtgcattgccctgcgtgtgccgatgcctgagaagagaaaaggaaagggcaaagagaatggtcgagaggctgaaaagacagaaacaaaacaaagaaacaagaagacgtccaatgatgatacatcggatgacgattccgcagacgaggatgaacccgacacggaagatttgacgctgctgaggaggaaagtcgaacgcgacgagggcgaagaagaccttgaaagcgctgatggttctgctatatcagaagatgacgctttccaaggcttttcagacagcgaggctgaagagcgtatgttctccaagtatgatgacttcgtgggagaatccagtgacgaagacgacctcggcgaggatgacaacgacgacgacgacgatgaagacaataatgctgagctagtagacagcaagtcaaagttaatagcaaggcttgcacctgatgatatctctctttctgaggatgaagatgatgaggacgagtcagactcggaagatgaaggcgtctcgccgccgccgaagaaacagaaggttgcaacgccagcgaactatagacccggcaattctgcatttttaccgacattgatgggcggctacatatccggctccgaatctgaagcttcggacatagatgtcgcaccaccgacgagaaagaacaggagaggacagcgagcgcgccaagcgatctgggagaagaagtacggtgacaaagcaaagcatcatgaaaaccagaaggatgcgagaaacgcaggctgggatttcaagagaggtgctgtcgatactgaaggttcttcaaagccgtggaagagtggtatttcgaatcccttcgagaatggtcaggttcatcccgatcggcagagagctatgcaaagaggggatgatgagtctcgtcaaggtaaaagaaagggcgcgttcggtcaggacagacggccgcctagccaactggatgataggagtcaggcccccagacaggataagtcgaagcctcgactgcctccgtcgagagatgatttaggggctctgcatccaagttgggctgcggctaaggcagcgaaggatggtgcacagaaggtggagtttcaggggaagaaggtcacctttgactag

SEQ ID NO: 3236 - protein, 497 aa, Muscodor strobelii
  misc_feature: SGI Peptide ID NO. 560732
  misc_feature (13)..(497): Pfam Id: PF09073 Pfam Desc: BUD22
  misc_feature (1)..(497): NCBI GI: 256733445 Blast Desc: NECHADRAFT_36200 [Nectria haematococca mpVI 77-13-4]
  misc_feature (1)..(497): NCBI GI: 46127997 Blast Desc: FG08376.1 [Gibberella zeae PH-1]
  misc_feature (300)..(497): NCBI GI: 171681832 Blast Desc: protein product [Podospora anserina] gi|170940875|emb|CAP66525.1| protein product [Podospora anserina]
  misc_feature (10)..(497): NCBI GI: 70991841 Blast Desc: cellular morphogenesis protein (Bud22) [Aspergillus fumigatus Af293] gi|66848402|gb|EAL88731.1| cellular morphogenesis protein (Bud22), [Aspergillus fumigatus Af293]
  misc_feature (318)..(497): NCBI GI: 39974793 Blast Desc: MGG_00457 [Magnaporthe grisea 70-15] gi|145018650|gb|EDK02929.1| MGG_00457 [Magnaporthe grisea 70-15]
  misc_feature (10)..(497): NCBI GI: 119469917 Blast Desc: cellular morphogenesis protein (Bud22), [Neosartorya fischeri NRRL 181] gi|119406148|gb|EAW16099.1| cellular morphogenesis protein (Bud22), [Neosartorya fischeri NRRL 181]
  misc_feature (6)..(497): NCBI GI: 154311999 Blast Desc: BC1G_06033 [Botryotinia fuckeliana B05.10] gi|150850683|gb|EDN25876.1| BC1G_06033 [Botryotinia fuckeliana B05.10]
  misc_feature (3)..(137): NCBI GI: 85095803 Blast Desc: NCU09870 [Neurospora crassa OR74A] gi|28921629|gb|EAA30916.1| [Neurospora crassa OR74A]
  misc_feature (21)..(497): NCBI GI: 115400439 Blast Desc: NADH-ubiquinone oxidoreductase 30.4 kDa subunit, mitochondrial precursor [Aspergillus terreus NIH2624] gi|114191474|gb|EAU33174.1| NADH-ubiquinone oxidoreductase 30.4
  misc_feature (10)..(497): NCBI GI: 238837997 Blast Desc: bud site selection protein 22 [Microsporum canis CBS 113480]
MPKRKREPSLEERLANWRKELVRALKTAKGFERQRLSKRLREADPDKKTRLEREILVLKSLDLQQAAHAFLCSSLLKIKGMAEAPKLPAEIKPIPKPDLSEEEKGALHNVTSALCNRKHVKDVLEEAIMGTCIALRVPMPEKRKGKGKENGREAEKTETKQRNKKTSNDDTSDDDSADEDEPDTEDLTLLRRKVERDEGEEDLESADGSAISEDDAFQGFSDSEAEERMFSKYDDFVGESSDEDDLGEDDNDDDDDEDNNAELVDSKSKLIARLAPDDISLSEDEDDEDESDSEDEGVSPPPKKQKVATPANYRPGNSAFLPTLMGGYISGSESEASDIDVAPPTRKNRRGQRARQAIWEKKYGDKAKHHENQKDARNAGWDFKRGAVDTEGSSKPWKSGISNPFENGQVHPDRQRAMQRGDDESRQGKRKGAFGQDRRPPSQLDDRSQAPRQDKSKPRLPPSRDDLGALHPSWAAAKAAKDGAQKVEFQGKKVTFD

SEQ ID NO: 3237 - DNA, 1850 bp, Muscodor strobelii
  misc_feature: SGI EST ID NO. CUFF.8065.0
  misc_feature: Variant of the nucleotide sequence at SEQ ID NO 3235
cgccgagactaaaacacgagtgacgatcggcacaatctgtctgaagatgccgaaacgaaagagagaacccagcctagaggagagactcgcgaactggcgcaaggaactggtccgagccttgaagaccgccaaaggattcgagcgccagcgcttgagcaaacgacttcgcgaagcagatcccgataagaagacccgcctcgaaagggagatcctcgtcttgaagagtctagacctgcaacaagcggctcatgcattcctgtgttcttcactcctgaagatcaagggaatggcggaggcgccgaagctacccgccgaaatcaaaccgattcctaagccagacctgtcagaagaagagaagggtgccctacacaatgtcacgagtgcgctttgcaatcggaaacatgtcaaagatgtcctagaggaggccatcatgggcacgtgcattgccctgcgtgtgccgatgcctgagaagagaaaaggaaagggcaaagagaatggtcgagaggctgaaaagacagaaacaaaacaaagaaacaagaagacgtccaatgatgatacatcggatgacgattccgcagacgaggatgaacccgacacggaagatttgacgctgctgaggaggaaagtcgaacgcgacgagggcgaagaagaccttgaaagcgctgatggttctgctatatcagaagatgacgctttccaaggcttttcagacagcgaggctgaagagcgtatgttctccaagtatgatgacttcgtgggagaatccagtgacgaagacgacctcggcgaggatgacaacgacgacgacgacgatgaagacaataatgctgagctagtagacagcaagtcaaagttaatagcaaggcttgcacctgatgatatctctctttctgaggatgaagatgatgaggacgagtcagactcggaagatgaaggcgtctcgccgccgccgaagaaacagaaggttgcaacgccagcgaactatagacccggcaattctgcatttttaccgacattgatgggcggctacatatccggctccgaatctgaagcttcggacatagatgtcgcaccaccgacgagaaagaacaggagaggacagcgagcgcgccaagcgatctgggagaagaagtacggtgacaaagcaaagcatcatgaaaaccagaaggatgcgagaaacgcaggctgggatttcaagagaggtgctgtcgatactgaaggttcttcaaagccgtggaagagtggtatttcgaatcccttcgagaatggtcaggttcatcccgatcggcagagagctatgcaaagaggggatgatgagtctcgtcaaggtaaaagaaagggcgcgttcggtcaggacagacggccgcctagccaactggatgataggagtcaggcccccagacaggataagtcgaagcctcgactgcctccgtcgagagatgatttaggggctctgcatccaagttgggctgcggctaaggcagcgaaggatggtgcacagaaggtggagtttcaggggaagaaggtcacctttgactagactaacgtaacaatcattgcttctggaagtcatgtagatgtatgaatcgcattagatacccatttaaggagaactaagtttgaaagttttcgatatcgcgcatacgtcacacgtattgtcgatgtacgatcgaatacaagaacgaggtagttgggacaacaggtccaagagagcagcgctcatgatccgatcacattagaacgtatgcttacctgttctcttgttgagagacatttttgaacccaacagattaccttatccaaatcgtagagcaataggctcatctagtgtatgtcggaggctgtccaaa

SEQ ID NO: 3238 - DNA, 1002 bp, Muscodor strobelii
  misc_feature: SGI cDNA ID NO. 560733
  misc_feature: Elevated expression when VOC is produced
  misc_feature: Encodes the peptide sequence at SEQ ID NO 3239
atgagttcaaatacaatcaagcaagccgccgaagcagcgcgctccaagacgtccaacatgaaacagcaaggctcagagacagcagccgcagccaagaatgacttccttcacacgcctctgatgagagccgcactcccattcatcaacggaggtctatccggcatgattgcaacatctgtcgttcagcccgtggacatgatcaaggtacggcttcagcttgcaggtgagggtattgctacgggtcccaagccgacgccaataactgtaacccgcgagattttggcacagggcaaggtcctcgatctctatactggtctatcggcaggtctcctccgccaagccgtctacactaccgcccgtctgggattcttcgatacgttcatgaagaatcttgccgtgcgtgccaaagggaagggaacagaggtcggcttcgctgaacgtgcgggtgctggtcttaccgctggcgggttggcagctttcattgggaatcctgccgacctcgctctcattcgaatgcagtctgatggactaaaacctctcgccgagcgtaagaattacaagtcagtggtggacgctcttacgtccatcgtgagatccgaaggcgtgacagcactatgggctggcgctacacccacagtagcacgcgctatggcactcaatctcggccagttagcatttttctctgaagccaaggcgcaactcaagactcgcacagcctggtcgccacaaacgcaaacccttaccgcaagcgccattgcaggatttttcgctagtttccttagtttgccgtttgactttgtcaagacgagattgcaaaaacagcagcgtggaccagacgggaagcttccctacaagaatatggcagattgctttgccaaagttgccaagcaagaaggcctaactcggttctatcgcggatttgccacgtactatgtgcgaattgcaccgcatgctatggtaacgctcatcgttgtggactatctcggttggttgactcgatga

SEQ ID NO: 3239 - protein, 333 aa, Muscodor strobelii
  misc_feature: SGI Peptide ID NO. 560733
  misc_feature (143)..(238): Pfam Id: PF00153 Pfam Desc: Mitochondrial carrier protein
  misc_feature (242)..(331): Pfam Id: PF00153 Pfam Desc: Mitochondrial carrier protein
  misc_feature (42)..(135): Pfam Id: PF00153 Pfam Desc: Mitochondrial carrier protein
  misc_feature (242)..(328): Pfam Id: PF00153 Pfam Desc: Mitochondrial carrier protein
  misc_feature (1)..(333): NCBI GI: 256733928 Blast Desc: NECHADRAFT_35479 [Nectria haematococca mpVI 77-13-4]
  misc_feature (2)..(333): NCBI GI: 154314166 Blast Desc: BC1G_05026 [Botryotinia fuckeliana B05.10] gi|150849172|gb|EDN24365.1| BC1G_05026 [Botryotinia fuckeliana B05.10]
  misc_feature (3)..(333): NCBI GI: 46127995 Blast Desc: FG08375.1 [Gibberella zeae PH-1]
  misc_feature (2)..(333): NCBI GI: 156060589 Blast Desc: SS1G_02434 [Sclerotinia sclerotiorum 1980] gi|154699841|gb|EDN99579.1| SS1G_02434 [Sclerotinia sclerotiorum 1980]
  misc_feature (3)..(318): NCBI GI: 116202137 Blast Desc: CHGG_08953 [Chaetomium globosum CBS 148.51] gi|88177471|gb|EAQ84939.1| CHGG_08953 [Chaetomium globosum CBS 148.51]
  misc_feature (3)..(333): NCBI GI: 145611344 Blast Desc: MGG_11576 [Magnaporthe grisea 70-15] gi|145018644|gb|EDK02923.1| MGG_11576 [Magnaporthe grisea 70-15]
  misc_feature (1)..(318): NCBI GI: 261360735 Blast Desc: mitochondrial 2-oxoglutarate/malate carrier protein [Verticillium albo-atrum VaMs.102]
  misc_feature (4)..(333): NCBI GI: 164426036 Blast Desc: NCU10732 [Neurospora crassa OR74A] gi|158517733|sp|P0C582.1|M2OM_NEUCR RecName: Full= mitochondrial 2-oxoglutarate/malate carrier protein; Short=OGCP translocator -
  misc_feature (7)..(333): NCBI GI: 189201251 Blast Desc: mitochondrial dicarboxylate transporter [Pyrenophora tritici-repentis Pt-1C-BFP] gi|187984061|gb|EDU49549.1| mitochondrial dicarboxylate transporter [Pyrenophora Pt-1C-BFP]
  misc_feature (1)..(333): NCBI GI: 212529560 Blast Desc: mitochondrial dicarboxylate carrier protein, [Penicillium marneffei ATCC 18224] gi|212529562|ref|XP_002144938.1| mitochondrial dicarboxylate ATCC
  misc_feature: Useful for introducing or modulating the production of volatile compounds
MSSNTIKQAAEAARSKTSNMKQQGSETAAAAKNDFLHTPLMRAALPFINGGLSGMIATSVVQPVDMIKVRLQLAGEGIATGPKPTPITVTREILAQGKVLDLYTGLSAGLLRQAVYTTARLGFFDTFMKNLAVRAKGKGTEVGFAERAGAGLTAGGLAAFIGNPADLALIRMQSDGLKPLAERKNYKSVVDALTSIVRSEGVTALWAGATPTVARAMALNLGQLAFFSEAKAQLKTRTAWSPQTQTLTASAIAGFFASFLSLPFDFVKTRLQKQQRGPDGKLPYKNMADCFAKVAKQEGLTRFYRGFATYYVRIAPHAMVTLIVVDYLGWLTR

SEQ ID NO: 3240 - DNA, 2193 bp, Muscodor strobelii
  misc_feature: SGI EST ID NO. CUFF.8144.2
  misc_feature: Variant of the nucleotide sequence at SEQ ID NO 3238
gggagaggggtcgaggttagtcgagatgtgagggtgaaatgcatcccctcgacttccttctgccccccagctagctacatcatcagttagtgactgattgcctgaacaacaaatgattgatttgtccgattgaacattccatgcaattggagtaggcatttattaaagtctcttcagctgtctgtcacgaatcttggaggccgatccttttctaccctttctctctcttctatccctccaacccgttgtttcccccaatctgctttcactggtctccttcctgccatagcactgcttcttccagctcttgcgtcattaaggtttcgactattccccaacccgtcacgcctcaacgggcaacggcctgatttccatactgtaaagctcgcccagcatattttgctctcttcttgaaagcaagttgtctcgaattcggagcataacttggcgtctgtcctgctcaactcttctgtgctcgcactcctgcgtcaaaatatagactcacaggcgctcgatcaacatcggctctgaataaaatatccaaactctagatcttttcccgtgtgctttgccttgaattgaccatcacccttcccttcgccctgacccacgtcacaagcgcttggctcgagcaaagcagttatcgccattcgaaccgacggtgcccaagatacggtgcatgagcctctgttctcggatttgtgtctgcgcagtgtcccctagctccgctcttgatcgagtctttctgcttgcgttgagatcagactgagctgtaccgagctcactgacacaaccctcccgccatatcatcattgatatagccagattatgagttcaaatacaatcaagcaagccgccgaagcagcgcgctccaagacgtccaacatgaaacagcaaggctcagagacagcagccgcagccaagaatgacttccttcacacgcctctgatgagagccgcactcccattcatcaacggaggtctatccggcatgattgcaacatctgtcgttcagcccgtggacatgatcaaggtacggcttcagcttgcaggtgagggtattgctacgggtcccaagccgacgccaataactgtaacccgcgagattttggcacagggcaaggtcctcgatctctatactggtctatcggcaggtctcctccgccaagccgtctacactaccgcccgtctgggattcttcgatacgttcatgaagaatcttgccgtgcgtgccaaagggaagggaacagaggtcggcttcgctgaacgtgcgggtgctggtcttaccgctggcgggttggcagctttcattgggaatcctgccgacctcgctctcattcgaatgcagtctgatggactaaaacctctcgccgagcgtaagaattacaagtcagtggtggacgctcttacgtccatcgtgagatccgaaggcgtgacagcactatgggctggcgctacacccacagtagcacgcgctatggcactcaatctcggccagttagcatttttctctgaagccaaggcgcaactcaagactcgcacagcctggtcgccacaaacgcaaacccttaccgcaagcgccattgcaggatttttcgctagtttccttagtttgccgtttgactttgtcaagacgagattgcaaaaacagcagcgtggaccagacgggaagcttccctacaagaatatggcagattgctttgccaaagttgccaagcaagaaggcctaactcggttctatcgcggatttgccacgtactatgtgcgaattgcaccgcatgctatggtaacgctcatcgttgtggactatctcggttggttgactcgatgaaagggaccaaggtgctcaatctgtgcttcatctgtgcataatgtttggaatggggtgatcggatcgctgcatgtagtataccccgcgatcgacttgctattcgggcgtttgaaggagtcaagattttatgagagtgagatccgatacggaaccattctatttgtttgctgaaaggcgaatgcttggacgtaccgtatgaagcaatggtacatccttgatgagagcgcgaatgacatacgcgaacgtctatactatgcagttcttggtatcataaacatcatatttttgagcatattatacattactatgtgcgcttatcccatgattaccctatcatggttcgtgaggacgtcttaattttac

SEQ ID NO: 3241 - DNA, 1074 bp, Muscodor strobelii
  misc_feature: SGI cDNA ID NO. 560734
  misc_feature: Elevated expression when VOC is produced
  misc_feature: Encodes the peptide sequence at SEQ ID NO 3242
atggggttgccatttgggccttctcgaacggccaccaagggcagcaagactactgaattcaccgaagatagcaagcctatggttcctcgccttcacctctgggagatcgatgatcagccatggttccctccaatgcttcgccgaatggtgcaaataggcctgctgcatttatggacgaccaaagttccatttattcaagcacgtacgcctgcatccatcgtcgccgagattctccaaaaggaactcggccaagacctgtccaagcacacattcgttgatttctgctccggggctggtggccccacacccgagatcgaacgagtgttgaatgagaatttgaaggatcaacaatcaacaactgccaaagtccagtccaatggaaatggtcacactaatggcaatggtaacatcaacaacaacggcactgccatcaagagaaccactggaggaacgtcaccacgcccaaaaacgccgtttgctcacttcgtcctgactgacattcaccctaacatatcaagctggatggaagcagaaaagaagagctcccatatcacgtacgttccagagccggtagacgcatctaacttgtcaccggatctcctaagtggacacgtatcgaaggacaagaagatcttccgcacctttaacctggccttccaccacttcgatgacaaactggcacaaaaggtgctcaaggacacgattgagacaagccatggattcggtattttcgaactccaggcccgtgattggcagtcattcgtagcctgcacactcttcggattcattgcctggatcttctcgttattcctctactggtggaatcccccattgctcttcttcgggttcttctttccgatcgtgccctttgtccttgcgttcgacgggttcatctccagcctccgtacccgcacgttctccgaggtcaatgagcttttccgtgcctgtccaaaggactcaaactgggaactgcggagcggcacggagacgtttctatggccagtggggcggatgacctggattgttggtacgaagctggatagcggcaacggcgacagctttcctgagccgtag

SEQ ID NO: 3242 - protein, 357 aa, Muscodor strobelii
  misc_feature: SGI Peptide ID NO. 560734
  misc_feature (26)..(345): NCBI GI: 85089709 Blast Desc: NCU10012 [Neurospora crassa OR74A] gi|28919391|gb|EAA28837.1| conserved [Neurospora crassa OR74A]
  misc_feature (27)..(345): NCBI GI: 156047699 Blast Desc: SS1G_09539 [Sclerotinia sclerotiorum 1980] gi|154693934|gb|EDN93672.1| SS1G_09539 [Sclerotinia sclerotiorum 1980]
  misc_feature (26)..(342): NCBI GI: 256733941 Blast Desc: NECHADRAFT_35477 [Nectria haematococca mpVI 77-13-4]
  misc_feature (27)..(345): NCBI GI: 154293649 Blast Desc: BC1G_14082 [Botryotinia fuckeliana B05.10] gi|150845238|gb|EDN20431.1| BC1G_14082 [Botryotinia fuckeliana B05.10]
  misc_feature (26)..(342): NCBI GI: 46128455 Blast Desc: FG08605.1 [Gibberella zeae PH-1]
  misc_feature (27)..(350): NCBI GI: 39974805 Blast Desc: MGG_00451 [Magnaporthe grisea 70-15] gi|145018657|gb|EDK02936.1| MGG_00451 [Magnaporthe grisea 70-15]
  misc_feature (26)..(345): NCBI GI: 145254319 Blast Desc: An18g01330 [Aspergillus niger] gi|134084173|emb|CAK47206.1| [Aspergillus niger]
  misc_feature (27)..(345): NCBI GI: 119479287 Blast Desc: NFIA_077080 [Neosartorya fischeri NRRL 181] gi|119407826|gb|EAW17775.1| conserved [Neosartorya fischeri NRRL 181]
  misc_feature (27)..(345): NCBI GI: 70997774 Blast Desc: conserved [Aspergillus fumigatus Af293] gi|66851257|gb|EAL91583.1| conserved [Aspergillus fumigatus Af293] gi|159126645|gb|EDP51761.1| conserved [Aspergillus A1163]
  misc_feature (27)..(345): NCBI GI: 256727409 Blast Desc: NECHADRAFT_33985 [Nectria haematococca mpVI 77-13-4]
  misc_feature: Useful for introducing or modulating the production of volatile compounds
MGLPFGPSRTATKGSKTTEFTEDSKPMVPRLHLWEIDDQPWFPPMLRRMVQIGLLHLWTTKVPFIQARTPASIVAEILQKELGQDLSKHTFVDFCSGAGGPTPEIERVLNENLKDQQSTTAKVQSNGNGHTNGNGNINNNGTAIKRTTGGTSPRPKTPFAHFVLTDIHPNISSWMEAEKKSSHITYVPEPVDASNLSPDLLSGHVSKDKKIFRTFNLAFHHFDDKLAQKVLKDTIETSHGFGIFELQARDWQSFVACTLFGFIAWIFSLFLYWWNPPLLFFGFFFPIVPFVLAFDGFISSLRTRTFSEVNELFRACPKDSNWELRSGTETFLWPVGRMTWIVGTKLDSGNGDSFPEP

SEQ ID NO: 3243 - DNA, 1858 bp, Muscodor strobelii
  misc_feature: SGI EST ID NO. CUFF.8089.0
  misc_feature: Variant of the nucleotide sequence at SEQ ID NO 3241
tcgagatattatgcgggattacggccaaatgtctgtccagttgttcaggcgtttaccgatgccattaatagtgtctgtagctaaggtactgtatgagattttgaattgggtagggtgtacctccattaggggctaagccttctagaagccgcgggctgccccgtcagtcatgacgacgttgaacgcttcacatcactttgtctggaattcacgaaattcacgcaaataacccaactgtctctgttatccgagagattctattttcatatcaactctcgagcaatagactagtaccaattgactcaatatccagtacgaccattccaatagctatccccgtacctgcatatctaaaccctcccctgcagaacgatggggttgccatttgggccttctcgaacggccaccaagggcagcaagactactgaattcaccgaagatagcaagcctatggttcctcgccttcacctctgggagatcgatgatcagccatggttccctccaatgcttcgccgaatggtgcaaataggcctgctgcatttatggacgaccaaagttccatttattcaagcacgtacgcctgcatccatcgtcgccgagattctccaaaaggaactcggccaagacctgtccaagcacacattcgttgatttctgctccggggctggtggccccacacccgagatcgaacgagtgttgaatgagaatttgaaggatcaacaatcaacaactgccaaagtccagtccaatggaaatggtcacactaatggcaatggtaacatcaacaacaacggcactgccatcaagagaaccactggaggaacgtcaccacgcccaaaaacgccgtttgctcacttcgtcctgactgacattcaccctaacatatcaagctggatggaagcagaaaagaagagctcccatatcacgtacgttccagagccggtagacgcatctaacttgtcaccggatctcctaagtggacacgtatcgaaggacaagaagatcttccgcacctttaacctggccttccaccacttcgatgacaaactggcacaaaaggtgctcaaggacacgattgagacaagccatggattcggtattttcgaactccaggcccgtgattggcagtcattcgtagcctgcacactcttcggattcattgcctggatcttctcgttattcctctactggtggaatcccccattgctcttcttcgggttcttctttccgatcgtgccctttgtccttgcgttcgacgggttcatctccagcctccgtacccgcacgttctccgaggtcaatgagcttttccgtgcctgtccaaaggactcaaactgggaactgcggagcggcacggagacgtttctatggccagtggggcggatgacctggattgttggtacgaagctggatagcggcaacggcgacagctttcctgagccgtagaaaagttcggggaacctgggctcacttcttgacgaaaaagacgttgtcaagccctaccaatggcgaaacggacgcaacccaaccccgactatcttttataggaaattcggatacggcccgtcccgcagctgcgcaagaggcgtcaaaaaagtaaatgatcgcgttggaacagaaaccacaggcacatgggtgcagacatggcctgtagagggcgatgactgaaagcatgtgtacttctagactagacggttatgcatcaaattagatgagtgtcatggaagagcggaacactatagacgtagacggtaaagcagtataaacacagacaatgaggtacacatagcccgcattatagaaggatgctcagagcatggacatagcttccgaatagtcagttgactgaacaattcac

SEQ ID NO: 3244 - DNA, 1569 bp, Muscodor strobelii
  misc_feature: SGI cDNA ID NO. 560735
  misc_feature: Elevated expression when VOC is produced
  misc_feature: Encodes the peptide sequence at SEQ ID NO 3245
atgacgctcgtcacagcgtctggcgtcatttggtcgcttgccataatcgtgattgcgtgctatttcaccatatttcgaccgacacggatcaagagaaatggcattgcattgagaaccccaccgaacacgcttcctcttgtcggaaacgggctgctgttcttgcaagcccgccaggggctattctcgtggtttgtcaaatgtgaacggcaatttggagatgaaactttccagatcactgtgcctactcttcattcaggtgtcgtcatcaatgatcccaagaatctcgaatatgtcttcaagaatgagggcatctttgccaaggggaacttcgtaaagcagcggtcttgggatctcttcggtaacggtatcatcaacgccgacggtgcattgtggaaagcccaaagaaaggcgggactacatttcctcaatgtcgccaatctccgcgttctcacagatgtcgcgcttcctcgctacatagagcaatgcgttagtcaactgaaaatacaagaaaaagctggcgatattatcgatttgcaacttacgtttcatgagatcactagccaattgatggggaaaatggcatacgatatggagatgcatgccgatgatgagtttacgcttgcatttgaacatgcgtctggcataacgactgaacgctttcaaaacccgttgtggttcataacggagctcattacagggtcagcattcagaagatcattggctgtcgtccgaaagttcggcagtgatattgttcaaagcgccgtggcggcgagcaagaaaccggtagcggtctcggctgatagttccaatgcggatcgagatttgttgaaccaagtatcaggctctctgatccagtctttgctggattctctgggtacgcgatatgacttagtcgcggatgctgctctcaattacctatctgctggcagagacaccactgcacaggcattgacgtggtcgatatatcttctaatacaagatcagtcagctgtcaaaaagatcagagaagagttgactcgtctacccggatttcagggtcatcattctgagcagaacgaactgggagaggccatatcgtctgctgctttcagcccagtaagcctgccctttaccatggcagtattctacgaggcattgcggctatatcctccagtgccattcgaaataaaagagtgtgaagcagatacgacactgcctgatggcacgttcttgccgaagaagtcaattgtggtttggtgcccgtgggcgatgaaccgatcgatgctccattggggagatgacgcagatgctttcaggcctgagagatggcttgatgaagatcggaaattaatcacaaagagcgcatcagagtttcctgtgttcaatggtgggccacggacgtgtcttggcaagcgaatggcggaagtcattgctgtccaagtcatcgctacaatggtgatgacgttcgatttcctgccggcgtatgagggtcagagagtcagtaagagtagcctgacactccctatgaaggacggtttgccgtgctatgtcaaattacgagcaaatagtatcagaactgatgtaatctag

SEQ ID NO: 3245 - protein, 522 aa, Muscodor strobelii
  misc_feature: SGI Peptide ID NO. 560735
  misc_feature (37)..(509): Pfam Id: PF00067 Pfam Desc: Cytochrome P450
  misc_feature (306)..(509): Pfam Id: PF00067 Pfam Desc: Cytochrome P450
  misc_feature (37)..(136): Pfam Id: PF00067 Pfam Desc: Cytochrome P450
  misc_feature (1)..(513): NCBI GI: 145611354 Blast Desc: MGG_00452 [Magnaporthe grisea 70-15] gi|145018656|gb|EDK02935.1| MGG_00452 [Magnaporthe grisea 70-15]
  misc_feature (40)..(516): NCBI GI: 154293647 Blast Desc: BC1G_14081 [Botryotinia fuckeliana B05.10] gi|150845237|gb|EDN20430.1| BC1G_14081 [Botryotinia fuckeliana B05.10]
  misc_feature (30)..(522): NCBI GI: 85089707 Blast Desc: NCU10011 [Neurospora crassa OR74A] gi|28919390|gb|EAA28836.1| conserved [Neurospora crassa OR74A]
  misc_feature (1)..(516): NCBI GI: 256733929 Blast Desc: [Nectria haematococca mpVI 77-13-4]
  misc_feature (30)..(513): NCBI GI: 171681826 Blast Desc: protein product [Podospora anserina] gi|170940872|emb|CAP66522.1| protein product [Podospora anserina]
  misc_feature (14)..(516): NCBI GI: 46127999 Blast Desc: FG08377.1 [Gibberella zeae PH-1]
  misc_feature (99)..(510): NCBI GI: 156047697 Blast Desc: SS1G_09538 [Sclerotinia sclerotiorum 1980] gi|154693933|gb|EDN93671.1| SS1G_09538 [Sclerotinia sclerotiorum 1980]
  misc_feature (36)..(511): NCBI GI: 256722283 Blast Desc: NECHADRAFT_54370 [Nectria haematococca mpVI 77-13-4]
  misc_feature (1)..(357): NCBI GI: 116202011 Blast Desc: CHGG_08890 [Chaetomium globosum CBS 148.51] gi|88177408|gb|EAQ84876.1| CHGG_08890 [Chaetomium globosum CBS 148.51]
  misc_feature (41)..(513): NCBI GI: 18000072 Blast Desc: AF092916_1 cytochrome P450-dependent fatty acid hydroxylase [Nicotiana tabacum]
  misc_feature (3)..(506): SWISSPROT Homolog: EC 1.14.13.30 Leukotriene-B(4) 20-monooxygenase
  misc_feature: Useful for introducing or modulating the production of volatile compounds
MTLVTASGVIWSLAIIVIACYFTIFRPTRIKRNGIALRTPPNTLPLVGNGLLFLQARQGLFSWFVKCERQFGDETFQITVPTLHSGVVINDPKNLEYVFKNEGIFAKGNFVKQRSWDLFGNGIINADGALWKAQRKAGLHFLNVANLRVLTDVALPRYIEQCVSQLKIQEKAGDIIDLQLTFHEITSQLMGKMAYDMEMHADDEFTLAFEHASGITTERFQNPLWFITELITGSAFRRSLAVVRKFGSDIVQSAVAASKKPVAVSADSSNADRDLLNQVSGSLIQSLLDSLGTRYDLVADAALNYLSAGRDTTAQALTWSIYLLIQDQSAVKKIREELTRLPGFQGHHSEQNELGEAISSAAFSPVSLPFTMAVFYEALRLYPPVPFEIKECEADTTLPDGTFLPKKSIVVWCPWAMNRSMLHWGDDADAFRPERWLDEDRKLITKSASEFPVFNGGPRTCLGKRMAEVIAVQVIATMVMTFDFLPAYEGQRVSKSSLTLPMKDGLPCYVKLRANSIRTDVI

SEQ ID NO: 3246 - DNA, 1762 bp, Muscodor strobelii
  misc_feature: SGI EST ID NO. CUFF.8091.0
  misc_feature: Variant of the nucleotide sequence at SEQ ID NO 3244
gattgatcttgacccaattgagacgcgctgcgaagcgtttgctctaagacaacttataagttcgacatgttcattgcatgctgccagatccgttcggctacaagccgcctcgttccatcatgacgctcgtcacagcgtctggcgtcatttggtcgcttgccataatcgtgattgcgtgctatttcaccatatttcgaccgacacggatcaagagaaatggcattgcattgagaaccccaccgaacacgcttcctcttgtcggaaacgggctgctgttcttgcaagcccgccaggggctattctcgtggtttgtcaaatgtgaacggcaatttggagatgaaactttccagatcactgtgcctactcttcattcaggtgtcgtcatcaatgatcccaagaatctcgaatatgtcttcaagaatgagggcatctttgccaaggggaacttcgtaaagcagcggtcttgggatctcttcggtaacggtatcatcaacgccgacggtgcattgtggaaagcccaaagaaaggcgggactacatttcctcaatgtcgccaatctccgcgttctcacagatgtcgcgcttcctcgctacatagagcaatgcgttagtcaactgaaaatacaagaaaaagctggcgatattatcgatttgcaacttacgtttcatgagatcactagccaattgatggggaaaatggcatacgatatggagatgcatgccgatgatgagtttacgcttgcatttgaacatgcgtctggcataacgactgaacgctttcaaaacccgttgtggttcataacggagctcattacagggtcagcattcagaagatcattggctgtcgtccgaaagttcggcagtgatattgttcaaagcgccgtggcggcgagcaagaaaccggtagcggtctcggctgatagttccaatgcggatcgagatttgttgaaccaagtatcaggctctctgatccagtctttgctggattctctgggtacgcgatatgacttagtcgcggatgctgctctcaattacctatctgctggcagagacaccactgcacaggcattgacgtggtcgatatatcttctaatacaagatcagtcagctgtcaaaaagatcagagaagagttgactcgtctacccggatttcagggtcatcattctgagcagaacgaactgggagaggccatatcgtctgctgctttcagcccagtaagcctgccctttaccatggcagtattctacgaggcattgcggctatatcctccagtgccattcgaaataaaagagtgtgaagcagatacgacactgcctgatggcacgttcttgccgaagaagtcaattgtggtttggtgcccgtgggcgatgaaccgatcgatgctccattggggagatgacgcagatgctttcaggcctgagagatggcttgatgaagatcggaaattaatcacaaagagcgcatcagagtttcctgtgttcaatggtgggccacggacgtgtcttggcaagcgaatggcggaagtcattgctgtccaagtcatcgctacaatggtgatgacgttcgatttcctgccggcgtatgagggtcagagagtcagtaagagtagcctgacactccctatgaaggacggtttgccgtgctatgtcaaattacgagcaaatagtatcagaactgatgtaatctaggcgataggcagtcgagataaagaactttgccttctcgtcaatctactcgaactaggcaatgtgagtagttctgc

SEQ ID NO: 3247 - DNA, 1680 bp, Muscodor strobelii
  misc_feature: SGI cDNA ID NO. 560736
  misc_feature: Elevated expression when VOC is produced
  misc_feature: Encodes the peptide sequence at SEQ ID NO 3248
atggccagtattgaaacagacattctgatcgttggggcaggcccagcggggtccagtttagcttgctttctaacacagtacggagttaccggtctcataataagcaaagcttcttcgactgcacgaacacctagagctcattacacgaataatgcaacatttgaatgtctccgagacgccggtcttgagcgtgaatgcagaaaggtcgctacgccgaaagaattaatcaaatactaccgattttgtgacactcttgctggcgaagagttctcaagatcttattatggaggaaatgatccgaatcgagaaggagagtatagaaaaggcacaccatgtgctcaagcagatattccccagtctattttggagccgattttagttcgaaaagcgacgcaaaatggattcaaaattcgttgggactacgagttcattacatgccaagagaacgcggccacaggaaaggtccatgctaccgtaaaggatcttttgtcaggtcaagaaatgacgatcgtatccaactatctttgcggcgcagacggtgcacgcagtgtcgtcgcacgtgagttgcgactcccatttacagaaaagcaaggcggtggatttgcattgaacatttggttcgaggcagatttgtcgcacctgatgagtcaaactcctgggcttatacacatgttagtcctgtcaaacaaaccacagccagactactgtgcggtgaccgtagctcgccaagttgagccatacaacaaatgggtattctcaatgcttgcaaaaccgggcgttacagaagtcaccgcgagccccgaagaaatcatacaacatgtcaaggatctcataggagatccttctgtaaaggttgatgtaaaaggaatgtcgacatggtcaatacaagactgctatgccgaacaatatagtcaaggccgggtgttctgcctcggagatgcggtacaccgacacccgccattcaacggcctaggatcgaacacttgcattcaagacgcatataacttggcatggaagataggcttcgttcaggacgggctcgcgtccccttcattgctagagtcgttcaatgctgagcgacaatcagtagggcaggctgtcgtcaaacgggcgaatttcacgggaacgatgcatgtcaaagtgttctctctactcagtgtattcgagtctgatgtcaataagaagcgcaagatgctcgagcttttccatgaagacagcacggaaggatcagaaacacgggcggcattccagggcttgatcgaagcactcgactctgaacgccacggatttggagtcgagatgaatcatgtatacaagtcacaggctgtatggacagacgacgagccggatccgcctccttcgttcgacaaccctgataacgcagctctccattatctagaaagcacttaccctgggtttagactgccacacgcttggcttcgggcatcgaaagctagaccaagtgacccgatggtgtcaacacatgacatagcaggaaaggggcgattcattatcttcacgggaattggcgggaaatcaaaatggacagaagctgcggagagagtacagaagtccctatcgatagaaataccggtgtacagtataggtggagaagattatcgcgacatcttctatgcttggatcaagaagagagaggtcggtgaaaagggtgctatttaa

SEQ ID NO: 3248 - protein, 559 aa, Muscodor strobelii
  misc_feature: SGI Peptide ID NO. 560736
  misc_feature (5)..(371): Pfam Id: PF01494 Pfam Desc: FAD binding domain
  misc_feature (1)..(559): NCBI GI: 171681441 Blast Desc: protein product [Podospora anserina] gi|170940679|emb|CAP65907.1| protein product [Podospora anserina]
  misc_feature (4)..(559): NCBI GI: 116200953 Blast Desc: CHGG_08361 [Chaetomium globosum CBS 148.51] gi|88176879|gb|EAQ84347.1| CHGG_08361 [Chaetomium globosum CBS 148.51]
  misc_feature (2)..(559): NCBI GI: 261205068 Blast Desc: FAD binding domain-containing protein [Ajellomyces dermatitidis SLH14081] gi|239592330|gb|EEQ74911.1| FAD binding domain-containing protein [Ajellomyces dermatitidis SLH14081] FAD
  misc_feature (4)..(559): NCBI GI: 171691560 Blast Desc: protein product [Podospora anserina] gi|170945728|emb|CAP71841.1| protein product [Podospora anserina]
  misc_feature (2)..(559): NCBI GI: 39942092 Blast Desc: MGG_03126 [Magnaporthe grisea 70-15] gi|145015900|gb|EDK00390.1| MGG_03126 [Magnaporthe grisea 70-15]
  misc_feature (4)..(559): NCBI GI: 116178774 Blast Desc: CHGG_00015 [Chaetomium globosum CBS 148.51] gi|88184312|gb|EAQ91780.1| CHGG_00015 [Chaetomium globosum CBS 148.51]
  misc_feature (4)..(559): NCBI GI: 85090724 Blast Desc: NCU09050 [Neurospora crassa OR74A] gi|28919926|gb|EAA29318.1| conserved [Neurospora crassa OR74A]
  misc_feature (3)..(559): NCBI GI: 238504674 Blast Desc: 2,4-dichlorophenol 6-monooxygenase, [Aspergillus flavus NRRL3357] gi|220691039|gb|EED47388.1| 2,4-dichlorophenol 6-monooxygenase, [Aspergillus flavus NRRL3357]
  misc_feature (4)..(559): NCBI GI: 171677380 Blast Desc: protein product [Podospora anserina] gi|170936758|emb|CAP61416.1| protein product [Podospora anserina]
  misc_feature (3)..(559): NCBI GI: 169764141 Blast Desc: [Aspergillus oryzae RIB40] gi|83764396|dbj|BAE54540.1| protein product [Aspergillus oryzae]
  misc_feature (4)..(559): SWISSPROT Homolog: EC 1.14.13.20 2,4-dichlorophenol 6-monooxygenase
  misc_feature: Useful for introducing or modulating the production of volatile compounds
MASIETDILIVGAGPAGSSLACFLTQYGVTGLIISKASSTARTPRAHYTNNATFECLRDAGLERECRKVATPKELIKYYRFCDTLAGEEFSRSYYGGNDPNREGEYRKGTPCAQADIPQSILEPILVRKATQNGFKIRWDYEFITCQENAATGKVHATVKDLLSGQEMTIVSNYLCGADGARSVVARELRLPFTEKQGGGFALNIWFEADLSHLMSQTPGLIHMLVLSNKPQPDYCAVTVARQVEPYNKWVFSMLAKPGVTEVTASPEEIIQHVKDLIGDPSVKVDVKGMSTWSIQDCYAEQYSQGRVFCLGDAVHRHPPFNGLGSNTCIQDAYNLAWKIGFVQDGLASPSLLESFNAERQSVGQAVVKRANFTGTMHVKVFSLLSVFESDVNKKRKMLELFHEDSTEGSETRAAFQGLIEALDSERHGFGVEMNHVYKSQAVWTDDEPDPPPSFDNPDNAALHYLESTYPGFRLPHAWLRASKARPSDPMVSTHDIAGKGRFIIFTGIGGKSKWTEAAERVQKSLSIEIPVYSIGGEDYRDIFYAWIKKREVGEKGAI

SEQ ID NO: 3249 - DNA, 1456 bp, Muscodor strobelii
  misc_feature: SGI EST ID NO. CUFF.8095.0
  misc_feature: Variant of the nucleotide sequence at SEQ ID NO 3247
gagccgattttagttcgaaaagcgacgcaaaatggattcaaaattcgttgggactacgagttcattacatgccaagagaacgcggccacaggaaaggtccatgctaccgtaaaggatcttttgtcaggtcaagaaatgacgatcgtatccaactatctttgcggcgcagacggtgcacgcagtgtcgtcgcacgtgagttgcgactcccatttacagaaaagcaaggcggtggatttgcattgaacatttggttcgaggcagatttgtcgcacctgatgagtcaaactcctgggcttatacacatgttagtcctgtcaaacaaaccacagccagactactgtgcggtgaccgtagctcgccaagttgagccatacaacaaatgggtattctcaatgcttgcaaaaccgggcgttacagaagtcaccgcgagccccgaagaaatcatacaacatgtcaaggatctcataggagatccttctgtaaaggttgatgtaaaaggaatgtcgacatggtcaatacaagactgctatgccgaacaatatagtcaaggccgggtgttctgcctcggagatgcggtacaccgacacccgccattcaacggcctaggatcgaacacttgcattcaagacgcatataacttggcatggaagataggcttcgttcaggacgggctcgcgtccccttcattgctagagtcgttcaatgctgagcgacaatcagtagggcaggctgtcgtcaaacgggcgaatttcacgggaacgatgcatgtcaaagtgttctctctactcagtgtattcgagtctgatgtcaataagaagcgcaagatgctcgagcttttccatgaagacagcacggaaggatcagaaacacgggcggcattccagggcttgatcgaagcactcgactctgaacgccacggatttggagtcgagatgaatcatgtatacaagtcacaggctgtatggacagacgacgagccggatccgcctccttcgttcgacaaccctgataacgcagctctccattatctagaaagcacttaccctgggtttagactgccacacgcttggcttcgggcatcgaaagctagaccaagtgacccgatggtgtcaacacatgacatagcaggaaaggggcgattcattatcttcacgggaattggcgggaaatcaaaatggacagaagctgcggagagagtacagaagtccctatcgatagaaataccggtgtacagtataggtggagaagattatcgcgacatcttctatgcttggatcaagaagagagaggtcggtgaaaagggtgctatttaattcggcctgatcgcttcgtggcttggagatgcgtggaagacgagttaagcccgacggaacgtggtgagaagttagtcaaggttatgtcacgtatcttaggacgatagggtatacttgaccacttgatatataattatgcaaa

SEQ ID NO: 3250 - DNA, 1302 bp, Muscodor strobelii
  misc_feature: SGI cDNA ID NO. 560737
  misc_feature: Encodes the peptide sequence at SEQ ID NO 3251
atggcccgtaagagctttctcgtgagctttgcgctcctcggcgcttcaatcgcccaaaagcccaacggtgctggtgacaaccacccacaagtcaccacatatcggtgtacaaaagcagatgggtgcaaagccgcgaccaactacatcgtgctagactcttcttctcatggcgttcatcaagtcggcagcagcgcaggttgtggcaattggggtagcggccccgatccgaccgcttgcccaactgaagaagcttgtgcacagaactgcgtaatggagagcatctcggactataccaccgttggtatcaagactagcggatcagaactgcatatggaccagattgtcaacggaaacgttgtttctcctcgtatctacttgctcgacgagaccaaggagaaatacgagatgttgaagctcactggtgccgaacttgcttttgatatcgatgctacgcatttgccttgcggcatgaacagcgccttatacttaggcgagatggccgcagatggaggcaagagtgatctcaacactggaggtgctgcatggggtactgggtattgcgatgctcagtgctatgtgacccctttcttcaatggtgttggaaatgttgatgcgaagggcatttgctgcaatgagatggacatttgggaagccaatgctcgttcaactcagattgctcctcacccttgcaatcaaactggcccatatctttgctcaggtgccgagtgccaggcgcaaggtgtctgtgacaagaacggatgtggatggaataccaaccgcttggcccaagaagactactacggagagggccccgattttacggttgacaccacgaagcctttcactgtcgtgacacaattcccagctgatgccgacggtaacctcgtcggcattcgacgtctctatgttcagggaggcaaggtcatccaagcgaaaaccattgccaaagaaggcgtcccggcggttgattatgaaacggatgagtactgcgccgcaaccggtgctacacagtttatggccctgggcgctttggctggaatgggcgaggctctcacaagaggcatggtgttgactttcagcctgtggtgggatgagggtggtttcatgcattggctcgacagcactacggatggcgctggtccctgtaatgcgaccgagggagaccctaaggtcattacacaagttgagcctgctccgcaagtgactttcagcaacatcaaatggggcgagatcaactcaacattctcatctgcgacgaatgccactagaatacctagtatcaagggccggaagttgtattag

SEQ ID NO: 3251 - protein, 433 aa, Muscodor strobelii
  misc_feature: SGI Peptide ID NO. 560737
  misc_feature (23)..(417): Pfam Id: PF00840 Pfam Desc: Glycosyl hydrolase family 7
  misc_feature (19)..(419): NCBI GI: 27125833 Blast Desc: cellulase [Melanocarpus albomyces]
  misc_feature (1)..(415): NCBI GI: 145610386 Blast Desc: MGG_02532 [Magnaporthe grisea 70-15] gi|145017693|gb|EDK02056.1| MGG_02532 [Magnaporthe grisea 70-15]
  misc_feature (10)..(416): NCBI GI: 171677538 Blast Desc: protein product [Podospora anserina] gi|170936837|emb|CAP61495.1| protein product [Podospora anserina]
  misc_feature (1)..(423): NCBI GI: 256723076 Blast Desc: NECHADRAFT_42608 [Nectria haematococca mpVI 77-13-4]
  misc_feature (19)..(417): NCBI GI: 6016178 Blast Desc: NECHADRAFT_42608 [Nectria haematococca mpVI 77-13-4]
  misc_feature (20)..(415): NCBI GI: 4558204 Blast Desc: NECHADRAFT_42608 [Nectria haematococca mpVI 77-13-4]
  misc_feature (19)..(418): NCBI GI: 2833230 Blast Desc: GUN1_HUMGT RecName: Full=Endoglucanase EG-1; AltName: Full=Endo-1,4-beta-glucanase; AltName: Full=Cellulase; Flags: Precursor gi|950688|dbj|BAA09786.1| Cellulase [Humicola grisea
  misc_feature (1)..(416): NCBI GI: 9954414 Blast Desc: AF292710_1 endoglucanase [Fusarium oxysporum f. sp. lycopersici]
  misc_feature (20)..(417): NCBI GI: 42543207 Blast Desc: AF292710_1 endoglucanase [Fusarium oxysporum f. sp. lycopersici]
  misc_feature (20)..(417): NCBI GI: 13096789 Blast Desc: AF292710_1 endoglucanase [Fusarium oxysporum f. sp. lycopersici]
  misc_feature (19)..(417): SWISSPROT Homolog: EC 3.2.1.4 Cellulase
MARKSFLVSFALLGASIAQKPNGAGDNHPQVTTYRCTKADGCKAATNYIVLDSSSHGVHQVGSSAGCGNWGSGPDPTACPTEEACAQNCVMESISDYTTVGIKTSGSELHMDQIVNGNVVSPRIYLLDETKEKYEMLKLTGAELAFDIDATHLPCGMNSALYLGEMAADGGKSDLNTGGAAWGTGYCDAQCYVTPFFNGVGNVDAKGICCNEMDIWEANARSTQIAPHPCNQTGPYLCSGAECQAQGVCDKNGCGWNTNRLAQEDYYGEGPDFTVDTTKPFTVVTQFPADADGNLVGIRRLYVQGGKVIQAKTIAKEGVPAVDYETDEYCAATGATQFMALGALAGMGEALTRGMVLTFSLWWDEGGFMHWLDSTTDGAGPCNATEGDPKVITQVEPAPQVTFSNIKWGEINSTFSSATNATRIPSIKGRKLY

SEQ ID NO: 3252 - DNA, 1279 bp, Muscodor strobelii
  misc_feature: SGI EST ID NO. CUFF.8101.0
  misc_feature: Variant of the nucleotide sequence at SEQ ID NO 3250
gccgcgaccaactacatcgtgctagactcttcttctcatggcgttcatcaagtcggcagcagcgcaggttgtggcaattggggtagcggccccgatccgaccgcttgcccaactgaagaagcttgtgcacagaactgcgtaatggagagcatctcggactataccaccgttggtatcaagactagcggatcagaactgcatatggaccagattgtcaacggaaacgttgtttctcctcgtatctacttgctcgacgagaccaaggagaaatacgagatgttgaagctcactggtgccgaacttgcttttgatatcgatgctacgcatttgccttgcggcatgaacagcgccttatacttaggcgagatggccgcagatggaggcaagagtgatctcaacactggaggtgctgcatggggtactgggtattgcgatgctcagtgctatgtgacccctttcttcaatggtgttggaaatgttgatgcgaagggcatttgctgcaatgagatggacatttgggaagccaatgctcgttcaactcagattgctcctcacccttgcaatcaaactggcccatatctttgctcaggtgccgagtgccaggcgcaaggtgtctgtgacaagaacggatgtggatggaataccaaccgcttggcccaagaagactactacggagagggccccgattttacggttgacaccacgaagcctttcactgtcgtgacacaattcccagctgatgccgacggtaacctcgtcggcattcgacgtctctatgttcagggaggcaaggtcatccaagcgaaaaccattgccaaagaaggcgtcccggcggttgattatgaaacggatgagtactgcgccgcaaccggtgctacacagtttatggccctgggcgctttggctggaatgggcgaggctctcacaagaggcatggtgttgactttcagcctgtggtgggatgagggtggtttcatgcattggctcgacagcactacggatggcgctggtccctgtaatgcgaccgagggagaccctaaggtcattacacaagttgagcctgctccgcaagtgactttcagcaacatcaaatggggcgagatcaactcaacattctcatctgcgacgaatgccactagaatacctagtatcaagggccggaagttgtattagagtgtacccggttacctacatgcagtttcattcatcctcctccatgaagacgcataagcaatggcccactatcaagtgaacataagatcttgtagcatatagacag

SEQ ID NO: 3253 - DNA, 1596 bp, Muscodor strobelii
  misc_feature: SGI cDNA ID NO. 560738
  misc_feature: Encodes the peptide sequence at SEQ ID NO 3254
atgcagaaagacgacgatatcggacctgctgctggccaccatatggtagacgatgttgctcaggcgaagagcctcgcggcgaaggatgtcgatgtggctatgaccttattcgattcgccagagcagttacatgagcctcgagatcccgaagaagaaaggaagcttgtcaggaagatcgattttatgatcctaccatatcttgcggtctgctacgcattcttctacattgacaaaaccactctgtcctacgccgcgatctttggaattaaagatgatctccaccttgttggaactcaatacagctggttgagttctgtattctactttggattcttgttttgggcctttcccacaaattttcttatgcagcgttttccaatcggaaaatatctcggtgtcaatatcttcttgtggggattttttctcatgctccaagccgcagcgacgaattttggctcgctacttgtcctgagattcttggctggcgcagccgaagcatgtgcggacccctccttcatgctcattacatccatgtggtacacaagaaagcagcagcccgttcgcattggattatggtataccgcgaatggctgtggaattgctcttggtggtctccttggttacggtatcggacacatcagaggcgctctcccatcatggaagtatgagtttctaatcattggcgcgctctgctccatatggggcattgtcatgttcatattcctgcccgactcgcccgtgaaagcaaaaggcctctcgcgcgccgagaagcgcatggcagtgcagagactcagagaaaaccaaaccggcgtcgagaacaagcacctcaaaggccaccaagtcagagaagcttttatggatattaagctgtacctttttttcgcactgggactcgtggggaacgttccaaacggcggattctccaatttcggcactctgattattcaaggattcggttatagtcagcttgtcacgactctcttgcagattccctacggcgtgttgattgctatcagtatcttggtttgtgtcttcttgaacgaccgctttgtcaacagacgctgcatgttcattctcatattcctcattcccaatctcgcgggcgcgtttggccttcattacataccgcgtgacaaaccggtcggccgcttaattgcgtattatctgacgggcccgtacaatgcagcatttgtgctcatcctatctcttcagaccgcaaatacagcaggccacacgaaaaaggtagtcacgaatgctgtgttattcttgggatactgcactggaaatggtaacgtcttcctcgactcgagcttttgcattctagctgacgatgcctttcttcagattgttggaccattcttttacttgacaagtcaagcaccagtctatgaactcggaatatggtcgataattgtgtcgcatcttcttgaagccctcgtcataacactcttctggataatcttccgactcgagaatcgccgaagagatcgcgtccaatctgcaatggagggcggacttgagggtcgggatctagaaacgactgcctttgcggacatgacagatcgagagaatctgaactttcgatacatctattag

SEQ ID NO: 3254 - protein, 531 aa, Muscodor strobelii
  misc_feature: SGI Peptide ID NO. 560738
  misc_feature (67)..(433): Pfam Id: PF07690 Pfam Desc: Major Facilitator Superfamily
  misc_feature (67)..(363): Pfam Id: PF07690 Pfam Desc: Major Facilitator Superfamily
  misc_feature (6)..(531): NCBI GI: 242792967 Blast Desc: MFS allantoate transporter, [Talaromyces stipitatus ATCC 10500] gi|218718654|gb|EED18074.1| MFS allantoate transporter, [Talaromyces stipitatus ATCC 10500]
  misc_feature (2)..(531): NCBI GI: 115400185 Blast Desc: conserved [Aspergillus terreus NIH2624] gi|114191347|gb|EAU33047.1| conserved [Aspergillus terreus NIH2624]
  misc_feature (16)..(531): NCBI GI: 212535412 Blast Desc: MFS allantoate transporter, [Penicillium marneffei ATCC 18224] gi|210070261|gb|EEA24351.1| MFS allantoate transporter, [Penicillium marneffei ATCC 18224]
  misc_feature (2)..(527): NCBI GI: 255949212 Blast Desc: Pc22g14520 [Penicillium chrysogenum Wisconsin 54-1255] gi|211592390|emb|CAP98740.1| Pc22g14520 [Penicillium chrysogenum Wisconsin 54-1255]
  misc_feature (23)..(526): NCBI GI: 121712994 Blast Desc: MFS allantoate transporter, [Aspergillus clavatus NRRL 1] gi|119402261|gb|EAW12682.1| MFS allantoate transporter, [Aspergillus clavatus NRRL 1]
  misc_feature (23)..(527): NCBI GI: 70997920 Blast Desc: MFS allantoate transporter [Aspergillus fumigatus Af293] gi|66851328|gb|EAL91654.1| MFS allantoate transporter, [Aspergillus fumigatus Af293] gi|159126575|gb|EDP51691.1| MFS
  misc_feature (23)..(527): NCBI GI: 119479427 Blast Desc: MFS allantoate transporter, [Neosartorya fischeri NRRL 181] gi|119407896|gb|EAW17845.1| MFS allantoate transporter, [Neosartorya fischeri NRRL 181]
  misc_feature (1)..(527): NCBI GI: 145237566 Blast Desc: An07g03470 [Aspergillus niger] gi|134075902|emb|CAL00281.1| protein product [Aspergillus niger]
  misc_feature (5)..(531): NCBI GI: 259482978 Blast Desc: TPA: MFS allantoate transporter, (AFU_orthologue; AFUA_5G09470) [Aspergillus nidulans FGSC A4]
  misc_feature (29)..(531): NCBI GI: 238844263 Blast Desc: allantoate permease [Microsporum canis CBS 113480]
MQKDDDIGPAAGHHMVDDVAQAKSLAAKDVDVAMTLFDSPEQLHEPRDPEEERKLVRKIDFMILPYLAVCYAFFYIDKTTLSYAAIFGIKDDLHLVGTQYSWLSSVFYFGFLFWAFPTNFLMQRFPIGKYLGVNIFLWGFFLMLQAAATNFGSLLVLRFLAGAAEACADPSFMLITSMWYTRKQQPVRIGLWYTANGCGIALGGLLGYGIGHIRGALPSWKYEFLIIGALCSIWGIVMFIFLPDSPVKAKGLSRAEKRMAVQRLRENQTGVENKHLKGHQVREAFMDIKLYLFFALGLVGNVPNGGFSNFGTLIIQGFGYSQLVTTLLQIPYGVLIAISILVCVFLNDRFVNRRCMFILIFLIPNLAGAFGLHYIPRDKPVGRLIAYYLTGPYNAAFVLILSLQTANTAGHTKKVVTNAVLFLGYCTGNGNVFLDSSFCILADDAFLQIVGPFFYLTSQAPVYELGIWSIIVSHLLEALVITLFWIIFRLENRRRDRVQSAMEGGLEGRDLETTAFADMTDRENLNFRYIY

SEQ ID NO: 3255 - DNA, 2022 bp, Muscodor strobelii
  misc_feature: SGI EST ID NO. CUFF.8127.0
  misc_feature: Variant of the nucleotide sequence at SEQ ID NO 3253
gcggacccctccttcatgctcattacatccatgtggtacacaagaaagcagcagcccgttcgcattggattatggtataccgcgaatggctgtggaattgctcttggtggtctccttggttacggtatgtgatcgacctcataggttgtcttcgtcgtctaacgtagccctaggtatcggacacatcagaggcgctctcccatcatggaagtatgagtttctaatcattggcgcgctctgctccatatggggcattgtcatgttcatattcctgcccgactcgcccgtgaaagcaaaaggcctctcgcgcgccgagaagcgcatggcagtgcagagactcagagaaaaccaaaccggcgtcgagaacaagcacctcaaaggccaccaagtcagagaagcttttatggatattaagctgtacctttttttcgcactgggactcgtggggaacgttccaaacggcggattctccaatttcggcactctgattattcaaggattcggttatagtcagcttgtcacgactctcttgcagattccctacggcgtgttgattgctatcagtatcttggtttgtgtcttcttgaacgaccgctttgtcaacagacgctgcatgttcattctcatattcctcattcccaatctcgcgggcgcgtttggccttcattacataccgcgtgacaaaccggtcggccgcttaattgcgtattatctgacgggcccgtacaatgcagcatttgtgctcatcctatctcttcagaccgcaaatacagcaggccacacgaaaaaggtagtcacgaatgctgtgttattcttgggatactgcactggaaatggtaacgtcttcctcgactcgagcgtgagtttgcgtatatacgtgatctattgctaacgaactcctagtatgtacatatcagagccgattttctgctttgaaatcgtataagccctacagttttgcattctagctgacgatgcctttcttcagattgttggaccattcttttacttgacaagtcaagcaccagtctatgaactcggaatatggtcgataattgtgtcgcatcttcttgaagccctcgtcataacactcttctggataatcttccgactcgagaatcgccgaagagatcgcgtccaatctgcaatggagggcggacttgagggtcgggatctagaaacgactgcctttgcggacatgacagatcgagagaatctgaactttcgatacatctattagatatatcggctctaatcaaatttgtatcgagcttgcatgcatgctgttttggttcgcaagcattagcatagcgctgcatgcagtcattataagacagatgccttgcaaagttctatggttctctaaacatgccgtattgaccttagtaacacatataatcaaggtacgattacgattcgatgtcatggtggataagccggctgggcaacattctgttcgtacatccatggccactgttgatacagagacatataaggtggttcggcattagcccacatgaggaaacttgacatctcatctgccgtcctgatgtattcttcaggtgtgggctgatttgcgaaagcattcgcggagattaccatcgctcctgtatagacttgggcaggagcttggctttgcgagtatgaaggtggctgattagttgttttcatatgcgcaggaggcaacgactgaacgggaacgatagtaggctgcttctgaacaagtgtgggtacgctctgctcggaggattcagtgcttgaagccactgttcgtgcgttcgcactggcttgaaacttttcaacctcaagctgagcaagtcggaatggagctcctctcgacagatgatatatcgatgcggagccggtaacttcagcaggcgattcaggactgcctaaattaggagggctgatagatgatcagcatgtaatatcaaatgggagactcttccaaggctcgtagaaaggaaatgggcgtacgtctgagaccgaagccaatcccttgcttcatcagcgaatccgaag

SEQ ID NO: 3256 - DNA, 1809 bp, Muscodor strobelii
  misc_feature: SGI cDNA ID NO. 560739
  misc_feature: Elevated expression when VOC is produced
  misc_feature: Encodes the peptide sequence at SEQ ID NO 3257
atgtctgacaaacgcccaaatttcctcgtcattgtcgctgacgacctcggcttcagtgattgtggctgttttggctccgagattgagaccccaaacatcgatgctcttgctaaagagactaatgccttgcgattcactaactatcatgtggccgcggcttgctcaccgacaagatcaatgctgatgactggaacggatcatcacattgcgggactcggtcagctccaggagattacgcgcgcctcgcccgcgcactacggacaacctggacatgaagggtatttgaacgagcgtgtagtcgccctaccagaattgctctcggaaggcggatattacacgtgtatgtcgggaaaatggcacctaggcttgaaacccgaacatttccctataaagcgtggctttaagaaatcattcgcattgcttcctgggtgtgcaaaccattacgcctacgagccagaatatagtgaccccagcactgaaccgggaagatttttcgaaacggccacccgagctctgcatgttgaggacgagcgattcttgggacgtttgcccgatgacttctacagcagcgattcatatgcaactaaattgatttcgatcctaggagagcgcactgaagaggagaaggcacaacccttcttcgcatatctaccctttaccgctccgcactggccactccaggcaccgaaagaagtatgcgacaaataccgtggcttttacgatgatgggccggaggtgttgcggcaaaagcgcttggcaagactcaaagagttggggatggtggatgctaacgtcgaagcacaccctgttgttatagtcgataacaaacctgagaactggtctgacctcgacgcggagacgcggcagtcttcgagccgcgccatggaagtctatgcgggaatggtagacagaatggactggaatatcggtcgcgttctcgattatctcaagaagataggatcgtacgacgacacattcattttgttcatgagcgataacggtgccgaaggagcaagctacgaagctgaatcaatcgtcagcggagagatcatggcacatgtccacaagtactacgataacagtctagacaatattggacgcggtaatagtttcgtgtggtatggttgtcgttgggcacaagcagcaacagctccttcgcgcctctataagatgcactcaaccgaaggcggatgtcgcgtcccgttggttgtaagacctcctctctcggacaatggtagctctagcaatggcggcctcatcacacacacattttgcactgttatggacatcgtgccaacagtgctggaaatggcgaaactggaacatccaggtgccacttacaaagggcgtacaatcgcatcccttcgaggccgtagctggacacagttcttagcctccgttctcggtggcaaagagagtgagatccatcctccagattacgccgtcggctttgaatgcaatggatctggtgcaatgcggcgtggtgattggaagatcacatttgtgccagcgccgaaaggcccgcagaaatgggagcttttcaatatcaaagaggatcccggagaagtacacgatctatcatcgaagcacccggagcttttcgagcaactgctgaagctctggaatgaatacaagaacgatgttggtgtcgtcggtgttgcaggcgaatacccgaaatttggccaaggcgatcctcgaacaacgcgggtggacgagatggaggacccttacgcctggatcaaatacattgggaggccagaaattacccctgagaggttgaagactatcattccgcctgtgtcaaactag

SEQ ID NO: 3257 - protein, 602 aa, Muscodor strobelii
  misc_feature: SGI Peptide ID NO. 560739
  misc_feature (4)..(525): Pfam Id: PF00884 Pfam Desc: Sulfatase
  misc_feature (1)..(601): NCBI GI: 256727569 Blast Desc: NECHADRAFT_33781 [Nectria haematococca mpVI 77-13-4]
  misc_feature (1)..(594): NCBI GI: 256722829 Blast Desc: NECHADRAFT_97519 [Nectria haematococca mpVI 77-13-4]
  misc_feature (4)..(594): NCBI GI: 115397923 Blast Desc: arylsulfatase [Aspergillus terreus NIH2624] gi|114192744|gb|EAU34444.1| arylsulfatase [Aspergillus terreus NIH2624]
  misc_feature (5)..(591): NCBI GI: 121712096 Blast Desc: arylsulfatase, [Aspergillus clavatus NRRL 1] gi|119401815|gb|EAW12237.1| arylsulfatase, [Aspergillus clavatus NRRL 1]
  misc_feature (5)..(591): NCBI GI: 70986108 Blast Desc: arylsulfatase [Aspergillus fumigatus Af293] gi|66846181|gb|EAL86514.1| arylsulfatase, [Aspergillus fumigatus Af293]
  misc_feature (5)..(591): NCBI GI: 119474023 Blast Desc: arylsulfatase, [Neosartorya fischeri NRRL 181] gi|119407040|gb|EAW16990.1| arylsulfatase, [Neosartorya fischeri NRRL 181]
  misc_feature (5)..(591): NCBI GI: 159128313 Blast Desc: arylsulfatase, [Aspergillus fumigatus A1163]
  misc_feature (1)..(551): NCBI GI: 169779331 Blast Desc: [Aspergillus oryzae RIB40] gi|83772869|dbj|BAE62997.1| protein product [Aspergillus oryzae]
  misc_feature (1)..(551): NCBI GI: 70997211 Blast Desc: arylsulfatase [Aspergillus fumigatus Af293] gi|66850995|gb|EAL91321.1| arylsulfatase, [Aspergillus fumigatus Af293]
  misc_feature (1)..(560): NCBI GI: 238499969 Blast Desc: arylsulfatase, [Aspergillus flavus NRRL3357] gi|220692972|gb|EED49318.1| arylsulfatase, [Aspergillus flavus NRRL3357]
  misc_feature (4)..(551): SWISSPROT Homolog: EC 3.1.6.1 Arylsulfatase
  misc_feature: Useful for introducing or modulating the production of volatile compounds
MSDKRPNFLVIVADDLGFSDCGCFGSEIETPNIDALAKETNALRFTNYHVAAACSPTRSMLMTGTDHHIAGLGQLQEITRASPAHYGQPGHEGYLNERVVALPELLSEGGYYTCMSGKWHLGLKPEHFPIKRGFKKSFALLPGCANHYAYEPEYSDPSTEPGRFFETATRALHVEDERFLGRLPDDFYSSDSYATKLISILGERTEEEKAQPFFAYLPFTAPHWPLQAPKEVCDKYRGFYDDGPEVLRQKRLARLKELGMVDANVEAHPVVIVDNKPENWSDLDAETRQSSSRAMEVYAGMVDRMDWNIGRVLDYLKKIGSYDDTFILFMSDNGAEGASYEAESIVSGEIMAHVHKYYDNSLDNIGRGNSFVWYGCRWAQAATAPSRLYKMHSTEGGCRVPLVVRPPLSDNGSSSNGGLITHTFCTVMDIVPTVLEMAKLEHPGATYKGRTIASLRGRSWTQFLASVLGGKESEIHPPDYAVGFECNGSGAMRRGDWKITFVPAPKGPQKWELFNIKEDPGEVHDLSSKHPELFEQLLKLWNEYKNDVGVVGVAGEYPKFGQGDPRTTRVDEMEDPYAWIKYIGRPEITPERLKTIIPPVSN

SEQ ID NO: 3258 - DNA, 3073 bp, Muscodor strobelii
  misc_feature: SGI EST ID NO. CUFF.8134.1
  misc_feature: Variant of the nucleotide sequence at SEQ ID NO 3256
aacatttccctataaagcgtggctttaagaaatcattcgcattgcttcctgggtgtgcaaaccattacgcctacgagccagaatatagtgaccccagcactgaaccgggaagatttttcgaaacggccacccgagctctgcatgttgaggacgagcgattcttgggacgtttgcccgatgacttctacagcagcgattcatatgcaactaaattgatttcgatcctaggagagcgcactgaagaggagaaggcacaacccttcttcgcatatctaccctttaccgctccgcactggccactccaggcaccgaaagaagtatgcgacaaataccgtggcttttacgatgatgggccggaggtgttgcggcaaaagcgcttggcaagactcaaagagttggggatggtggatgctaacgtcgaagcacaccctgttgttatagtcgataacaaacctgagaactggtctgacctcgacgcggagacgcggcagtcttcgagccgcgccatggaagtctatgcgggaatggtagacagaatggactggaatatcggtcgcgttctcgattatctcaagaagataggatcgtacgacgacacattcattttgttcatgagcgataacggtgccgaaggagcaagctacgaagctgaatcaatcgtcagcggagagatcatggcacatgtccacaagtactacgataacagtctagacaatattggacgcggtaatagtttcgtgtggtatggttgtcgttgggcacaagcagcaacagctccttcgcgcctctataagatgcactcaaccgaaggcggatgtcgcgtcccgttggttgtaagacctcctctctcggacaatggtagctctagcaatggcggcctcatcacacacacattttgcactgttatggacatcgtgccaacagtgctggaaatggcgaaactggaacatccaggtgccacttacaaagggcgtacaatcgcatcccttcgaggccgtagctggacacagttcttagcctccgttctcggtggcaaagagagtgagatccatcctccagattacgccgtcggctttgaatgcaatggatctggtgcaatgcggcgtggtgattggaagatcacatttgtgccagcgccgaaaggcccgcagaaatgggagcttttcaatatcaaagaggatcccggagaagtacacgatctatcatcgaagcacccggagcttttcgagcaactgctgaagctctggaatgaatacaagaacgatgttggtgtcgtcggtgttgcaggcgaatacccgaaatttggccaaggcgatcctcgaacaacgcgggtggacgagatggaggacccttacgcctggatcaaatacattgggaggccagaaattacccctgagaggttgaagactatcattccgcctgtgtcaaactagccaaaagaccgagcgatgttattggggtattagacagtccagctacttatgtttataacgttcaatctgcaagtcttctccctctccgtattattacccctgctactctaatcctcgtccgatccgatgcctattactaaatgttgccctcgtctactctttagactgttctgcgtttgctgctctggccgttcctcctactgagtttcaagatgggtccgcaagcgttttgtattcaggtgtagacctgcacgtggcatgaacctgtcacctttatttgtaccgcgagtcggtttccattgatctgatactccgggcgctcactagtatgtccctcttcttgctgcgtttgctcttcatgctcagcagtctgctgttctgattgtcgctccggctggtcggcagcatgttcctcttcttgctgcatttgcgctcctgatagctcctcaggctgctgttctggctgtggccctggctgtccttcgatctgttgttccggctgttcatccatccgttccacttgttgctgcactggcggcccactggtttgctgctccggtccctcgctgatctgttcctcgatatgttgctcgacttgttgctcttgctcccgtggctgctcatgcgattgttcgagggactgatctccgggctggtctccgggctggtctccgggctggaattcgggttggtcttcatgaatccctccatttgtacctccgtttgtcccccactgtgatgcgccgttatgcccgttcaccccattgatgccatggccattgccattcgaggcaagacgtaactttcccacgtagtcgccccttctctccacgattcgctcgcgaacgtcgccgtcaacaccgcccagtgaaccagtagaagagagcccaattaattctttgtggtatttggtcagcttgggagctacgtcctcacgaagcgaaaagccgtagttctcccgcgggcgcacaaacgatctcatgaagagcatggagatcgataatcgatcctgtctagtcacgtttggacctgtggcatgccaaagtcggctgtcggacacaagcgctgttcctgcaggcccaattgctgccacagtatcaggcgtagcgtagacaaccttgggagctatattgcctttgtgcgatgcaggataaatacgtgttgccccattctgcaccgaagcatcatccagaaaccacgctacaatgccgattgtcagccatactacttgcatctcagactgcgcaccgataaattcgataagcaggacagggctaacagatgcttactaatatttatgccgagagcgagatcgcgaatcggtggctgtatggcagactgatctgtgcgcagccgcattggtgtattgttcggttcaacgaccttagcgaagtacgaatagatatgtgcgagatgtccgagcattggtggcacaattgccttgataagcgggtggttgagaaggtcgaggaactcctataatttcttacttagtatctgtcagattatgggtcacagagacgggcaattccgttttgtccaagcacagtgatgaaaatgttgatgcgactttgttaggactacttggtaatttcagagttggtatgttgcttaactcacatcacctttgttcgccaacg

SEQ ID NO: 3259 - DNA, 3141 bp, Muscodor strobelii
  misc_feature: SGI cDNA ID NO. 560740
  misc_feature: Encodes the peptide sequence at SEQ ID NO 3260
atgtttcagtgcgagtgtggccgctcgctaaaatcggacgttgctcttacccagcatcagaaggacaagcacaatgccccctctggctctacggctccgaccgttccccgatcaagtgcggctgcaggggcacggaaagcgtcgctcgctcgggaccctcgtgatagctggatgtggaggaaggtcaaaatgtcccggccaccgcaagccatatctgtagcaaaccttcagccctctcccagttcagtgacgagtgatgctgttgacaagctgctgtgcacgtataattggcaaaattctaaagaagcgacgatacagattcccggcttcgcaccaatctggaatcccgcgactctgcccgtcgccctaccacctgataaaagcacattccacattgatcaaaacgcaggtcgtgtgcctgagtatcccttcgagccgcttttcagagcagccgacacaatgaacccaggcatgaatttcaataacgtcgatgtagttatcacccggaacagtctgagaaaatttcttgatttgagtaatggtgcggctaaatcaagcttttgtgtcaacttggccatggtgcacaatacgatgatcatcgagcgctgtgagaaaagcgctcgcgagctcatcaggggaagtgatggatcaggctggggtcacactttcgaaaagacctttacgaaacagccgccgcatggggattggagtactcagtatcaccgctttctccagtattccatgggtgaactgaactgcgtggttggtttcgaggttgatggctgttacatgtctgctgatcagtccggagctatcgatagcaaggcttttggacccgaccttctagtgaagctaaggaaactttcgatcaatggttctcgatcgaaatgcaatacggctagcagcacggctaacgcagcgcctagcgcccgggaagcattcaacgtaatgccacaatctacagcggccgaaatcaagacttgttccaaaccaaaggctcttggaaatttcatgccccaactatggttcgggcgaacaccgtggctgatcatgggccatcatagccaggggaactttcacaagatcgaaattaagcacgcaaaatccgaattcgcggcatgggagaccaggaaccaagagaagttgaaaaagatggtcacactgctgatacagttgcgccaggccgcccaatcgatcagttttccacgatgcgtggcgatttatgaaaagaaaacctcgcaattgactgtcttcgagtctaccgtcaagaaaggggcgttgcctgacgaaattgttcgcatattctggagtcccactgagtcaactgggatggagcagcttcatattgtcatgatccacaccgtaaaggccggccaatacgatgatatagttggcccatggaccatcgaatatactcaagaagagcgcgacttccgatgttgtgtagcaccttcattaagtggttcaaactgtcaaatatcagaattcagccgtctatacatcgatgcacgttttgatggcagagaagcattaggtctcgagtatgcacctcctggtcgcatcgacgccggtgtaagtatcgaagcgaaagatatcatcctcctgagcgagggttgcatagaatcacgatacgcgctgttcaaagatgcggccccgaacagttcccccagagtgcgaggcaatctagcggctgccattgcttttgtagacttattgacccctcatccccacggaccagtattgaactacaagcctgagctattcccaaagctgcctgagccgagaacttcgatcggggacctgaaaaacgatatgttcaatttcggctatgggctagtgaaagatgcattgactccagaagaagtagcaatacttcgcagagcagtcaaggagcaagcccatggtgaaaagaacgctggcatccatttaattaatggcaaaatgacccagccacaccagcatgtctgggcgttggcgaacaaaggtgatgagttcctcgaccttctcaaccacccgcttatcaaggcaattgtgccaccaatgctcggacatctcgcacatatctattcgtacttcgctaaggtcgttgaaccgaacaatacaccaatgcggctgcgcacagatcagtctgccatacagccaccgattcgcgatctcgctctcggcataaatattacgtggtttctggatgatgcttcggtgcagaatggggcaacacgtatttatcctgcatcgcacaaaggcaatatagctcccaaggttgtctacgctacgcctgatactgtggcagcaattgggcctgcaggaacagcgcttgtgtccgacagccgactttggcatgccacaggtccaaacgtgactagacaggatcgattatcgatctccatgctcttcatgagatcgtttgtgcgcccgcgggagaactacggcttttcgcttcgtgaggacgtagctcccaagctgaccaaataccacaaagaattaattgggctctcttctactggttcactgggcggtgttgacggcgacgttcgcgagcgaatcgtggagagaaggggcgactacgtgggaaagttacgtcttgcctcgaatggcaatggccatggcatcaatggggtgaacgggcataacggcgcatcacagtgggggacaaacggaggtacaaatggagggattcatgaagaccaacccgaattccagcccggagaccagcccggagaccagcccggagatcagtccctcgaacaatcgcatgagcagccacgggagcaagagcaacaagtcgagcaacatatcgaggaacagatcagcgagggaccggagcagcaaaccagtgggccgccagtgcagcaacaagtggaacggatggatgaacagccggaacaacagatcgaaggacagccagggccacagccagaacagcagcctgaggagctatcaggagcgcaaatgcagcaagaagaggaacatgctgccgaccagccggagcgacaatcagaacagcagactgctgagcatgaagagcaaacgcagcaagaagagggacatactagtgagcgcccggagtatcagatcaatggaaaccgactcgcggtacaaataaaggtgacaggttcatgccacgtgcaggtctacacctga

SEQ ID NO: 3260 - protein, 1046 aa, Muscodor strobelii
  misc_feature: SGI Peptide ID NO. 560740
  misc_feature (603)..(793): Pfam Id: PF05721 Pfam Desc: Phytanoyl-CoA dioxygenase (PhyH)
  misc_feature (707)..(793): Pfam Id: PF05721 Pfam Desc: Phytanoyl-CoA dioxygenase (PhyH)
  misc_feature (6)..(436): NCBI GI: 256726759 Blast Desc: NECHADRAFT_76072 [Nectria haematococca mpVI 77-13-4]
  misc_feature (57)..(438): NCBI GI: 39954759 Blast Desc: [Magnaporthe grisea 70-15] gi|145021093|gb|EDK05222.1| [Magnaporthe grisea 70-15]
  misc_feature (591)..(860): NCBI GI: 39942702 Blast Desc: MGG_03431 [Magnaporthe grisea 70-15] gi|145010026|gb|EDJ94682.1| MGG_03431 [Magnaporthe grisea 70-15]
  misc_feature (92)..(431): NCBI GI: 116201427 Blast Desc: CHGG_08598 [Chaetomium globosum CBS 148.51] gi|88177116|gb|EAQ84584.1| CHGG_08598 [Chaetomium globosum CBS 148.51]
  misc_feature (66)..(442): NCBI GI: 225555198 Blast Desc: conserved [Ajellomyces capsulatus G186AR]
  misc_feature (70)..(431): NCBI GI: 145236373 Blast Desc: An06g00030 [Aspergillus niger] gi|134075287|emb|CAL00753.1| protein product [Aspergillus niger]
  misc_feature (69)..(389): NCBI GI: 189209710 Blast Desc: conserved [Pyrenophora tritici-repentis Pt-1C-BFP] gi|187977280|gb|EDU43906.1| conserved [Pyrenophora tritici-repentis Pt-1C-BFP]
  misc_feature (90)..(431): NCBI GI: 212533095 Blast Desc: conserved [Penicillium marneffei ATCC 18224] gi|210072068|gb|EEA26157.1| conserved [Penicillium marneffei ATCC 18224]
  misc_feature (80)..(431): NCBI GI: 258572252 Blast Desc: geranylgeranyl pyrophosphate synthetase [Uncinocarpus reesii 1704] gi|237905158|gb|EEP79559.1| geranylgeranyl pyrophosphate synthetase [Uncinocarpus reesii 1704]
  misc_feature (69)..(421): NCBI GI: 169624447 Blast Desc: SNOG_15483 [Phaeosphaeria nodorum SN15] gi|160705171|gb|EAT77148.2| SNOG_15483 [Phaeosphaeria nodorum SN15]
MFQCECGRSLKSDVALTQHQKDKHNAPSGSTAPTVPRSSAAAGARKASLARDPRDSWMWRKVKMSRPPQAISVANLQPSPSSVTSDAVDKLLCTYNWQNSKEATIQIPGFAPIWNPATLPVALPPDKSTFHIDQNAGRVPEYPFEPLFRAADTMNPGMNFNNVDVVITRNSLRKFLDLSNGAAKSSFCVNLAMVHNTMIIERCEKSARELIRGSDGSGWGHTFEKTFTKQPPHGDWSTQYHRFLQYSMGELNCVVGFEVDGCYMSADQSGAIDSKAFGPDLLVKLRKLSINGSRSKCNTASSTANAAPSAREAFNVMPQSTAAEIKTCSKPKALGNFMPQLWFGRTPWLIMGHHSQGNFHKIEIKHAKSEFAAWETRNQEKLKKMVTLLIQLRQAAQSISFPRCVAIYEKKTSQLTVFESTVKKGALPDEIVRIFWSPTESTGMEQLHIVMIHTVKAGQYDDIVGPWTIEYTQEERDFRCCVAPSLSGSNCQISEFSRLYIDARFDGREALGLEYAPPGRIDAGVSIEAKDIILLSEGCIESRYALFKDAAPNSSPRVRGNLAAAIAFVDLLTPHPHGPVLNYKPELFPKLPEPRTSIGDLKNDMFNFGYGLVKDALTPEEVAILRRAVKEQAHGEKNAGIHLINGKMTQPHQHVWALANKGDEFLDLLNHPLIKAIVPPMLGHLAHIYSYFAKVVEPNNTPMRLRTDQSAIQPPIRDLALGINITWFLDDASVQNGATRIYPASHKGNIAPKVVYATPDTVAAIGPAGTALVSDSRLWHATGPNVTRQDRLSISMLFMRSFVRPRENYGFSLREDVAPKLTKYHKELIGLSSTGSLGGVDGDVRERIVERRGDYVGKLRLASNGNGHGINGVNGHNGASQWGTNGGTNGGIHEDQPEFQPGDQPGDQPGDQSLEQSHEQPREQEQQVEQHIEEQISEGPEQQTSGPPVQQQVERMDEQPEQQIEGQPGPQPEQQPEELSGAQMQQEEEHAADQPERQSEQQTAEHEEQTQQEEGHTSERPEYQINGNRLAVQIKVTGSCHVQVYT

SEQ ID NO: 3261 - DNA, 3923 bp, Muscodor strobelii
  misc_feature: SGI EST ID NO. CUFF.8241.2
  misc_feature: Variant of the nucleotide sequence at SEQ ID NO 3259
cgtcagtccgtcgctaattggcgtgcatgctattggcccgtcagcgggctgtaccaacgagtcgggtttcagtgaccaatattactggctgtttcgttctcaagacacattccaaagtaccaacatgcaatatctagacctttcttattgtgatgaaatgacatgtggaatcaatatatgtgattcattggaacctctcggatgtggtggtatgctactaattccttcggaagaaggtggagtggcacagtcaagacctgacctccgtcttatgatacacgaagccctacaccatgggctcaagagaaagatgtgatgcgacattgctaccagacaatctagaccggcggcgtagagcagatgattatatccatactcaaacagatcgttgagctcttcgagttgttcttagtattgtccgtcctgtccatgcgcaccctgtagctttctttcaatccatgtccaacatggtcattcgaagcatatcgaactccgtcaattggcaccagcgcctgtggctactaattcccagcttgagatcggacgaacgcgaacttctcaaatgaggcgcatagccgcacaaaacaccatcatgtgtatcttatcaccatctgttaggttagccattgatccttctgttgggcgcttatttggaaacctacaaactcaattctttatcgcaagacatgagtgctcgttggtcggccacgagtgatctcgttcttgccgctggttgagaattgcgctacgtgcatcttaaaccgatgagactgagagtagagactttatcgtaagagccttgatactgcttgtagagcaaaatctcaattctatgcaggtgatctcgtcgctatggatttgacatccaactttcaccttaccctcaccatacttttataggccaatttcgcgttacaaatctctatttatactcatccgagccaataatcgatcggactgcttatgctatgagcaaacaaaagacaccgcttcttcaaaaacgtgcagagcctcatgtatgacccagcgacaaagcatgttgcctggcatgcggctgtgccgaagcctctttgggggctgcgcggaacgccggggacgggggcatcgatgatcaagagctccagcaaggcactaccatccggcgtcccggtaaaattccaaacacttacattggatggcattttgaacgaagcttgacttttcctccatcttgtcaaattgggcatgttggggctgtggtcggtaggcttgatcctttgaaccacaacgtggagatattcagcggccgtgatggctgactacctgacggagctcaatactgagtgacatacctaggggttatgaatctcgaactctctgtcttaattctctcattcgatccatgaaagagttgaggtagatacaggattgatgtgggcgatgagccgcactttgacggatcagtctcctcgctctgttcgccagtggggtccagagacaaaattacaggcccgcacttagaaccctaagcgcctgttttaggctgcaaacttatattcttcatctcgttcattcagcatcgaaagcctctgtgagtttaggccatatcgtatagattgtatcgaaagcgtcgcctctttttcctctttcattcgatctcatgtatcattaaaatgagttagcgaattcttaccatgcatgcccttggctatgcgaggtagctctgtcctatcaacacgcgtttttgcgaccactcaacttcgttcagaaccatcatcaaacgtgctgttgaatcaacagtcaaccccgcttgccggtgtcaagttattcttcgattaaccacatcttcctgttcattccatattgttatttcgccagttatgcttcgccgcgcataacaactttttggcttcttcgttcatctaaggatcgaggttaagtagtttaatgacagtatgtttcagtgcgagtgtggccgctcgctaaaatcggacgttgctcttacccagcatcagaaggacaagcacaatgccccctctggctctacggctccgaccgttccccgatcaagtgcggctgcaggggcacggaaagcgtcgctcgctcgggaccctcgtgatagctggatgtggaggaaggtcaaaatgtcccggccaccgcaagccatatctgtagcaaaccttcagccctctcccagttcagtgacgagtgatgctgttgacaagctgctgtgcacgtataattggcaaaattctaaagaagcgacgatacagattcccggcttcgcaccaatctggaatcccgcgactctgcccgtcgccctaccacctgataaaagcacattccacattgatcaaaacgcaggtcgtgtgcctgagtatcccttcgagccgcttttcagagcagccgacacaatgaacccaggcatgaatttcaataacgtcgatgtagttatcacccggaacagtctgagaaaatttcttgatttgagtaatggtgcggctaaatcaagcttttgtgtcaacttggccatggtgcacaatacgatgatcatcgagcgctgtgagaaaagcgctcgcgagctcatcaggggaagtgatggatcaggctggggtcacactttcgaaaagacctttacgaaacagccgccgcatggggattggagtactcagtatcaccgctttctccagtattccatgggtgaactgaactgcgtggttggtttcgaggttgatggctgttacatgtctgctgatcagtccggagctatcgatagcaaggcttttggacccgaccttctagtgaagctaaggaaactttcgatcaatggttctcgatcgaaatgcaatacggctagcagcacggctaacgcagcgcctagcgcccgggaagcattcaacgtaatgccacaatctacagcggccgaaatcaagacttgttccaaaccaaaggctcttggaaatttcatgccccaactatggttcgggcgaacaccgtggctgatcatgggccatcatagccaggggaactttcacaagatcgaaattaagcacgcaaaatccgaattcgcggcatgggagaccaggaaccaagagaagttgaaaaagatggtcacactgctgatacagttgcgccaggccgcccaatcgatcagttttccacgatgcgtggcgatttatgaaaagaaaacctcgcaattgactgtcttcgagtctaccgtcaagaaaggggcgttgcctgacgaaattgttcgcatattctggagtcccactgagtcgtgagttgattcaagacggaactagaacgcgcatagttatcacgccttactttgttattcaccccttgggccagtatatgcaatggttttcacccagatactcggcaaaatgctatcaagcatgaatatgcatgagatcagcgctttagttcgctacagtgaaacgccaattgtatgtaggcgaagaggagagcgaggcaggtgctaatatgaaataagcgcgtctgttagatgtgactgtccaaatccatttcattaacaatgttgcaaatctcagtctacctaccctccttatttcctgatgattgattcatgaaaggtcccgagattgagtctgtagggagaagccttctcttcgtggtccgtttagtgtcgtctgaggaatttgtacagaactgggatggagcagcttcatattgtcatgatccacaccgtaaaggccggccaatacgatgatatagttggcccatggaccatcgaatatactcaagaagagcgcgacttccgatgttgtgtagcaccttcatgtatcccggctaccctgtgaatgatagcaggtacatagtgcgcgctatcatttgggcaggtagtacagaattcgtggaaagcactgttaggacaacatttataatattcagccctggtgagaaaatgcgtcattctcaat

SEQ ID NO: 3262 - DNA, 909 bp, Muscodor strobelii
  misc_feature: SGI cDNA ID NO. 560741
  misc_feature: Elevated expression when VOC is produced
  misc_feature: Encodes the peptide sequence at SEQ ID NO 3263
atgttcccccgtagcatacagcctttcgtcgctcctttcctaccttcatattggagaggtcgtcgttgtgtcaaaaacgcacaggatatcctgtatcccaaaatccagcagctcatggaagcaaatgacaagggactatgggaccctgagaatagcaccaaagaagaagatatgaacttactcagctggctcgcgggcagtattaaggggagtgagcgtaatcctgcatcggtcgtacatgtcgagatattacttgcattcgcttcaacgcatacatcgttgactcgcatcgtcaactgtctgtatgacatcatggaggccgatccagctctgacaaatgagctgctcgccgagatcgagtctgtggctatcgatgctaagggatgggtcaacgtgccgtacgatcagctgcacaagttggactctgtgctacgcgaatcacaacgcacatcccccacggtcctcctgggtatgaagcgactctttaaagaaccctacacattcacgaatgggatcaacgtgccagctggaacattcacgacaatgatggtagcagccatcgaaaacgatcccgataacacaccaaacccggaagtcttcgatggattgcggttctatcgtgagaaactagccgtaggacttgaaaatcccgcgacaagggatctagatttcacagcagctacaaataccgcactagggtttggttacggccgtactgcctgtcctggaagattcttcgcgagtcttgtgattaagatggtgtttgttaaactacttactgagtatgagtttgcgtttctggagggagagacaagaccaaaggcgtttggattacatgattttttggttacggatccgaagaagaagatccttgttagaaggagacggggtggtgtttgtcctttttga

SEQ ID NO: 3263 - protein, 302 aa, Muscodor strobelii
  misc_feature: SGI Peptide ID NO. 560741
  misc_feature (140)..(292): Pfam Id: PF00067 Pfam Desc: Cytochrome P450
  misc_feature (1)..(302): NCBI GI: 67525591 Blast Desc: AN3253.2 [Aspergillus nidulans FGSC A4] gi|40743972|gb|EAA63154.1| AN3253.2 [Aspergillus nidulans FGSC A4] gi|259485782|tpe|CBF83094.1| TPA: cytochrome P450, (Eurofung)
  misc_feature (1)..(302): NCBI GI: 169615437 Blast Desc: SNOG_10876 [Phaeosphaeria nodorum SN15] gi|160702960|gb|EAT81375.2| SNOG_10876 [Phaeosphaeria nodorum SN15]
  misc_feature (2)..(302): NCBI GI: 116203025 Blast Desc: CHGG_09397 [Chaetomium globosum CBS 148.51] gi|88177915|gb|EAQ85383.1| CHGG_09397 [Chaetomium globosum CBS 148.51]
  misc_feature (1)..(300): NCBI GI: 145254738 Blast Desc: An18g02700 [Aspergillus niger] gi|134084313|emb|CAK48653.1| protein product [Aspergillus niger]
  misc_feature (2)..(295): NCBI GI: 238839986 Blast Desc: phoma betae P450 monooxygenase No.2 [Microsporum canis CBS 113480]
  misc_feature (2)..(295): NCBI GI: 119494789 Blast Desc: cytochrome P450 monooxygenase, [Neosartorya fischeri NRRL 181] gi|119412362|gb|EAW22303.1| cytochrome P450 monooxygenase, [Neosartorya fischeri NRRL 181]
  misc_feature (2)..(295): NCBI GI: 259486929 Blast Desc: TPA: cytochrome P450, (Eurofung) [Aspergillus nidulans FGSC A4]
  misc_feature (2)..(295): NCBI GI: 67522282 Blast Desc: AN1598.2 [Aspergillus nidulans FGSC A4] gi|40745149|gb|EAA64305.1| AN1598.2 [Aspergillus nidulans FGSC A4]
  misc_feature (1)..(296): NCBI GI: 119186083 Blast Desc: CIMG_03089 [Coccidioides immitis RS]
  misc_feature (1)..(296): NCBI GI: 240108704 Blast Desc: Cytochrome P450 family protein [Coccidioides posadasii C735 delta SOWgp]
  misc_feature (3)..(295): SWISSPROT Homolog: EC 1.14.13.78 Ent-kaurene oxidase
  misc_feature: Useful for introducing or modulating the production of volatile compounds
MFPRSIQPFVAPFLPSYWRGRRCVKNAQDILYPKIQQLMEANDKGLWDPENSTKEEDMNLLSWLAGSIKGSERNPASVVHVEILLAFASTHTSLTRIVNCLYDIMEADPALTNELLAEIESVAIDAKGWVNVPYDQLHKLDSVLRESQRTSPTVLLGMKRLFKEPYTFTNGINVPAGTFTTMMVAAIENDPDNTPNPEVFDGLRFYREKLAVGLENPATRDLDFTAATNTALGFGYGRTACPGRFFASLVIKMVFVKLLTEYEFAFLEGETRPKAFGLHDFLVTDPKKKILVRRRRGGVCPF

SEQ ID NO: 3264 - DNA, 1788 bp, Muscodor strobelii
  misc_feature: SGI EST ID NO. CUFF.8141.0
  misc_feature: Variant of the nucleotide sequence at SEQ ID NO 3262
cgtctctctgctttatctcattgtcacttattgaagagctttaatcatggataccactccttttgatcatctgtactgggtagtcccagtctgttgtattgtctacatatatgtaaaagatgcatacagcatatggaagtctgcaaaacagcatcccattgcaggggaactgtcaccactgatacctcgaccaattctcaatctgattttcgcgctaagagcaacacacctttgtcagtatagttaccaaaaattcaaagatagagcagtccaatttgtacgcagcgaaggaaacgttctcgttcttccttctagcactcttcacgaactgtcgactttaccagctacagttgctagcccccacgatggtctcgaaaacgatcttatgggaagatacacgagtatcagtctcattctagacagcagacttcatcactccattgtccagcgcagattgactccccgacttccagttctagttccattcttggaaagctcgctttcgtcagcttttcgagactgtttcccgcacttagatgattgggtcgagatgacaccctacgaggtgtttggaaagatatcggctagagcaaatgcacccgcgctcgtagggccagcattctctaaagatcccaaatggcttgatattgctttcgactataccgaacagctgatgcagacactgatcatactccgcatgttcccccgtagcatacagcctttcgtcgctcctttcctaccttcatattggagaggtcgtcgttgtgtcaaaaacgcacaggatatcctgtatcccaaaatccagcagctcatggaagcaaatgacaagggactatgggaccctgagaatagcaccaaagaagaagatatgaacttactcagctggctcgcgggcagtattaaggggagtgagcgtaatcctgcatcggtcgtacatgtcgagatattacttgcattcgcttcaacgcatacatcgttgactcgcatcgtcaactgtctgtatgacatcatggaggccgatccagctctgacaaatgagctgctcgccgagatcgagtctgtggctatcgatgctaagggatgggtcaacgtgccgtacgatcagctgcacaagttggactctgtgctacgcgaatcacaacgcacatcccccacggtcctcctgggtatgaagcgactctttaaagaaccctacacattcacgaatgggatcaacgtgccagctggaacattcacgacaatgatggtagcagccatcgaaaacgatcccgataacacaccaaacccggaagtcttcgatggattgcggttctatcgtgagaaactagccgtaggacttgaaaatcccgcgacaagggatctagatttcacagcagctacaaataccgcactagggtttggttacggccgtactgcctgtcctggaagattcttcgcgagtcttgtgattaagatggtgtttgttaaactacttactgagtatgagtttgcgtttctggagggagagacaagaccaaaggcgtttggattacatgattttttggttacggatccgaagaagaagatccttgttagaaggagacggggtggtgtttgtcctttttgagctgggtggctacgggtatggactacgatagaggacgatatgttgagtcgttaccctaagctttctgtattgttgatacaacgatcgcatcttctacattccgttttgaagccgaaccctggagaaaaggtcttccaatttgaggacgattccttccacattcaaccgacatttggtcggat

SEQ ID NO: 3265 - DNA, 459 bp, Muscodor strobelii
  misc_feature: SGI cDNA ID NO. 560742
  misc_feature: Encodes the peptide sequence at SEQ ID NO 3266
atgtctgcaattggtctagatttgtccaagaactactcgttctacacgttgccattggcgtggctcttcgccaatttccccggattctacgcgaagtccctcgcgccaaagacgtacgacctcgcatacccccgacaattcgcagagagtgtccagaaggatgcgggtctcaccaaacagaccaaaaacaagatcttccgctgcgagtcggcagcggccaatgggcaagagaccgtagctttctacctggcagccgtgatcgccgccaactacgcaggtgttcctgttgagagcatcaacacgtggtccggcgtttatcttgccagccgcctggtctataacttcgtctacatcatcttgcaagagaatcgtaacttggccccgatccgctctcttgtgtggaatgctagcgttgtctcctgggttgtgctattcatcaaggctggaaaccgactctga

SEQ ID NO: 3266 - protein, 152 aa, Muscodor strobelii
  misc_feature: SGI Peptide ID NO. 560742
  misc_feature (6)..(152): NCBI GI: 164429117 Blast Desc: NCU00456 [Neurospora crassa OR74A] gi|157072416|gb|EAA27539.2| [Neurospora crassa OR74A]
  misc_feature (2)..(152): NCBI GI: 46125023 Blast Desc: FG06889.1 [Gibberella zeae PH-1]
  misc_feature (1)..(152): NCBI GI: 171686036 Blast Desc: protein product [Podospora anserina] gi|170942979|emb|CAP68632.1| protein product [Podospora anserina]
  misc_feature (1)..(152): NCBI GI: 156048995 Blast Desc: [Sclerotinia sclerotiorum 1980] gi|154692603|gb|EDN92341.1| [Sclerotinia sclerotiorum 1980]
  misc_feature (6)..(123): NCBI GI: 154317162 Blast Desc: BC1G_03483 [Botryotinia fuckeliana B05.10] gi|150844900|gb|EDN20093.1| BC1G_03483 [Botryotinia fuckeliana B05.10]
  misc_feature (9)..(152): NCBI GI: 71003774 Blast Desc: UM00406.1 [Ustilago maydis 521] gi|46095555|gb|EAK80788.1| UM00406.1 [Ustilago maydis 521]
  misc_feature (35)..(152): NCBI GI: 154300203 Blast Desc: BC1G_10477 [Botryotinia fuckeliana B05.10] gi|150856766|gb|EDN31958.1| BC1G_10477 [Botryotinia fuckeliana B05.10]
  misc_feature (15)..(152): NCBI GI: 169851360 Blast Desc: [Coprinopsis cinerea okayama7#130] gi|116506509|gb|EAU89404.1| [Coprinopsis cinerea okayama7#130]
  misc_feature (56)..(123): NCBI GI: 261358327 Blast Desc: [Verticillium albo-atrum VaMs.102]
  misc_feature (34)..(149): NCBI GI: 156048324 Blast Desc: SS1G_08893 [Sclerotinia sclerotiorum 1980] gi|154693290|gb|EDN93028.1| SS1G_08893 [Sclerotinia sclerotiorum 1980]
MSAIGLDLSKNYSFYTLPLAWLFANFPGFYAKSLAPKTYDLAYPRQFAESVQKDAGLTKQTKNKIFRCESAAANGQETVAFYLAAVIAANYAGVPVESINTWSGVYLASRLVYNFVYIILQENRNLAPIRSLVWNASVVSWVVLFIKAGNRL

SEQ ID NO: 3267 - DNA, 901 bp, Muscodor strobelii
  misc_feature: SGI EST ID NO. CUFF.8454.1
  misc_feature: Variant of the nucleotide sequence at SEQ ID NO 3265
aaaacccggacaaaactccgatatataaacaacttaaatcagctcgaactactagttagaagacatcgaaagagaagagctcaaaatgtctgcaattggtctagatttgtccaagaactactcgttctacacgttgccattggcgtggctcttcgccaatttccccggattctacgcgaagtccctcgcgccaaagacgtacgacctcgcatacccccgacaattcgcagagagtgtccagaaggatgcgggtctcaccaaacagaccaaaaacaagatcttccgctgcgagtcggcagcggccaatgggcaagagaccgtagctttctacctggcagccgtgatcgccgccaactacgcaggtgttcctgttgagagcatcaacacgtggtccggcgtttatcttgccagccgcctggtctataacttcgtctacatcatcttgcaagagaatcgtaacttggccccgatccgctctcttgtgtggaatgctagcgttgtctcctgggttgtgctattcatcaaggctggaaaccgactctgagctgaggattacgttatgtcccactggttctggcgagcattggggtgaaatgggcgagagaaggcaacggaatggataacgaggcagatttgaaacggcttcccggaaaagcaccagtgtatacattcatcagtacaaatactttgggttctgtaaaggggtacacacatatgaatacctaccgtcgtgcaacataaacacattggttctcctatttaaagtctcgttcatgcgaccaaagacacatagttcatgtagctgcacctgcgaacgagcaaatcgtcgcggattccttgccaaagaaataggcacgggaactactggaactccaatatgatcagcatgcgtcaaataatc

SEQ ID NO: 3268 - DNA, 873 bp, Muscodor strobelii
  misc_feature: SGI cDNA ID NO. 560743
  misc_feature: Reduced expression when VOC is produced
  misc_feature: Encodes the peptide sequence at SEQ ID NO 3269
atggcgaccaagctctgccgtagcagggccttggcctcagctttgaggccctccaatgccctctcccgcaccaccatcgagcagcaggcggttcggtgcatcgcctcgacggcccgccacaatgtcgcgatgcccagcgacgtctccaacatgcggcatgcgccccgcgaccaccctcgggagctgaaggcacccatcgtcaacccggcggacaagtaccagaccaaggccgacgacatgcaccgctacgggagctggctgatgggctgcatgcccaagtacatccagcagttctccgtctggaaggacgagctcgtcatctacatctcgccccagggcgtcatccccgtcttctccttcctcaagcacaacacggcggccgagttcacgcaggtcagcaccatcaccgccgtcgacttccccaccaaagacgcgcgcttcgagatcgtctacaacctgctctccgtccgccacaacgcccgcatccgcgtcaagacctacgccgacgaggcctcccccgtcccctccatcacgcccctcttcgacggcgccaactggtacgagcgcgaggtctacgacatgttcggcgtcttcttcaccgggcaccccgacctgcgccgcatcatgaccgactacggcttcgagggccaccccctgcgcaaggacttccccctcaccggctacaccgaggtccgctacgacgaggagaagaagcgcatcgtcacagagcccctcgagctcacccaggccttccgcaacttcgagggcggctccaccgcttgggagcccgtcggttccggccaggaccggaagccagatactttcaagctgcctacgccgaagcctgagcccgcgccggaagagaagaaatag

SEQ ID NO: 3269 - protein, 290 aa, Muscodor strobelii
  misc_feature: SGI Peptide ID NO. 560743
  misc_feature (164)..(231): Pfam Id: PF00329 Pfam Desc: Respiratory-chain NADH dehydrogenase, 30 Kd subunit
  misc_feature (1)..(279): NCBI GI: 46134189 Blast Desc: FG09234.1 [Gibberella zeae PH-1]
  misc_feature (1)..(290): NCBI GI: 85086366 Blast Desc: NADH:ubiquinone oxidoreductase 30.4kD subunit [Neurospora crassa OR74A] gi|67477363|sp|P23710.2|NDUS3_NEUCR RecName: Full=NADH-ubiquinone oxidoreductase 30.4 kDa subunit,
  misc_feature (1)..(279): NCBI GI: 171682350 Blast Desc: protein product [Podospora anserina] gi|170941134|emb|CAP66784.1| protein product [Podospora anserina]
  misc_feature (1)..(279): NCBI GI: 58257421 Blast Desc: NADH-ubiquinone oxidoreductase-like protein [Magnaporthe grisea]
  misc_feature (1)..(279): NCBI GI: 39951381 Blast Desc: MGG_01333 [Magnaporthe grisea 70-15] gi|145020847|gb|EDK04976.1| MGG_01333 [Magnaporthe grisea 70-15]
  misc_feature (1)..(277): NCBI GI: 156060183 Blast Desc: NADH-ubiquinone oxidoreductase 30.4 kDa subunit, mitochondrial precursor [Sclerotinia sclerotiorum 1980] gi|154699638|gb|EDN99376.1| NADH-ubiquinone oxidoreductase 30.4
  misc_feature (1)..(277): NCBI GI: 116202719 Blast Desc: CHGG_09244 [Chaetomium globosum CBS 148.51] gi|88177762|gb|EAQ85230.1| CHGG_09244 [Chaetomium globosum CBS 148.51]
  misc_feature (1)..(288): NCBI GI: 261359365 Blast Desc: NADH dehydrogenase iron-sulfur protein [Verticillium albo-atrum VaMs.102]
  misc_feature (7)..(290): NCBI GI: 242773027 Blast Desc: NADH-ubiquinone oxidoreductase 304 kDa subunit precursor [Talaromyces stipitatus ATCC 10500] gi|218721774|gb|EED21192.1| NADH-ubiquinone oxidoreductase 304
  misc_feature (1)..(290): NCBI GI: 189190938 Blast Desc: NADH dehydrogenase iron-sulfur protein 3, mitochondrial precursor [Pyrenophora tritici-repentis Pt-1C-BFP] gi|187973414|gb|EDU40913.1| NADH dehydrogenase iron-sulfur 3,
  misc_feature (1)..(277): SWISSPROT Homolog: EC 1.6.5.3 NADH dehydrogenase (ubiquinone)
  misc_feature (1)..(277): SWISSPROT Homolog: EC 1.6.99.3 NADH dehydrogenase
  misc_feature: Useful for introducing or modulating the production of volatile compounds
MATKLCRSRALASALRPSNALSRTTIEQQAVRCIASTARHNVAMPSDVSNMRHAPRDHPRELKAPIVNPADKYQTKADDMHRYGSWLMGCMPKYIQQFSVWKDELVIYISPQGVIPVFSFLKHNTAAEFTQVSTITAVDFPTKDARFEIVYNLLSVRHNARIRVKTYADEASPVPSITPLFDGANWYEREVYDMFGVFFTGHPDLRRIMTDYGFEGHPLRKDFPLTGYTEVRYDEEKKRIVTEPLELTQAFRNFEGGSTAWEPVGSGQDRKPDTFKLPTPKPEPAPEEKK

SEQ ID NO: 3270 - DNA, 1388 bp, Muscodor strobelii
  misc_feature: SGI EST ID NO. CUFF.8154.0
  misc_feature: Variant of the nucleotide sequence at SEQ ID NO 3268
caggactagaggtgctgctcccaaagtacctgagcccgcaattggaaaaccacaagctgtgattggctcccagcatcgacggccactggtcatcgaaggcactccttcgcattgagattcaaggtcgaattcactcaaccacggcgactgttcgacgaccaattggccctcccgccgccccgacaccaacatggcgaccaagctctgccgtagcagggccttggcctcagctttgaggccctccaatgccctctcccgcaccaccatcgagcagcaggcggttcggtgcatcgcctcgacggcccgccacaatgtcgcgatgcccagcgacgtctccaacatgcggcatgcgccccgcgaccaccctcgggagctgaaggcacccatcgtcaacccggcggacaagtaccagaccaaggccgacgacatgcaccgctacgggagctggctgatgggctgcatgcccaagtacatccagcagttctccgtctggaaggacgagctcgtcatctacatctcgccccagggcgtcatccccgtcttctccttcctcaagcacaacacggcggccgagttcacgcaggtcagcaccatcaccgccgtcgacttccccaccaaagacgcgcgcttcgagatcgtctacaacctgctctccgtccgccacaacgcccgcatccgcgtcaagacctacgccgacgaggcctcccccgtcccctccatcacgcccctcttcgacggcgccaactggtacgagcgcgaggtctacgacatgttcggcgtcttcttcaccgggcaccccgacctgcgccgcatcatgaccgactacggcttcgagggccaccccctgcgcaaggacttccccctcaccggctacaccgaggtccgctacgacgaggagaagaagcgcatcgtcacagagcccctcgagctcacccaggccttccgcaacttcgagggcggctccaccgcttgggagcccgtcggttccggccaggaccggaagccagatactttcaagctgcctacgccgaagcctgagcccgcgccggaagagaagaaatagagagtgtgcgtctagaagaaagggctgcaaaccaagcatgtacataaactactgtgttacaacaaaatccatattccccgagttgttaactagatttcctatgttctcgtgcatttagtgggatacaacgatgagaataaacactacatttaccaattatcctcatgtcggtcaaaaccaatatccaacatactcaaaacagcctatgacagaaaaggtccactgctcagatgaagcagtagaaacatatcatcgataaattgagcccatattcgggatgtgagtagaccagtgtgagaaattgtcggggtggaaattaggcaaa

SEQ ID NO: 3271 - DNA, 4650 bp, Muscodor strobelii
  misc_feature: SGI cDNA ID NO. 560744
  misc_feature: Reduced expression when VOC is produced
  misc_feature: Encodes the peptide sequence at SEQ ID NO 3272
atggcgcctcaagacagcttcatcgatgaggaggatgatacctgccccctttgcatcgaagagttcgacctatccgatcgaaactttcgcccatgtccctgtggataccaggtctgccagttctgttataacaatctcaaaaataacctaaacggcctgtgtcccgcatgtcgtcgcccctacgacgaaaaggacatacaatggaaggtggtcacaaacgaagaggaagcggagttccgggccaatattcaaaagaatcagaagaagagagccagcgagcaacgccaaaaggaagtacagaaacgtgaagccgagaaggaaagccgcaagaacctgcaaggcgtccgagtcgtgcagaaaaatctcgtctacgtcactggcctgacccccggagtccgcgaagacgagcttctcaagacgttgcggaagcacgagttcttcggccagtatggcaacattcaaaagatttccatcagcaaccgcaagtcctccgatggccagcaacagtccctagggatatatgtcaccttcgagaggcaggaagacgcggcacgatgcattgccgccgtggacggcgctgaaaacggtgatcgctgcttgaaagctcaactaggcacgacgaagtactgctctgcctggctgcggcatgaacaatgtggcaaccgtcagtgcatgttcctgcacgaactcggcgacgaagaggacagctacacgcggcaggacttgtcctccctcaacagcgtccacacccaacgcccgctctccagcgctgcctcctcttctcggcccataccgcgtgcccaggctcccaaggtccctccacctgccgcatcccagcccatggctcgctcgtccagtaaagaagggtccgaaggcggcgatggacctgcattaccggctacggcaaactgggcccgcaccaatcaacagcgaagccggcgtggaagccatgcgaccagcggtgccgcctccagccctgcgatctcgacttcattaccagcgacaagcgagacagtgccggaacctgttgactcgggcccgccaccaccatccagtcggaaagcagaaaagcagccggttgatacagttgcaaaggcagagcctgtttctacgcaagccccatcaactaccaagcgcaactccgatgaactcgagacgtcgattagagtgctcatgtcgattcctccagatgcctgggactacccatgggtcgatgacgataccaactatcctccaatgttcgatctggagcgtgcaacacggaggcgagctttgttggaggaagagaatcgcttggccgaccacgacgaccaaatggataatcttgcaccctccgatggagagccagagagtggtagcctagcgctgggaggcgaaccggaggagcatggccggaacagcttggactatatctctggacgaaacgcacccattcagaggggcggagccaacgatatgttcggtccttctcttgcggcgtttggccagaacactgcttctgctggctctatgggcagccgtacaatgacgccacaacagcaactgttcatgcgaccccaaggcagcttcacagatcaaatgcctcccggcatatctcagcaacagccctcgctcttccaaggccaaggccaaggtcattcacgtcagcaatcgcgattcagctttgcgaatgacaacagcgccagttcggtgaacgtcaagtccagcgcggatcctcgatacatggctcagcagaactccatgatgccgtctaattaccgcactgggaccaatcagctgtatcaaacaaccgtatctggtcccccacctgggcttaagtcgaccggcactccacctgtcagtggcaacatgtttggccaaggacacggtttcggaggatcgaattttggagcagtgaagaacgaaagccagaatgatttattacaatccctcatccggagaggcgcggccggtggtcagggacacgagcaaggaaagcgtgagtaccaaattccccaatttcccacttttcataaccaatatccttcctctacttcctccaccccagctcctgcccaggctcctggcctcctggcatcgctctatgtctcacagcctggagcttttccggactacggacccaagcagaagaagaaggggaagaagcacagacacgctaacacttcctcctcgggggggagtggcttagtagatcttgcggacccgagtatccttcggatacatcatcagcaacaagggaacaacgtcggagccgggcaggggctgttcggtggacaaagtcaagatgacgatgaccttgacatggacgaagcaacactcgcggttgatgcacttgtttcggatccgtcagagtttgaggatatgattcgacggactgctggtaggtcgacgccgtctatgcccccagggctaagtttcagccatggacacccgccggtattatttggtgaaggtgtacaaagtcccgtgctgccggatcgatcgctctcaagaaatagcacagcacgctccatcactcattctgctcctcgaccagcgaccccacttgcggcgacaccattggtcaagtcagccattctccgagggaaagacgagtcccctgctcccaagagtgacgcgaagaaaaacattaaggagcttgccagcacaagcggtctcgcgcaggatatcgccgcacaggcagcaaaggccgcaaggaccacactcttgcaagaagaggacttccctgctctcgactcggtgaagcaagagcctgcagtcaaaacccctgctgccgcaacctcaaaatcggcacaagcgaccaaaactcaaagtggaaagaaggttaccgccgaaggatcaagcaagatctcagcggagactaagcagaagaaatctgacaagcggccagttcctggcatcctcgacattgctgccgccacaagctccgtgtcccagcagcatatcacagaagcaaagacaggagatttagacaaaagtgctacccagacctctgccaaggccccttcgtcttccgccctgccaacgcctaccccgaccacggcgtccgtctcttctccacttgctaaggctatgccaaagacccttcgtcttgtacaaacgcccaagaccgaaacgcccttggctgccgctgtggcctccatccgttcaggtgcagcagcaagttcaagtcaccggcccatgacgccagccagcgagatcgtgtctgatactgcttccgtcatcagcacatccatttcggcatccaggacgagctctccgccgccttcgtccaggatcggctccctcccggtgcgccctgctacgaagagtcagcaacgcaaacaacgtaaagacgcttccaaggaggctgccgcacagatagccgagactcctgtgtttgagccagaagttggcattgctccgatcctcggcaggaagaagaagcagaagaaagagaaaaagaccaccgccgccgccagcagagcaagcagccggccacaaacgccgaccgcgtccgagcaggttgaagagaagcctgccgctgataagaacagcagcaagcaatctgttgaaatggcaagcaagccccagagagaggccaaacagccagtcccagagcttccgagagcaaaggttgagaaagcaaaggacgtgagccctccgcctcaaagtcctgtggcgattgatacgtctatcaagctgaacgaatcaacgaagaccacagtattgactcctgattatgtaacccatacccccgaggtcagaaatgagcagccgatggagcaggatattggtgaagtccctcagcttcgagatgttttccgaaagctcctggacgatgaggctctgtctgaactggacaagatgagttttttcaaggccactgcagggtacagatccgagctcaacgcaaacaacccacctaccgctcttccacccacgctcaaggccatcgtagcgaaagaagatgaggaaaagctcaatgcattccagcctgttcgtaagacagtcaatgaccaatatgtcctcttgactcccaacggagattgtctgttgaacttgacaccagccgaggccgaccttttcctcgagctccaagaacgactgagatccgatagcgttcgtccaaccgcctactctgctcctcgctactcacccgcaagcggcttcagtctagtgaagaaccgcgcagttcctaacggcgcaccgtctttcttccccttgggtcctgataactatcccagcgaccccgttgggaagatgcaccgtgaagaagcgatcagctgcatcaaccagcacgtcctcccgtcgttgaacctaggcagctacaagaccatggggcctaactcgaatttcactaagaatgtaaatctccagcagctggccccctggatctacccgcctgcagatggttccgatgatcggaagatgttcaccggtcggtctacagacgactacaacagcggccgcaatagcgcggtggacagcgcctacggtagctacgatcatcctgagccgtacccgagccccgctatcggtagcacgccgctcatgagcgtcgaggacgccgagacggtgtggacgcaggctaagaagcagcatgaggcgcttgataagaagtttcgccagctgcagcagaagaatcgtcggctggttgatttgcattga

SEQ ID NO: 3272 - protein, 1549 aa, Muscodor strobelii
  misc_feature: SGI Peptide ID NO. 560744
  misc_feature (123)..(202): Pfam Id: PF00076 Pfam Desc: RNA recognition motif. (a.k.a. RRM, RBD, or RNP domain)
  misc_feature (1)..(1427): NCBI GI: 116202721 Blast Desc: CHGG_09245 [Chaetomium globosum CBS 148.51] gi|88177763|gb|EAQ85231.1| CHGG_09245 [Chaetomium globosum CBS 148.51]
  misc_feature (1)..(761): NCBI GI: 145613832 Blast Desc: MGG_11229 [Magnaporthe grisea 70-15] gi|145020848|gb|EDK04977.1| MGG_11229 [Magnaporthe grisea 70-15]
  misc_feature (1)..(1170): NCBI GI: 46134187 Blast Desc: FG09233.1 [Gibberella zeae PH-1]
  misc_feature (1)..(761): NCBI GI: 256727170 Blast Desc: NECHADRAFT_91372 [Nectria haematococca mpVI 77-13-4]
  misc_feature (1)..(667): NCBI GI: 164426732 Blast Desc: NCU04073 [Neurospora crassa OR74A] gi|157071453|gb|EAA28452.2| conserved [Neurospora crassa OR74A]
  misc_feature (37)..(739): NCBI GI: 171682348 Blast Desc: protein product [Podospora anserina] gi|170941133|emb|CAP66783.1| protein product [Podospora anserina]
  misc_feature (1)..(761): NCBI GI: 156060185 Blast Desc: SS1G_02231 [Sclerotinia sclerotiorum 1980] gi|154699639|gb|EDN99377.1| SS1G_02231 [Sclerotinia sclerotiorum 1980]
  misc_feature (1)..(757): NCBI GI: 154315523 Blast Desc: BC1G_04334 [Botryotinia fuckeliana B05.10] gi|150847274|gb|EDN22467.1| BC1G_04334 [Botryotinia fuckeliana B05.10]
  misc_feature (5)..(1148): NCBI GI: 240105500 Blast Desc: RNA recognition motif containing protein [Coccidioides posadasii C735 delta SOWgp]
  misc_feature (1)..(433): NCBI GI: 261359364 Blast Desc: general negative regulator of transcription subunit 4 [Verticillium albo-atrum VaMs.102]
  misc_feature: Useful for introducing or modulating the production of volatile compounds
MAPQDSFIDEEDDTCPLCIEEFDLSDRNFRPCPCGYQVCQFCYNNLKNNLNGLCPACRRPYDEKDIQWKVVTNEEEAEFRANIQKNQKKRASEQRQKEVQKREAEKESRKNLQGVRVVQKNLVYVTGLTPGVREDELLKTLRKHEFFGQYGNIQKISISNRKSSDGQQQSLGIYVTFERQEDAARCIAAVDGAENGDRCLKAQLGTTKYCSAWLRHEQCGNRQCMFLHELGDEEDSYTRQDLSSLNSVHTQRPLSSAASSSRPIPRAQAPKVPPPAASQPMARSSSKEGSEGGDGPALPATANWARTNQQRSRRGSHATSGAASSPAISTSLPATSETVPEPVDSGPPPPSSRKAEKQPVDTVAKAEPVSTQAPSTTKRNSDELETSIRVLMSIPPDAWDYPWVDDDTNYPPMFDLERATRRRALLEEENRLADHDDQMDNLAPSDGEPESGSLALGGEPEEHGRNSLDYISGRNAPIQRGGANDMFGPSLAAFGQNTASAGSMGSRTMTPQQQLFMRPQGSFTDQMPPGISQQQPSLFQGQGQGHSRQQSRFSFANDNSASSVNVKSSADPRYMAQQNSMMPSNYRTGTNQLYQTTVSGPPPGLKSTGTPPVSGNMFGQGHGFGGSNFGAVKNESQNDLLQSLIRRGAAGGQGHEQGKREYQIPQFPTFHNQYPSSTSSTPAPAQAPGLLASLYVSQPGAFPDYGPKQKKKGKKHRHANTSSSGGSGLVDLADPSILRIHHQQQGNNVGAGQGLFGGQSQDDDDLDMDEATLAVDALVSDPSEFEDMIRRTAGRSTPSMPPGLSFSHGHPPVLFGEGVQSPVLPDRSLSRNSTARSITHSAPRPATPLAATPLVKSAILRGKDESPAPKSDAKKNIKELASTSGLAQDIAAQAAKAARTTLLQEEDFPALDSVKQEPAVKTPAAATSKSAQATKTQSGKKVTAEGSSKISAETKQKKSDKRPVPGILDIAAATSSVSQQHITEAKTGDLDKSATQTSAKAPSSSALPTPTPTTASVSSPLAKAMPKTLRLVQTPKTETPLAAAVASIRSGAAASSSHRPMTPASEIVSDTASVISTSISASRTSSPPPSSRIGSLPVRPATKSQQRKQRKDASKEAAAQIAETPVFEPEVGIAPILGRKKKQKKEKKTTAAASRASSRPQTPTASEQVEEKPAADKNSSKQSVEMASKPQREAKQPVPELPRAKVEKAKDVSPPPQSPVAIDTSIKLNESTKTTVLTPDYVTHTPEVRNEQPMEQDIGEVPQLRDVFRKLLDDEALSELDKMSFFKATAGYRSELNANNPPTALPPTLKAIVAKEDEEKLNAFQPVRKTVNDQYVLLTPNGDCLLNLTPAEADLFLELQERLRSDSVRPTAYSAPRYSPASGFSLVKNRAVPNGAPSFFPLGPDNYPSDPVGKMHREEAISCINQHVLPSLNLGSYKTMGPNSNFTKNVNLQQLAPWIYPPADGSDDRKMFTGRSTDDYNSGRNSAVDSAYGSYDHPEPYPSPAIGSTPLMSVEDAETVWTQAKKQHEALDKKFRQLQQKNRRLVDLH

SEQ ID NO: 3273 - DNA, 6245 bp, Muscodor strobelii
  misc_feature: SGI EST ID NO. CUFF.9045.1
  misc_feature: Variant of the nucleotide sequence at SEQ ID NO 3271
ttgcaaccaaaccttcagcacagcagcacacctgcctctcctttgcatctacatttgcatcgacggcaacctccccctcatcctttcctccctctcccacctacgaccttaatactcccattcccatcttcgcgtcaccatcacgcctctccggcttccaccatccccactgcattctttcgcctggcgttccaaggtctgcatgcattcgtcctggtgtcgagccttttcttattagagccctgcacaaccactcccacctctaatatcccagacaccaccgctcccgaacacgcgtggcgactatctcgacattctttgtcgccgggtatacgtagtagagtattcgtttacctcctccccgacgcgacactctcccttctccgatccctcggtcaccttcgttggtacccgaacacttcgaccctccgaattcacatacaccactctcaacatggcgcctcaagacagcttcatcgatgaggaggatgatacctgccccctttgcatcgaagagttcgacctatccgatcgaaactttcgcccatgtccctgtggataccaggtctgccagttctgttataacaatctcaaaaataacctaaacggcctgtgtcccgcatgtcgtcgcccctacgacgaaaaggacatacaatggaaggtggtcacaaacgaagaggaagcggagttccgggccaatattcaaaagaatcagaagaagagagccagcgagcaacgccaaaaggaagtacagaaacgtgaagccgagaaggaaagccgcaagaacctgcaaggcgtccgagtcgtgcagaaaaatctcgtctacgtcactggcctgacccccggagtccgcgaagacgagcttctcaagacgttgcggaagcacgagttcttcggccagtatggcaacattcaaaagatttccatcagcaaccgcaagtcctccgatggccagcaacagtccctagggatatatgtcaccttcgagaggcaggaagacgcggcacgatgcattgccgccgtggacggcgctgaaaacggtgatcgctgcttgaaagctcaactaggcacgacgaagtactgctctgcctggctgcggcatgaacaatgtggcaaccgtcagtgcatgttcctgcacgaactcggcgacgaagaggacagctacacgcggcaggacttgtcctccctcaacagcgtccacacccaacgcccgctctccagcgctgcctcctcttctcggcccataccgcgtgcccaggctcccaaggtccctccacctgccgcatcccagcccatggctcgctcgtccagtaaagaagggtccgaaggcggcgatggacctgcattaccggctacggcaaactgggcccgcaccaatcaacagcgaagccggcgtggaagccatgcgaccagcggtgccgcctccagccctgcgatctcgacttcattaccagcgacaagcgagacagtgccggaacctgttgactcgggcccgccaccaccatccagtcggaaagcagaaaagcagccggttgatacagttgcaaaggcagagcctgtttctacgcaagccccatcaactaccaagcgcaactccgatgaactcgagacgtcgattagagtgctcatgtcgattcctccagatgcctgggactacccatgggtcgatgacgataccaactatcctccaatgttcgatctggagcgtgcaacacggaggcgagctttgttggaggaagagaatcgcttggccgaccacgacgaccaaatggataatcttgcaccctccgatggagagccagagagtggtagcctagcgctgggaggcgaaccggaggagcatggccggaacagcttggactatatctctggacgaaacgcacccattcagaggggcggagccaacgatatgttcggtccttctcttgcggcgtttggccagaacactgcttctgctggctctatgggcagccgtacaatgacgccacaacagcaactgttcatgcgaccccaaggcagcttcacagatcaaatgcctcccggcatatctcagcaacagccctcgctcttccaaggccaaggccaaggtcattcacgtcagcaatcgcgattcagctttgcgaatgacaacagcgccagttcggtgaacgtcaagtccagcgcggatcctcgatacatggctcagcagaactccatgatgccgtctaattaccgcactgggaccaatcagctgtatcaaacaaccgtatctggtcccccacctgggcttaagtcgaccggcactccacctgtcagtggcaacatgtttggccaaggacacggtttcggaggatcgaattttggagcagtgaagaacgaaagccagaatgatttattacaatccctcatccggagaggcgcggccggtggtcagggacacgagcaaggaaagctagatcttgcggacccgagtatccttcggatacatcatcagcaacaagggaacaacgtcggagccgggcaggggctgttcggtggacaaagtcaaggtgggtacaacaatcccaacaccatgtatggcggtgggggatacaacaacagatggtagccgtgtattcagcatgaagctgcggagcaatcaatgggcggcgcgatatactttattttctttctctggctttcagcaaggggtacgtcaaggcgttagggttctcggaaatggaagataatcggaacattccacaagatctgtttcagcgagcataccagaggcatgacgatccggggtggatcaaggttgcatttggcgtccaacttgctcttggaaacgacgaggctgcccgaccgcggccgctgctttacacgagatacacactgtttctggcgtcttatctaccatcttatgagaattgttcggttctacggtcacgccaggcaagccatcgtcgtcttccacaaattttatgtacgttaatgcacagatctggccgaaggcgaataatagcattcaacctcttaactgtgtcaaattcctgtatctccttgtgggagacgacgatggaagcctgtgacgtgacctgtgaaccagtccttagttgtagcgcaactttttccgtttttttaggtaattcagatgtgtcgatgaatttactagctaacatatttgtcttttctagatgacgatgaccttgacatggacgaagcaacactcgcggttgatgcacttgtttcggatccgtcagagtttgaggatatgattcgacggactgctggtaggtcgacgccgtctatgcccccagggctaagtttcagccatggacacccgccggtattatttggtgaaggtgtacaaagtcccgtgctgccggatcgatcgctctcaagaaatagcacagcacgctccatcactcattctgctcctcgaccagcgaccccacttgcggcgacaccattggtcaagtcagccattctccgagggaaagacgagtcccctgctcccaagagtgacgcgaagaaaaacattaaggagcttgccagcacaagcggtctcgcgcaggatatcgccgcacaggcagcaaaggccgcaaggaccacactcttgcaagaagaggacttccctgctctcgactcggtgaagcaagagcctgcagtcaaaacccctgctgccgcaacctcaaaatcggcacaagcgaccaaaactcaaagtggaaagaaggttaccgccgaaggatcaagcaagatctcagcggagactaagcagaagaaatctgacaagcggccagttcctggcatcctcgacattgctgccgccacaagctccgtgtcccagcagcatatcacagaagcaaagacaggagatttagacaaaagtgctacccagacctctgccaaggccccttcgtcttccgccctgccaacgcctaccccgaccacggcgtccgtctcttctccacttgctaaggctatgccaaagacccttcgtcttgtacaaacgcccaagaccgaaacgcccttggctgccgctgtggcctccatccgttcaggtgcagcagcaagttcaagtcaccggcccatgacgccagccagcgagatcgtgtctgatactgcttccgtcatcagcacatccatttcggcatccaggacgagctctccgccgccttcgtccaggatcggctccctcccggtgcgccctgctacgaagagtcagcaacgcaaacaacgtaaagacgcttccaaggaggctgccgcacagatagccgagactcctgtgtttgagccagaagttggcattgctccgatcctcggcaggaagaagaagcagaagaaagagaaaaagaccaccgccgccgccagcagagcaagcagccggccacaaacgccgaccgcgtccgagcaggttgaagagaagcctgccgctgataagaacagcagcaagcaatctgttgaaatggcaagcaagccccagagagaggccaaacagccagtcccagagcttccgagagcaaaggttgagaaagcaaaggacgtgagccctccgcctcaaagtcctgtggcgattgatacgtctatcaagctgaacgaatcaacgaagaccacagtattgactcctgattatgtaacccatacccccgaggtcagaaatgagcagccgatggagcaggatattggtgaagtccctcagcttcgagatgttttccgaaagctcctggacgatgaggctctgtctgaactggacaagatgagttttttcaaggccactgcagggtacagatccgagctcaacgcaaacaacccacctaccgctcttccacccacgctcaaggccatcgtagcgaaagaagatgaggaaaagctcaatgcattccagcctgttcgtaagacagtcaatgaccaatatgtcctcttgactcccaacggagattgtctgttgaacttgacaccagccgaggccgaccttttcctcgagctccaagaacgactgagatccgatagcgttcgtccaaccgcctactctgctcctcgctactcacccgcaagcggcttcagtctagtgaagaaccgcgcagttcctaacggcgcaccgtctttcttccccttgggtcctgataactatcccagcgaccccgttgggaagatgcaccgtgaagaagcgatcagctgcatcaaccagcacgtcctcccgtcgttgaacctaggcagctacaagaccatggggcctaactcgaatttcactaagaatgtaaatctccagcagctggccccctggatctacccgcctgcagatggttccgatgatcggaagatgttcaccggtcggtctacagacgactacaacagcggccgcaatagcgcggtggacagcgcctacggtagctacgatcatcctgagccgtacccgagccccgctatcggtagcacgccgctcatgagcgtcgaggacgccgagacggtgtggacgcaggctaagaagcagcatgaggcgcttgataagaagtttcgccagctgcagcagaagaatcgtcggctggttgatttgcattgactgccgagcttgttgggcttctgcttagatgcgcctgtgcttgtggttaggtggatttgttatgcgatcatgacggttgcgtttggggttgcgttcgcgaggagtgttgtggggactttgcctggtgctgcggctgtgcttggtgttcattaggttgggtgatgggttgaggactgggaacggagaccggggaatgtagagagcccctgaaggtggatcttcagggctgtatgggatggggaagcggagaggttgtgtacgattttgcatttgtattgcattgtatgaggtatgagtttgtttggtatggttatggcatgatttcggcatgctgtggtatggatggtgggcagggcattgcgtttgttctggatttgcatcggtctacactgcatccgtatctgcattgttcgcgtcgggtatgggagatggggaaagagaggggaaagatgagaaaacgctgggaatgggttgatgagtgggagaacattaacagatgccattgagttgtggcttttgctgtatcagtaggtatgcgttagacagagcgatagcaggtagcattgctattgtagcgtgcttggattaagggctgttgagatatgagttttggttttgtgttattgtgcattgtgtattgtgtatgtgagttgagttgtgattatgaggtgagggagttgagagcgagattgtgagttaagtggttaggaggttaggaagtgtg

SEQ ID NO: 3274 - DNA, 2343 bp, Muscodor strobelii
  misc_feature: SGI cDNA ID NO. 560745
  misc_feature: Reduced expression when VOC is produced
  misc_feature: Encodes the peptide sequence at SEQ ID NO 3275
atggcgcctcaagacagcttcatcgatgaggaggatgatacctgccccctttgcatcgaagagttcgacctatccgatcgaaactttcgcccatgtccctgtggataccaggtctgccagttctgttataacaatctcaaaaataacctaaacggcctgtgtcccgcatgtcgtcgcccctacgacgaaaaggacatacaatggaaggtggtcacaaacgaagaggaagcggagttccgggccaatattcaaaagaatcagaagaagagagccagcgagcaacgccaaaaggaagtacagaaacgtgaagccgagaaggaaagccgcaagaacctgcaaggcgtccgagtcgtgcagaaaaatctcgtctacgtcactggcctgacccccggagtccgcgaagacgagcttctcaagacgttgcggaagcacgagttcttcggccagtatggcaacattcaaaagatttccatcagcaaccgcaagtcctccgatggccagcaacagtccctagggatatatgtcaccttcgagaggcaggaagacgcggcacgatgcattgccgccgtggacggcgctgaaaacggtgatcgctgcttgaaagctcaactaggcacgacgaagtactgctctgcctggctgcggcatgaacaatgtggcaaccgtcagtgcatgttcctgcacgaactcggcgacgaagaggacagctacacgcggcaggacttgtcctccctcaacagcgtccacacccaacgcccgctctccagcgctgcctcctcttctcggcccataccgcgtgcccaggctcccaaggtccctccacctgccgcatcccagcccatggctcgctcgtccagtaaagaagggtccgaaggcggcgatggacctgcattaccggctacggcaaactgggcccgcaccaatcaacagcgaagccggcgtggaagccatgcgaccagcggtgccgcctccagccctgcgatctcgacttcattaccagcgacaagcgagacagtgccggaacctgttgactcgggcccgccaccaccatccagtcggaaagcagaaaagcagccggttgatacagttgcaaaggcagagcctgtttctacgcaagccccatcaactaccaagcgcaactccgatgaactcgagacgtcgattagagtgctcatgtcgattcctccagatgcctgggactacccatgggtcgatgacgataccaactatcctccaatgttcgatctggagcgtgcaacacggaggcgagctttgttggaggaagagaatcgcttggccgaccacgacgaccaaatggataatcttgcaccctccgatggagagccagagagtggtagcctagcgctgggaggcgaaccggaggagcatggccggaacagcttggactatatctctggacgaaacgcacccattcagaggggcggagccaacgatatgttcggtccttctcttgcggcgtttggccagaacactgcttctgctggctctatgggcagccgtacaatgacgccacaacagcaactgttcatgcgaccccaaggcagcttcacagatcaaatgcctcccggcatatctcagcaacagccctcgctcttccaaggccaaggccaaggtcattcacgtcagcaatcgcgattcagctttgcgaatgacaacagcgccagttcggtgaacgtcaagtccagcgcggatcctcgatacatggctcagcagaactccatgatgccgtctaattaccgcactgggaccaatcagctgtatcaaacaaccgtatctggtcccccacctgggcttaagtcgaccggcactccacctgtcagtggcaacatgtttggccaaggacacggtttcggaggatcgaattttggagcagtgaagaacgaaagccagaatgatttattacaatccctcatccggagaggcgcggccggtggtcagggacacgagcaaggaaagcgtgagtaccaaattccccaatttcccacttttcataaccaatatccttcctctacttcctccaccccagctcctgcccaggctcctggcctcctggcatcgctctatgtctcacagcctggagcttttccggactacggacccaagcagaagaagaaggggaagaagcacagacacgctaacacttcctcctcgggggggagtggcttagtagatcttgcggacccgagtatccttcggatacatcatcagcaacaagggaacaacgtcggagccgggcaggggctgttcggtggacaaagtcaaggtgggtacaacaatcccaacaccatgtatggcggtgggggatacaacaacagatggtag

SEQ ID NO: 3275 - protein, 780 aa, Muscodor strobelii
  misc_feature: SGI Peptide ID NO. 560745
  misc_feature (123)..(202): Pfam Id: PF00076 Pfam Desc: RNA recognition motif. (a.k.a. RRM, RBD, or RNP domain)
  misc_feature (1)..(780): NCBI GI: 145613832 Blast Desc: MGG_11229 [Magnaporthe grisea 70-15] gi|145020848|gb|EDK04977.1| MGG_11229 [Magnaporthe grisea 70-15]
  misc_feature (1)..(739): NCBI GI: 116202721 Blast Desc: CHGG_09245 [Chaetomium globosum CBS 148.51] gi|88177763|gb|EAQ85231.1| CHGG_09245 [Chaetomium globosum CBS 148.51]
  misc_feature (1)..(761): NCBI GI: 256727170 Blast Desc: NECHADRAFT_91372 [Nectria haematococca mpVI 77-13-4]
  misc_feature (1)..(667): NCBI GI: 164426732 Blast Desc: NCU04073 [Neurospora crassa OR74A] gi|157071453|gb|EAA28452.2| conserved [Neurospora crassa OR74A]
  misc_feature (37)..(771): NCBI GI: 171682348 Blast Desc: protein product [Podospora anserina] gi|170941133|emb|CAP66783.1| protein product [Podospora anserina]
  misc_feature (1)..(780): NCBI GI: 156060185 Blast Desc: SS1G_02231 [Sclerotinia sclerotiorum 1980] gi|154699639|gb|EDN99377.1| SS1G_02231 [Sclerotinia sclerotiorum 1980]
  misc_feature (1)..(745): NCBI GI: 46134187 Blast Desc: FG09233.1 [Gibberella zeae PH-1]
  misc_feature (1)..(780): NCBI GI: 154315523 Blast Desc: BC1G_04334 [Botryotinia fuckeliana B05.10] gi|150847274|gb|EDN22467.1| BC1G_04334 [Botryotinia fuckeliana B05.10]
  misc_feature (4)..(780): NCBI GI: 189190940 Blast Desc: PTRG_01476 [Pyrenophora tritici-repentis Pt-1C-BFP] gi|187973415|gb|EDU40914.1| PTRG_01476 [Pyrenophora tritici-repentis Pt-1C-BFP]
  misc_feature (1)..(433): NCBI GI: 261359364 Blast Desc: general negative regulator of transcription subunit 4 [Verticillium albo-atrum VaMs.102]
  misc_feature: Useful for introducing or modulating the production of volatile compounds
MAPQDSFIDEEDDTCPLCIEEFDLSDRNFRPCPCGYQVCQFCYNNLKNNLNGLCPACRRPYDEKDIQWKVVTNEEEAEFRANIQKNQKKRASEQRQKEVQKREAEKESRKNLQGVRVVQKNLVYVTGLTPGVREDELLKTLRKHEFFGQYGNIQKISISNRKSSDGQQQSLGIYVTFERQEDAARCIAAVDGAENGDRCLKAQLGTTKYCSAWLRHEQCGNRQCMFLHELGDEEDSYTRQDLSSLNSVHTQRPLSSAASSSRPIPRAQAPKVPPPAASQPMARSSSKEGSEGGDGPALPATANWARTNQQRSRRGSHATSGAASSPAISTSLPATSETVPEPVDSGPPPPSSRKAEKQPVDTVAKAEPVSTQAPSTTKRNSDELETSIRVLMSIPPDAWDYPWVDDDTNYPPMFDLERATRRRALLEEENRLADHDDQMDNLAPSDGEPESGSLALGGEPEEHGRNSLDYISGRNAPIQRGGANDMFGPSLAAFGQNTASAGSMGSRTMTPQQQLFMRPQGSFTDQMPPGISQQQPSLFQGQGQGHSRQQSRFSFANDNSASSVNVKSSADPRYMAQQNSMMPSNYRTGTNQLYQTTVSGPPPGLKSTGTPPVSGNMFGQGHGFGGSNFGAVKNESQNDLLQSLIRRGAAGGQGHEQGKREYQIPQFPTFHNQYPSSTSSTPAPAQAPGLLASLYVSQPGAFPDYGPKQKKKGKKHRHANTSSSGGSGLVDLADPSILRIHHQQQGNNVGAGQGLFGGQSQGGYNNPNTMYGGGGYNNRW

SEQ ID NO: 3276 - DNA, 6245 bp, Muscodor strobelii; identical to SEQ ID NO: 3273
  misc_feature: SGI EST ID NO. CUFF.9045.1
  misc_feature: Variant of the nucleotide sequence at SEQ ID NO 3274

SEQ ID NO: 3277 - DNA, 2076 bp, Muscodor strobelii
  misc_feature: SGI cDNA ID NO. 560746
  misc_feature: Elevated expression when VOC is produced
  misc_feature: Encodes the peptide sequence at SEQ ID NO 3278
atgacaggaatccagacacagttctccttgtcgttggagctgacaaagcttgcgccacctattctgtccgtcgcggggaaaacttgggctgctgctacacaattcgcacgcgaacttcaaaattctggctcggacatagtcattgaggatgatttggcgcggtactttggtcgcaaccgcatctcaccacagctcgcatcgggtttccgcagcgttgttgcacagcagaacgaagtgaatcccctcgtagccggtatcgccttggtcagtgggccaggtccaacggcattgagagcactgaaagaaagtgatgaaggggctcactttaggatgctcgtgcaatgttccttacttattgaagttcacgcacctcgcagcctcgccgatgggctgtataaagcgatggaaaaggagctggacgggggacctcctaatcaagagtttcgcagccttcccagcattgaaggcttgcgaggctcactcgaggtcatccaaagccagacatcttcatactattggagaaatctgctcttagcggttgcttgtcaattggggatcgatgagcaacgtgctcacgatggtttatgcatttccatcttccagggtctagtcactctgctcggctctgtccaaaggtttcccgacgaaagacttctggtgctcgacactagtcatggtatttgtgtgcttgtcgtctgggcccatcatgtcttgggattatccgtgcgtgtccatttccactctcatggaggtcaagtggtgaccaagaccttcggatccgaacaagcaaatgttgtaattaacgttgaccccacgaagcagtgtggggcaccctttcggtgcgcggcaatactgctaagtgcggatggggacgaaatattcaaacttatcggtgactcggatcatgatcgtataaacagcgttgctagaggaccgcttcgtggttttgctaagcggctcgttgagcgagtcttacgtgcatacccaaactcgggtaaacttcaaatggagctgatgatagctagtctaggactggccatccgtctctcccgtagtgcaggttctgtacgtaagccggtcggactttcccaagtgggaacgactataccggtcgactcttctatattcccccataccatcccggaaatcaatctggtcgatgcagcaaatatgctttttaactcctcagccatcgatttgagagaggcagagaattatgcggatattttacatgggagtattgttcacaagctagagtgcccagctggacctattgccgcgtactgcagctcgggtggctcgactcctatcggacgcgcatgggaccgagacctgcgtaacttggtcaaaatgatcgccattgtcatatatgctttcgcgcatgtcactaatgtgaacgactgcggcggcttacccgtcatagaatggttggacataaccatcagcaaattggataactaccgtcgtctgtgttcatggaacatgacttctagctttgaggttcaaaaggatgacagttttatcactatcggctacatgcttttcggttccctggataactttgaatatcaagctagtctcgctagcgccttgggatggagcgtgttcatgagctcattcacagatgcggcagatccggtctttgcgtatttccgatgtgatcgttattttgacgacagcatgagccatctctgcgcagacgcaagcgccaatgctggccagtgcctagatcttgagaatgttgaaaggatccagatagcttcccctctcgtgggcgaagaccgggacagtttcatcgtcagccttcgcatgttccagggcaaagaggccctctaccgcgccgacacctaccgcactgggtttttcgagcgttctgaggctctatgggctagcctcttgaccaagggttgcaatcatattctcggcacagccgagtccatcacgcttccagtaggctgtgtcgctgtcgatagttttggcaggaagcccgaacgcgaggtggctcgctttgttgaccgccattcgctcatcgctggggcgcgaaaattcaacacacaagtggcctgtattgcttag

SEQ ID NO: 3278 - protein, 691 aa, Muscodor strobelii
  misc_feature: SGI Peptide ID NO. 560746
  misc_feature (3)..(192): NCBI GI: 159122833 Blast Desc: AFUB_098050 [Aspergillus fumigatus A1163]
  misc_feature (8)..(546): NCBI GI: 238502603 Blast Desc: conserved [Aspergillus flavus NRRL3357] gi|220691345|gb|EED47693.1| conserved [Aspergillus flavus NRRL3357]
  misc_feature (193)..(505): NCBI GI: 159122834 Blast Desc: AFUB_098060 [Aspergillus fumigatus A1163]
  misc_feature (207)..(546): NCBI GI: 169775943 Blast Desc: [Aspergillus oryzae RIB40] gi|83771173|dbj|BAE61305.1| protein product [Aspergillus oryzae]
  misc_feature (10)..(65): NCBI GI: 242812097 Blast Desc: TSTA_099050 [Talaromyces stipitatus ATCC 10500] gi|218714227|gb|EED13650.1| TSTA_099050 [Talaromyces stipitatus ATCC 10500]
  misc_feature: Useful for introducing or modulating the production of volatile compounds
MTGIQTQFSLSLELTKLAPPILSVAGKTWAAATQFARELQNSGSDIVIEDDLARYFGRNRISPQLASGFRSVVAQQNEVNPLVAGIALVSGPGPTALRALKESDEGAHFRMLVQCSLLIEVHAPRSLADGLYKAMEKELDGGPPNQEFRSLPSIEGLRGSLEVIQSQTSSYYWRNLLLAVACQLGIDEQRAHDGLCISIFQGLVTLLGSVQRFPDERLLVLDTSHGICVLVVWAHHVLGLSVRVHFHSHGGQVVTKTFGSEQANVVINVDPTKQCGAPFRCAAILLSADGDEIFKLIGDSDHDRINSVARGPLRGFAKRLVERVLRAYPNSGKLQMELMIASLGLAIRLSRSAGSVRKPVGLSQVGTTIPVDSSIFPHTIPEINLVDAANMLFNSSAIDLREAENYADILHGSIVHKLECPAGPIAAYCSSGGSTPIGRAWDRDLRNLVKMIAIVIYAFAHVTNVNDCGGLPVIEWLDITISKLDNYRRLCSWNMTSSFEVQKDDSFITIGYMLFGSLDNFEYQASLASALGWSVFMSSFTDAADPVFAYFRCDRYFDDSMSHLCADASANAGQCLDLENVERIQIASPLVGEDRDSFIVSLRMFQGKEALYRADTYRTGFFERSEALWASLLTKGCNHILGTAESITLPVGCVAVDSFGRKPEREVARFVDRHSLIAGARKFNTQVACIA

SEQ ID NO: 3279 - DNA, 2046 bp, Muscodor strobelii
  misc_feature: SGI EST ID NO. CUFF.8165.1
  misc_feature: Variant of the nucleotide sequence at SEQ ID NO 3277
agtatatattgtttcctctctatgtatttaatgatgaaggggtgagttgctttaatcgagtgtcttttcatgcttttaactcgtgctatatgaatgatcgaggtgttatgtgttatactttaaggtgcgtaataaggagttccgatatgtgatgacgaaagtcgtttaagatgaggacgaaaaggaggccagtgagtacgtgggcgatgacttagtgcaagaattataggtgctaagcgttttactgtttctatgctcgctcgcctaaccctttgggagcattcctggcaaagcctcagcccagccgcacttatatgcagacatatagtatgtgaggcagacagggtgcgggcaccaatgaaacaaaggaaattgctggaagaatgccttggagcgcagataggattagacataagtacagacggtagcagcatattcgttgattatttcgaatgctcttaaaatgagataatttattatagtggtctcgaataagaaaatgacaggaatccagacacagttctccttgtcgttggagctgacaaagcttgcgccacctattctgtccgtcgcggggaaaacttgggctgctgctacacaattcgcacgcgaacttcaaaattctggctcggacatagtcattgaggatgatttggcgcggtactttggtcgcaaccgcatctcaccacagctcgcatcgggtttccgcagcgttgttgcacagcagaacgaagtgaatcccctcgtagccggtatcgccttggtcagtgggccaggtccaacggcattgagagcactgaaagaaagtgatgaaggggctcactttaggatgctcgtgcaatgttccttacttattgaagttcacgcacctcgcagcctcgccgatgggctgtataaagcgatggaaaaggagctggacgggggacctcctaatcaagagtttcgcagccttcccagcattgaaggcttgcgaggctcactcgaggtcatccaaagccagacatcttcatactattggagaaatctgctcttagcggttgcttgtcaattggggatcgatgagcaactcacgatggtttatgcatttccatcttccagggtctagtcactctgctcggctctgtccaaaggtttcccgacgaaagacttctggtgctcgacactagtcatggtatttgtgtgcttgtcgtctgggcccatcatgtcttgggattatccgtgcgtgtccatttccactctcatggaggtcaagtggtgaccaagaccttcggatccgaacaagcaaatgttgtaattaacgttgaccccacgaagcagtgtggggcaccctttcggtgcgcggcaatactgctaagtgcggatggggacgaaatattcaaacttatcggtgactcggatcatgatcgtataaacagcgttgctagaggaccgcttcgtggttttgctaagcggctcgttgagcgagtcttacgtgcatacccaaactcgggtaaacttcaaatggagctgatgatagctagtctaggactggccatccgtctctcccgtagtgcaggttctgtacgtaagccggtcggactttcccaagtgggaacgactataccggtcgactcttctatattcccccataccatcccggaaatcaatctggtcgatgcagcaaatatgctttttaactcctcagccatcgatttgagagaggcagagaattatgcggatattttacatgggagtattgttcacaagctagagtgcccagctggacctattgccgcgtactgcagctcgggtggctcgactcctatcggacgcgcatgggaccgagacctgcgtaacttggtcaaaatgatcgccattgtcatatatgctttcgcgcatgtcactaatgtgaacgactgcggcggcttacccgtcatagaatggttggacataaccatcagcaaattggataactaccgtcgtctgtgttcatggaacatgacttctagctttgaggttcaaaaggatgacagttttatcactatcggctacatgcttttcggttcc

SEQ ID NO: 3280 - DNA, 528 bp, Muscodor strobelii
  misc_feature: SGI cDNA ID NO. 560747
  misc_feature: Encodes the peptide sequence at SEQ ID NO 3281
atgcctcagcaacaatttgctgtcctgggaactcaaggatgcgagtctatctttggtgatcaaactttcgttgctacctacaccgacaatacaataggagaggagcgggaggctacgttctccgccgtgtcgggagaaacactctccgcatttggcattactctcatatcgactcctaagacgacctcagcaattatctcgacgtctctcacttccagcagcgtacttccgacccccactactgctacaacatcatcagtagagactatgagcccaacccccatgccggagcactcgagcctgactcccggtgcggctgccggtatcgggataggggcaactgctggagttgttcttctgtttctcctcgctttcttcctctatcgaaagcgcacgaaaaagatagctgaggcagttcccgttgtgaacccagcaccgcttccggacgccgcagcaagagctacccctttgaaggccggtgagcgagctaccgacggcgtcagtgtcgcgttgatgagttcaccttag

SEQ ID NO: 3281 - protein, 175 aa, Muscodor strobelii
  misc_feature: SGI Peptide ID NO. 560747
  misc_feature (63)..(148): NCBI GI: 239606988 Blast Desc: conserved [Ajellomyces dermatitidis ER-3]
  misc_feature (63)..(148): NCBI GI: 261194054 Blast Desc: conserved [Ajellomyces dermatitidis SLH14081] gi|239588446|gb|EEQ71089.1| conserved [Ajellomyces dermatitidis SLH14081]
  misc_feature (60)..(148): NCBI GI: 225556522 Blast Desc: conserved [Ajellomyces capsulatus G186AR]
  misc_feature (57)..(148): NCBI GI: 240273634 Blast Desc: conserved [Ajellomyces capsulatus H143]
  misc_feature (84)..(163): NCBI GI: 121700571 Blast Desc: ACLA_018280 [Aspergillus clavatus NRRL 1] gi|119396693|gb|EAW07124.1| ACLA_018280 [Aspergillus clavatus NRRL 1]
  misc_feature (78)..(134): NCBI GI: 256729031 Blast Desc: NECHADRAFT_40333 [Nectria haematococca mpVI 77-13-4]
MPQQQFAVLGTQGCESIFGDQTFVATYTDNTIGEEREATFSAVSGETLSAFGITLISTPKTTSAIISTSLTSSSVLPTPTTATTSSVETMSPTPMPEHSSLTPGAAAGIGIGATAGVVLLFLLAFFLYRKRTKKIAEAVPVVNPAPLPDAAARATPLKAGERATDGVSVALMSSP

SEQ ID NO: 3282 - DNA, 1095 bp, Muscodor strobelii
  misc_feature: SGI cDNA ID NO. 560748
  misc_feature: Encodes the peptide sequence at SEQ ID NO 3283
atgaacccactctctcgatcactgtctaaatgccgacgagtgtttacgtatactcttctcattgtcattattatactcctctacttactttataaccaacacttaaggcttttcgggtttccagaagcccactttcttcttcacccccagtccaacgaagtcgtcattccagatgaaagttgttcgggacttgaaggcctcgagaatttcttcatcatcgtcaggacaggttccaacgagttgcatcaaaaattgccaccggccttgagcacgacgttgcgctgcgtgccgcacttcggtatctggtctgattgggaagagaccttttccggccatcatattgctaacgcccttgatgaaatcgatcacaagattttgtcacatcattcggatttcgactattatagacttcttcaggaacatgggcctggtggcttttcttccgaagagatctctaaatggagtcaagcccagaatacagctcaaggccgtgatacaccgggctggaagcttgataagtggaagtttctgcctcttgcgaagaaagcctactcccagcgcccctcaagcaggtggtatatgttcatcgaatgcgacacgtacgtgttctggaatagtctcgtaacctggttgtctcgctttgacgccaagcgacctttgtggattgggcggcagatgtacatgggtgacagcctcttcgcctatggaggtgcaggcatcatcttctccggcccggccatgcgacaactcgtggatggttacaaggcgaatgagggtttctataacgatttcactatgaaccaatgggccggtgatgtcgttctcggtaaggccatgtctgatgtcggcattgagttatcgagggcttggccgactcttgaaggtgacatgcccgccaccctcgacttcaagatgcagtgtccgacaggtcacccattctggtgctactacgcgactacatatcatcacctcaattcccaagacatgatagactactatgcctttgaacaatcctggaagtcaacggtaaggccaatatcgaagcccgccaatctgagtggctatacgctgatacatacccctatagcattctga

SEQ ID NO: 3283 - protein, 364 aa, Muscodor strobelii
  misc_feature: SGI Peptide ID NO. 560748
  misc_feature (11)..(341): NCBI GI: 169616260 Blast Desc: SNOG_11300 [Phaeosphaeria nodorum SN15] gi|111059888|gb|EAT81008.1| SNOG_11300 [Phaeosphaeria nodorum SN15]
  misc_feature (7)..(362): NCBI GI: 169775639 Blast Desc: [Aspergillus oryzae RIB40] gi|83771021|dbj|BAE61153.1| protein product [Aspergillus oryzae]
  misc_feature (7)..(362): NCBI GI: 238502273 Blast Desc: conserved [Aspergillus flavus NRRL3357] gi|220691180|gb|EED47528.1| conserved [Aspergillus flavus NRRL3357]
  misc_feature (67)..(346): NCBI GI: 121701475 Blast Desc: ACLA_022900 [Aspergillus clavatus NRRL 1] gi|119397145|gb|EAW07576.1| ACLA_022900 [Aspergillus clavatus NRRL 1]
  misc_feature (12)..(345): NCBI GI: 145234224 Blast Desc: An02g13520 [Aspergillus niger] gi|134057427|emb|CAK47765.1| protein product [Aspergillus niger]
  misc_feature (19)..(339): NCBI GI: 238485472 Blast Desc: conserved [Aspergillus flavus NRRL3357] gi|220698853|gb|EED55192.1| conserved [Aspergillus flavus NRRL3357]
  misc_feature (8)..(362): NCBI GI: 115385138 Blast Desc: conserved [Aspergillus terreus NIH2624] gi|114196808|gb|EAU38508.1| conserved [Aspergillus terreus NIH2624]
  misc_feature (13)..(340): NCBI GI: 169606410 Blast Desc: SNOG_06243 [Phaeosphaeria nodorum SN15] gi|111064954|gb|EAT86074.1| SNOG_06243 [Phaeosphaeria nodorum SN15]
  misc_feature (3)..(337): NCBI GI: 70981442 Blast Desc: conserved [Aspergillus fumigatus Af293] gi|66843872|gb|EAL84213.1| conserved [Aspergillus fumigatus Af293]
  misc_feature (3)..(337): NCBI GI: 159122724 Blast Desc: conserved [Aspergillus fumigatus A1163]
  misc_feature (159)..(335): SWISSPROT Homolog: EC 2.4.1.122 Glycoprotein-N-acetylgalactosamine 3-beta-galactosyltransferase
MNPLSRSLSKCRRVFTYTLLIVIIILLYLLYNQHLRLFGFPEAHFLLHPQSNEVVIPDESCSGLEGLENFFIIVRTGSNELHQKLPPALSTTLRCVPHFGIWSDWEETFSGHHIANALDEIDHKILSHHSDFDYYRLLQEHGPGGFSSEEISKWSQAQNTAQGRDTPGWKLDKWKFLPLAKKAYSQRPSSRWYMFIECDTYVFWNSLVTWLSRFDAKRPLWIGRQMYMGDSLFAYGGAGIIFSGPAMRQLVDGYKANEGFYNDFTMNQWAGDVVLGKAMSDVGIELSRAWPTLEGDMPATLDFKMQCPTGHPFWCYYATTYHHLNSQDMIDYYAFEQSWKSTVRPISKPANLSGYTLIHTPIAF

SEQ ID NO: 3284 - DNA, 316 bp, Muscodor strobelii
  misc_feature: SGI EST ID NO. CUFF.8177.0
  misc_feature: Variant of the nucleotide sequence at SEQ ID NO 3282
agcccactttcttcttcacccccagtccaacgaagtcgtcattccagatgaaagttgttcgggacttgaaggcctcgagaatttcttcatcatcgtcaggacaggttccaacgagttgcatcaaaaattgccaccggccttgagcacgacgttgcgctgcgtgccgcacttcggtatctggtctgattgggaagagaccttttccggccatcatattgctaacgcccttgatgaaatcgatcacaagattttgtcacatcattcggatttcgactattatagacttcttcaggaacatgggcctggtggcttttct

SEQ ID NO: 3285 - DNA, 1116 bp, Muscodor strobelii
  misc_feature: SGI cDNA ID NO. 560749
  misc_feature: Elevated expression when VOC is produced
  misc_feature: Encodes the peptide sequence at SEQ ID NO 3286
atggtcggctcaatgaaactcagtatgctcggcgctgtgctcctgcaagcgtcaattgtcatcgccgctccgtcgacggagtcggtagaccgggccactgaggaactccgtcttgtgaagacttctgaggaggggccccctatttgggtaacggagtcggagaagtttgagatgttcatctcgaagcgtatcggctttatggatatcaccgagacacctaatctcgaggcccttggtgctgcaagactggcgggaatgcaaaagcgtgccacattccccagtgcccctagccatcagtccacagcaaatcctctcattgccaatgtaaatcagagcaacctccaatcttggaccaacacgctggccaacttttacaatcgctattaccgcggttcttacgccgctactagcgctgcctgggtcttcgacaccgtcaagtcggtggcatctgtgaactcggccatcacggtcacccagttcacccattcatacagccagcccagtgtcattgccaagattcccggtacatcgtcggacatcgttattgtatcggcgcattatgactcgatcggtagcacgaccagtggtcgcgcccctggtgcggatgacaatgcctctggcttcgtcactatcctagaagctctccgtgtcttggctgcagcaaaattcaagcccgagaacactctcgagttccacttctactcgggcgaggaaggtggactactcggctcccgcgatgtaatgaacaactatgtctctgctaagaagaatgttctcgcagttatgaatcaagatatgacgggctactctcccaacaacgtcatcgccgtcttcactgattatggtgacaagaacctcattaccttcctccagaagctcgtccctgtgtactcgtcgctgcccttgtcgactgatgtatgtggctatgcttgctctgatcatgcttcggcgtactctgccgggtaccccgcgggctatgtgtgtgatgagaatattagggattcgagcccgtacattcactctgcatccgatacggtctcgacggtggactttgcgcatgttaaggaacatgctaagtacactattggctttttggttgaggcttcgtacttttaa

SEQ ID NO: 3286 - protein, 371 aa, Muscodor strobelii
  misc_feature: SGI Peptide ID NO. 560749
  misc_feature (179)..(355): Pfam Id: PF04389 Pfam Desc: Peptidase family M28
  misc_feature (182)..(245): Pfam Id: PF01546 Pfam Desc: Peptidase family M20/M25/M40
  misc_feature (1)..(371): NCBI GI: 261357274 Blast Desc: bacterial leucyl aminopeptidase [Verticillium albo-atrum VaMs.102]
  misc_feature (14)..(371): NCBI GI: 116201693 Blast Desc: CHGG_08731 [Chaetomium globosum CBS 148.51] gi|88177249|gb|EAQ84717.1| CHGG_08731 [Chaetomium globosum CBS 148.51]
  misc_feature (20)..(371): NCBI GI: 171678060 Blast Desc: protein product [Podospora anserina] gi|170937099|emb|CAP61757.1| protein product [Podospora anserina]
  misc_feature (36)..(371): NCBI GI: 164428383 Blast Desc: NCU04994 [Neurospora crassa OR74A] gi|157072125|gb|EAA26578.2| [Neurospora crassa OR74A]
  misc_feature (5)..(370): NCBI GI: 256722751 Blast Desc: NECHADRAFT_97552 [Nectria haematococca mpVI 77-13-4]
  misc_feature (43)..(370): NCBI GI: 169622178 Blast Desc: SNOG_14304 [Phaeosphaeria nodorum SN15] gi|160704716|gb|EAT78175.2| SNOG_14304 [Phaeosphaeria nodorum SN15]
  misc_feature (31)..(370): NCBI GI: 46109872 Blast Desc: FG01818.1 [Gibberella zeae PH-1]
  misc_feature (27)..(367): NCBI GI: 18250467 Blast Desc: aminopeptidase [Agaricus bisporus]
  misc_feature (38)..(370): NCBI GI: 258567568 Blast Desc: UREG_05217 [Uncinocarpus reesii 1704] gi|237905974|gb|EEP80375.1| UREG_05217 [Uncinocarpus reesii 1704]
  misc_feature (50)..(370): NCBI GI: 169782566 Blast Desc: [Aspergillus oryzae RIB40] gi|83774489|dbj|BAE64612.1| protein product [Aspergillus oryzae]
  misc_feature (90)..(367): SWISSPROT Homolog: EC 3.4.11.10 Bacterial leucyl aminopeptidase
  misc_feature: Useful for introducing or modulating the production of volatile compounds
MVGSMKLSMLGAVLLQASIVIAAPSTESVDRATEELRLVKTSEEGPPIWVTESEKFEMFISKRIGFMDITETPNLEALGAARLAGMQKRATFPSAPSHQSTANPLIANVNQSNLQSWTNTLANFYNRYYRGSYAATSAAWVFDTVKSVASVNSAITVTQFTHSYSQPSVIAKIPGTSSDIVIVSAHYDSIGSTTSGRAPGADDNASGFVTILEALRVLAAAKFKPENTLEFHFYSGEEGGLLGSRDVMNNYVSAKKNVLAVMNQDMTGYSPNNVIAVFTDYGDKNLITFLQKLVPVYSSLPLSTDVCGYACSDHASAYSAGYPAGYVCDENIRDSSPYIHSASDTVSTVDFAHVKEHAKYTIGFLVEASYF

SEQ ID NO: 3287 - DNA, 1519 bp, Muscodor strobelii
  misc_feature: SGI EST ID NO. CUFF.8183.0
  misc_feature: Variant of the nucleotide sequence at SEQ ID NO 3285
tttccatatgaagaaggaggcattcggccacactcaatcataagcgcgccgacgaacaagactggcagactctcgacacaacgcgagatgctttatcttgcaggttgactatataatgtcgtcgatcatttcaacttgtccatgttctgatttcgctgtgtgtccacgcttgatcgaactatagctcccctgcgacaccctgccgttcggataagacaatatggtcggctcaatgaaactcagtatgctcggcgctgtgctcctgcaagcgtcaattgtcatcgccgctccgtcgacggagtcggtagaccgggccactgaggaactccgtcttgtgaagacttctgaggaggggccccctatttgggtaacggagtcggagaagtttgagatgttcatctcgaagcgtatcggctttatggatatcaccgagacacctaatctcgaggcccttggtgctgcaagactggcgggaatgcaaaagcgtgccacattccccagtgcccctagccatcagtccacagcaaatcctctcattgccaatgtaaatcagagcaacctccaatcttggaccaacacgctggccaacttttacaatcgctattaccgcggttcttacgccgctactagcgctgcctgggtcttcgacaccgtcaagtcggtggcatctgtgaactcggccatcacggtcacccagttcacccattcatacagccagcccagtgtcattgccaagattcccggtacatcgtcggacatcgttattgtatcggcgcattatgactcgatcggtagcacgaccagtggtcgcgcccctggtgcggatgacaatgcctctggcttcgtcactatcctagaagctctccgtgtcttggctgcagcaaaattcaagcccgagaacactctcgagttccacttctactcgggcgaggaaggtggactactcggctcccgcgatgtaatgaacaactatgtctctgctaagaagaatgttctcgcagttatgaatcaagatatgacgggctactctcccaacaacgtcatcgccgtcttcactgattatggtgacaagaacctcattaccttcctccagaagctcgtccctgtgtactcgtcgctgcccttgtcgactgatgtatgtggctatgcttgctctgatcatgcttcggcgtactctgccgggtaccccgcgggctatgtgtgtgatgagaatattagggattcgagcccgtacattcactctgcatccgatacggtctcgacggtggactttgcgcatgttaaggaacatgctaagtacactattggctttttggttgaggcttcgtacttttaagaatgtagctttttagcccgcaacggtcgggccaccacgcgccctcgcgagaatgctagatcagcatgacaaggtcattaaaagccttcgctgcgtagctatttgttaagtaccatcttccgtagtagccaatcatgagatacacaagctaagactagattctaatccattctttcagctctc

SEQ ID NO: 3288 - DNA, 609 bp, Muscodor strobelii
  misc_feature: SGI cDNA ID NO. 560750
  misc_feature: Encodes the peptide sequence at SEQ ID NO 3289
atgaccattatgaacccgtgggaagcacaggctctccaatacaacttccagcaatacgaggataatgacacagcagtattgaccgctgaagctgctgtcgcaacagctattgcgacgcaccccaaagactccatacatgatcctgtaatctatcctgggatatatgctccaagtggattcgacatgatgaacattcttattcggatcatctcaaggccaaaccccgtaattcaactcgggcctgtcgacgcctcctgtgcgctcctaatgtgcgacatcgaccaagccgactatccagttgtttacgccaatgatgcctgtacagagttgacgggctattcgaatagagacatgatggggcggaattgtcgcttcatgcaagcaccgggcggcaaagtcaagaagagctcggcacggaagcacgtggagaggagcttgatcagcaaaatgaaccgtgctatcgcggaaaatagcgaaatcgccgtcgagatcccaaatttcaagaagaacggcgacaaattcatcaatcttttgacgatgataccagtttattgggacagccaagagccaagatattacgttggatttatggctgagaagacttggtga

SEQ ID NO: 3289 - protein, 202 aa, Muscodor strobelii
  misc_feature: SGI Peptide ID NO. 560750
  misc_feature (4)..(200): NCBI GI: 261359460 Blast Desc: vivid PAS protein VVD [Verticillium albo-atrum VaMs.102]
  misc_feature (2)..(199): NCBI GI: 12831203 Blast Desc: AF338412_1 vivid PAS protein VVD [Neurospora crassa] gi|40882318|emb|CAF06140.1| vivid PAS protein VVD [Neurospora crassa]
  misc_feature (47)..(200): NCBI GI: 39973625 Blast Desc: MGG_01041 [Magnaporthe grisea 70-15] gi|145018006|gb|EDK02285.1| MGG_01041 [Magnaporthe grisea 70-15]
  misc_feature (47)..(199): NCBI GI: 164426650 Blast Desc: NCU03967 [Neurospora crassa OR74A] gi|157071421|gb|EAA28370.2| conserved [Neurospora crassa OR74A]
  misc_feature (54)..(199): NCBI GI: 260099970 Blast Desc: NCU03967 [Neurospora crassa OR74A] gi|157071421|gb|EAA28370.2| conserved [Neurospora crassa OR74A]
  misc_feature (54)..(199): NCBI GI: 262368024 Blast Desc: NCU03967 [Neurospora crassa OR74A] gi|157071421|gb|EAA28370.2| conserved [Neurospora crassa OR74A]
  misc_feature (54)..(199): NCBI GI: 260099972 Blast Desc: NCU03967 [Neurospora crassa OR74A] gi|157071421|gb|EAA28370.2| conserved [Neurospora crassa OR74A]
  misc_feature (54)..(199): NCBI GI: 149243080 Blast Desc: NCU03967 [Neurospora crassa OR74A] gi|157071421|gb|EAA28370.2| conserved [Neurospora crassa OR74A]
  misc_feature (54)..(199): NCBI GI: 262368023 Blast Desc: NCU03967 [Neurospora crassa OR74A] gi|157071421|gb|EAA28370.2| conserved [Neurospora crassa OR74A]
  misc_feature (54)..(199): NCBI GI: 149243082 Blast Desc: NCU03967 [Neurospora crassa OR74A] gi|157071421|gb|EAA28370.2| conserved [Neurospora crassa OR74A]
  misc_feature (88)..(193): SWISSPROT Homolog: EC 2.7.13.3 Histidine kinase
MTIMNPWEAQALQYNFQQYEDNDTAVLTAEAAVATAIATHPKDSIHDPVIYPGIYAPSGFDMMNILIRIISRPNPVIQLGPVDASCALLMCDIDQADYPVVYANDACTELTGYSNRDMMGRNCRFMQAPGGKVKKSSARKHVERSLISKMNRAIAENSEIAVEIPNFKKNGDKFINLLTMIPVYWDSQEPRYYVGFMAEKTW

SEQ ID NO: 3290 - DNA, 1950 bp, Muscodor strobelii
  misc_feature: SGI EST ID NO. CUFF.8347.1
  misc_feature: Variant of the nucleotide sequence at SEQ ID NO 3288
ctcgtatgtcattggctcagcgtattgttttggtcccctctctgcctcgtttctttgtagatggcagataggtctccccttcactggtgcatcgtccgattgctctgtaataatgtccaagcgagaacgatgtaggcatagtcgactcacttacgatcacgatcccattcagaagcccgccttacatctatcccggacctggaccgagaaacatgtaactattgatgcaatcttgtcttgatacacacagcttctccaaataagcccatacattccatcaacgtcgcatagctctcacgatatatacctgttgtgtcgtcttgagctttaccctaccaatggaataaaacaccaagcagcattcatctaaactgctggatcatccgtcgccaaacctacgacgttgatataattataccgactcacacagcccgttgttggctatctactacacaattcgcactagagctcgtgataatgccgatcagcacttgtcattccaccatgaccattatgaacccgtgggaagcacaggctctccaatacaacttccagcaatacgaggataatgacacagcagtattgaccgctgaagctgctgtcgcaacagctattgcgacgcaccccaaagactccatacatgatcctgtaatctatcctgggatatatgctccaagtggattcgacatgatgaacattcttattcggatcatctcaaggccaaaccccgtaattcaactcgggcctgtcgacgcctcctgtgcgctcctaatgtgcgacatcgaccaagccgactatccagttgtttacgccaatgatgcctgtacagagttgacgggctattcgaatagagacatgatggggcggaattgtcgcttcatgcaagcaccgggcggcaaagtcaagaagagctcggcacggaagcacgtggagaggagcttgatcagcaaaatgaaccgtgctatcgcggaaaatagcgaaatcgccgtcgagatcccaaatttcaagaagaacggcgacaaattcatcaatcttttgacgatgataccagtttattgggacagccaagagccaagatattacgttggatttatggctgagaagacttggtgacgaattttttcgggttatgaaaaccagtacatggaaatcaaggattaaccgagagcaacaaaacaaacccatcttttcttaccacgacaacgcgacctggaacacttctatcatcacacatcgaattacgacggaaagcaccaggatttatcgaggttataaatgcttttaggcacggcacgatacccatacgtttgtttagcgtttgcatattaccggagttcagggcgtatcttagttatagcggactgggaatcaaatgcatagctccggcgttctagcgacgaagcatctatacccacctagcgtcatattcgcatagctacacaaatactatcacatatctatccatttagccatatctcatgggagtttctctttgtggttgaagagataatttgatatctagagcttatattcggtggccttagtgagagaaatagcgaaagcaccatgaatgtagcatccagagaaactaaacaatagcagctctctgtgtcatgggtcaacagcagagccacaaggataatcgcatggtcggagccttaaattgacaaatctagcaacaggttggttgcataaaatcttgtactatttgggggggcatctgataaaattgcagcttcgggcctaatgcttttcgcccaccaacaagttctggtcgtctcaacaccgcctacagggttttgcacgtgttgtcagctttgctggtactccttccaagttgccctttggctaccaaggacgtgggagcccatattagaccctcagcgtgtaaaatatcgtcaattactttccgtagatctgtcagcgcaggccagcatctatcgtctcaag

SEQ ID NO: 3291 - DNA, 837 bp, Muscodor strobelii
  misc_feature: SGI cDNA ID NO. 560751
  misc_feature: Encodes the peptide sequence at SEQ ID NO 3292
atggatctgagcaaagctattgacaatttcattgccgaagcggatggtgaccccgcccgcatcgcgaaaatctgcgaggagcatcgacagaacaggaacaagaaatatgaggagattcttcttcaacctgactatcccggtgtcccgattgacgagattttgactgctcgtcttaaagatcccgagtatctcgatcctcgtaataatctttgtctcttcgcttggccgtctgaggaagtttcgggtcttattttacgtattcaacttgaactgcgctctttggctccccatatatggttaccaccgcccgaatggcttcatatgacggttatcgagttggtccactctaagtcaccccctgaattggctaccaatgcgaagaaagcagagccacacgcatccaaattcacgactttcgcggctcagcacacagctggcctcgagcgcccaatgctgagtctagatgatactgccgtagcgttgacatttctgcctgttgaggacagttcctatacgtatctacatatgcggcgagatctagcaaatatttgtgccgaaaatggtattgaggtcgcgtccaagtactataatacctcgagtcacatcacattcgcgcggttcgcaaacacttctgacttgcagggtcatgaacatctgagcgtatgggttgaaaaaatcaagtcattgaaccaatggctattcgatgaattctggccaaagaaggaacaaggccattcgaggtctggtcttaaatggcttgtaggcgcaggacgtggtgtagaagtgaggaaaggcagattgtggtacggcgacggaaagccgatcagtgaaccctga

SEQ ID NO: 3292 - protein, 278 aa, Muscodor strobelii
  misc_feature: SGI Peptide ID NO. 560751
  misc_feature (2)..(278): NCBI GI: 119500662 Blast Desc: NFIA_106800 [Neosartorya fischeri NRRL 181] gi|119415253|gb|EAW25191.1| conserved [Neosartorya fischeri NRRL 181]
  misc_feature (3)..(273): NCBI GI: 169600703 Blast Desc: SNOG_03196 [Phaeosphaeria nodorum SN15] gi|160705496|gb|EAT89927.2| SNOG_03196 [Phaeosphaeria nodorum SN15]
  misc_feature (10)..(272): NCBI GI: 121717287 Blast Desc: conserved [Aspergillus clavatus NRRL 1] gi|119404221|gb|EAW14638.1| conserved [Aspergillus clavatus NRRL 1]
  misc_feature (3)..(275): NCBI GI: 189192278 Blast Desc: conserved [Pyrenophora tritici-repentis Pt-1C-BFP] gi|187974084|gb|EDU41583.1| conserved [Pyrenophora tritici-repentis Pt-1C-BFP]
  misc_feature (10)..(276): NCBI GI: 261351903 Blast Desc: conserved [Verticillium albo-atrum VaMs.102]
  misc_feature (7)..(275): NCBI GI: 121698190 Blast Desc: conserved [Aspergillus clavatus NRRL 1] gi|119395885|gb|EAW06317.1| conserved [Aspergillus clavatus NRRL 1]
  misc_feature (10)..(275): NCBI GI: 119497637 Blast Desc: NFIA_032430 [Neosartorya fischeri NRRL 181] gi|119413740|gb|EAW23679.1| conserved [Neosartorya fischeri NRRL 181]
  misc_feature (2)..(275): NCBI GI: 238493819 Blast Desc: conserved [Aspergillus flavus NRRL3357] gi|220696640|gb|EED52982.1| conserved [Aspergillus flavus NRRL3357]
  misc_feature (9)..(273): NCBI GI: 255953151 Blast Desc: Pc21g02640 [Penicillium chrysogenum Wisconsin 54-1255] gi|211589039|emb|CAP95161.1| Pc21g02640 [Penicillium chrysogenum Wisconsin 54-1255]
  misc_feature (7)..(275): NCBI GI: 115442942 Blast Desc: conserved [Aspergillus terreus NIH2624] gi|114188147|gb|EAU29847.1| conserved [Aspergillus terreus NIH2624]
MDLSKAIDNFIAEADGDPARIAKICEEHRQNRNKKYEEILLQPDYPGVPIDEILTARLKDPEYLDPRNNLCLFAWPSEEVSGLILRIQLELRSLAPHIWLPPPEWLHMTVIELVHSKSPPELATNAKKAEPHASKFTTFAAQHTAGLERPMLSLDDTAVALTFLPVEDSSYTYLHMRRDLANICAENGIEVASKYYNTSSHITFARFANTSDLQGHEHLSVWVEKIKSLNQWLFDEFWPKKEQGHSRSGLKWLVGAGRGVEVRKGRLWYGDGKPISEP

SEQ ID NO: 3293 - DNA, 984 bp, Muscodor strobelii
  misc_feature: SGI EST ID NO. CUFF.8220.0
  misc_feature: Variant of the nucleotide sequence at SEQ ID NO 3291
tttcgggtcttattttacgtattcaacttgaactgcgctctttggctccccatatatggttaccaccgcccgaatggcttcatatgacggttatcgagttggtccactctaagtcaccccctgaattggctaccaatgcgaagaaagcagagccacacgcatccaaattcacgactttcgcggctcagcacacagctggcctcgagcgcccaatgctgagtctagatgatactgccgtagcgttgacatttctgcctgttgaggacagttcctatacgtatctacatatgcggcgagatctagcaaatatttgtgccgaaaatggtattgaggtcgcgtccaagtactataatacctcgagtcacatcacattcgcgcggttcgcaaacacttctgacttgcagggtcatgaacatctgagcgtatgggttgaaaaaatcaagtcattgaaccaatggctattcgatgaattctggccaaagaaggaacaaggccattcgaggtctggtcttaaatggcttgtaggcgcaggacgtggtgtagaagtgaggaaaggcagattgtggtacggcgacggaaagccgatcagtgaaccctgagagaggctgtgtgtgtgtgtgagatcgattaatagatttggcagctgatataaccgtaacacgtcaagaggggttttgactcaacgaactgccacaaacattccaagatgccatcaaagtcactcgcgaattcggcattcaatacatttggatagacgcaatatgtattgtccaaagcgaggatggtaacgactggaatcaagagaaacagaatatgcaggacatattctcctcggcatactgcacaatagccgccacgtcaggcgagaactccaattccggcttgcgcatcccgacacgacaatatgacagcatttatgtgagagactcagcacaacagtggagccttgtggtcgattttgacaatgatgtcgacgaagccaat

SEQ ID NO: 3294 - DNA, 3813 bp, Muscodor strobelii
  misc_feature: SGI cDNA ID NO. 560752
  misc_feature: Encodes the peptide sequence at SEQ ID NO 3295
atgacacggatatcttacctgctcggcgctggcgtcgccgtgctggccgcccgcgcatccgccgacgacctgttcacgcccaaacacgaagccggccgttgcgccctgcgcggacactgtggaaagaagggctggttcggcaaggccctaccatgtgtcgacaacgggctcgccgagacccccgacgatgactttgccaaggagatcgaggagctgtgtggtcccaagtggaaggacagcaaggtgtgctgtgatgccgaacagctgagcgcattgaaggacaacttcggcaccccgagccagatcatcggcggctgtccagcatgcaaggacaacttcttcaacctcttctgcaccttcacctgttcgcccgaccagtccctcttcgtcaacgtcacgagaacccaacagctcaccggaggcattgcggtggccgagctcgaccagctcataaccgatgaatatgccgatggattctacgacagctgcaaggaggtcaagtttggccctaccaactccaaggccatgaacttcatcggtggcggtgctaccaactcttccggcttcctcaagtttctaggaaaagagcaggctgtcgggtcgccattccagatcaacttccccaggaactattccgagccagacatgggtgctctggagatgaagcccaagaaatgcaacgatgaggatcccaacttccgctgcgcctgtgtcgactgtcccgccgtttgccctgccctcccagaagtggagcaggccggttcatgccgtgtcggggttctgccttgcttgaccttcgcctctatcttcacctatggtgtcttgttctttaccctgattgtcgccatcgtcggtcacgtcgcttggagaagacatgcgcgccgacgaagcgagcggctccacctcttgcaaggcgccgagccaagtgatgatgaagacgagggagatctcgtccgtaatggcgccatgtacgatcgtccccagaagcattacaagctcaacacgtggtgtgacaccgctttcagcaagcttggtcacttttgtgctaggtttcccggcattacaattggtttgagtttggtgctggtcatcgtcctaagtgtcggatggatcaagtttgacgtcgaaagagagcccgccagactatgggtcagtccggactcggccgccgcgcaagagaaggctttcttcgacgagagctttggtgctttctaccgagcagaaaaagtcttcttggtcaatgacacgtcgtccacaggtactggtcccgttatgagctacgatactcttacttggtgggctggcgtcgagaaggagattcgagagctgaaggggcaaaacttcggaacaaactttaaggacgtttgtttcaagcccactggttcggcttgtgtagtcgagtcccctctcatctttttcgatggcaccgaggactggaagccggcgttccgcgactgtgccagtacgcctgttgagtgccgtcccgacttcgaacaacccattgaacccggactcatcctgggtggatcagaaggtctcgatgatatcactgatgtccctgccatgaccgttacttgggtcgtcaacaatttcccagagggtagcaccgatctcgctcacgcccaggactgggagagggctttgaaggacaggctgctggctgcccaagccgaagcggcaagccgcggtctgcgactctccttctcgacggagatcagcttggaagaggagctgaacaaatctacaaatactgacgctacaattgtcgccattagctatctggtcatgttcatatacgcctccatcgctctaggatctagtggcatgaccctccgcgagttgatgagaaaccctgccgtcgggttcgtccaaagcaagttcaccctcggactcgtcggtattctaatcgttctgatgtccatcacgtcgtctattggacttttctcgtgggctggcgtcaaggccactctgatcattgccgaagtcatccctttcatcgtcctagccgttggagtggacaatattttcctcattgtccacgaatttgaccgtgtcaatcaaagccacgcggatgctatggttgaagagagaatcgcaaaagcgatgggccgcatgggtccttccattcttttctcagctatcaccgaaacagtctcttttgctcttggtgcattcgtcggaatgccagcggtccgaaactttgcagtgtatgcagcgggtgccgtcttcatcaatgcactgctgcagatgaccttatttatctccgtcttatcacttaaccagatgcgcattgaggaccacagagcagattgcttcccttgtatacaagtcaaggccgcgcgggtacacatgagcagcaatgggaacactggccctcgtccctatgatgtgccagaggagagcctactccagcaatttattcgcaagtactacgcgccaacaattttgggaaagaaggtcaaggtcgtcattgttaccatattcctcggccttcttgctgctggtgttgcactcattccttatgtgaaacttggccttgatcagcgtgtggcgcttcccgatgattcttacctcattgaatatttcaacgacatgtacaactacttggatgctggcccgcctctttactttgtcaccaagggcctgaatgccacagaccgctctcagcagcaacagatctgctcgcgcttctccacgtgcgaagagatgtcactggctacagttcttgaacaagaacgcaagcgcccggacgtatcttacatcgcttccccaagtgcaagttggattgacgacttcttcttgtggctcaggccagagaatgaggattgttgcaaggaaaatggcaaggtgtgttttgccgatcgcaacccgccgtggaatatcacattgggcggcatgccggagggtgccgaatttgtacactacctcgagaaattcttgacgtctcccactactgacgcgtgtccccttggcggacaagcctcctatagctcagccgtggtcgtcgattccaagaacatcgacgttcccgcaagtcacttccgaacggcacatactccactacgaagtcaagatgactttattaacgcctacgccgcggcgcgccgcgtctccaaagaagtcagcgacagcactggcgccgaagtcttcccctacagtgtattctacattttcttcgatcaatacgccgatattgtccagctgactggcacgttacttggctcagctgttgccatcatcttcgccgtttctaccatcctcctaggctctatcgtaacagccctaatagtcacaatcactgttgtgatgacagtggttgacatcatcggcgccatggccgtcttcgacgtctctcttaatgccgtatcgctagtgaatcttatcatctgcgtcggtattgcagttgaattctgcgcccacattgcccgcgcgttcatgttcccctccggatctgtcatggaacgtgctaagaaccgattccgcggtcgcgatgcacgagcctggacagctcttgtcaacgtgggcggaagtgtcttcagtggtatcaccgtcacaaaactattaggtgtttgcgtccttgcgttcacgcgatcaaagatctttgagatttactactttagagtgtggctagcgcttgtggtgttcgccgctacgcatgccttgatcttcttgcctgttgccctgtcactcgtgggcggccagggatacgtggacccggaaagtgaaggcggtctagcagacgatttaatccagagacggtatcgcgcgatggctggagatgccagcgattccgaggacgaggacgaggattag

SEQ ID NO: 3295 - protein, 1270 aa, Muscodor strobelii
  misc_feature: SGI Peptide ID NO. 560752
  misc_feature (365)..(1233): Pfam Id: PF02460 Pfam Desc: Patched family
  misc_feature (623)..(864): Pfam Id: PF02460 Pfam Desc: Patched family
  misc_feature (269)..(1267): NCBI GI: 154274666 Blast Desc: HCAG_05789 [Ajellomyces capsulatus NAm1] gi|150414624|gb|EDN09986.1| HCAG_05789 [Ajellomyces capsulatus NAm1]
  misc_feature (26)..(1252): NCBI GI: 254565407 Blast Desc: Vacuolar membrane protein that transits through the biosynthetic vacuolar protein sorting pathway [Pichia pastoris GS115] gi|238029610|emb|CAY67533.1| Vacuolar membrane protein the
  misc_feature (32)..(1236): NCBI GI: 134111997 Blast Desc: CNBE2480 [Cryptococcus neoformans var. neoformans B-3501A] gi|50258193|gb|EAL20887.1| CNBE2480 [Cryptococcus neoformans var. neoformans B-3501A]
  misc_feature (32)..(1236): NCBI GI: 58267588 Blast Desc: vacuolar membrane protein [Cryptococcus neoformans var. neoformans JEC21] gi|57227184|gb|AAW43643.1| vacuolar membrane protein, [Cryptococcus neoformans var. neoformans JEC21]
  misc_feature (24)..(1268): NCBI GI: 50549181 Blast Desc: YALI0C20757p [Yarrowia lipolytica] gi|49647928|emb|CAG82381.1| YALI0C20757p [Yarrowia lipolytica]
  misc_feature (33)..(1254): NCBI GI: 170086992 Blast Desc: [Laccaria bicolor S238N-H82] gi|164649919|gb|EDR14160.1| [Laccaria bicolor S238N-H82]
  misc_feature (29)..(1237): NCBI GI: 199431448 Blast Desc: DEHA2D04620p [Debaryomyces hansenii]
  misc_feature (29)..(1237): NCBI GI: 50420269 Blast Desc: DEHA0D05335g [Debaryomyces hansenii CBS767]
  misc_feature (29)..(1241): NCBI GI: 190348438 Blast Desc: PGUG_04987 [Pichia guilliermondii ATCC 6260]
  misc_feature (29)..(1241): NCBI GI: 146414123 Blast Desc: PGUG_04987 [Pichia guilliermondii ATCC 6260]
MTRISYLLGAGVAVLAARASADDLFTPKHEAGRCALRGHCGKKGWFGKALPCVDNGLAETPDDDFAKEIEELCGPKWKDSKVCCDAEQLSALKDNFGTPSQIIGGCPACKDNFFNLFCTFTCSPDQSLFVNVTRTQQLTGGIAVAELDQLITDEYADGFYDSCKEVKFGPTNSKAMNFIGGGATNSSGFLKFLGKEQAVGSPFQINFPRNYSEPDMGALEMKPKKCNDEDPNFRCACVDCPAVCPALPEVEQAGSCRVGVLPCLTFASIFTYGVLFFTLIVAIVGHVAWRRHARRRSERLHLLQGAEPSDDEDEGDLVRNGAMYDRPQKHYKLNTWCDTAFSKLGHFCARFPGITIGLSLVLVIVLSVGWIKFDVEREPARLWVSPDSAAAQEKAFFDESFGAFYRAEKVFLVNDTSSTGTGPVMSYDTLTWWAGVEKEIRELKGQNFGTNFKDVCFKPTGSACVVESPLIFFDGTEDWKPAFRDCASTPVECRPDFEQPIEPGLILGGSEGLDDITDVPAMTVTWVVNNFPEGSTDLAHAQDWERALKDRLLAAQAEAASRGLRLSFSTEISLEEELNKSTNTDATIVAISYLVMFIYASIALGSSGMTLRELMRNPAVGFVQSKFTLGLVGILIVLMSITSSIGLFSWAGVKATLIIAEVIPFIVLAVGVDNIFLIVHEFDRVNQSHADAMVEERIAKAMGRMGPSILFSAITETVSFALGAFVGMPAVRNFAVYAAGAVFINALLQMTLFISVLSLNQMRIEDHRADCFPCIQVKAARVHMSSNGNTGPRPYDVPEESLLQQFIRKYYAPTILGKKVKVVIVTIFLGLLAAGVALIPYVKLGLDQRVALPDDSYLIEYFNDMYNYLDAGPPLYFVTKGLNATDRSQQQQICSRFSTCEEMSLATVLEQERKRPDVSYIASPSASWIDDFFLWLRPENEDCCKENGKVCFADRNPPWNITLGGMPEGAEFVHYLEKFLTSPTTDACPLGGQASYSSAVVVDSKNIDVPASHFRTAHTPLRSQDDFINAYAAARRVSKEVSDSTGAEVFPYSVFYIFFDQYADIVQLTGTLLGSAVAIIFAVSTILLGSIVTALIVTITVVMTVVDIIGAMAVFDVSLNAVSLVNLIICVGIAVEFCAHIARAFMFPSGSVMERAKNRFRGRDARAWTALVNVGGSVFSGITVTKLLGVCVLAFTRSKIFEIYYFRVWLALVVFAATHALIFLPVALSLVGGQGYVDPESEGGLADDLIQRRYRAMAGDASDSEDEDED

SEQ ID NO: 3296 - DNA, 4356 bp, Muscodor strobelii
  misc_feature: SGI EST ID NO. CUFF.8226.0
  misc_feature: Variant of the nucleotide sequence at SEQ ID NO 3294
ttgccaacgccccaagctccaacgtctttcccattagtctcaacatcacattcttttctggccatcgctgcattcccatgttgtcgctgctgtctgagtagcgcaggggtgtaaatatgacacggatatcttacctgctcggcgctggcgtcgccgtgctggccgcccgcgcatccgccgacgacctgttcacgcccaaacacgaagccggccgttgcgccctgcgcggacactgtggaaagaagggctggttcggcaaggccctaccatgtgtcgacaacgggctcgccgagacccccgacgatgactttgccaaggagatcgaggagctgtgtggtcccaagtggaaggacagcaaggtgtgctgtgatgccgaacagctgagcgcattgaaggacaacttcggcaccccgagccagatcatcggcggctgtccagcatgcaaggacaacttcttcaacctcttctgcaccttcacctgttcgcccgaccagtccctcttcgtcaacgtcacgagaacccaacagctcaccggaggcattgcggtggccgagctcgaccagctcataaccgatgaatatgccgatggattctacgacagctgcaaggaggtcaagtttggccctaccaactccaaggccatgaacttcatcggtggcggtgctaccaactcttccggcttcctcaagtttctaggaaaagagcaggctgtcgggtcgccattccagatcaacttccccaggaactattccgagccagacatgggtgctctggagatgaagcccaagaaatgcaacgatgaggatcccaacttccgctgcgcctgtgtcgactgtcccgccgtttgccctgccctcccagaagtggagcaggccggttcatgccgtgtcggggttctgccttgcttgaccttcgcctctatcttcacctatggtgtcttgttctttaccctgattgtcgccatcgtcggtcacgtcgcttggagaagacatgcgcgccgacgaagcgagcggctccacctcttgcaaggcgccgagccaagtgatgatgaagacgagggagatctcgtccgtaatggcgccatgtacgatcgtccccagaagcattacaagctcaacacgtggtgtgacaccgctttcagcaagcttggtcacttttgtgctaggtttcccggcattacaattggtttgagtttggtgctggtcatcgtcctaagtgtcggatggatcaagtttgacgtcgaaagagagcccgccagactatgggtcagtccggactcggccgccgcgcaagagaaggctttcttcgacgagagctttggtgctttctaccgagcagaaaaagtcttcttggtcaatgacacgtcgtccacaggtactggtcccgttatgagctacgatactcttacttggtgggctggcgtcgagaaggagattcgagagctgaaggggcaaaacttcggaacaaactttaaggacgtttgtttcaagcccactggttcggcttgtgtagtcgagtcccctctcatctttttcgatggcaccgaggactggaagccggcgttccgcgactgtgccagtacgcctgttgagtgccgtcccgacttcgaacaacccattgaacccggactcatcctgggtggatcagaaggtctcgatgatatcactgatgtccctgccatgaccgttacttgggtcgtcaacaatttcccagagggtagcaccgatctcgctcacgcccaggactgggagagggctttgaaggacaggctgctggctgcccaagccgaagcggcaagccgcggtctgcgactctccttctcgacggagatcagcttggaagaggagctgaacaaatctacaaatactgacgctacaattgtcgccattagctatctggtcatgttcatatacgcctccatcgctctaggatctagtggcatgaccctccgcgagttgatgagaaaccctgccgtcgggttcgtccaaagcaagttcaccctcggactcgtcggtattctaatcgttctgatgtccatcacgtcgtctattggacttttctcgtgggctggcgtcaaggccactctgatcattgccgaagtcatccctttcatcgtcctagccgttggagtggacaatattttcctcattgtccacgaatttgaccgtgtcaatcaaagccacgcggatgctatggttgaagagagaatcgcaaaagcgatgggccgcatgggtccttccattcttttctcagctatcaccgaaacagtctcttttgctcttggtgcattcgtcggaatgccagcggtccgaaactttgcagtgtatgcagcgggtgccgtcttcatcaatgcactgctgcagatgaccttatttatctccgtcttatcacttaaccagatgcgcattgaggaccacagagcagattgcttcccttgtatacaagtcaaggccgcgcgggtacacatgagcagcaatgggaacactggccctcgtccctatgatgtgccagaggagagcctactccagcaatttattcgcaagtactacgcgccaacaattttgggaaagaaggtcaaggtcgtcattgttaccatattcctcggccttcttgctgctggtgttgcactcattccttatgtgaaacttggccttgatcagcgtgtggcgcttcccgatgattcttacctcattgaatatttcaacgacatgtacaactacttggatgctggcccgcctctttactttgtcaccaagggcctgaatgccacagaccgctctcagcagcaacagatctgctcgcgcttctccacgtgcgaagagatgtcactggctacagttcttgaacaagaacgcaagcgcccggacgtatcttacatcgcttccccaagtgcaagttggattgacgacttcttcttgtggctcaggccagagaatgaggattgttgcaaggaaaatggcaaggtgtgttttgccgatcgcaacccgccgtggaatatcacattgggcggcatgccggagggtgccgaatttgtacactacctcgagaaattcttgacgtctcccactactgacgcgtgtccccttggcggacaagcctcctatagctcagccgtggtcgtcgattccaagaacatcgacgttcccgcaagtcacttccgaacggcacatactccactacgaagtcaagatgactttattaacgcctacgccgcggcgcgccgcgtctccaaagaagtcagcgacagcactggcgccgaagtcttcccctacagtgtattctacattttcttcgatcaatacgccgatattgtccagctgactggcacgttacttggctcagctgttgccatcatcttcgccgtttctaccatcctcctaggctctatcgtaacagccctaatagtcacaatcactgttgtgatgacagtggttgacatcatcggcgccatggccgtcttcgacgtctctcttaatgccgtatcgctagtgaatcttatcatctgcgtcggtattgcagttgaattctgcgcccacattgcccgcgcgttcatgttcccctccggatctgtcatggaacgtgctaagaaccgattccgcggtcgcgatgcacgagcctggacagctcttgtcaacgtgggcggaagtgtcttcagtggtatcaccgtcacaaaactattaggtgtttgcgtccttgcgttcacgcgatcaaagatctttgagatttactactttagagtgtggctagcgcttgtggtgttcgccgctacgcatgccttgatcttcttgcctgttgccctgtcactcgtgggcggccagggatacgtggacccggaaagtgaaggcggtctagcagacgatttaatccagagacggtatcgcgcgatggctggagatgccagcgattccgaggacgaggacgaggattagatttcccgtttgacgagatttgcccgtgagaggcgagtcgcagagtccgccgatgaccctgaggcagacgacgtttccattcctagacaagaaggcttgtaggacaggtctgatgtggagtagtagtattgctcattagcgcttgtgtattctccgatttgaagggtgtttgttactgggagacagaatggagataaggagtaggaagaatagtatcgatatacgatagcgtgtttggtgttttttcggggttcaacactgggtcacatcggaatttggaacgcatcagggattagatggtggcttacaagcgatgcatataagtaggcgcataggtctatgcatacataaatgtaaaaataaatggcattaaatgagcattgagaccttgcgtttagtacgtgcttttatcatgtgtgtcctgccg

SEQ ID NO: 3297 - DNA, 2058 bp, Muscodor strobelii
  misc_feature: SGI cDNA ID NO. 560753
  misc_feature: Encodes the peptide sequence at SEQ ID NO 3298
atgacgacaatccactcacaatggcacccaggcgagctcgccatgcaccggactctacacgtaccgacaagagacaaccctacggtgaatgggctcaaagaagcccacgggtaccgagtttcagtctccccgctcgtcgcattcggcacgctcgataaagatggtagaccatgggcgactatctggggaggcgaagcagggttcaccagaccggtagccgaaaatgtgctcggtgtgaatgcgaacccgggcgcatgggatcccgtcctagaagcattcttcggagatgagaagaaagagagtcctcaggatgggcaagatgacattgtcagacctcaaggaggaaagacgatggctgcgctgtcgctggatctggagacgagggatagggtgaaactcgcgggcaaaatgatcgcaggcgctgcgggacaaacggaggacgaggggaagaatgtgcagttggcgtttttagttgagggcgcgttgggaaattgtccgaagtatttgaataagaaggctatcagacctgttgtaccgaagcctatgcttgttagggctggggagggcggtgatgtggaggttcgagatgaggatggtgagatgggaaagggaaacggcaagggattgccattgccgcagggtgcggtgaaattgatcgagaaggcggatttattcttcattgcttcgaagcatggggatgggagtatggacgttaatactcgtggaggcgcgccaggcttcttgagggtattccggaatcagaaaccatctgcctccccaaaatatgacgaggaagcagcggtgtcgttggtctatcctgagtactctggtaatagactttaccagacgcttggaaacttacaggaggatcccgtggccggactcgtggtcccggatttcgagaccggggatgtgctgtaccccactggcaagacgacgattctcgtcgctgagaaagcagccgcttatattccgcgtgcgaaactcgcgattcgcattgacgtcgttgaggcgaggtttgtgcgccagggtttatcgtttaggggggatttcgtcgattactcgccttataatccacctgttaggaagctagtctcggagcagaaacctggagaggcagaggatgatgggaatgcgaatgctgttgctattgctactctgctcaaccgcgaggtgctgacggatagtatatcacggtatactttcaaagtttcaccaccgcctgatgcgagggaagctatttcgaggactgggaagggagagaagaagaaaatacccgcttggtaccctggacagcatgttacgtttgatttctcgaatgagttggatttggggtattcgcatatgcgggatgataatccgcagagtctgaatgatgactttgttaggacttttacggtttcttcgccgttggatcctaattcgatcgagacggtcatcacgccaccttgtactagcgagggacagagtaaagaggagagacttgttcgtcacgatgttgaacccgagctggagatcgtcgttagacgtcatggacctgctacggggctgcttgcgaactggaatctgcgcgtcccgctcgagattccgatcatgggctttggaggcgttgaggagttccgaatgccaactgtcagagtaggagatggaaaggagagtgtgttcgtcgctggtggcgtgggaatcacgccgttgcttgctcaggctaagggtgtgcttggtgttgagggcaagagacagttgaaagttctttggagtctgagggccgaggatctgaagcttgccagaaatgtttttgagaagattgaggggcttggtagtgttacgaagctatttgttacgggcacgaggaatggcgataagatgagagaattaactgaggcactgaagacgatgggtgctgaggttgttgagaggaggatggagaagagtgatattagtgaagctggagtgaaggggcagaggaagttttattgctgtactgggccagcgatgatgaagacgttgcttcagtggatggagggcgaagaggttgtgtttgagagttttgaatattga

SEQ ID NO: 3298 - protein, 685 aa, Muscodor strobelii
  misc_feature: SGI Peptide ID NO. 560753
  misc_feature (1)..(685): NCBI GI: 256727681 Blast Desc: NECHADRAFT_32450 [Nectria haematococca mpVI 77-13-4]
  misc_feature (1)..(685): NCBI GI: 46135923 Blast Desc: FG09477.1 [Gibberella zeae PH-1]
  misc_feature (1)..(685): NCBI GI: 39940556 Blast Desc: MGG_04962 [Magnaporthe grisea 70-15] gi|145010803|gb|EDJ95459.1| MGG_04962 [Magnaporthe grisea 70-15]
  misc_feature (1)..(685): NCBI GI: 171682466 Blast Desc: protein product [Podospora anserina] gi|170941192|emb|CAP66842.1| protein product [Podospora anserina]
  misc_feature (8)..(685): NCBI GI: 255932375 Blast Desc: Pc12g09170 [Penicillium chrysogenum Wisconsin 54-1255] gi|211582363|emb|CAP80544.1| Pc12g09170 [Penicillium chrysogenum Wisconsin 54-1255]
  misc_feature (8)..(685): NCBI GI: 212529542 Blast Desc: oxidoreductase, FAD-binding, [Penicillium marneffei ATCC 18224] gi|210074326|gb|EEA28413.1| oxidoreductase, FAD-binding, [Penicillium marneffei ATCC 18224]
  misc_feature (8)..(685): NCBI GI: 242762883 Blast Desc: oxidoreductase, FAD-binding, [Talaromyces stipitatus ATCC 10500] gi|218723664|gb|EED23081.1| oxidoreductase, FAD-binding, [Talaromyces stipitatus ATCC 10500]
  misc_feature (8)..(685): NCBI GI: 239615665 Blast Desc: oxidoreductase [Ajellomyces dermatitidis ER-3]
  misc_feature (8)..(685): NCBI GI: 261199782 Blast Desc: oxidoreductase [Ajellomyces dermatitidis SLH14081] gi|239594500|gb|EEQ77081.1| oxidoreductase [Ajellomyces dermatitidis SLH14081]
  misc_feature (8)..(685): NCBI GI: 226288146 Blast Desc: conserved [Paracoccidioides brasiliensis Pb18]
MTTIHSQWHPGELAMHRTLHVPTRDNPTVNGLKEAHGYRVSVSPLVAFGTLDKDGRPWATIWGGEAGFTRPVAENVLGVNANPGAWDPVLEAFFGDEKKESPQDGQDDIVRPQGGKTMAALSLDLETRDRVKLAGKMIAGAAGQTEDEGKNVQLAFLVEGALGNCPKYLNKKAIRPVVPKPMLVRAGEGGDVEVRDEDGEMGKGNGKGLPLPQGAVKLIEKADLFFIASKHGDGSMDVNTRGGAPGFLRVFRNQKPSASPKYDEEAAVSLVYPEYSGNRLYQTLGNLQEDPVAGLVVPDFETGDVLYPTGKTTILVAEKAAAYIPRAKLAIRIDVVEARFVRQGLSFRGDFVDYSPYNPPVRKLVSEQKPGEAEDDGNANAVAIATLLNREVLTDSISRYTFKVSPPPDAREAISRTGKGEKKKIPAWYPGQHVTFDFSNELDLGYSHMRDDNPQSLNDDFVRTFTVSSPLDPNSIETVITPPCTSEGQSKEERLVRHDVEPELEIVVRRHGPATGLLANWNLRVPLEIPIMGFGGVEEFRMPTVRVGDGKESVFVAGGVGITPLLAQAKGVLGVEGKRQLKVLWSLRAEDLKLARNVFEKIEGLGSVTKLFVTGTRNGDKMRELTEALKTMGAEVVERRMEKSDISEAGVKGQRKFYCCTGPAMMKTLLQWMEGEEVVFESFEY

SEQ ID NO: 3299 - DNA, 1671 bp, Muscodor strobelii
  misc_feature: SGI EST ID NO. CUFF.8234.0
  misc_feature: Variant of the nucleotide sequence at SEQ ID NO 3297
gattactcgccttataatccacctgttaggaagctagtctcggagcagaaacctggagaggcagaggatgatgggaatgcgaatgctgttgctattgctactctgctcaaccgcgaggtgctgacggatagtatatcacggtatactttcaaagtttcaccaccgcctgatgcgagggaagctatttcgaggactgggaagggagagaagaagaaaatacccgcttggtaccctggacagcatgttacgtttgatttctcgaatgagttggatttggggtattcgcatatgcgggatgataatccgcagagtctgaatgatgactttgttaggacttttacggtttcttcgccgttggatcctaattcgatcgagacggtcatcacgccaccttgtactagcgagggacagagtaaagaggagagacttgttcgtcacgatgttgaacccgagctggagatcgtcgttagacgtcatggacctgctacggggctgcttgcgaactggaatctgcgcgtcccgctcgagattccgatcatgggctttggaggcgttgaggagttccgaatgccaactgtcagagtaggagatggaaaggagagtgtgttcgtcgctggtggcgtgggaatcacgccgttgcttgctcaggctaagggtgtgcttggtgttgagggcaagagacagttgaaagttctttggagtctgagggccgaggatctgaagcttgccagaaatgtttttgagaagattgaggggcttggtagtgttacgaagctatttgttacgggcacgaggaatggcgataagatgagagaattaactgaggcactgaagacgatgggtgctgaggttgttgagaggaggatggagaagagtgatattagtgaagctggagtgaaggggcagaggaagttttattgctgtactgggccagcgatgatgaagacgttgcttcagtggatggagggcgaagaggttgtgtttgagagttttgaatattgaagcggatgtcaattttattcgaggaataggggtatatgggtgaaaagtagctgagcggatggttccaagcatttacacggcgttttgcttcgagttataagtacactgttatttagaaaacgatgatctcgatgcgatcagattaaatctcgagatgaaattctgtgatattcatacctgcagttgatatgccgaagtgatgcgaaacattgtctaccttgccgtcgcgaccaccattttatcgcgtcagcaatgccaccacccataacctaatttaatcataagcctcgcatgcatcagtgcatggacatgattacgtctcacacaggattctgatcaaagtgcataatccttatcaaagtgtatgatatcctaggtgacgagattgtggcatggcaacaccacccctccccctccacacccctcaacacacgcgtcaccaaacctcgaacctcagctcatttggcttcgcttcaatcattgattactcgctcgatatcgctggcaaaaatgtaaaagcttcattactcatcatcgaagcattatctgacccaaatgaaaaatgaagaaaaataaaaaacgaaaccaaggccgcgggatgccgtcgccagtcgtcaccggcccggctaccttcgctgagaagcgcggcttctctaaggtagaggcgtg

SEQ ID NO: 3300 - DNA, 1911 bp, Muscodor strobelii
  misc_feature: SGI cDNA ID NO. 560754
  misc_feature: Encodes the peptide sequence at SEQ ID NO 3301
atgatgctctttgggaccacccgaaagagggctgagatcacggctgatcagcaatggggggccattagtcttcgcgatttcagatcgaaatcttgttttacgtacctggcctatggttatcttcatttttctctcctcctctcccttgtcgtctatggagtcgatatcttcacagctgtcagccttctcgcgttcgatcagtgggcttcgtctattgcaccgtcccagcttatttcttttgacgcaacgaagtggatatttgctggctccattattgcatcttttgttaatctcatcttcgaacacctccgagcctggcgagtcatgaaccgaaagagtgtagccgaatgctatctcgacactctagcaatccgactagagagtatcaaatggactagtcaaggctttagacgctttcaggtatttggtgcattgacaaaatcgaagaagggcgccgaatatgtcgccctctttacgtactactctttccaatcttggatccgaataattgtctgctttggtccgcgccaagctgtaaacgcgttaactttatacgcggtttacacgtcaaaattgaaccccactgataactcctctattggaagcacgctgagcgatttcttcgaaaagcttggggcgctctattcccaggaaacccagcaagcagttgtattgtccggcatgctgttcactcttatcatttgggcgttttcgttcctattcctgctgactggagtcctgttttatattttcttcttatggcactatatcccgcgtcaggatggcggcctacacggctactgcgaacggaaaatcaacaagagactgaaggcaattgttaccaagaaggtcaacaaggccctggcaaaagaagaacaagatcgcatcaaggctgccaagaaggctggcgacatgtctactgaacgccaagctaccctgccgtcattcttggatatggagaaaggcgatgacaagctccctggtatgcccatgttgagtcgcaatgagacaacggcaacacttccgttgtacacgtcacgaccaggaaccccgggcagtatcgagcttggcatgatggatcaaaagcgtcctcttccctcgagatctgccacgacggctacgacaatgtcgacggcaccaagctactcttctcgagctcctcttgtcgcaggagcagccgatatgggttatgacagtcaagagccgacattgccaaacctggaccctgcgagaaattatcagatacctactcgtccgggaacctcggcctccaacggtccacgaaacgggcctcgaccaccgatgaatcgcatccagacggacgtgtcgaacggcgcaaatggatcgctacgctctcctgatagccttccacctatgcctcaggcaattctttctccagcttctcagaccagttttggtggcccgacacgtcccacatacagcgaaggacgcgctagccccgcgccatcgtcgtactcgaatcgtggaccgcctttggggccagccattcgctccccatatgacggtggtcgtgctagtcccgccccctcagcgtattcgaaccgtggacctcccatgcggccgccattttctgaaggccgtgctagccccgcaccttcatcgcctatgaaccgtggtcccccaatgcgagccccttacgctgatgggcgttccagcccggcgccttcatattcaagtcgtggaccaaataattatcaaccatataatacaccagcccgtagcgctacaaaccctcccatgccgccacagcagcagcgatttgcgccgcagcggaacatgacggcaccagccccaatgccacaaatgcctcgagaacaaggcgactacttctctggcaacaataaccaacgaggttataatgggtacggccaagataactcgcgatattag

SEQ ID NO: 3301 - protein, 636 aa, Muscodor strobelii
  misc_feature: SGI Peptide ID NO. 560754
  misc_feature (8)..(632): NCBI GI: 261359477 Blast Desc: conserved [Verticillium albo-atrum VaMs.102]
  misc_feature (1)..(541): NCBI GI: 154311538 Blast Desc: BC1G_06228 [Botryotinia fuckeliana B05.10] gi|150850739|gb|EDN25932.1| BC1G_06228 [Botryotinia fuckeliana B05.10]
  misc_feature (2)..(581): NCBI GI: 156060017 Blast Desc: SS1G_02145 [Sclerotinia sclerotiorum 1980] gi|154699555|gb|EDN99293.1| SS1G_02145 [Sclerotinia sclerotiorum 1980]
  misc_feature (1)..(603): NCBI GI: 171682480 Blast Desc: protein product [Podospora anserina] gi|170941199|emb|CAP66849.1| protein product [Podospora anserina]
  misc_feature (8)..(603): NCBI GI: 116202677 Blast Desc: CHGG_09223 [Chaetomium globosum CBS 148.51] gi|88177741|gb|EAQ85209.1| CHGG_09223 [Chaetomium globosum CBS 148.51]
  misc_feature (1)..(576): NCBI GI: 46135925 Blast Desc: FG09478.1 [Gibberella zeae PH-1]
  misc_feature (1)..(386): NCBI GI: 256727682 Blast Desc: NECHADRAFT_33735 [Nectria haematococca mpVI 77-13-4]
  misc_feature (49)..(612): NCBI GI: 145602382 Blast Desc: MGG_04961 [Magnaporthe grisea 70-15] gi|145010804|gb|EDJ95460.1| MGG_04961 [Magnaporthe grisea 70-15]
  misc_feature (2)..(596): NCBI GI: 145243630 Blast Desc: An11g03330 [Aspergillus niger] gi|134079015|emb|CAK48324.1| protein product [Aspergillus niger]
  misc_feature (11)..(589): NCBI GI: 225557469 Blast Desc: pheromone-regulated membrane protein [Ajellomyces capsulatus G186AR]
MMLFGTTRKRAEITADQQWGAISLRDFRSKSCFTYLAYGYLHFSLLLSLVVYGVDIFTAVSLLAFDQWASSIAPSQLISFDATKWIFAGSIIASFVNLIFEHLRAWRVMNRKSVAECYLDTLAIRLESIKWTSQGFRRFQVFGALTKSKKGAEYVALFTYYSFQSWIRIIVCFGPRQAVNALTLYAVYTSKLNPTDNSSIGSTLSDFFEKLGALYSQETQQAVVLSGMLFTLIIWAFSFLFLLTGVLFYIFFLWHYIPRQDGGLHGYCERKINKRLKAIVTKKVNKALAKEEQDRIKAAKKAGDMSTERQATLPSFLDMEKGDDKLPGMPMLSRNETTATLPLYTSRPGTPGSIELGMMDQKRPLPSRSATTATTMSTAPSYSSRAPLVAGAADMGYDSQEPTLPNLDPARNYQIPTRPGTSASNGPRNGPRPPMNRIQTDVSNGANGSLRSPDSLPPMPQAILSPASQTSFGGPTRPTYSEGRASPAPSSYSNRGPPLGPAIRSPYDGGRASPAPSAYSNRGPPMRPPFSEGRASPAPSSPMNRGPPMRAPYADGRSSPAPSYSSRGPNNYQPYNTPARSATNPPMPPQQQRFAPQRNMTAPAPMPQMPREQGDYFSGNNNQRGYNGYGQDNSRY

SEQ ID NO: 3302 - DNA, 3159 bp, Muscodor strobelii
  misc_feature: SGI EST ID NO. CUFF.8269.0
  misc_feature: Variant of the nucleotide sequence at SEQ ID NO 3300
cgagcctctctctccctcgctctttcaaaacacctcaaccgaatcacaatccgctgtgttatgcactgactgctttcgtcaaccaacgtttcgttgttgaccagcttgtcgtccgatccttaccacgcctttgaccattccagcgttgtagccatctctagtcttcggctaagtcgtgggctattcggcgcgcgttgcgactcttgggccgcatcaaatcaaagttggagactacgaacacacattgccaagtcactcattcatcaccttggacattgggcttgacaattgaccctggaggcatttgttcccagttcctggctctgtgtttcctgattagctgtgttgagactcaagtcaacacatatttcacacgtatcccttccccaaaatagcaagtcgatcaaacggtctgatatcgccctctttttgagccttgcgttcctgtcgcgtatcaactcgcacggcttcaccgctcgctgtgctgacaggaacaaacactcgactcggataccgtgctcccatcagcagttacttcacggtagtgtttccaacagtaggcaatgcattatcagtagccggtaagacacttgtcattggatagggcataccttgggggtcccttccgacttgcaagggagtcaatcgcttcttctcttcatacgacgtctattactaggacatctcgtcgccttcgatctttgctcttcaccaactgaagagcacagtcgaacacttcgcgggcgagggacgactgtgcactacggcaggaccgcatatgacgactgccatcgactctcgttgatcgattgatgaagctgcttcccaacgacgatacccacgcatattcacgctcttttgaacatcacgacttttgataccctcttcctcgactgcgtcgaactactccttctctacccacgttgaatacccttttcatgaattggaccattacaatctgacaagatgatgctctttgggaccacccgaaagagggctgagatcacggctgatcagcaatggggggccattagtcttcgcgatttcagatcgaaatcttgttttacgtacctggcctatggttatcttcatttttctctcctcctctcccttgtcgtctatggagtcgatatcttcacagctgtcagccttctcgcgttcgatcagtgggcttcgtctattgcaccgtcccagcttatttcttttgacgcaacgaagtggatatttgctggctccattattgcatcttttgttaatctcatcttcgaacacctccgagcctggcgagtcatgaaccgaaagagtgtagccgaatgctatctcgacactctagcaatccgactagagagtatcaaatggactagtcaaggctttagacgctttcaggtatttggtgcattgacaaaatcgaagaagggcgccgaatatgtcgccctctttacgtactactctttccaatcttggatccgaataattgtctgctttggtccgcgccaagctgtaaacgcgttaactttatacgcggtttacacgtcaaaattgaaccccactgataactcctctattggaagcacgctgagcgatttcttcgaaaagcttggggcgctctattcccaggaaacccagcaagcagttgtattgtccggcatgctgttcactcttatcatttgggcgttttcgttcctattcctgctgactggagtcctgttttatattttcttcttatggcactatatcccgcgtcaggatggcggcctacacggctactgcgaacggaaaatcaacaagagactgaaggcaattgttaccaagaaggtcaacaaggccctggcaaaagaagaacaagatcgcatcaaggctgccaagaaggctggcgacatgtctactgaacgccaagctaccctgccgtcattcttggatatggagaaaggcgatgacaagctccctggtatgcccatgttgagtcgcaatgagacaacggcaacacttccgttgtacacgtcacgaccaggaaccccgggcagtatcgagcttggcatgatggatcaaaagcgtcctcttccctcgagatctgccacgacggctacgacaatgtcgacggcaccaagctactcttctcgagctcctcttgtcgcaggagcagccgatatgggttatgacagtcaagagccgacattgccaaacctggaccctgcgagaaattatcagatacctactcgtccgggaacctcggcctccaacggtccacgaaacgggcctcgaccaccgatgaatcgcatccagacggacgtgtcgaacggcgcaaatggatcgctacgctctcctgatagccttccacctatgcctcaggcaattctttctccagcttctcagaccagttttggtggcccgacacgtcccacatacagcgaaggacgcgctagccccgcgccatcgtcgtactcgaatcgtggaccgcctttggggccagccattcgctccccatatgacggtggtcgtgctagtcccgccccctcagcgtattcgaaccgtggacctcccatgcggccgccattttctgaaggccgtgctagccccgcaccttcatcgcctatgaaccgtggtcccccaatgcgagccccttacgctgatgggcgttccagcccggcgccttcatattcaagtcgtggaccaaataattatcaaccatataatacaccagcccgtagcgctacaaaccctcccatgccgccacagcagcagcgatttgcgccgcagcggaacatgacggcaccagccccaatgccacaaatgcctcgagaacaaggcgactacttctctggcaacaataaccaacgaggttataatgggtacggccaagataactcgcgatattagggatatcgcgaatatcggcattgaaaagcgaagaatcattattactattgctaatttcatctggtgtacgatatgattttgattacactaataccatctcacatggttgtatataaaggaagattggccaaatatgccatagcgttaactcacgaaggataagcgattcagagtcgactcgaaagagcgattagagatgattgaagaccacggtggcgattagaacaccagattccaataaacaatgtttcaactaatgatacttatttgacttgttgagcg

SEQ ID NO: 3303 - DNA, 1302 bp, Muscodor strobelii
  misc_feature: SGI cDNA ID NO. 560755
  misc_feature: Encodes the peptide sequence at SEQ ID NO 3304
atgtctaagttcaaagatgtctatgaagactactaccacaatgccctcaactatgagttcctcaccgagatgtcaccgggcgtatggaagatcacgcggaagagcgatcgaatggagtatctagcgcacgacgtcacagacacactcttcaactccatcgatggcgacgtcaaggaactcacgccgtatggtcaactactgcgaccgaatgggctggggatgcttcgaccagtcaagaagatcctcaatcatgataacttggtgtcaatggtagattgcttcgcgatccaggtctcgaactcaggaaaagtcggccgcgagaaatggtatactgtctgggacttctgcgacgcgggcaacttgggcaatctactcgtcaaacaacagacggatatcccgaaggtcgcgaacgatagggattgtccgagcgatgatgaagatgaggatatcgatatggatgatgctccggaagtcaagtttcttcccgagactttctgctggcatgtcttactctcgatgcttcgagcgctgacgtggctacacgacggcgtggagaacgtcattctaagcgataacgatcgatatgagaggcaaaccgataatctagactggcagccaatcttacaccggaatctcacgcctcagaatatcttcctcggatatccacgtcggaaggagtggtacgggcccgtcaagctcgggaactacggcaaattgcatatctcaggacattgccagacgggcggtgaaacttatcagccactgttctccaaggtcatcgcaccgcatccaaaaggcgacttcgctactctcgatgaactgatttatgaagatgcgcggatgggcagtgtttatcctcttcagcccggacagccctacacaatgacaagcgaataccgcgccctcggcgaaataatccaagccatgatggtcatccccacaaacaacgtccacatcaaaaccatccagtcccgcaatccgcgggataacctcgcatacgcgaagtactccgcgcgactgaaaaacttcgtggtaaagatgatggagattgatccttggcgtgttttccccgctagtcagcaaaatgcccgcccgatgtacgtcacgagtgatctgtacgcggaggcgcagtacgcgttcaaaatgtttatggcgcagggtggagatgaggcgaatgcgtatatcacccatgagatggctgctaatgaggattatgttgagagagaattgctaccggcgaaggagtatgtggattcgttggagactgttgcgagtgtgttgaagaaacttgggaaaacttag

SEQ ID NO: 3304 - protein, 433 aa, Muscodor strobelii
  misc_feature: SGI Peptide ID NO. 560755
  misc_feature (17)..(327): NCBI GI: 261359476 Blast Desc: conserved [Verticillium albo-atrum VaMs.102]
  misc_feature (18)..(311): NCBI GI: 256727102 Blast Desc: NECHADRAFT_24864 [Nectria haematococca mpVI 77-13-4]
  misc_feature (78)..(311): NCBI GI: 145602376 Blast Desc: MGG_12963 [Magnaporthe grisea 70-15] gi|145010795|gb|EDJ95451.1| MGG_12963 [Magnaporthe grisea 70-15]
  misc_feature (18)..(311): NCBI GI: 46135927 Blast Desc: FG09479.1 [Gibberella zeae PH-1]
  misc_feature (81)..(351): NCBI GI: 116202063 Blast Desc: CHGG_08916 [Chaetomium globosum CBS 148.51] gi|88177434|gb|EAQ84902.1| CHGG_08916 [Chaetomium globosum CBS 148.51]
  misc_feature (72)..(242): NCBI GI: 85097381 Blast Desc: NCU04812 [Neurospora crassa OR74A] gi|28921929|gb|EAA31202.1| [Neurospora crassa OR74A]
  misc_feature (30)..(350): NCBI GI: 154312041 Blast Desc: [Botryotinia fuckeliana B05.10] gi|150850704|gb|EDN25897.1| [Botryotinia fuckeliana B05.10]
  misc_feature (77)..(312): NCBI GI: 156060049 Blast Desc: SS1G_02162 [Sclerotinia sclerotiorum 1980] gi|154699571|gb|EDN99309.1| SS1G_02162 [Sclerotinia sclerotiorum 1980]
  misc_feature (161)..(237): NCBI GI: 261197816 Blast Desc: G2-specific protein kinase NimA [Ajellomyces dermatitidis SLH14081] gi|239595273|gb|EEQ77854.1| G2-specific protein kinase NimA [Ajellomyces dermatitidis SLH14081]
  misc_feature (161)..(237): NCBI GI: 239607697 Blast Desc: G2-specific protein kinase NimA [Ajellomyces dermatitidis ER-3]
MSKFKDVYEDYYHNALNYEFLTEMSPGVWKITRKSDRMEYLAHDVTDTLFNSIDGDVKELTPYGQLLRPNGLGMLRPVKKILNHDNLVSMVDCFAIQVSNSGKVGREKWYTVWDFCDAGNLGNLLVKQQTDIPKVANDRDCPSDDEDEDIDMDDAPEVKFLPETFCWHVLLSMLRALTWLHDGVENVILSDNDRYERQTDNLDWQPILHRNLTPQNIFLGYPRRKEWYGPVKLGNYGKLHISGHCQTGGETYQPLFSKVIAPHPKGDFATLDELIYEDARMGSVYPLQPGQPYTMTSEYRALGEIIQAMMVIPTNNVHIKTIQSRNPRDNLAYAKYSARLKNFVVKMMEIDPWRVFPASQQNARPMYVTSDLYAEAQYAFKMFMAQGGDEANAYITHEMAANEDYVERELLPAKEYVDSLETVASVLKKLGKT

SEQ ID NO: 3305 - DNA, 1162 bp, Muscodor strobelii
  misc_feature: SGI EST ID NO. CUFF.8250.0
  misc_feature: Variant of the nucleotide sequence at SEQ ID NO 3303
tgggacttctgcgacgcgggcaacttgggcaatctactcgtcaaacaacagacggatatcccgaaggtcgcgaacgatagggattgtccgagcgatgatgaagatgaggatatcgatatggatgatgctccggaagtcaagtttcttcccgagactttctgctggcatgtcttactctcgatgcttcgagcgctgacgtggctacacgacggcgtggagaacgtcattctaagcgataacgatcgatatgagaggcaaaccgataatctagactggcagccaatcttacaccggaatctcacgcctcagaatatcttcctcggatatccacgtcggaaggagtggtacgggcccgtcaagctcgggaactacggcaaattgcatatctcaggacattgccagacgggcggtgaaacttatcagccactgttctccaaggtcatcgcaccgcatccaaaaggcgacttcgctactctcgatgaactgatttatgaagatgcgcggatgggcagtgtttatcctcttcagcccggacagccctacacaatgacaagcgaataccgcgccctcggcgaaataatccaagccatgatggtcatccccacaaacaacgtccacatcaaaaccatccagtcccgcaatccgcgggataacctcgcatacgcgaagtactccgcgcgactgaaaaacttcgtggtaaagatgatggagattgatccttggcgtgttttccccgctagtcagcaaaatgcccgcccgatgtacgtcacgagtgatctgtacgcggaggcgcagtacgcgttcaaaatgtttatggcgcagggtggagatgaggcgaatgcgtatatcacccatgagatggctgctaatgaggattatgttgagagagaattgctaccggcgaaggagtatgtggattcgttggagactgttgcgagtgtgttgaagaaacttgggaaaacttagtggttagaggttatggggttcgccagtggcagagacgtgttgtgtgcattgagggcacgtcgcattggtttgagaaatcgaagattctcggagtaggtggattggcatggaatcgcacgctcagctaatccaacataagatagcataggacagcagttgaaatgctgcaacttgcacaattctatttgattatggc

SEQ ID NO: 3306 - DNA, 582 bp, Muscodor strobelii
  misc_feature: SGI cDNA ID NO. 560756
  misc_feature: Encodes the peptide sequence at SEQ ID NO 3307
atgttcaacctcgcaacattgggcacagccgtcttactcctccccatcactctggcccacccccatccactcgaggcactcttagcccgaaacaagacctcaagcgattcattcctcctcacatccctatccggtacctttccatgcggcggcccatacggcctgacggcagtcgactcttctctgacagcccatctcgattatccaaacccccacaagaaggggcagaaactctctacctcctgttcggctagctggcccaagggaaccgatcccggcccaacagactggataccctgcgaggatcccgacgtgaaatttcgtctccccgaggaaggttggacagccactacgagattcactcttgaggggtggcaacagttgtctgttaatggtatcggtctggacgcatcccagaaactagcaatggacccagcgcatcccaacgacccgaacgcgttcttgttttgcgcgcagaggggaaagttcaatccgctgagttgtgatcttactggaccgtatggatttgtaaatcgacaggtcgttataccggcgaagaaactgaagatgataccgcactga

SEQ ID NO: 3307 - protein, 193 aa, Muscodor strobelii
  misc_feature: SGI Peptide ID NO. 560756
MFNLATLGTAVLLLPITLAHPHPLEALLARNKTSSDSFLLTSLSGTFPCGGPYGLTAVDSSLTAHLDYPNPHKKGQKLSTSCSASWPKGTDPGPTDWIPCEDPDVKFRLPEEGWTATTRFTLEGWQQLSVNGIGLDASQKLAMDPAHPNDPNAFLFCAQRGKFNPLSCDLTGPYGFVNRQVVIPAKKLKMIPH

SEQ ID NO: 3308 - DNA, 339 bp, Muscodor strobelii
  misc_feature: SGI EST ID NO. CUFF.8259.0
  misc_feature: Variant of the nucleotide sequence at SEQ ID NO 3306
ggcaacagttgtctgttaatggtatcggtctggacgcatcccagaaactagcaatggacccagcgcatcccaacgacccgaacgcgttcttgttttgcgcgcagaggggaaagttcaatccgctgagttgtgatcttactggaccgtatggatttgtaaatcgacaggtcgttataccggcgaagaaactgaagatgataccgcactgaactgacgatgtgatcggaggatgttggcgatacacgcttggaaatgggagtttggttcaactaaatgcattagattgatgagttgtttatgatagattaatgagtattcctgtcttgtacacctttaatg

SEQ ID NO: 3309 - DNA, 1377 bp, Muscodor strobelii
  misc_feature: SGI cDNA ID NO. 560757
  misc_feature: Encodes the peptide sequence at SEQ ID NO 3310
atgtactccaagactgcagctttcgtggcggcatggacggccgccaccacggtctcgggccagcaggtgggcacacagcaaactgagactcaccccaagatgacttggtcgaaatgtaccgctgcgaacagctgtaccacagtcaacggtgaggtcaccatcgacgccaactggcgatgggttcacgacaagggaggatacaccaactgctacaccggcaacgagtggaactcttccatctgctccgacgctacttcttgtgcgtcgaattgtgccctcgatggcgccgattatactgccacctacggtgctaccaccagcggcaacgccctgactctcaacttcgttaccaagggccagtactcaaccaacattggatctcgcttgtacttgatggatggtgccgacaagtaccagatgttcactctcctcggcaacgaattcacatttgatgtcgatgtgtcgaacttgggctgtggtatgaacggtgccctgtacttcgtctccatggacgcagatggtggcaaggccaagttccccgccaacaaggctggcgccaagtacggtaccggttactgcgatgctcagtgcccccgtgacttgaagttcatcgacggcaaggccaactctgctcaatggaccccgtcaaccaacgacgccaacgctggtgtcggtcaaatgggctcctgctgctctgagatggatatctgggaggccaacagcatctcaaccgcctacactcctcatccttgcaccaccatcggccagcactcctgcgagggcgacgcctgcggcggaacctactctgcgacccgctacgccggagactgtgaccccgacggatgcgacttcaactcctaccgccagggcgtcaaggacttctacggacccggcatgacggtcgacaccaagagcaagttcaccgtcgtcacccagttcatcaagggttccagcggcgacctcgagtccatcaagcgcttctacgtccagggcggcaaggtcatccccaactccgagagtactgtcgctggcaccagcggtaacgaggtcaacaccgatttctgcaaggctcagaagactgcctttggtgatgatgaccatttctctgagaagggcggtcttgcacagatgggcaaggctctgtcgcagggtatggtcttggttatgtctctttgggatgaccactacgccaacatgctgtggctcgacagctcctaccctctggacaaggacgcctcttctcccggcgttgcccgtggtacctgcgacaccggctccggtgtgcccgccgacgtcgagagcaagcaggcctccaacaaggtcatctacagcaacatcaagttcggccctatcaactctacctttacctctacataa

SEQ ID NO: 3310 - protein, 458 aa, Muscodor strobelii
  misc_feature: SGI Peptide ID NO. 560757
  misc_feature (22)..(457): Pfam Id: PF00840 Pfam Desc: Glycosyl hydrolase family 7
  misc_feature (1)..(458): NCBI GI: 156712280 Blast Desc: cellulose 1,4-beta-cellobiosidase [Acremonium thermophilum]
  misc_feature (1)..(456): NCBI GI: 156712278 Blast Desc: cellulose 1,4-beta-cellobiosidase [Acremonium thermophilum]
  misc_feature (1)..(455): NCBI GI: 70992391 Blast Desc: 1,4-beta-D-glucan-cellobiohydrolyase [Aspergillus fumigatus Af293] gi|66848677|gb|EAL89006.1| 1,4-beta-D-glucan-cellobiohydrolyase, [Aspergillus fumigatus
  misc_feature (1)..(457): NCBI GI: 156712284 Blast Desc: cellulose 1,4-beta-cellobiosidase [Thermoascus aurantiacus]
  misc_feature (1)..(457): NCBI GI: 56718412 Blast Desc: cellobiohydrolase precursor [Thermoascus aurantiacus var. levisporus]
  misc_feature (1)..(455): NCBI GI: 119472134 Blast Desc: glycosyl hydrolase family 7 protein [Neosartorya fischeri NRRL 181] gi|119406430|gb|EAW16381.1| glycosyl hydrolase family 7 protein [Neosartorya fischeri NRRL 181]
  misc_feature (28)..(454): NCBI GI: 50844407 Blast Desc: CBHI [Chaetomium thermophilum var. thermophilum]
  misc_feature (28)..(454): NCBI GI: 950686 Blast Desc: Cellulase [Humicola grisea var. thermoidea]
  misc_feature (28)..(454): NCBI GI: 58045187 Blast Desc: cellobiohydrolase [Chaetomium thermophilum]
  misc_feature (28)..(454): NCBI GI: 1346226 Blast Desc: GUX1_HUMGT RecName: Full=Exoglucanase 1; AltName: Full=Exoglucanase I; AltName: Full=Exocellobiohydrolase I; AltName: Full=1,4-beta-cellobiohydrolase; AltName: Flags: grisea]
  misc_feature (29)..(454): SWISSPROT Homolog: EC 3.2.1.91 Cellulose 1,4-beta-cellobiosidase
MYSKTAAFVAAWTAATTVSGQQVGTQQTETHPKMTWSKCTAANSCTTVNGEVTIDANWRWVHDKGGYTNCYTGNEWNSSICSDATSCASNCALDGADYTATYGATTSGNALTLNFVTKGQYSTNIGSRLYLMDGADKYQMFTLLGNEFTFDVDVSNLGCGMNGALYFVSMDADGGKAKFPANKAGAKYGTGYCDAQCPRDLKFIDGKANSAQWTPSTNDANAGVGQMGSCCSEMDIWEANSISTAYTPHPCTTIGQHSCEGDACGGTYSATRYAGDCDPDGCDFNSYRQGVKDFYGPGMTVDTKSKFTVVTQFIKGSSGDLESIKRFYVQGGKVIPNSESTVAGTSGNEVNTDFCKAQKTAFGDDDHFSEKGGLAQMGKALSQGMVLVMSLWDDHYANMLWLDSSYPLDKDASSPGVARGTCDTGSGVPADVESKQASNKVIYSNIKFGPINSTFTST

SEQ ID NO: 3311 - DNA, 1209 bp, Muscodor strobelii
  misc_feature: SGI EST ID NO. CUFF.8263.0
  misc_feature: Variant of the nucleotide sequence at SEQ ID NO 3309
caacattggatctcgcttgtacttgatggatggtgccgacaagtaccagatgttcactctcctcggcaacgaattcacatttgatgtcgatgtgtcgaacttgggctgtggtatgaacggtgccctgtacttcgtctccatggacgcagatggtggcaaggccaagttccccgccaacaaggctggcgccaagtacggtaccggttactgcgatgctcagtgcccccgtgacttgaagttcatcgacggcaaggccaactctgctcaatggaccccgtcaaccaacgacgccaacgctggtgtcggtcaaatgggctcctgctgctctgagatggatatctgggaggccaacagcatctcaaccgcctacactcctcatccttgcaccaccatcggccagcactcctgcgagggcgacgcctgcggcggaacctactctgcgacccgctacgccggagactgtgaccccgacggatgcgacttcaactcctaccgccagggcgtcaaggacttctacggacccggcatgacggtcgacaccaagagcaagttcaccgtcgtcacccagttcatcaagggttccagcggcgacctcgagtccatcaagcgcttctacgtccagggcggcaaggtcatccccaactccgagagtactgtcgctggcaccagcggtaacgaggtcaacaccgatttctgcaaggctcagaagactgcctttggtgatgatgaccatttctctgagaagggcggtcttgcacagatgggcaaggctctgtcgcagggtatggtcttggttatgtctctttgggatgaccactacgccaacatgctgtggctcgacagctcctaccctctggacaaggacgcctcttctcccggcgttgcccgtggtacctgcgacaccggctccggtgtgcccgccgacgtcgagagcaagcaggcctccaacaaggtcatctacagcaacatcaagttcggccctatcaactctacctttacctctacataaatggaggaaaagaaagacagctcagctcatctcactcctctgttactcgggtctcgaaacccagccatgatacgtgggtggcctggctgaactctcatttctcaatttcagtagacatgtacctaagtttggtggaagacaagcatttctaggacctgtatgtatgtagcatagattagtacatgaattgaaaccccggg

SEQ ID NO: 3312 - DNA, 666 bp, Muscodor strobelii
  misc_feature: SGI cDNA ID NO. 560758
  misc_feature: Encodes the peptide sequence at SEQ ID NO 3313
atgtctctcgccgcgccgacaccgccattactcctcacgaaacgcctgacggccttcttacgcgccaacctctcccctcagatccacacatccctgcttacgacgctatctggcaagctgcttgcccacgcgacaccacatcccgtcgctactttacgcacacaggctactgttgctgcctcgctatgggctctctatgctgctccctctacagctagcactgtggaaggatcccttccagcacaatcgtcgtcccgcttgcttggtgaaccgacatcgagcgcaatcacagttcagctcagtggtgccgtcgttgttatcagacgcctacgatgcgatttactgttcatatgtattggtcctgctgcagaaagccctgaccttgcacagcaaaagcatcttcagccacagagccggccaatgcaggcaccacaatccaatgctgatccacagcctagccctctcctcggctcgccttcggaagttgagagcataacgagtacgggagctgcaactacggtcagtatagccacgacggctagtgtagcttcctcggcggtggtggccatgaggaggcagacagaggagctggctcgatggctgaacgacaagctcgggtctcttggagtgcccgacgaaacaactggtgggatggagcaacgatga

SEQ ID NO: 3313 - protein, 221 aa, Muscodor strobelii
  misc_feature: SGI Peptide ID NO. 560758
  misc_feature (1)..(216): NCBI GI: 46135929 Blast Desc: FG09480.1 [Gibberella zeae PH-1]
  misc_feature (1)..(216): NCBI GI: 256727103 Blast Desc: [Nectria haematococca mpVI 77-13-4]
  misc_feature (8)..(213): NCBI GI: 145602374 Blast Desc: [Magnaporthe grisea 70-15] gi|145010794|gb|EDJ95450.1| [Magnaporthe grisea 70-15]
  misc_feature (13)..(216): NCBI GI: 85097377 Blast Desc: NCU04811 [Neurospora crassa OR74A] gi|28921928|gb|EAA31201.1| [Neurospora crassa OR74A]
  misc_feature (10)..(208): NCBI GI: 156047575 Blast Desc: SS1G_09514 [Sclerotinia sclerotiorum 1980] gi|154693909|gb|EDN93647.1| SS1G_09514 [Sclerotinia sclerotiorum 1980]
  misc_feature (13)..(122): NCBI GI: 116202063 Blast Desc: CHGG_08916 [Chaetomium globosum CBS 148.51] gi|88177434|gb|EAQ84902.1| CHGG_08916 [Chaetomium globosum CBS 148.51]
  misc_feature (3)..(45): NCBI GI: 261359475 Blast Desc: [Verticillium albo-atrum VaMs.102]
  misc_feature (157)..(213): NCBI GI: 116202063 Blast Desc: CHGG_08916 [Chaetomium globosum CBS 148.51] gi|88177434|gb|EAQ84902.1| CHGG_08916 [Chaetomium globosum CBS 148.51]
  misc_feature (103)..(208): NCBI GI: 154313908 Blast Desc: [Botryotinia fuckeliana B05.10] gi|150849043|gb|EDN24236.1| [Botryotinia fuckeliana B05.10]
MSLAAPTPPLLLTKRLTAFLRANLSPQIHTSLLTTLSGKLLAHATPHPVATLRTQATVAASLWALYAAPSTASTVEGSLPAQSSSRLLGEPTSSAITVQLSGAVVVIRRLRCDLLFICIGPAAESPDLAQQKHLQPQSRPMQAPQSNADPQPSPLLGSPSEVESITSTGAATTVSIATTASVASSAVVAMRRQTEELARWLNDKLGSLGVPDETTGGMEQR

SEQ ID NO: 3314 - DNA, 2236 bp, Muscodor strobelii
  misc_feature: SGI EST ID NO. CUFF.8277.0
  misc_feature: Variant of the nucleotide sequence at SEQ ID NO 3312
ctccagctcaccagcctcacttcgatgcctgctgtcttattcatctgatacccgtttgccttacgtacctatgcaagtcttcttcacctgaattactgcccaaagagtcattttctctcacattcactgcttcgctgactctgactgtcgcacgcgtgaatgacaaacggtcatgactcggagcccagccgaaatcacgtttaccacctacacgacggatagcaagctagctgagaagctgtagattcacttcgtcgcgcttgtcgcgtgggagccgcattgcattacacggtgcatttctggaggagggaggagctatcaccatgtctctcgccgcgccgacaccgccattactcctcacgaaacgcctgacggccttcttacgcgccaacctctcccctcagatccacacatccctgcttacgacgctatctggcaagctgcttgcccacgcgacaccacatcccgtcgctactttacgcacacaggctactgttgctgcctcgctatgggctctctatgctgctccctctacagctagcactgtggaaggatcccttccagcacaatcgtcgtcccgcttgcttggtgaaccgacatcgagcgcaatcacagttcagctcagtggtgccgtcgttgttatcagacgcctacgatgcgatttactgttcatatgtattggtcctgctgcagaaagccctgaccttgcacagcaaaagcatcttcagccacagagccggccaatgcaggcaccacaatccaatgctgatccacagcctagccctctcctcggctcgccttcggaagttgagagcataacgagtacgggagctgcaactacggtcagtatagccacgacggctagtgtagcttcctcggcggtggtggccatgaggaggcagacagaggagctggctcgatggctgaacgacaagctcgggtctcttggagtgcccgacgaaacaactggtgggatggagcaacgatgatcacgtatgaggaattatgacaacctcagctcaaatgactctactacaaaggccgtccctgtgaaacgaacgatatgagatgacgatagacacaaaagcgaactttgctactacgagcctcactgcatgtcgggatgcttaggaattcgccaaatagacgcaagcagaatgttggatgcttccagggctccgctacgaactaagctcaagatctactcgacacagtacggacaggagcacacatctctcgctgacaaaagatcccggaaataaatgctaagatcctccgaacggtctatcgtaagcgcatagtctatcgggtcgatgaattactgaatatgattgatgattatgaacgagatcaagcgggagagacacggcctggggcgggctactagctccctgtgctccaaacttcgacctcgtgttgcccgcgaatcggcaacctgccatagaaatgatacccaagaaattttagatctcatgatctactttaacaccaaaattattgcatggtacctgattcctgcatctcagattgtttgccgacaatatcccgaagtgaagcgtcccgttctaccatatctatcataacacaacctcctcgacttctggctcaagccaaggtcgttcgccagtgacgtgtaatgcaagaacatgaacaatttgaacctaccccgactccaattcacgagtcgtcgaaagtacgacatgggagtttcgaagtttcgttaataggaggagtagtctaggtccgcgagctcatatgcttcactggccatcaccgtccacccccttctaagcatccaaatactttgcatggactggactttcggactggcgacctctttccaatacgacatgttgccttaattttagagagaacagttcgattctagtgacacggatatctcgtcccgactgataagggatgcaaacgtccggtacccaataataacctcgtggacaatcaatgatgctcatgatttcacgaactttgctttgcatcgtgatctacaccaagactcgctgttcgctacgaagctactccgattgatcttgcgcacacaaaatgcggcgtcgtgagattcaagtatagattagccgggagtcgatctcggagggccatctgagtaaggtccgttcagctgtgcctcgttagatttcaatgcccacgcgcccaaatggttcctacctgttgatctgttgctatttgcattcgatttgagttcggatctccagaccgc

SEQ ID NO: 3315 - DNA, 813 bp, Muscodor strobelii
  misc_feature: SGI cDNA ID NO. 560759
  misc_feature: Reduced expression when VOC is produced
  misc_feature: Encodes the peptide sequence at SEQ ID NO 3316
atgacgtctcacgccggcgctgcaccattgaacgcgggcgtatccaacatgacgctccagaactacagatttcccgcccatcgcctgcgccaacagataaatccaaatcggactccgctggtgcttgttgcttgcggctctttctcgcccatcaccttcctgcacatgcgcatgttcgagatggccaacgacttcgcccgcatgaacacagacttcgaggtcgtcggcggctatctcagccccgtgtcagacgcctacaagaaagccggtcttgccgagtcaaaccacagggtacgcatgtgtgagctggctgccgaggagacttcaaattggcttatggtcgacccgtgggaggccatacagcctgagtacaccccgactgccaccgtgcttgatcacttcgagaaggaaatcaacggcggcgaccgcggcggtgttctcagtgccgacggcagcaagctcgtcaaagtcaaggtcctgctgctggccggcgccgatctcatcagcaccatgtccacgcccggcgtttgggccgagaaagatctcgaccatattctcggcaacttcggtgccatgattgtcgaacggagcggtaccgacatggaggaagcgctagaggctctcaagccctgggaagagaacattcacgtcatacaacagatgattcagaacgatgtgagcagcacaaagatcaggctgctccttaagagggacttgagcattacgtatctcatcccgacgcccgtcgtcaactacatcagtgcaaaccggctctacaccgatggcgatgcggggtccaaatcgaccaaataa

SEQ ID NO: 3316 - protein, 270 aa, Muscodor strobelii
  misc_feature: SGI Peptide ID NO. 560759
  misc_feature (43)..(234): Pfam Id: PF01467 Pfam Desc: Cytidylyltransferase
  misc_feature (19)..(269): NCBI GI: 119470062 Blast Desc: nicotinamide mononucleotide adenylyl transferase [Neosartorya fischeri NRRL 181] gi|119406155|gb|EAW16106.1| nicotinamide mononucleotide adenylyl transferase [Neosartorya
  misc_feature (19)..(269): NCBI GI: 70991855 Blast Desc: nicotinamide mononucleotide adenylyl transferase [Aspergillus fumigatus Af293] gi|66848409|gb|EAL88738.1| nicotinamide mononucleotide adenylyl transferase [Aspergillus
  misc_feature (17)..(269): NCBI GI: 261205294 Blast Desc: nicotinamide mononucleotide adenylyl transferase [Ajellomyces dermatitidis SLH14081] gi|239592443|gb|EEQ75024.1| nicotinamide mononucleotide adenylyl transferase [Ajellomyces
  misc_feature (12)..(269): NCBI GI: 169769204 Blast Desc: [Aspergillus oryzae RIB40] gi|83766930|dbj|BAE57070.1| protein product [Aspergillus oryzae]
  misc_feature (12)..(269): NCBI GI: 238501648 Blast Desc: nicotinamide mononucleotide adenylyl transferase [Aspergillus flavus NRRL3357] gi|220692295|gb|EED48642.1| nicotinamide mononucleotide adenylyl transferase [Aspergillus
  misc_feature (19)..(261): NCBI GI: 121699629 Blast Desc: nicotinamide mononucleotide adenylyl transferase [Aspergillus clavatus NRRL 1] gi|119396227|gb|EAW06659.1| nicotinamide mononucleotide adenylyl transferase [Aspergillus 1]
  misc_feature (19)..(261): NCBI GI: 67522577 Blast Desc: AN1745.2 [Aspergillus nidulans FGSC A4] gi|40744875|gb|EAA64031.1| AN1745.2 [Aspergillus nidulans FGSC A4] gi|259487090|tpe|CBF85484.1| TPA: nicotinamide mononucleotide
  misc_feature (18)..(269): NCBI GI: 242777056 Blast Desc: nicotinamide mononucleotide adenylyl transferase [Talaromyces stipitatus ATCC 10500] gi|218722574|gb|EED21992.1| nicotinamide mononucleotide adenylyl transferase [Talaromyces
  misc_feature (18)..(269): NCBI GI: 212532985 Blast Desc: nicotinamide mononucleotide adenylyl transferase [Penicillium marneffei ATCC 18224] gi|210072013|gb|EEA26102.1| nicotinamide mononucleotide adenylyl transferase [Penicillium
  misc_feature (10)..(267): NCBI GI: 255932279 Blast Desc: Pc12g08660 [Penicillium chrysogenum Wisconsin 54-1255] gi|211582315|emb|CAP80493.1| Pc12g08660 [Penicillium chrysogenum Wisconsin 54-1255]
  misc_feature (18)..(261): SWISSPROT Homolog: EC 2.7.7.1 Nicotinamide-nucleotide adenylyltransferase
  misc_feature: Useful for introducing or modulating the production of volatile compounds
MTSHAGAAPLNAGVSNMTLQNYRFPAHRLRQQINPNRTPLVLVACGSFSPITFLHMRMFEMANDFARMNTDFEVVGGYLSPVSDAYKKAGLAESNHRVRMCELAAEETSNWLMVDPWEAIQPEYTPTATVLDHFEKEINGGDRGGVLSADGSKLVKVKVLLLAGADLISTMSTPGVWAEKDLDHILGNFGAMIVERSGTDMEEALEALKPWEENIHVIQQMIQNDVSSTKIRLLLKRDLSITYLIPTPVVNYISANRLYTDGDAGSKSTK

SEQ ID NO: 3317 - DNA, 2012 bp, Muscodor strobelii
  misc_feature: SGI EST ID NO. CUFF.8299.0
  misc_feature: Variant of the nucleotide sequence at SEQ ID NO 3315
tgactcttagtacttcttcagacttcaagggacttcttgctctttgtccttccatctccaggttccatatcttcgcagtcacatttccgcctgcatctctgtatcgctgcagtcaacgcactcgttcttagtatatttgcatccgcccgactgcattgattgatcgccatctttcccatagtttttcaacttgtttcccggctcctgacgtcttggacaatcccccaccgattacgattaccgataggcagcttgccaaaccccccaacgatgacgtctcacgccggcgctgcaccattgaacgcgggcgtatccaacatgacgctccagaactacagatttcccgcccatcgcctgcgccaacagataaatccaaatcggactccgctggtgcttgttgcttgcggctctttctcgcccatcaccttcctgcacatgcgcatgttcgagatggccaacgacttcgcccgcatgaacacagacttcgaggtcgtcggcggctatctcagccccgtgtcagacgcctacaagaaagccggtcttgccgagtcaaaccacagggtacgcatgtgtgagctggctgccgaggagacttcaaattggcttatggtcgacccgtgggaggccatacagcctgagtacaccccgactgccaccgtgcttgatcacttcgagaaggaaatcaacggcggcgaccgcggcggtgttctcagtgccgacggcagcaagctcgtcaaagtcaaggtcctgctgctggccggcgccgatctcatcagcaccatgtccacgcccggcgtttgggccgagaaagatctcgaccatattctcggcaacttcggtgccatgattgtcgaacggagcggtaccgacatggaggaagcgctagaggctctcaagccctgggaagagaacattcacgtcatacaacagatgattcagaacgatgtgagcagcacaaagatcaggctgctccttaagagggacttgagcattacgtatctcatcccgacgcccgtcgtcaactacatcagtgcaaaccggctctacaccgatggcgatgcggggtccaaatcgaccaaataatgagcacgaacacaaccacggcacgagccaattcgatgtggcattactgtattattaattttgcgacccatcttccggagcgagcatcactgcagacgagaagcacagcattgtgtgcgcatcaaagtcgggaattcggcgcccaccggcgttgcatccggcactaggctccagtgtattgaggggctgcggcgcactgtcgccctccactaaaatcgcaccccatactggctaggtctgctgcactgaactctgctcaccctacatgcgtctgcatgcatgcagctttgctgcagcgccagaaccgcgtatacgccgaaattttcttcagcaccaagcgtccttttattagcgttaccggcgacaaagcctgttcaaaattttgcttttcttggctgtactcgcaatttcacctgtcgcccagacattcattcactaattgacgaagtgacatacgcgagaagactactagagagctttctgggagactgtttttgctatcatcttgtaggacacagtagatttggggactaggagaattatagatgagcaggacggatggggatagcgtccattattcgtattttgcatgtgacccagagaatagcggtcgcaggggagaaggggagggatctggatccatcattggtaatgagcttactgcgcacgtcgagaactggggaattaagtttcttcggcaggcacttaggtaggtaaacattgcaattgaaaagatggttggttgacgatggtatatcggagttcctgcttttggagtcctttacgtgattgatatgtgagataatgttgctctaagtctaatccataaccctgcagcttagatcgaaactgtatgaaagcaactataccgcatttactgcacgaggtataagagatgtcattgcgaatgagagtctaggagaacgcgc

SEQ ID NO: 3318 - DNA, 1041 bp, Muscodor strobelii
  misc_feature: SGI cDNA ID NO. 560760
  misc_feature: Encodes the peptide sequence at SEQ ID NO 3319
atgtcgtcttctcagtcccctactaatccatatgcagccgcccatgcagaccctcgaagtgccggcgatgacagaccaacagcaacccagatcattggagacgagggccttgtcaacgccttaccgggaaaggttattctggtcaccggcaccacttctggtatcggcatcgacaccgtccgcgctctccacatgacaggcgccgacatctttatgcaggcccgtaacaagactaaggcagacgaggtccatgccgaagtcttgagcgcaagccctggcaagggaaaacttgagatcctcattatggacctcaactcgctgcagtctatccgagacggtgtcgagctgcttttaaccaagaccaagagtttgaatatcctcatcaacaacgccggcgtccgcaacacccctgaaggcagaaccatcgacagcttcgagacacaattcgccgtgaaccacctggcccacttcctgctcttcgaactgctccgcccgacactgctcgcatctagcactcccgacttccactcacgtgtcattaacgtgacgtctgcagcccacaggggaagccaaatccacttcgacaaccccaatctcgaaggcatttacgccccgcgcctcgcctactcccagagcaagacggccaacattctgatggccaacgagatcgagcgtcggtttgggccccgtggcttacacggtctatcagtccacccgggctgtatcattacgggactgaatcagcacgattatcccactcccgaggccgtacaggaacatctcgcagccaacccggtgctcgccaaggtgcttaagagcactactcaaggcgccgccactcaggtctgggcagccgtcgccaaggtgtgggaggggaagggcggcgtctaccttgaagagtgtcgcctgggagtcgagagggaagtagttgatctggaaaatggcggttataaggcttatgtctttgaccgcgacgctcaacggaagttgtggaatatcagttgtcgcatggttggcgttgatgatgtttctgcttcttag

SEQ ID NO: 3319 - protein, 346 aa, Muscodor strobelii
  misc_feature: SGI Peptide ID NO. 560760
  misc_feature (44)..(193): Pfam Id: PF00106 Pfam Desc: short chain dehydrogenase
  misc_feature (11)..(340): NCBI GI: 256720144 Blast Desc: NECHADRAFT_73270 [Nectria haematococca mpVI 77-13-4]
  misc_feature (11)..(342): NCBI GI: 256726740 Blast Desc: NECHADRAFT_32426 [Nectria haematococca mpVI 77-13-4]
  misc_feature (11)..(340): NCBI GI: 256721804 Blast Desc: NECHADRAFT_97586 [Nectria haematococca mpVI 77-13-4]
  misc_feature (11)..(342): NCBI GI: 256725873 Blast Desc: NECHADRAFT_43218 [Nectria haematococca mpVI 77-13-4]
  misc_feature (11)..(342): NCBI GI: 145234937 Blast Desc: An03g02180 [Aspergillus niger] gi|134057793|emb|CAK38188.1| protein product [Aspergillus niger]
  misc_feature (11)..(338): NCBI GI: 256720335 Blast Desc: NECHADRAFT_89149 [Nectria haematococca mpVI 77-13-4]
  misc_feature (1)..(342): NCBI GI: 169773903 Blast Desc: [Aspergillus oryzae RIB40] gi|238491930|ref|XP_002377202.1| short-chain dehydrogenase/reductase, [Aspergillus flavus NRRL3357] protein
  misc_feature (11)..(340): NCBI GI: 256734856 Blast Desc: NECHADRAFT_75545 [Nectria haematococca mpVI 77-13-4]
  misc_feature (11)..(342): NCBI GI: 145240467 Blast Desc: An08g07630 [Aspergillus niger] gi|134077399|emb|CAK96630.1| protein product [Aspergillus niger]
  misc_feature (11)..(342): NCBI GI: 261358215 Blast Desc: WW domain-containing oxidoreductase [Verticillium albo-atrum VaMs.102]
  misc_feature (47)..(341): SWISSPROT Homolog: EC 1.3.1.33 Protochlorophyllide reductase
MSSSQSPTNPYAAAHADPRSAGDDRPTATQIIGDEGLVNALPGKVILVTGTTSGIGIDTVRALHMTGADIFMQARNKTKADEVHAEVLSASPGKGKLEILIMDLNSLQSIRDGVELLLTKTKSLNILINNAGVRNTPEGRTIDSFETQFAVNHLAHFLLFELLRPTLLASSTPDFHSRVINVTSAAHRGSQIHFDNPNLEGIYAPRLAYSQSKTANILMANEIERRFGPRGLHGLSVHPGCIITGLNQHDYPTPEAVQEHLAANPVLAKVLKSTTQGAATQVWAAVAKVWEGKGGVYLEECRLGVEREVVDLENGGYKAYVFDRDAQRKLWNISCRMVGVDDVSAS

SEQ ID NO: 3320 - DNA, 586 bp, Muscodor strobelii
  misc_feature: SGI EST ID NO. CUFF.8287.0
  misc_feature: Variant of the nucleotide sequence at SEQ ID NO 3318
cggtgtcgagctgcttttaaccaagaccaagagtttgaatatcctcatcaacaacgccggcgtccgcaacacccctgaaggcagaaccatcgacagcttcgagacacaattcgccgtgaaccacctggcccacttcctgctcttcgaactgctccgcccgacactgctcgcatctagcactcccgacttccactcacgtgtcattaacgtgacgtctgcagcccacaggggaagccaaatccacttcgacaaccccaatctcgaaggcatttacgccccgcgcctcgcctactcccagagcaagacggccaacattctgatggccaacgagatcgagcgtcggtttgggccccgtggcttacacggtctatcagtccacccgggctgtatcattacgggactgaatcagcacgattatcccactcccgaggccgtacaggaacatctcgcagccaacccggtgctcgccaaggtgcttaagagcactactcaaggcgccgccactcaggtctgggcagccgtcgccaaggtgtgggaggggaagggcggcgtctaccttgaagagtgtcgcctgggagtcgagagg

SEQ ID NO: 3321 - DNA, 1653 bp, Muscodor strobelii
  misc_feature: SGI cDNA ID NO. 560761
  misc_feature: Encodes the peptide sequence at SEQ ID NO 3322
atgccagatcctacacaacagttaatagatgagctttgctcacttttggatgaaacaacaattttgtccatatccagtgattttgatctacagaatccggaggaattcaagactgcacgcgagatactcctgtcgctctcagcaagtgtcgaggcagaggaagcaactggtttcaaccccagtgggatcagtggtgaagatctcgcaggtatttcatcctctctccatgacccaaatcccgattcacctgccacgggcgagggtgatttgaagagtatagatggtttgacgagtacaaccgagacttcaaattctcgtagtcttatttctgacccctcgtccaaggtatcaagtcacggaaacccagatgttattcatgtcagtgttctggacggtctcagtattgaagagaaagagcaacaactcgctgacatgtttgcgtcgctgaaaccgattgatgtcaagctcgcgctgaagaaagccaaaggtgatgcagatatcgctatggacgaactgctgaacctacaatggcttgagcaaacggggcaaagaccaaagggtatcgagggattctatatatcagatggagagggtgcgccgggcaagaagagaaaagggcgcaagaagaaaaagagcccaaagacagcgactccaaagagcccgagtcccgacaaaacaaatagagacgaatctctagaggaacccaacagagatgagactgctgacaatgacaacatcacatttatctcggaacgttttgcacttcccattgcggacgcaatagaaatctaccaacgcaacaaattctcctgcggcctggcaatcatcgcaatactggacaactatctagctctcgagtttaacaatcccattaccgccagactagctgaggacattcaggttgaacagaaacgagtcccatggattccacaggaatatttcgctgccatcttcgagacaactgcagactataaatctgcaatcagcgtggtcgatgccttagcatctcatttcgagaagcctgcgtatctcaaatacgatgtatcatacagtctcatggctacggatgccgagctagaatcaggccaccaacgccaaacgatcaacctcaaatccatcaaaacaccccatgcaccctctacgaatctcaatctccatgcacatccaacgtcgctgcaagaagcgtccgcccagcgcacccaagcggctctctccctacgaaattcccaatccgctgcgacatcggcatttaagaaagggcgctcggatcccctattccgcgctgcaggcgcatactatgcagagcgatcccgcgaccttgcggcaagtcatagagcagcaataggcgccgaagcgcggtacatagtcgattcccagagcaccactgacacgatcgatctacatggtgtaacagtagctgacggcgttggcattgccgtcgagagggcttggaaatggtgggatgggctgggaatcggtgaggagaggagaagaaaggcaaaggaagggttcaagatcgttacgggagtaggacgacatagcgaaggcggtgtcagcagacttagagtcaatgttttcaaggcgcttgttgcggatgggtggaaaattgaggcgcttactggtgctgtgcttgtcacggggcggttgaagtag

SEQ ID NO: 3322 - protein, 550 aa, Muscodor strobelii
  misc_feature: SGI Peptide ID NO. 560761
  misc_feature (506)..(548): Pfam Id: PF01713 Pfam Desc: Smr domain
  misc_feature (5)..(548): NCBI GI: 46134227 Blast Desc: FG09253.1 [Gibberella zeae PH-1]
  misc_feature (1)..(548): NCBI GI: 256727161 Blast Desc: NECHADRAFT_32522 [Nectria haematococca mpVI 77-13-4]
  misc_feature (36)..(550): NCBI GI: 261359344 Blast Desc: conserved [Verticillium albo-atrum VaMs.102]
  misc_feature (7)..(547): NCBI GI: 154315497 Blast Desc: BC1G_04321 [Botryotinia fuckeliana B05.10] gi|150847261|gb|EDN22454.1| BC1G_04321 [Botryotinia fuckeliana B05.10]
  misc_feature (11)..(550): NCBI GI: 156060161 Blast Desc: SS1G_02219 [Sclerotinia sclerotiorum 1980] gi|154699627|gb|EDN99365.1| SS1G_02219 [Sclerotinia sclerotiorum 1980]
  misc_feature (6)..(547): NCBI GI: 169618461 Blast Desc: SNOG_12421 [Phaeosphaeria nodorum SN15] gi|111059114|gb|EAT80234.1| SNOG_12421 [Phaeosphaeria nodorum SN15]
  misc_feature (1)..(550): NCBI GI: 242764082 Blast Desc: Smr domain protein [Talaromyces stipitatus ATCC 10500] gi|218723900|gb|EED23317.1| Smr domain protein [Talaromyces stipitatus ATCC 10500]
  misc_feature (7)..(547): NCBI GI: 238837931 Blast Desc: smr domain-containing protein [Microsporum canis CBS 113480]
  misc_feature (7)..(550): NCBI GI: 119469023 Blast Desc: Smr domain protein [Neosartorya fischeri NRRL 181] gi|119406055|gb|EAW16006.1| Smr domain protein [Neosartorya fischeri NRRL 181]
  misc_feature (6)..(550): NCBI GI: 212529218 Blast Desc: Smr domain protein [Penicillium marneffei ATCC 18224] gi|210074164|gb|EEA28251.1| Smr domain protein [Penicillium marneffei ATCC 18224]
MPDPTQQLIDELCSLLDETTILSISSDFDLQNPEEFKTAREILLSLSASVEAEEATGFNPSGISGEDLAGISSSLHDPNPDSPATGEGDLKSIDGLTSTTETSNSRSLISDPSSKVSSHGNPDVIHVSVLDGLSIEEKEQQLADMFASLKPIDVKLALKKAKGDADIAMDELLNLQWLEQTGQRPKGIEGFYISDGEGAPGKKRKGRKKKKSPKTATPKSPSPDKTNRDESLEEPNRDETADNDNITFISERFALPIADAIEIYQRNKFSCGLAIIAILDNYLALEFNNPITARLAEDIQVEQKRVPWIPQEYFAAIFETTADYKSAISVVDALASHFEKPAYLKYDVSYSLMATDAELESGHQRQTINLKSIKTPHAPSTNLNLHAHPTSLQEASAQRTQAALSLRNSQSAATSAFKKGRSDPLFRAAGAYYAERSRDLAASHRAAIGAEARYIVDSQSTTDTIDLHGVTVADGVGIAVERAWKWWDGLGIGEERRRKAKEGFKIVTGVGRHSEGGVSRLRVNVFKALVADGWKIEALTGAVLVTGRLK

SEQ ID NO: 3323 - DNA, 2446 bp, Muscodor strobelii
  misc_feature: SGI EST ID NO. CUFF.8296.0
  misc_feature: Variant of the nucleotide sequence at SEQ ID NO 3321
caattggtgacgggccgctgacagtcactgcagctagccgtgattatgtggccgatccatcatacaggcgctgattcatcatgctgcgattctctttgatgttcatgtttggatcgaccttcagctcaacgttcccgcgtacccacaaccacttgctgtgaaattcctatcttgactgctttgcgatttcaggctgcgtttcacacttggcacgtctgtcttctggagaactcccaataaacactcaatattgccaacgacgatgcctcggccctcagattcagtctcctctctttgtcccctaacctcgtaccgcagcctgtcgtgaataacaggcggagcgacgctacacacaaattgtttaactactgttggatttgttggattgatgcaatatgatgccagatcctacacaacagttaatagatgagctttgctcacttttggatgaaacaacaattttgtccatatccagtgattttgatctacagaatccggaggaattcaagactgcacgcgagatactcctgtcgctctcagcaagtgtcgaggcagaggaagcaactggtttcaaccccagtgggatcagtggtgaagatctcgcaggtatttcatcctctctccatgacccaaatcccgattcacctgccacgggcgagggtgatttgaagagtatagatggtttgacgagtacaaccgagacttcaaattctcgtagtcttatttctgacccctcgtccaaggtatcaagtcacggaaacccagatgttattcatgtcagtgttctggacggtctcagtattgaagagaaagagcaacaactcgctgacatgtttgcgtcgctgaaaccgattgatgtcaagctcgcgctgaagaaagccaaaggtgatgcagatatcgctatggacgaactgctgaacctacaatggcttgagcaaacggggcaaagaccaaagggtatcgagggattctatatatcagatggagagggtgcgccgggcaagaagagaaaagggcgcaagaagaaaaagagcccaaagacagcgactccaaagagcccgagtcccgacaaaacaaatagagacgaatctctagaggaacccaacagagatgagactgctgacaatgacaacatcacatttatctcggaacgttttgcacttcccattgcggacgcaatagaaatctaccaacgcaacaaattctcctgcggcctggcaatcatcgcaatactggacaactatctagctctcgagtttaacaatcccattaccgccagactagctgaggacattcaggttgaacagaaacgagtcccatggattccacaggaatatttcgctgccatcttcgagacaactgcagactataaatctgcaatcagcgtggtcgatgccttagcatctcatttcgagaagcctgcgtatctcaaatacgatgtatcatacagtctcatggctacggatgccgagctagaatcaggccaccaacgccaaacgatcaacctcaaatccatcaaaacaccccatgcaccctctacgaatctcaatctccatgcacatccaacgtcgctgcaagaagcgtccgcccagcgcacccaagcggctctctccctacgaaattcccaatccgctgcgacatcggcatttaagaaagggcgctcggatcccctattccgcgctgcaggcgcatactatgcagagcgatcccgcgaccttgcggcaagtcatagagcagcaataggcgccgaagcgcggtacatagtcgattcccagagcaccactgacacgatcgatctacatggtgtaacagtagctgacggcgttggcattgccgtcgagagggcttggaaatggtgggatgggctgggaatcggtgaggagaggagaagaaaggcaaaggaagggttcaagatcgttacgggagtaggacgacatagcgaaggcggtgtcagcagacttagagtcaatgttttcaaggcgcttgttgcggatgggtggaaaattgaggcgcttactggtgctgtgcttgtcacggggcggttgaagtagtgtgctaccagtcattttgacttgggaatgcatacgaacacaggcgtttcgtcgtgttgggaattggatatgggttgtgtacctaggattcgtggtctcagatcttcgcttgggtccggccaccggttgtatatgggggagttctttctacgatcacgacggagtttcaagaatttctgatgttggaagggttagaccattccacccactggtgtctcggaggctgaatagtcggtttgttgatatagaagcatcatcgtcagaatacgatagctaccatctcacagtgcactacatttgcgaggattgggaacatattcaattgctctcttgtatgtgaaccccgtctcgaatacccgttgtcagtgaggcctgtaccacgcaacacagcaatg

SEQ ID NO: 3324 - DNA, 1221 bp, Muscodor strobelii
  misc_feature: SGI cDNA ID NO. 560762
  misc_feature: Reduced expression when VOC is produced
  misc_feature: Encodes the peptide sequence at SEQ ID NO 3325
atggcatccgcagggacgacggggcttgctatcgcagcctacacttgcacagtcgccgcgccgcagcctatctcagataagctgaccggcgaccgatatgcccaagatcatcacattaagaacggccgtggcgagacggtcaagttccagaatccgcacccatcacacgtcttcccttcattctccgtcttggcacccacagtattcaaactagtttttggtatcacagaaagaccaaagccaaagcttgaggagaaactggtaccagtggtaaagccaagattccttgagacgcgcaccgcgtccacagagctccgggctacttggcttggccatgcctgctattacgtcgagtatccttcaggtttgcgcgtgctctttgacccggtattcgaggactgctgtgcaccagtcaacttgtccatgttcaagcgctatactgagagaccctgcgacatcggcgacctaccctacgtagatgctgttgtcattagccactcacactatgatcacttatcttacccgaccgtgcaggaggtccagaagcatcatcccaatgcacatttcttcgtcggtttagggttggagaaatggtttaaggcgagtggtgtcgagcaagtcacggaaatggattggtgggatgaggcaaaggtgacattcacgccgaaggcaaccaatgagacggacaagagtcttcagcctattacagcaaccatctcatgtctaccaagccaacactcctcaggccgcaacggaatggacagagataagacgctatgggcatcgtggggtgtcaagtctggctcatccgataaagaaaagactgtctggttcggcggcgacaccggatatcgaacggtgcctaagctcgcagagggcgtcgacgactacggcccggaattttcccatctgccagtttgtccgcaattcaagcagatcggtgactatctcggatctgtagacctaggactcatccccatcggcgcgtactatccgcgctacgttttctcgcacatgcacgtcaacccctatgactccgttgagatcttccacgacaccaaatgcaagcgggcgatgggaatacattggggcacgtgggttctgacccctgaacatcctctcgagccaccgaaggtactgaaggaggctttgaagagaaaggggatgcccgagactggtgtctttgatgtttgcaatattggcgaaagtcgcgagttttag

SEQ ID NO: 3325 - protein, 406 aa, Muscodor strobelii
  misc_feature: SGI Peptide ID NO. 560762
  misc_feature (111)..(171): Pfam Id: PF00753 Pfam Desc: Metallo-beta-lactamase superfamily
  misc_feature (37)..(406): NCBI GI: 116195558 Blast Desc: CHGG_04377 [Chaetomium globosum CBS 148.51] gi|88180290|gb|EAQ87758.1| CHGG_04377 [Chaetomium globosum CBS 148.51]
  misc_feature (25)..(406): NCBI GI: 170940194 Blast Desc: protein product [Podospora anserina]
  misc_feature (2)..(406): NCBI GI: 261359655 Blast Desc: NAPE-hydrolyzing phospholipase D [Verticillium albo-atrum VaMs.102]
  misc_feature (31)..(406): NCBI GI: 46134243 Blast Desc: FG09261.1 [Gibberella zeae PH-1]
  misc_feature (15)..(406): NCBI GI: 256727734 Blast Desc: NECHADRAFT_103573 [Nectria haematococca mpVI 77-13-4]
  misc_feature (11)..(406): NCBI GI: 85106249 Blast Desc: NCU07271 [Neurospora crassa OR74A] gi|28923721|gb|EAA32889.1| conserved [Neurospora crassa OR74A]
  misc_feature (9)..(406): NCBI GI: 156030687 Blast Desc: SS1G_14439 [Sclerotinia sclerotiorum 1980] gi|154700830|gb|EDO00569.1| SS1G_14439 [Sclerotinia sclerotiorum 1980]
  misc_feature (6)..(406): NCBI GI: 242821821 Blast Desc: conserved [Talaromyces stipitatus ATCC 10500] gi|242821826|ref|XP_002487760.1| conserved [Talaromyces stipitatus ATCC 10500] gi|242821831|ref|XP_002487761.1| conserved
  misc_feature (6)..(406): NCBI GI: 242821816 Blast Desc: conserved [Talaromyces stipitatus ATCC 10500] gi|218712679|gb|EED12104.1| conserved [Talaromyces stipitatus ATCC 10500]
  misc_feature (26)..(406): NCBI GI: 154304021 Blast Desc: BC1G_09646 [Botryotinia fuckeliana B05.10] gi|150854281|gb|EDN29473.1| BC1G_09646 [Botryotinia fuckeliana B05.10]
  misc_feature: Useful for introducing or modulating the production of volatile compounds
MASAGTTGLAIAAYTCTVAAPQPISDKLTGDRYAQDHHIKNGRGETVKFQNPHPSHVFPSFSVLAPTVFKLVFGITERPKPKLEEKLVPVVKPRFLETRTASTELRATWLGHACYYVEYPSGLRVLFDPVFEDCCAPVNLSMFKRYTERPCDIGDLPYVDAVVISHSHYDHLSYPTVQEVQKHHPNAHFFVGLGLEKWFKASGVEQVTEMDWWDEAKVTFTPKATNETDKSLQPITATISCLPSQHSSGRNGMDRDKTLWASWGVKSGSSDKEKTVWFGGDTGYRTVPKLAEGVDDYGPEFSHLPVCPQFKQIGDYLGSVDLGLIPIGAYYPRYVFSHMHVNPYDSVEIFHDTKCKRAMGIHWGTWVLTPEHPLEPPKVLKEALKRKGMPETGVFDVCNIGESREF

SEQ ID NO: 3326 - DNA, 1606 bp, Muscodor strobelii
  misc_feature: SGI EST ID NO. CUFF.8311.0
  misc_feature: Variant of the nucleotide sequence at SEQ ID NO 3324
gtcgcatcaggtcgcatttttttctgagctggcacgtaaaccacgtgctgaccatattgcatttaacatccagtacagacgatttcacgtcaccttacttccctccctttctagactcatactatataatcaaagctgatgctcttctttcgccggctttggcaatctggtctaaagcctccgcctataagtcgatacaccaagatggcatccgcagggacgacggggcttgctatcgcagcctacacttgcacagtcgccgcgccgcagcctatctcagataagctgaccggcgaccgatatgcccaagatcatcacattaagaacggccgtggcgagacggtcaagttccagaatccgcacccatcacacgtcttcccttcattctccgtcttggcacccacagtattcaaactagtttttggtatcacagaaagaccaaagccaaagcttgaggagaaactggtaccagtggtaaagccaagattccttgagacgcgcaccgcgtccacagagctccgggctacttggcttggccatgcctgctattacgtcgagtatccttcaggtttgcgcgtgctctttgacccggtattcgaggactgctgtgcaccagtcaacttgtccatgttcaagcgctatactgagagaccctgcgacatcggcgacctaccctacgtagatgctgttgtcattagccactcacactatgatcacttatcttacccgaccgtgcaggaggtccagaagcatcatcccaatgcacatttcttcgtcggtttagggttggagaaatggtttaaggcgagtggtgtcgagcaagtcacggaaatggattggtgggatgaggcaaaggtgacattcacgccgaaggcaaccaatgagacggacaagagtcttcagcctattacagcaaccatctcatgtctaccaagccaacactcctcaggccgcaacggaatggacagagataagacgctatgggcatcgtggggtgtcaagtctggctcatccgataaagaaaagactgtctggttcggcggcgacaccggatatcgaacggtgcctaagctcgcagagggcgtcgacgactacggcccggaattttcccatctgccagtttgtccgcaattcaagcagatcggtgactatctcggatctgtagacctaggactcatccccatcggcgcgtactatccgcgctacgttttctcgcacatgcacgtcaacccctatgactccgttgagatcttccacgacaccaaatgcaagcgggcgatgggaatacattggggcacgtgggttctgacccctgaacatcctctcgagccaccgaaggtactgaaggaggctttgaagagaaaggggatgcccgagactggtgtctttgatgtttgcaatattggcgaaagtcgcgagttttagagcgccttgtatataccctgtaaagttatatgtagcaatgtgtggtggtgttggtggtttgatacgtggttagcatagcttagatgcgtgggatcttttcacctctttttgagtttgaaactacaaataaacttcatatcataaaggagaccatttaaattcaataatacctcaagattac

SEQ ID NO: 3327 - DNA, 411 bp, Muscodor strobelii
  misc_feature: SGI cDNA ID NO. 560763
  misc_feature: Encodes the peptide sequence at SEQ ID NO 3328
atgtctgtcggaggctgcttctgcggaaacgtccgctactcttacgagggtgatgctcttggcaaggccctctgccactgcaaagactgccacaaaatcaccggcagcacatacagcacaaacatcatcgtctcaggcgacggattcaaagtcacctctggcacacccaaggagtacaccgtcacagctagctccggccgaaagatcacatcgcacttctgcggtgattgcggcagcactttgtggcgatcaggcgatgctttcggccccaacaagtgtatcaaggtcggcactatcgacgaccctgaggcttttgagaaggcgaagcccggcgtcgaattgttcactgctgatcgtatcagctgggttcctgccactgctgatactcagcagttcccgcagatgatgtaa

SEQ ID NO: 3328 - protein, 136 aa, Muscodor strobelii
  misc_feature: SGI Peptide ID NO. 560763
  misc_feature (23)..(125): Pfam Id: PF04828 Pfam Desc: Glutathione-dependent formaldehyde-activating enzyme
  misc_feature (1)..(135): NCBI GI: 156063298 Blast Desc: SS1G_01765 [Sclerotinia sclerotiorum 1980] gi|154697101|gb|EDN96839.1| SS1G_01765 [Sclerotinia sclerotiorum 1980]
  misc_feature (1)..(135): NCBI GI: 169622322 Blast Desc: SNOG_14383 [Phaeosphaeria nodorum SN15] gi|111057134|gb|EAT78254.1| SNOG_14383 [Phaeosphaeria nodorum SN15]
  misc_feature (4)..(131): NCBI GI: 256722643 Blast Desc: NECHADRAFT_85380 [Nectria haematococca mpVI 77-13-4]
  misc_feature (2)..(136): NCBI GI: 159130549 Blast Desc: DUF636 domain protein [Aspergillus fumigatus A1163]
  misc_feature (1)..(132): NCBI GI: 146324087 Blast Desc: DUF636 domain protein [Aspergillus fumigatus Af293] gi|129558075|gb|EAL91905.2| DUF636 domain protein [Aspergillus fumigatus Af293]
  misc_feature (1)..(131): NCBI GI: 121715057 Blast Desc: DUF636 domain protein [Aspergillus clavatus NRRL 1] gi|119403294|gb|EAW13712.1| DUF636 domain protein [Aspergillus clavatus NRRL 1]
  misc_feature (1)..(135): NCBI GI: 76057317 Blast Desc: [Aspergillus niger]
  misc_feature (4)..(135): NCBI GI: 146323177 Blast Desc: DUF636 domain protein [Aspergillus fumigatus Af293] gi|129556503|gb|EAL86481.2| DUF636 domain protein [Aspergillus fumigatus Af293] gi|159128348|gb|EDP53463.1| DUF636 domain A1163]
  misc_feature (1)..(124): NCBI GI: 255949044 Blast Desc: Pc22g13630 [Penicillium chrysogenum Wisconsin 54-1255] gi|211592306|emb|CAP98651.1| Pc22g13630 [Penicillium chrysogenum Wisconsin 54-1255]
  misc_feature (1)..(136): NCBI GI: 255938594 Blast Desc: Pc14g00730 [Penicillium chrysogenum Wisconsin 54-1255] gi|211584688|emb|CAP74214.1| Pc14g00730 [Penicillium chrysogenum Wisconsin 54-1255]
MSVGGCFCGNVRYSYEGDALGKALCHCKDCHKITGSTYSTNIIVSGDGFKVTSGTPKEYTVTASSGRKITSHFCGDCGSTLWRSGDAFGPNKCIKVGTIDDPEAFEKAKPGVELFTADRISWVPATADTQQFPQMM

SEQ ID NO: 3329 - DNA, 1067 bp, Muscodor strobelii
  misc_feature: SGI EST ID NO. CUFF.8724.1
  misc_feature: Variant of the nucleotide sequence at SEQ ID NO 3327
taaaagtattgtatcgctgcttaacatgcttacatggatcatcgatgatatgatagtcggcttatcgaacctaattgagttctgggtaacgggatgaggaagctcgaattgagggttggagtatataaagaatgaaggtgccgctcctcaattgatgggctttaattgttcctctctttatccaaagccaatcccaagatttcaagacttgaactttatttgctcccaccaacaaacctcacgtaactccaatctaacttcaacatgtctgtcggaggctgcttctgcggaaacgtccgctactcttacgagggtgatgctcttggcaaggccctctgccactgcaaagactgccacaaaatcaccggcagcacatacagcacaaacatcatcgtctcaggcgacggattcaaagtcacctctggcacacccaaggagtacaccgtcacagctagctccggccgaaagatcacatcgcacttctgcggtgattgcggcagcactttgtggcgatcaggcgatgctttcggccccaacaagtgtatcaaggtcggcactatcgacgaccctgaggcttttgagaaggcgaagcccggcgtcgaattgttcactgctgatcgtatcagctgggttcctgccactgctgatactcagcagttcccgcagatgatgtaaatggttgatcaaaatgggacggggaaaagttgcggtttaggctcaaatctggttcgattgatgcccggttctggcgtgtgaattgcttggtaggatgggcatggcggggcgaggcgaggcgtcgaggcgaggcgtcgaggcgagtgtatcgtacgttgagttggtgtctggttacgagaagcactggtgtagatatcgaaatctagcaaattccgtctgtatgccaagcggcgacgatgtttcaaatctcgtattcagcctcactagtagtatactgttgtcacatgaccatgctattcggttgaccgaaacccgtttttatgtcctcagcttggtcgatctcgatgctagtcaaagcgtcatgtgatgggaagtcagaacctcggtttttg

SEQ ID NO: 3330 - DNA, 2481 bp, Muscodor strobelii
  misc_feature: SGI cDNA ID NO. 560764
  misc_feature: Reduced expression when VOC is produced
  misc_feature: Encodes the peptide sequence at SEQ ID NO 3331
atgtcggtagtcaaaacgcatcgtcctgtcgtttcgaggccagctgcatctgctttcctcacatcttgcgaaccaggctacaacccgaaacctcacccaaaatcagcagcagcctacgtgcactcgatgagtgctttcggaggcggaaccgatctcggtgtcgtcgaagaggacggaggcgccgacatacccgacatcccaccaaggccaccaccacgcaagtcgaggctcttgtcttcactcaaaccaggcatgcctcccatcatcaagccattgcatcagacaaactcgaccgaggatgccgattgcagcccgccccagtcgccactaccacaagtgtcaatcaagtcacaacgtgctatccacaaccagtttgacggccgtgacaccactcacgacccagagtcttatcacgatcctatgatcagtcgctccccttccgttgcgcccaagagtatcatgtctaaatctatacactcccgctctggctccccggactcctctgcttacggcaacggacaaacaggactggttcctctccaaactcatgccgcagctgaacatgacggtcttgagcccctagccgaagaagaaatcgacccggcgtcttttgatctggtcatccccgcgtctgcccctgggcagcagtattccctcgaagtgcagtcagagcagttgttcagtcctgaacatctcactctcatttttgaagatcctgtactgcttcagcgcttcacaaacttcatatataaattccgaccaagtgctatacccttgcttgaatactaccaagataccaagaaggctctcaaggctattgaatacgccaacgccatcgtacgaggtctacagcctatgaaggatctgacttattcgtcactcctaccacaccccaccatgaacaaggtcttacaagaaaaggcggacaaggcgtttgagacgctcaccaaccaagaactgccggcttacatcacacactcgtacatccagaccgtaagcacaaccatcaaacgacgaatcgccgacacattaccgcccaacttgagggagatgtcggagggtctggccgaggttttctgtctcactgatccatcgcgacgcgacaatcccatcatctttgcgagtgaggaattccacaagacaacgcaatatggtgtgtctgtcgcccggatcagggagaaactcaatgctggcaaggaacattgcgagacattccttaactaccgccgcgatggacagccctttatgaatcttctcatggtcgcccccctgtatgattctagaggggtggtacgatatcatatcggcgcgcaggtcgatatctctggccttgtacgggaatgttcgggctttaagtcattagcacgcctgattgaacgtgaaaatgcggtggaccgtgatgatgccgcagctcgccccgtcaagattcacagccgaccaaatgagcagatagccaacggaggtaaagcaccgagtgccactgctcctttgagtaacggtcatcataaggacgaacacgacgaggaagggctacaagagtttcgtgatctcgcctccatgttctctctccaagagttgaagactgtgcgcgagcaaggcggctccatacaccgcattcaacaacaaaccgatttgactggccatgagggcatgagtagcaactggaacaagcctcgactgctgatcaaagatgatgtctgtgtgagtcaacgcgactccgaccctcttcccgatgtgatcagcgatgccaaccctacctcactcccggcaccggatgctgatggcagactgtcgggcgtctacgagcactacctcctcgtgcgcccctacccaagcctgcgcattctattcgcgtcgcctaccctgcgactcccgggcatgctgcaaagcaatctcatgtcgcgcattggtggatctcccaaagtgcgcgaggcgattgtgcaggcctttgctggcggcaatggcgtgacagccaaggtgcgctggatcaacaaccgtagtggggtaagccgcggccgctggattcattgtacaccgctcttgggctccaacggcgctgtcggtgtttggatggttgtgctcgttgacgacgagcttgaacctaatattcaggaacccatcaaagctccaccgataaaccaacaccgcgcagctcatggattttacaatgagcccttcgccgcgagtgcagataatctcagcatgacggatagttttgggcacggcggtcttgacgacaggcggtcaagtattgggagtcgtggcggcgatgatgagagttaccagacaacccagagcatgcgggccccaccagtaggtcacaggcggagggtcgctgttaacgatgctggcatgcctgatgctaggagattggctcgacaggcagccgaagacggccgctaccttcgtgaggtcccagttgcgataccgcaccgatcaagctcgttagaggacaatcccgatgattacacgacgctctag

SEQ ID NO: 3331 - protein, 826 aa, Muscodor strobelii
  misc_feature: SGI Peptide ID NO. 560764
  misc_feature (184)..(698): NCBI GI: 46114260 Blast Desc: FG02972.1 [Gibberella zeae PH-1]
  misc_feature (145)..(719): NCBI GI: 256723426 Blast Desc: NECHADRAFT_42185 [Nectria haematococca mpVI 77-13-4]
  misc_feature (63)..(698): NCBI GI: 154291032 Blast Desc: BC1G_15404 [Botryotinia fuckeliana B05.10] gi|150847133|gb|EDN22326.1| BC1G_15404 [Botryotinia fuckeliana B05.10]
  misc_feature (129)..(664): NCBI GI: 256723388 Blast Desc: NECHADRAFT_88949 [Nectria haematococca mpVI 77-13-4] gi|256725161|gb|EEU38527.1| NECHADRAFT_88657 [Nectria haematococca mpVI 77-13-4]
  misc_feature (55)..(698): NCBI GI: 145609331 Blast Desc: MGG_07517 [Magnaporthe grisea 70-15] gi|145016713|gb|EDK01143.1| MGG_07517 [Magnaporthe grisea 70-15]
  misc_feature (160)..(769): NCBI GI: 156037698 Blast Desc: SS1G_12563 [Sclerotinia sclerotiorum 1980] gi|154697971|gb|EDN97709.1| SS1G_12563 [Sclerotinia sclerotiorum 1980]
  misc_feature (113)..(768): NCBI GI: 261360806 Blast Desc: hisactophilin C49S mutant/phototropin PHY3 fusion protein [Verticillium albo-atrum VaMs.102]
  misc_feature (177)..(724): NCBI GI: 189202218 Blast Desc: conserved [Pyrenophora tritici-repentis Pt-1C-BFP] gi|187984544|gb|EDU50032.1| conserved [Pyrenophora tritici-repentis Pt-1C-BFP]
  misc_feature (164)..(712): NCBI GI: 169596152 Blast Desc: SNOG_00829 [Phaeosphaeria nodorum SN15] gi|160701242|gb|EAT92324.2| SNOG_00829 [Phaeosphaeria nodorum SN15]
  misc_feature (202)..(698): NCBI GI: 238506347 Blast Desc: white collar, [Aspergillus flavus NRRL3357] gi|220689088|gb|EED45439.1| white collar, [Aspergillus flavus NRRL3357]
  misc_feature: Useful for introducing or modulating the production of volatile compounds
MSVVKTHRPVVSRPAASAFLTSCEPGYNPKPHPKSAAAYVHSMSAFGGGTDLGVVEEDGGADIPDIPPRPPPRKSRLLSSLKPGMPPIIKPLHQTNSTEDADCSPPQSPLPQVSIKSQRAIHNQFDGRDTTHDPESYHDPMISRSPSVAPKSIMSKSIHSRSGSPDSSAYGNGQTGLVPLQTHAAAEHDGLEPLAEEEIDPASFDLVIPASAPGQQYSLEVQSEQLFSPEHLTLIFEDPVLLQRFTNFIYKFRPSAIPLLEYYQDTKKALKAIEYANAIVRGLQPMKDLTYSSLLPHPTMNKVLQEKADKAFETLTNQELPAYITHSYIQTVSTTIKRRIADTLPPNLREMSEGLAEVFCLTDPSRRDNPIIFASEEFHKTTQYGVSVARIREKLNAGKEHCETFLNYRRDGQPFMNLLMVAPLYDSRGVVRYHIGAQVDISGLVRECSGFKSLARLIERENAVDRDDAAARPVKIHSRPNEQIANGGKAPSATAPLSNGHHKDEHDEEGLQEFRDLASMFSLQELKTVREQGGSIHRIQQQTDLTGHEGMSSNWNKPRLLIKDDVCVSQRDSDPLPDVISDANPTSLPAPDADGRLSGVYEHYLLVRPYPSLRILFASPTLRLPGMLQSNLMSRIGGSPKVREAIVQAFAGGNGVTAKVRWINNRSGVSRGRWIHCTPLLGSNGAVGVWMVVLVDDELEPNIQEPIKAPPINQHRAAHGFYNEPFAASADNLSMTDSFGHGGLDDRRSSIGSRGGDDESYQTTQSMRAPPVGHRRRVAVNDAGMPDARRLARQAAEDGRYLREVPVAIPHRSSSLEDNPDDYTTL

SEQ ID NO: 3332 - DNA, 3677 bp, Muscodor strobelii
  misc_feature: SGI EST ID NO. CUFF.8332.0
  misc_feature: Variant of the nucleotide sequence at SEQ ID NO 3330
catagatcgtccttgtcgtgatcaatcgacgatctctcgatctgtcactgtccactagtagtctctactccctacctcataggccaggttgctagagccaggcactgggactagcgccagacgcgttgagtcgttgacaacttactacaagatacctgacctaaacaatgggcagaaatggaaatcaatcacgaactgcagacaaggacttcggcaattgactgtgcgatcaggaacatggtaaatttggacatgcctgcaatctttatgacgatttctcacttgacgatgggaaccgtcgagtcaagcctcgccttagcgtggataccctcgacatataagtcctgctcgtcactttcttttcccaacgcgctcgccatgaatacgatagatcgcttcgcgccacacgctacacggagagaacgggcctgactagtagggcctgagcagcggtacctcgccaagagcagataccgatcaggtaaaactgagtagagagctttgcaccatgtcggtagtcaaaacgcatcgtcctgtcgtttcgaggccagctgcatctgctttcctcacatcttgcgaaccaggctacaacccgaaacctcacccaaaatcagcagcagcctacgtgcactcgatgagtgctttcggaggcggaaccgatctcggtgtcgtcgaagaggacggaggcgccgacatacccgacatcccaccaaggccaccaccacgcaagtcgaggctcttgtcttcactcaaaccaggcatgcctcccatcatcaagccattgcatcagacaaactcgaccgaggatgccgattgcagcccgccccagtcgccactaccacaagtgtcaatcaagtcacaacgtgctatccacaaccagtttgacggccgtgacaccactcacgacccagagtcttatcacgatcctatgatcagtcgctccccttccgttgcgcccaagagtatcatgtctaaatctatacactcccgctctggctccccggactcctctgcttacggcaacggacaaacaggactggttcctctccaaactcatgccgcagctgaacatgacggtcttgagcccctagccgaagaagaaatcgacccggcgtcttttgatctggtcatccccgcgtctgcccctgggcagcagtattccctcgaagtgcagtcagagcagttgttcagtcctgaacatctcactctcatttttgaagatcctgtactgcttcagcgcttcacaaacttcatatataaattccgaccaagtgctatacccttgcttgaatactaccaagataccaagaaggctctcaaggctattgaatacgccaacgccatcgtacgaggtctacagcctatgaaggatctgacttattcgtcactcctaccacaccccaccatgaacaaggtcttacaagaaaaggcggacaaggcgtttgagacgctcaccaaccaagaactgccggcttacatcacacactcgtacatccagaccgtaagcacaaccatcaaacgacgaatcgccgacacattaccgcccaacttgagggagatgtcggagggtctggccgaggttttctgtctcactgatccatcgcgacgcgacaatcccatcatctttgcgagtgaggaattccacaagacaacgcaatatggtgtgtcgtacgtgttgggtcgcaattgccgatttttgcaaggcccgaagacaaacccttttagtgtcgcccggatcagggagaaactcaatgctggcaaggaacattgcgagacattccttaactaccgccgcgatggacagccctttatgaatcttctcatggtcgcccccctgtatgattctagaggggtggtacgatatcatatcggcgcgcaggtcgatatctctggccttgtacgggaatgttcgggctttaagtcattagcacgcctgattgaacgtgaaaatgcggtggaccgtgatgatgccgcagctcgccccgtcaagattcacagccgaccaaatgagcagatagccaacggaggtaaagcaccgagtgccactgctcctttgagtaacggtcatcataaggacgaacacgacgaggaagggctacaagagtttcgtgatctcgcctccatgttctctctccaagagttgaagactgtgcgcgagcaaggcggctccatacaccgcattcaacaacaaaccgatttgactggccatgagggcatgagtagcaactggaacaagcctcgactgctgatcaaagatgatgtctgtgtgagtcaacgcgactccgaccctcttcccgatgtgatcagcgatgccaaccctacctcactcccggcaccggatgctgatggcagactgtcgggcgtctacgagcactacctcctcgtgcgcccctacccaagcctgcgcattctattcgcgtcgcctaccctgcgactcccgggcatgctgcaaagcaatctcatgtcgcgcattggtggatctcccaaagtgcgcgaggcgattgtgcaggcctttgctggcggcaatggcgtgacagccaaggtgcgctggatcaacaaccgtagtggggtaagccgcggccgctggattcattgtacaccgctcttgggctccaacggcgctgtcggtgtttggatggttgtgctcgttgacgacgagcttgaacctaatattcaggaacccatcaaagctccaccgataaaccaacaccgcgcagctcatggattttacaatgagcccttcgccgcgagtgcagataatctcagcatgacggatagttttgggcacggcggtcttgacgacaggcggtcaagtattgggagtcgtggcggcgatgatgagagttaccagacaacccagagcatgcgggccccaccagtaggtcacaggcggagggtcgctgttaacgatgctggcatgcctgatgctaggagattggctcgacaggcagccgaagacggccgctaccttcgtgaggtcccagttgcgataccgcaccgatcaagctcgttagaggacaatcccgatgattacacgacgctctagcaaaagtttcaatctcttgtcgatgttaggagcggaagaagtatcctgagttgcctgacgcactcatatcaatcacgacaatcgggtttcggacttggacgtgctcaaaccagcagtctattgtatggcgatggcacggctgtcatgatcaagactcgcagagcagtcgtcttgaatgctacgaaacctatggatgggataaaggcgggggcaaaacacactcaaagctgccttttggtttggttttactcatattttggctttgctgctcccgagtaaagaagagcaggggaggtgacgaattgactggacggtgatataccctgggaccatttccttttacatatataatacactcccgagccgcagatctgttccattatctccgttttattagcatttagcttccgaggttggattgcgtcctcatttatattagccatgtggtgtatttgtcttgattgtgttgattactctgtatgtttggctaattttaatgcgttgggggttggcattggcgaaagggaggtgtagatagatcggtgtacctacctgcatacatgaggtacctatgtatgtgtacatgatgagcttgattttttttaatctgcctcttggttaataaacggca

SEQ ID NO: 3333 - DNA, 480 bp, Muscodor strobelii
  misc_feature: SGI cDNA ID NO. 560765
  misc_feature: Encodes the peptide sequence at SEQ ID NO 3334
atgttcaaccaacctgaggcagcaaagaagatcatcttctgctctgctcccgatgctggcaatctcagtccaggcgacgctgcaacgtacgttccagccgggaccagcgctgaatacctttttcgcatcggcactgccactgctaacaacatggcgtggccacaggtcggcggacacttgatgcaatacgacagctctccaaaatctggctcgtcgatcgctacggccttagcagcgggcttcgcagcgctgctgattcacgtcgtgcgcatggctgtaatccggacatatcaacatgacagagagggcaagaacgacaacagcatcatcgaactcgcgtccctcgcggctatccagtcacttgaaaatatgcgcaagacgtttgtctgtagggccaaagaccgaagtatgtatatgcttccagcaactttgagcacgaagcgaaccagctcccaggatgctgatgagcccgagatttag

SEQ ID NO: 3334 - protein, 159 aa, Muscodor strobelii
  misc_feature: SGI Peptide ID NO. 560765
  misc_feature (11)..(126): NCBI GI: 46133981 Blast Desc: FG09130.1 [Gibberella zeae PH-1]
  misc_feature (11)..(91): NCBI GI: 85110713 Blast Desc: NCU08734 [Neurospora crassa OR74A] gi|28925280|gb|EAA34359.1| [Neurospora crassa OR74A] gi|38524226|emb|CAE75692.1| related to microbial serine crassa]
MFNQPEAAKKIIFCSAPDAGNLSPGDAATYVPAGTSAEYLFRIGTATANNMAWPQVGGHLMQYDSSPKSGSSIATALAAGFAALLIHVVRMAVIRTYQHDREGKNDNSIIELASLAAIQSLENMRKTFVCRAKDRSMYMLPATLSTKRTSSQDADEPEI

SEQ ID NO: 3335 - DNA, 1371 bp, Muscodor strobelii
  misc_feature: SGI cDNA ID NO. 560767
  misc_feature: Elevated expression when VOC is produced
  misc_feature: Encodes the peptide sequence at SEQ ID NO 3336
atgcataagtttcggcagaacgggtatcatcacgccaatggaaatggctatcccaacggccatcatcacaccaatggccacacgaacggacataccaatgggtactccaacggaaacgccgtcgcgcccgtcgacgacgtcgcacatgagaacatgatcaaatacgtctcagagctcatagtatgcgacatccagggaaacatgtcgagcgagttcctgcggcaagtccacgcttgcaagaagagcggcttggcaccgcacgagaaagccgagcggatgcgcgtcgtgcgcgacatgcggaagacgctagagcggctgacggaggagatggggcagaagttctatgaagagtatcgcatcagaccgaaagttggtcgttggtacgactcctggttgcttaatgagccccctcaatttcttcggtgggaacaggagtggggattcacgccagacgacggtttattgactatcgatggacacagcatggctggtagcatggacgggagtatgtacggcgcgcgagccaaggtcgcatacaaagagacgcatacccgacatgtggatgagcggttcctcgatatacccgaagttgatgacatccccgaggaggaagagttcgtcccagagacgaatgggcattacgaacctacgctgccggagtacaatcctaatgcgcccgtgactgagaagatgaacgatgcgccaatactgagcgtcgggagatgcgattgtggtgcagatcatgatggatcagaggagcacgcacccactaaatcttgccgggatggatgcgtctgcgccatgcagggctatggctgtatagcgacatgcggatgcgacgaaacatgcagcaacccttttaacagtctcgcgcttgatcacatcttagggaccgatgcgaacacgggcgcaccgcagaagccaagcccatgcttcatttcattcgccctgaaacacgattcggccagcactctcacgctggactacctatttgagcacttactgggaggacttgagatagtccccgagggagcatgcgaagctattgacgcgtggcgggtgaagtgggatacgagcatcagtggggacgacgccgagaaacagacggaagagctgcagcgggatctgctgaggataggtcttggagctgaccacggagcgtgcttcttctcgttctgccaccccaaccacggtcgggtgggaagctggcagcaggatgcgttgatgtggcactgcaaggactgcgcgagctgcaacgagaggcgagagtggcactgtgagaactgcaacaactgcacattcgggctggcagtgccttgcggtggctgtggaggtgtatcaagctcgtatcataccgagccgcgggagtaa

SEQ ID NO: 3336 - protein, 456 aa, Muscodor strobelii
  misc_feature: SGI Peptide ID NO. 560767
  misc_feature (4)..(40): NCBI GI: 116201723 Blast Desc: CHGG_08746 [Chaetomium globosum CBS 148.51] gi|88177264|gb|EAQ84732.1| CHGG_08746 [Chaetomium globosum CBS 148.51]
  misc_feature: Useful for introducing or modulating the production of volatile compounds
MHKFRQNGYHHANGNGYPNGHHHTNGHTNGHTNGYSNGNAVAPVDDVAHENMIKYVSELIVCDIQGNMSSEFLRQVHACKKSGLAPHEKAERMRVVRDMRKTLERLTEEMGQKFYEEYRIRPKVGRWYDSWLLNEPPQFLRWEQEWGFTPDDGLLTIDGHSMAGSMDGSMYGARAKVAYKETHTRHVDERFLDIPEVDDIPEEEEFVPETNGHYEPTLPEYNPNAPVTEKMNDAPILSVGRCDCGADHDGSEEHAPTKSCRDGCVCAMQGYGCIATCGCDETCSNPFNSLALDHILGTDANTGAPQKPSPCFISFALKHDSASTLTLDYLFEHLLGGLEIVPEGACEAIDAWRVKWDTSISGDDAEKQTEELQRDLLRIGLGADHGACFFSFCHPNHGRVGSWQQDALMWHCKDCASCNERREWHCENCNNCTFGLAVPCGGCGGVSSSYHTEPRE

SEQ ID NO: 3337 - DNA, 2904 bp, Muscodor strobelii
  misc_feature: SGI EST ID NO. CUFF.8448.1
  misc_feature: Variant of the nucleotide sequence at SEQ ID NO 3335
aaacaggagtctgtagtaaggtctacgctgtgtgttgcaggaacatatcacatttttgggctgaatgccgatcagagtgctcaaggcgtttcacggggaaacgtggatgtgacggtatagcaaagtagattattcaccgcctaagtagacgaagaaggaatataccgagcttttatacagtatgctatctgataattcgaaatatagttagaagaaggatcgatgcaagcatcggtaacagggttcaagtcgcccgtaaattgacacagagcatcgcgaatccttctagaaaacatctcggaggttgccggccggaatgcgaaattgaaacacgagccacctgtaattttaccagcaaagaaagactgcagccattagggatatttcacgatcggaatgctcggttgctagtatgtcgtaaaccagaaacaaggactcgttgaagatgtgtgtaacttcaactttgtaagagttggataatcaactgatctgacatcaaaatgcaaatgaacctgcatatctgacgtcaatcccaccctatcacagcatacgtcgtgccatgcgaccatataatttgagaaatccgcgtaaaaccacacatctcaaacctacctcatacaaacgaattgcttaaccccgagatcagagtcaagaccttccttgcgcgacgttgggccgttggactaagtgcatttttcaggtcaccgtcgggcgggcggccagctaattactggtgcgatgctgactgtttctccccaaaacagagcgcggcaggatcggcgcaggggctgcgctgacggtatttataggactagtttgacaaatcatcgcctacaggctgccagcaaaacttgagctgcgatatttgggattttgcggccgcaatttgagaattgcgcgcacgtggtggggaaatgtgtcttttcgatcttcctttttgaaactgcgactagatttccctggcttttactattgtcgcttcgtttttgctatgagatcgtttgttgtccttgtttgtttctattgatacccgtagtatttcggcttcatgtgcgacggcctgagcgtgagattaattggcgcggatcgtatcgtgatagacagcgggaagagcaagcgggtcgatcggatcgacaataagcggcaatctggttctaccaatttctcatctcataactctaatctcatcaagatgcataagtttcggcagaacgggtatcatcacgccaatggaaatggctatcccaacggccatcatcacaccaatggccacacgaacggacataccaatgggtactccaacggaaacgccgtcgcgcccgtcgacgacgtcgcacatgagaacatgatcaaatacgtctcagagctcatagtatgcgacatccagggaaacatgtcgagcgagttcctgcggcaagtccacgcttgcaagaagagcggcttggcaccgcacgagaaagccgagcggatgcgcgtcgtgcgcgacatgcggaagacgctagagcggctgacggaggagatggggcagaagttctatgaagagtatcgcatcagaccgaaagttggtcgttggtacgactcctggttgcttaatgagccccctcaatttcttcggtgggaacaggagtggggattcacgccagacgacggtttattgactatcgatggacacagcatggctggtagcatggacgggagtatgtacggcgcgcgagccaaggtcgcatacaaagagacgcatacccgacatgtggatgagcggttcctcgatatacccgaagttgatgacatccccgaggaggaagagttcgtcccagagacgaatgggcattacgaacctacgctgccggagtacaatcctaatgcgcccgtgactgagaagatgaacgatgcgccaatactgagcgtcgggagatgcgattgtggtgcagatcatgatggatcagaggagcacgcacccactaaatcttgccgggatggatgcgtctgcgccatgcagggctatggctgtatagcgacatgcggatgcgacgaaacatgcagcaacccttttaacagtctcgcgcttgatcacatcttagggaccgatgcgaacacgggcgcaccgcagaagccaagcccatgcttcatttcattcgccctgaaacacgattcggccagcactctcacgctggactacctatttgagcacttactgggaggacttgagatagtccccgagggagcatgcgaagctattgacgcgtggcgggtgaagtgggatacgagcatcagtggggacgacgccgagaaacagacggaagagctgcagcgggatctgctgaggataggtcttggagctgaccacggagcgtgcttcttctcgttctgccaccccaaccacggtcgggtgggaagctggcagcaggatgcgttgatgtggcactgcaaggactgcgcgagctgcaacgagaggcgagagtggcactgtgagaactgcaacaactgcacattcgggctggcagtgccttgcggtggctgtggaggtgtatcaagctcgtatcataccgagccgcgggagtaaggggatggatatatccatacaagaggggaattggtgattcaaagagataccagagcgacaagatttgaagttccgaatgactttcgagggcgtcttgcatatgggtgcggggatgttttgagcgtcagcattatcgatggtctgtttcgaccagcagcttcacaggctatgaagtcgatactctttttttcgctgtatctagttgagtgctaagagtatataatattccattttgacgattaccagccctttggtgtgttttgaccacaacgagactgagattggccataggcgggaagctcgaatcacagcatccaaagagcaggataagtacacagagt

SEQ ID NO: 3338 - DNA, 1947 bp, Muscodor strobelii
  misc_feature: SGI cDNA ID NO. 560768
  misc_feature: Encodes the peptide sequence at SEQ ID NO 3339
atggagtctaacaccgatgatcaaagcaaagatctttatcgtattgtgaccgccgatggccccgacagcataagactgatcactctgtttcccggtgctctcaccgacaagatcctcagatgcaaagtcagctgcgcagacctttctaccaacccacaattcgaggcgctctcgtatgtttggggcaagccggccttcgacaagacaatcatttgcaatgagaagataccgttcaagatcactagtagcctatactatgtcttgatgcgcctgcgcgacgtagacaagccccgaactttttgggtcgaccagatctgcatcaaccaagccagcaatgtggacagaagcgcacaagtggctcgcatgacgcggatttacagtggatgccagaacacgattgtgtggcttagcgatgtccctaggatgcaactcaaattcatcgacttcgttcagacgctgtccagagcacagaagctgcagtacaaagacaagttaattatgagcaatggagattcgagtacattacagctttccgagatggatgccaagcaaaagaagcgatatgggcttccggagtggacagactatcgctggaagctcttgctatacatgtacgcatccgtgtggatgcgacggacttggatcgtgcaagaagtctcgcttcctccgaaagtagatgttctaattggtcctatcataatggattggcacagcttctcggctcttctgatctacgcggaatctttaaaggtcacggggctcgacttcgcatcgctgagttcctggagtgcttttcgagcccttgcggctaggaggatgcgaacacagcagcgagaattcagttctctggctgatctacttctcgagcatcgtactggcaaagccacagatgcgcgagatcgaatattcgggatgcagggtcttgcagccgagcgagaagagcttcccctagccgattatgccgccactgctgccagcgtcttcaccgatgcgactgttcgaatgtttcgtatgtcagggaaccttgatattcttgggctggtcggatctgatcggccagaccgcccagaagatctgccttcgtgggtgcctgattatggtgcgcctctcggaccgcaccctatatcaaggaaaggcatgatcttgagctcggagagccgagaggtatctgttccattcgtagcaagcggcaaacgagagcttttattcaacatcaaggggcaagcgcttgtgctcccagctgtagtcattggcgagatttacgaactggctagttgtttcgtccgtcaacgagatgacgacatagatctacaacgtgtacttttcatgattaatctgcagcatgccattcggtctttgaaaaacgagatcgacgtcgctaatacacttttatcatgggacaagctcttactcagagctacgaaaagacgtcaaatctatgagcccacgaagcaaagcacgcaagacgcattcttcatgacgtattatgaagggcaggttgaagaagtaatagacaaatatcgcgctgtatacgccgcagatagatccttccagacgatttggagggttctgactttaggtcagggatgcacatgccttccggtcgctatacctctcattttcatctatgcaatcctcgtgcagatcagcaagagcctttggagctttctagggtacccatcaatctcaatcgttcgcgaacacggggaaatggtgaaagctgctactgacaggctgctttgcactacgaggaatggcttagttggactcgcaccgccgacttcaatccgaggagataaggttgcgctcctaaaaggtggcagagttccagtagttctacgccgcgagaccgatggtttcagattgttgggcgaggcatacgttcatggtgctatgcatggcgaaatgttcgatactgagaaagttgagatcatcacaattaggtaa

SEQ ID NO: 3339 - protein, 648 aa, Muscodor strobelii
  misc_feature: SGI Peptide ID NO. 560768
  misc_feature (54)..(218): Pfam Id: PF06985 Pfam Desc: Heterokaryon incompatibility protein (HET)
  misc_feature (97)..(137): Pfam Id: PF06985 Pfam Desc: Heterokaryon incompatibility protein (HET)
  misc_feature (24)..(643): NCBI GI: 256721799 Blast Desc: NECHADRAFT_53281 [Nectria haematococca mpVI 77-13-4]
  misc_feature (22)..(635): NCBI GI: 256722306 Blast Desc: NECHADRAFT_87938 [Nectria haematococca mpVI 77-13-4]
  misc_feature (4)..(632): NCBI GI: 256722966 Blast Desc: NECHADRAFT_86875 [Nectria haematococca mpVI 77-13-4]
  misc_feature (24)..(371): NCBI GI: 46139489 Blast Desc: FG11259.1 [Gibberella zeae PH-1]
  misc_feature (36)..(647): NCBI GI: 46114550 Blast Desc: FG03117.1 [Gibberella zeae PH-1]
  misc_feature (23)..(642): NCBI GI: 171678763 Blast Desc: protein product [Podospora anserina] gi|170937451|emb|CAP62109.1| protein product [Podospora anserina]
  misc_feature (46)..(647): NCBI GI: 169594972 Blast Desc: SNOG_00218 [Phaeosphaeria nodorum SN15] gi|111070593|gb|EAT91713.1| SNOG_00218 [Phaeosphaeria nodorum SN15]
  misc_feature (24)..(648): NCBI GI: 119179507 Blast Desc: CIMG_08498 [Coccidioides immitis RS]
  misc_feature (15)..(643): NCBI GI: 30315956 Blast Desc: HET6_NEUCR RecName: Full=Heterokaryon incompatibility protein 6, OR allele; Short=Het-6(OR) gi|6578941|gb|AAF18141.1| heterokaryon incompatibility protein [Neurospora crassa] protein
  misc_feature (23)..(366): NCBI GI: 256721874 Blast Desc: NECHADRAFT_88090 [Nectria haematococca mpVI 77-13-4]
MESNTDDQSKDLYRIVTADGPDSIRLITLFPGALTDKILRCKVSCADLSTNPQFEALSYVWGKPAFDKTIICNEKIPFKITSSLYYVLMRLRDVDKPRTFWVDQICINQASNVDRSAQVARMTRIYSGCQNTIVWLSDVPRMQLKFIDFVQTLSRAQKLQYKDKLIMSNGDSSTLQLSEMDAKQKKRYGLPEWTDYRWKLLLYMYASVWMRRTWIVQEVSLPPKVDVLIGPIIMDWHSFSALLIYAESLKVTGLDFASLSSWSAFRALAARRMRTQQREFSSLADLLLEHRTGKATDARDRIFGMQGLAAEREELPLADYAATAASVFTDATVRMFRMSGNLDILGLVGSDRPDRPEDLPSWVPDYGAPLGPHPISRKGMILSSESREVSVPFVASGKRELLFNIKGQALVLPAVVIGEIYELASCFVRQRDDDIDLQRVLFMINLQHAIRSLKNEIDVANTLLSWDKLLLRATKRRQIYEPTKQSTQDAFFMTYYEGQVEEVIDKYRAVYAADRSFQTIWRVLTLGQGCTCLPVAIPLIFIYAILVQISKSLWSFLGYPSISIVREHGEMVKAATDRLLCTTRNGLVGLAPPTSIRGDKVALLKGGRVPVVLRRETDGFRLLGEAYVHGAMHGEMFDTEKVEIITIR

SEQ ID NO: 3340 - DNA, 280 bp, Muscodor strobelii
  misc_feature: SGI EST ID NO. CUFF.8365.0
  misc_feature: Variant of the nucleotide sequence at SEQ ID NO 3338
gcaagacgcattcttcatgacgtattatgaagggcaggttgaagaagtaatagacaaatatcgcgctgtatacgccgcagatagatccttccagacgatttggagggttctgactttaggtcagggatgcacatgccttccggtcgctatacctctcattttcatctatgcaatcctcgtgcagatcagcaagagcctttggagctttctagggtacccatcaatctcaatcgttcgcgaacacggggaaatggtgaaagctgctactgacaggctgctt

SEQ ID NO: 3341 - DNA, 1245 bp, Muscodor strobelii
  misc_feature: SGI cDNA ID NO. 560769
  misc_feature: Encodes the peptide sequence at SEQ ID NO 3342
atgttcccaacttctctaataagggcggcgatcctcgctccgatcgttttctttgtctacgcggtaagattcgttctttggtattatcgagctcgaaaacagttccctggcccggctgtaaagagcgtatggaacggtaatcttgatgaagtcctgcaaaacgatatccatgagaagtggagaagttggcacaatagtcacggcccggttttccaaacatggaacggcccgctgtcacgaaccatctatgttggcgaccccgccatggttgccaagattctgaatagtaattggcccaaagcgccagggcagtacgaaggattcaagccactaagtggtagtgcgcttttcgcgcagatggatcatcagagatggcacacccagagaaaagccttggccccagcatttggccctggggttatcaacactcaggtcaagagtctgaacaaatacttgaaatcttatagagtcgccctgtccaaagcagcagcatcgggttctgtgctcgacttgtcgcaactaaatgttcttcttacccttgactttgttggcgagaccgcttttggtatcgatctgaatgctctagaacaagggtccaactgtcgcgtgcttgctttatttgaagacattctacccgagcttatgaaatgtggcctatttcctcttcgcgcaaaagtgccggtatgctcaagtactaggcgtatgcattctgccatcgctgagctacgcggattggccaggagtgctgtttctggtgtgcgtgcgaaggaaaatgccagcttactcccagtcgagaagccaggaaaacggatattcgagatccttgcacaacagcgagatgctagtggggcttataccttcagcaccagtgaactcgtcgacaattatgtcacattcctcgtcgctggcggtgacccaacagcgcatacaatcacttttgctatctatgaacttgttatgcatcgcgacaccaatatttggggtccagacgccaacgcatttaatccagagcgctgggcaaacggcgtaggcgcgccgcaaccaggatcctttttcccattctcatacggcccaagaaattgcctcgggcaaggattagctatgttagagatgtcattggctattgcgacattgttccggtggtatgacttgacattcgacgacggatttgaaatggagttccttcccagtttcacgatgtgcgccaaaaacggtctcatgcttcgggttcaagaaagaatctag

SEQ ID NO: 3342 - protein, 414 aa, Muscodor strobelii
  misc_feature: SGI Peptide ID NO. 560769
  misc_feature (36)..(409): Pfam Id: PF00067 Pfam Desc: Cytochrome P450
  misc_feature (320)..(409): Pfam Id: PF00067 Pfam Desc: Cytochrome P450
  misc_feature (36)..(211): Pfam Id: PF00067 Pfam Desc: Cytochrome P450
  misc_feature (16)..(392): NCBI GI: 189207330 Blast Desc: cytochrome P450 46A1 [Pyrenophora tritici-repentis Pt-1C-BFP] gi|187976092|gb|EDU42718.1| cytochrome P450 46A1 [Pyrenophora tritici-repentis Pt-1C-BFP]
  misc_feature (65)..(409): NCBI GI: 54290257 Blast Desc: cytochrome P450-like [Oryza sativa Japonica Group] gi|54290357|dbj|BAD61161.1| cytochrome P450-like [Oryza sativa Japonica Group]
  misc_feature (15)..(321): NCBI GI: 113674217 Blast Desc: LOC692332 [Danio rerio] gi|95132411|gb|AAI16618.1| Zgc:136808 [Danio rerio]
  misc_feature (65)..(409): NCBI GI: 222618892 Blast Desc: OsJ_02683 [Oryza sativa Japonica Group]
  misc_feature (65)..(409): NCBI GI: 218188701 Blast Desc: OsI_02939 [Oryza sativa Indica Group]
  misc_feature (11)..(318): NCBI GI: 187608754 Blast Desc: LOC100145328 [Xenopus (Silurana) tropicalis] gi|169641874|gb|AAI60534.1| LOC100145328 protein [Xenopus (Silurana) tropicalis]
  misc_feature (6)..(413): NCBI GI: 195381847 Blast Desc: GJ21711 [Drosophila virilis] gi|194144452|gb|EDW60848.1| GJ21711 [Drosophila virilis]
  misc_feature (4)..(321): NCBI GI: 156376624 Blast Desc: [Nematostella vectensis] gi|156217481|gb|EDO38396.1| [Nematostella vectensis]
  misc_feature (24)..(323): NCBI GI: 145236853 Blast Desc: An06g02530 [Aspergillus niger] gi|134075537|emb|CAK39220.1| protein product [Aspergillus niger]
  misc_feature (6)..(324): NCBI GI: 242003790 Blast Desc: cytochrome P-450, [Pediculus humanus corporis] gi|212505743|gb|EEB10123.1| cytochrome P-450, [Pediculus humanus corporis]
  misc_feature (27)..(318): SWISSPROT Homolog: EC 1.14.13.98 Cholesterol 24-hydroxylase
MFPTSLIRAAILAPIVFFVYAVRFVLWYYRARKQFPGPAVKSVWNGNLDEVLQNDIHEKWRSWHNSHGPVFQTWNGPLSRTIYVGDPAMVAKILNSNWPKAPGQYEGFKPLSGSALFAQMDHQRWHTQRKALAPAFGPGVINTQVKSLNKYLKSYRVALSKAAASGSVLDLSQLNVLLTLDFVGETAFGIDLNALEQGSNCRVLALFEDILPELMKCGLFPLRAKVPVCSSTRRMHSAIAELRGLARSAVSGVRAKENASLLPVEKPGKRIFEILAQQRDASGAYTFSTSELVDNYVTFLVAGGDPTAHTITFAIYELVMHRDTNIWGPDANAFNPERWANGVGAPQPGSFFPFSYGPRNCLGQGLAMLEMSLAIATLFRWYDLTFDDGFEMEFLPSFTMCAKNGLMLRVQERI

SEQ ID NO: 3343 - DNA, 619 bp, Muscodor strobelii
  misc_feature: SGI EST ID NO. CUFF.8384.0
  misc_feature: Variant of the nucleotide sequence at SEQ ID NO 3341
gtccagacgccaacgcatttaatccagagcgctgggcaaacggcgtaggcgcgccgcaaccaggatcctttttcccattctcatacggcccaagaaattgcctcgggcaaggattagctatgttagagatgtcattggctattgcgacattgttccggtggtatgacttgacattcgacgacggatttgaaatggagttccttcccagtttcacgatgtgcgccaaaaacggtctcatgcttcgggttcaagaaagaatctagatcaaaaacaaaagttagcgatatgattgtcttcagttcagaatgatgcgaattgattgagtggtggttgtgagatcatatgttccaagccaacacttacttttacggccaaaacgctagcagtatatagaatgtgactggcagtcaagagtcacctaactgtacgataagtacactatgagatctctatggccggaagactattacttagtaacgagtatatcggagcaaacggcgaatgttatgagtgggatacccccgaagacctcttagttcctactggatcttaaacgcttgcacgacattcattgtagcgttcgtcttgtcaaagttcctttcttaggaaagccatgtca

SEQ ID NO: 3344 - DNA, 2979 bp, Muscodor strobelii
  misc_feature: SGI cDNA ID NO. 560770
  misc_feature: Encodes the peptide sequence at SEQ ID NO 3345
atgggtaacgatgtcgagaaagacggtctgcaagccacaagaatatctgtcacggatggtgttgactctgccgactcacaaggaggggatgaaagcattgcgtcaataattgaaccaccagaagatgtcgagggtggcttagcaggctggttgaatgtgctgggctctgtcttggtttacttcacgactttcggcttcatcaatagtttcggatttttccagtcatactacgtgaagggacccctgagctcttacgacccatcagtcattgccttcatcggaactctccaggtatccctgctcttcgtcatgagcccggtcgctgggagtttattcgatgcatatggtctgaagcgtctctacgctggcgctgggttgggttgcaccctggcactcattcttctctcattcagtaggcctggtcagctatgggccccatttttgacacagggggtcttgttcggcttatgctctgcattcggaatccaacctgccctatcagttgcaggccaatacttccagaagcgccgcgcattagccctaggggtagtggcagcaggaagcagcattggtggcgtcgtctttcccttcctgttctcgggcctcattccgattcttggctttgggtggaccatccgccttagcgcgctcatatgcataatattctacgcagttgcaattctcgtgtccaagtcacgccttccgccacagcccctcaagtcggcccgtgatcttctggacttcaatgggtatcgagacgcccgctatagcgtgctcgccctcggcaccttcatcgcgagcttgggcctttacgtgccatattactatatcgagccgtacgctctaacgttgtcaggagtaaaggaatcttccggagttgtcacagccttacttccactcatcaacgccagcagtcttgtcggaagaataacaggtggccaagcggcggacaaactcgggaggctcaacgtgttatggccaatgacgactgtgtccggtatgctatgtttgctgctttggatattcgctactaacattgcgagcgtcattgcttttactctgctatacggctattgttctggcatcttcatttctgtcacaccagcagttgtgggtgagatctctccaaaagagaaacttggagcgcgcattggtgccttcttcggcatcaccgcggtcgcaactcttgcaggaacgccggctgcaggagctttgatccaagaggcgactaagagagctggatacctacccctaattgcctttggtggtgcaacacttcttgttggaggcctacttcagggatcaactcaaatcatcatcaacagaaagcgcttatactataacctgcgagctgagcctgacataagacttgtccatttcaacgatgtttacaacatatgtccagcatcgcatgagcctgttggaggagcagcgaagttccaaagtgtagtgaaacactacaaaagcagtcccgagtttgagggccaatccaggttattaacactattttctggggatgctttcaatccaagtttggagagcatctttacacgaggtcaacaaatggcccagctgttgaatgacatcggagtggacgctgcatgtattgggaatcacgaactcgattttggcgtcggtcgctttgaggaactatcaaaagaatgcaattttccttggctgctggcaaacgttttagatcccgctcttgggaatagtgtcccactgggtaattgtccaaagagcaccatgctcacggccagcaccggaatcaaagtaggtctcatcggagtggtagaagaagaatggcttccaactgtgaatcgtctcccacctaatcttgtatttcgatctgcgtccgagaccgcacttgagctgagcgcaaaattgcgctcagagggtgctgagatcatcatcgcgctcacgcatcaacgcgagcccaacgatatcagactggctcgcgaggccgttggcgcgatagatattattctcgccggtcacgatcatatttacaagcacgaaattgtgtcaggcacgcacattctacgtagcggctcggatttcaagcaactgagctatttggagttacgcaagtctggtagtatccttccaagacaagacaatggatggcaaaagtgggacgtacagattgttcgtcgagacatagactcaagtatccatagcgatatgaaaaccgcgcagtgggtgagagacataacgcaattaatacgtccgcagcttgagcctgttgtagcccagactgctgtgggacttgatgctaggttcgatgtagtgcgtcttcaagagtcgaacatgggaaatctggtgaccgatattttgcgccagtactacaatgctgactgctgcatcatggctgctggcactatacgtggggattgcgtttatccaccaggctccttgacacttggagatatcagaacatgttttcctttcgaagatccctgggttgtgttggagtccagtggccaggccatatgggacgcgcttgaaaccggtgtgagcttataccctgcagccgaaggacgctttcctcaggtatcgggaatgacttttacgtttggccctcaaaaacttccgggatcgcggattgaatctgttagtatagatggtctaccattagcgagggatagaatgtaccgtctctgcacgcgtgactatatggctaggggcaaggacggcttcgcttcgctgttatctacttcgtcgggtggatcgtgcaaggagctcgtctctgcacaagaaggactccgcacatatgaggttctgctaagatacttcgagtcactcgcccaacactcgagagcacaccctaataacgatcggatttcgaatactgaagacattgaggcttcttccgaaaacaccatcaagctcggggacttggcattcaaattcttcacaggaggacatgtctacagaagaatcgagcatcatttccccgttggaacacaacacgcctga

SEQ ID NO: 3345 - protein, 992 aa, Muscodor strobelii
  misc_feature: SGI Peptide ID NO. 560770
  misc_feature (749)..(905): Pfam Id: PF02872 Pfam Desc: 5'-nucleotidase, C-terminal domain
  misc_feature (455)..(670): Pfam Id: PF00149 Pfam Desc: Calcineurin-like phosphoesterase
  misc_feature (56)..(399): Pfam Id: PF07690 Pfam Desc: Major Facilitator Superfamily
  misc_feature (502)..(670): Pfam Id: PF00149 Pfam Desc: Calcineurin-like phosphoesterase
  misc_feature (453)..(973): NCBI GI: 145602783 Blast Desc: MGG_09866 [Magnaporthe grisea 70-15] gi|145011172|gb|EDJ95828.1| MGG_09866 [Magnaporthe grisea 70-15]
  misc_feature (453)..(935): NCBI GI: 242772041 Blast Desc: 5'-nucleotidase, [Talaromyces stipitatus ATCC 10500] gi|218721581|gb|EED20999.1| 5'-nucleotidase, [Talaromyces stipitatus ATCC 10500]
  misc_feature (453)..(935): NCBI GI: 121700396 Blast Desc: 5'-nucleotidase, [Aspergillus clavatus NRRL 1] gi|119396605|gb|EAW07037.1| 5'-nucleotidase, [Aspergillus clavatus NRRL 1]
  misc_feature (453)..(936): NCBI GI: 171676668 Blast Desc: protein product [Podospora anserina] gi|170936401|emb|CAP61058.1| protein product [Podospora anserina]
  misc_feature (453)..(935): NCBI GI: 115492795 Blast Desc: conserved [Aspergillus terreus NIH2624] gi|114197885|gb|EAU39585.1| conserved [Aspergillus terreus NIH2624]
  misc_feature (448)..(935): NCBI GI: 70992913 Blast Desc: 5'-nucleotidase [Aspergillus fumigatus Af293] gi|66848938|gb|EAL89267.1| 5'-nucleotidase, [Aspergillus fumigatus Af293] gi|159130241|gb|EDP55354.1| 5'-nucleotidase,
  misc_feature (448)..(940): NCBI GI: 259485222 Blast Desc: TPA: 5'-nucleotidase, (AFU_orthologue; AFUA_6G14310) [Aspergillus nidulans FGSC A4]
  misc_feature (453)..(935): NCBI GI: 169785088 Blast Desc: [Aspergillus oryzae RIB40] gi|238507668|ref|XP_002385035.1| 5'-nucleotidase, [Aspergillus flavus NRRL3357] gi|83775752|dbj|BAE65872.1| protein product
  misc_feature (399)..(935): NCBI GI: 67538332 Blast Desc: AN5336.2 [Aspergillus nidulans FGSC A4] gi|40743306|gb|EAA62496.1| AN5336.2 [Aspergillus nidulans FGSC A4]
  misc_feature (448)..(935): NCBI GI: 119473307 Blast Desc: 5'-nucleotidase, [Neosartorya fischeri NRRL 181] gi|119406712|gb|EAW16663.1| 5'-nucleotidase, [Neosartorya fischeri NRRL 181]
  misc_feature (454)..(937): SWISSPROT Homolog: EC 3.1.3.5 5'-nucleotidase
  misc_feature (454)..(937): SWISSPROT Homolog: EC 3.1.3.6 3'-nucleotidase
  misc_feature (454)..(937): SWISSPROT Homolog: EC 3.1.4.16 2',3'-cyclic-nucleotide 2'-phosphodiesterase
MGNDVEKDGLQATRISVTDGVDSADSQGGDESIASIIEPPEDVEGGLAGWLNVLGSVLVYFTTFGFINSFGFFQSYYVKGPLSSYDPSVIAFIGTLQVSLLFVMSPVAGSLFDAYGLKRLYAGAGLGCTLALILLSFSRPGQLWAPFLTQGVLFGLCSAFGIQPALSVAGQYFQKRRALALGVVAAGSSIGGVVFPFLFSGLIPILGFGWTIRLSALICIIFYAVAILVSKSRLPPQPLKSARDLLDFNGYRDARYSVLALGTFIASLGLYVPYYYIEPYALTLSGVKESSGVVTALLPLINASSLVGRITGGQAADKLGRLNVLWPMTTVSGMLCLLLWIFATNIASVIAFTLLYGYCSGIFISVTPAVVGEISPKEKLGARIGAFFGITAVATLAGTPAAGALIQEATKRAGYLPLIAFGGATLLVGGLLQGSTQIIINRKRLYYNLRAEPDIRLVHFNDVYNICPASHEPVGGAAKFQSVVKHYKSSPEFEGQSRLLTLFSGDAFNPSLESIFTRGQQMAQLLNDIGVDAACIGNHELDFGVGRFEELSKECNFPWLLANVLDPALGNSVPLGNCPKSTMLTASTGIKVGLIGVVEEEWLPTVNRLPPNLVFRSASETALELSAKLRSEGAEIIIALTHQREPNDIRLAREAVGAIDIILAGHDHIYKHEIVSGTHILRSGSDFKQLSYLELRKSGSILPRQDNGWQKWDVQIVRRDIDSSIHSDMKTAQWVRDITQLIRPQLEPVVAQTAVGLDARFDVVRLQESNMGNLVTDILRQYYNADCCIMAAGTIRGDCVYPPGSLTLGDIRTCFPFEDPWVVLESSGQAIWDALETGVSLYPAAEGRFPQVSGMTFTFGPQKLPGSRIESVSIDGLPLARDRMYRLCTRDYMARGKDGFASLLSTSSGGSCKELVSAQEGLRTYEVLLRYFESLAQHSRAHPNNDRISNTEDIEASSENTIKLGDLAFKFFTGGHVYRRIEHHFPVGTQHA

SEQ ID NO: 3346 - DNA, 1553 bp, Muscodor strobelii
  misc_feature: SGI EST ID NO. CUFF.8435.0
  misc_feature: Variant of the nucleotide sequence at SEQ ID NO 3344
cattaactcgttatccctcttcgctgcttcgatctgcggttcatctacacctttgcggagcattaagcatcttgacactgctatacaagtacaaaggatccttgtatctatcacacaattcatttgtaccttttgccgaccattgctgtgcggcatgggtaacgatgtcgagaaagacggtctgcaagccacaagaatatctgtcacggatggtgttgactctgccgactcacaaggaggggatgaaagcattgcgtcaataattgaaccaccagaagatgtcgagggtggcttagcaggctggttgaatgtgctgggctctgtcttggtttacttcacgactttcggcttcatcaatagtttcggatttttccagtcatactacgtgaagggacccctgagctcttacgacccatcagtcattgccttcatcggaactctccaggtatccctgctcttcgtcatgagcccggtcgctgggagtttattcgatgcatatggtctgaagcgtctctacgctggcgctgggttgggttgcaccctggcactcattcttctctcattcagtaggcctggtcagctatgggccccatttttgacacagggggtcttgttcggcttatgctctgcattcggaatccaacctgccctatcagttgcaggccaatacttccagaagcgccgcgcattagccctaggggtagtggcagcaggaagcagcattggtggccaagcggcggacaaactcgggaggctcaacgtgttatggccaatgacgactgtgtccggtatgctatgtttgctgctttggatattcgctactaacattgcgagcgtcattgcttttactctgctatacggctattgttctggcatcttcatttctgtcacaccagcagttgtgggtgagatctctccaaaagagaaacttggagcgcgcattggtgccttcttcggcatcaccgcggtcgcaactcttgcaggaacgccggctgcaggagctttgatccaagaggcgactaagagagctggatacctacccctaattgcctttggtggtgcaacacttcttgttggaggcctacttcagggatcaactcaaatcatcatcaacagaaagcgcttatagtaagcaaagatgatgatgatgacgatggttaaatcgcgaacattgcagacggtgtggatgcggctcagtgacagctacgtttcattatgcttgtacccgtaggactattctagttcatgtacggaaacatcttacctgctccagatgcttcgtcacggataaagatatcatcaaaagatgaccttgatagattcggcctgccatgagactaggttctacagtttctcaatacatatatctatcgtcgacttgacactgccatagactctctcttgaatccgaatcaactcaccgcagtacggtcgaatcgatcgtgtactttcagttcttggccagtagcctggtgaagttaatactctttgaagaaacattactcctatcgtgtcgttaacacgtcgagttgcatttcgcttgcattttgaca

SEQ ID NO: 3347 - DNA, 3915 bp, Muscodor strobelii
  misc_feature: SGI cDNA ID NO. 560771
  misc_feature: Encodes the peptide sequence at SEQ ID NO 3348
atgcctaatccaaaggcaaattaccatttccatgaagaccaatccctccgcgccgcagacacctcggccaagggctggtttaccgacattcctgagaaagctacagccatactcaaaggcttaagcagttaccatgcaggtggcatcagcggggctgccaaggaggctgttgtgcccctcgacatagacgatcccatgagcaagaagatcaccaaggaaatggtttctatgctctggggttccatgcttcatccgcctcaaagtttccgcggagaaaaacaccagtatcgcactgctgatgggagcaatcacaatgttatgtatccgtggcttggccaagctggaaaaccatacgccaagagtgtccagggcactacagctcagaaaggagctcgaccgcagcctgaagacctcttcgaccttcttatggctcgccctgaaaacgaccacaacgagagcgataccgggatctctagcatgttgctctaccaggccacaatagtgatacacgatgttttcagatccaatgattatgacaagaacatctccgatacttcatcctatctcgacctggctcccctgtacggcaaagaccaggaagcgcaagacactgtccgcactttcagcgaggggcgtttgaaacccgataccttcgctgagcataggctgctaaaccaaccaccagcggtgtctattttccttattatgtataatcgcttccataactacgttgccgagcgactactacagattaacgagggcgatcgattttctctacctgctaattatcgggaccttggcccgaaggagcaggaccaagcccgcaaagaacaggatcaggagctttttcaggtcgctcgcctcgtcacatgtgggctatacgcacaaatcgccatccacgattacctcagaacactcatattaatacattcaaaagacagtccctggacgctcgaccctcgtacttcattccccgatggctatgacaagagaggtttacagcgaggcgagggtaatatggtgtctgtcgagttcaatctgctctatcgtttccacagcccattgtcggaacgcgactgcgactggtcgacggagcttttcaagatgtggctgtccatgggagtcaaggacagtgctaccccggaggaaatccaggcaggtacatatatcacgccagagatgctaaagaatgaggaaattcctgttccgttcatgcaaaagctgatcgcgatgcaaaatgcaaaggctgcgcgtgacacaaaggcattgaaagaaactccatactttccaggaggattcgatcgcgtgggtggcccgagaggagggtttgttttcacccgagacgaggccggcaagttcaatgacaagcaattggtagcggagctcatacgcgcaagcgaagaccctatctgctcatttggctcgcagggaattcccaagatcttcaagtctgtcgagatgataggcatcctgcaggcacgcaagtgggaggtcgcttcgctcaacgagttccgtgctttctttggcatggagcggcacaaaagcttcgaggatatcaatagtgacccatatatccagcagacactgcgagatctttacgacgacgtcgatcaggttgagctgtaccccggtttcgttgtggaaggccagggacgtgcctgcgaccccaacaattcgtgcgggagcggtgcgggaacagccttatggcgtggtattttctccgatgctgtcactctagtccgctccgatcgcttctacactctcgactggaacgtcgactctctcactacctggggcatgaaggagctcacttcagaccccaaaatcaacaagggtgggatgatgtacaagttgtatcaccacgccttccccggcttcttccattacaacgccttacatctgtggcagccttatcacactcctgcaagcaatctcatctttgcgcaagagcaggggcatttgcacaagctcaacattgatgattatgaatatcggttcgacaatgatagtgaagacgtctggcgaatactcgatactaaacggtcggacaacggaaaatatgcaacggacttcaaaaagctgtcgagtatcgacaagtccattagagttgatcagatcgaagggaggcgcaaggaacgtaaccaaaagatgaagacgttaggagcccgttttgcgaaaggagagatcaccaaaaaggagtattatattcaacggaacgcaatgaagcctatacccatgtttcggttacggcgcaggctcggaagagctgatggttatgaaaacagcgatttgagatggcagcggggtggcgagctggccaagcccattagtcgcattcctcaggaggaatctagctacgatgtcatccgttccgccatcctgggccgtcagtcgtgtgtcaactggttgaaccgggacgttggttcagaccatgacatccccgcaggcgcggttcgggaagttatgttgaacaagtttgacaagtgggaagaagctatcgccattctagaagacaatctcttaggcgggcaagaccaagaacagatccttcgcgagtaccttgatgaactagctcagcagattcgactacgcgaggaacgcgattacaacgtgcccaatcacagtggcaccgggaaggtctaccagttggacgtagtgcgcgacttcgcaatacccttcatcgtccgcttcgttgctgacgttcttggtttctgggaaaaaatcaagacacccgaattccccgatcgggagcacgacgagaacgagatatatcaacacatcgtaaactgtcagaattggcgctcttggaatgcagatcaaaccaagatgatgcagcgccgcgaagccttccagaagtcgtcaatgaagctcaaggaacttgccgagttcggggttggccgctggactgccggtctcttcaacttctatgggtacggtcgctcgtacggtagcaagggagacggaagccgggttcatgcgcttcggatgtcttccgttcgcgccattcaggccttgttagccaagtacgaacctgatgtggtcgctgctatcatgctgagcaacgtgctcacaatgacgaacacggcggtcatcaggtttactgaggttcttgcatactttctgcagcccgaaagtaaatcaggagaatcgccacgtagtcataccccacgctcggaactatgggaggcactacaagacctagctaacgtccgggactcggataatgccctcgaagccgcgagggagatcgatggttacgtgcttgaggcttggcgacttggcacaacgctgaagcctgcttacagatacaaccctaaagaagtcggcaacccagtgcaactaagccccggcaaaacgaggaacaaggacggcgacctgaaccaagacgagcttggcaacccggtcattggaccgcggttcgtcgagaaaggtgatctagtcatcatcaatcttcaaaaggctatgcaagacccagatgtatttgttaacccggcctcattcaaccctcgacgtacccgcacggactatctgctatacggacgattcgatagcaaagaaaagctcatgaaagagccctccgtcgccatggtcatgaccattgcggtgcagagtgccatgctcaagcacatggcgcgcctcttgaacatccgcccggcacatgggcgggctggtcgtctcagaaccctgatcgagaaggaccacagatcgaaattagagagagtgatgtacttgaattcacaatggaacgagctgacaccatggcccgcaacttggacactgagatatgatggcgagggcaagggtgcatgggagccaccagcgaaaagattcggcctgtcggatggtatggtcaagttgacggaggagatgcttgacggaatgctcgatgaagctacaaagaggacggcaaaatag

SEQ ID NO: 3348 - protein, 1304 aa, Muscodor strobelii
  misc_feature: SGI Peptide ID NO. 560771
  misc_feature (94)..(617): Pfam Id: PF03098 Pfam Desc: Animal haem peroxidase
  misc_feature (502)..(548): Pfam Id: PF03098 Pfam Desc: Animal haem peroxidase
  misc_feature (1139)..(1171): Pfam Id: PF00067 Pfam Desc: Cytochrome P450
  misc_feature (68)..(709): NCBI GI: 238489785 Blast Desc: prostaglandin G/H synthase 2/cyclooxygenase 2, pgh2/cox2, [Aspergillus flavus NRRL3357] gi|220698518|gb|EED54858.1| prostaglandin G/H synthase 2, flavus
  misc_feature (68)..(709): NCBI GI: 169763822 Blast Desc: [Aspergillus oryzae RIB40] gi|83770839|dbj|BAE60972.1| protein product [Aspergillus oryzae] gi|226442047|gb|ACO57613.1| fatty acid peroxidase ppoD [Aspergillus flavus]
  misc_feature (68)..(661): NCBI GI: 145245942 Blast Desc: An12g01320 [Aspergillus niger] gi|134079931|emb|CAK41061.1| protein product [Aspergillus niger]
  misc_feature (68)..(661): NCBI GI: 115387417 Blast Desc: conserved [Aspergillus terreus NIH2624] gi|114195298|gb|EAU36998.1| conserved [Aspergillus terreus NIH2624]
  misc_feature (70)..(661): NCBI GI: 46111573 Blast Desc: FG02668.1 [Gibberella zeae PH-1]
  misc_feature (69)..(652): NCBI GI: 256726240 Blast Desc: [Nectria haematococca mpVI 77-13-4]
  misc_feature (68)..(644): NCBI GI: 171695494 Blast Desc: protein product [Podospora anserina] gi|170947989|emb|CAP60153.1| protein product [Podospora anserina]
  misc_feature (69)..(692): NCBI GI: 225557208 Blast Desc: fatty acid oxygenase [Ajellomyces capsulatus G186AR]
  misc_feature (69)..(664): NCBI GI: 154316646 Blast Desc: BC1G_04254 [Botryotinia fuckeliana B05.10] gi|150846054|gb|EDN21247.1| BC1G_04254 [Botryotinia fuckeliana B05.10]
  misc_feature (69)..(664): NCBI GI: 156043403 Blast Desc: SS1G_10705 [Sclerotinia sclerotiorum 1980] gi|154695092|gb|EDN94830.1| SS1G_10705 [Sclerotinia sclerotiorum 1980]
MPNPKANYHFHEDQSLRAADTSAKGWFTDIPEKATAILKGLSSYHAGGISGAAKEAVVPLDIDDPMSKKITKEMVSMLWGSMLHPPQSFRGEKHQYRTADGSNHNVMYPWLGQAGKPYAKSVQGTTAQKGARPQPEDLFDLLMARPENDHNESDTGISSMLLYQATIVIHDVFRSNDYDKNISDTSSYLDLAPLYGKDQEAQDTVRTFSEGRLKPDTFAEHRLLNQPPAVSIFLIMYNRFHNYVAERLLQINEGDRFSLPANYRDLGPKEQDQARKEQDQELFQVARLVTCGLYAQIAIHDYLRTLILIHSKDSPWTLDPRTSFPDGYDKRGLQRGEGNMVSVEFNLLYRFHSPLSERDCDWSTELFKMWLSMGVKDSATPEEIQAGTYITPEMLKNEEIPVPFMQKLIAMQNAKAARDTKALKETPYFPGGFDRVGGPRGGFVFTRDEAGKFNDKQLVAELIRASEDPICSFGSQGIPKIFKSVEMIGILQARKWEVASLNEFRAFFGMERHKSFEDINSDPYIQQTLRDLYDDVDQVELYPGFVVEGQGRACDPNNSCGSGAGTALWRGIFSDAVTLVRSDRFYTLDWNVDSLTTWGMKELTSDPKINKGGMMYKLYHHAFPGFFHYNALHLWQPYHTPASNLIFAQEQGHLHKLNIDDYEYRFDNDSEDVWRILDTKRSDNGKYATDFKKLSSIDKSIRVDQIEGRRKERNQKMKTLGARFAKGEITKKEYYIQRNAMKPIPMFRLRRRLGRADGYENSDLRWQRGGELAKPISRIPQEESSYDVIRSAILGRQSCVNWLNRDVGSDHDIPAGAVREVMLNKFDKWEEAIAILEDNLLGGQDQEQILREYLDELAQQIRLREERDYNVPNHSGTGKVYQLDVVRDFAIPFIVRFVADVLGFWEKIKTPEFPDREHDENEIYQHIVNCQNWRSWNADQTKMMQRREAFQKSSMKLKELAEFGVGRWTAGLFNFYGYGRSYGSKGDGSRVHALRMSSVRAIQALLAKYEPDVVAAIMLSNVLTMTNTAVIRFTEVLAYFLQPESKSGESPRSHTPRSELWEALQDLANVRDSDNALEAAREIDGYVLEAWRLGTTLKPAYRYNPKEVGNPVQLSPGKTRNKDGDLNQDELGNPVIGPRFVEKGDLVIINLQKAMQDPDVFVNPASFNPRRTRTDYLLYGRFDSKEKLMKEPSVAMVMTIAVQSAMLKHMARLLNIRPAHGRAGRLRTLIEKDHRSKLERVMYLNSQWNELTPWPATWTLRYDGEGKGAWEPPAKRFGLSDGMVKLTEEMLDGMLDEATKRTAK

SEQ ID NO: 3349 - DNA, 3870 bp, Muscodor strobelii
  misc_feature: SGI EST ID NO. CUFF.8412.0
  misc_feature: Variant of the nucleotide sequence at SEQ ID NO 3347
gggctgccaaggaggctgttgtgcccctcgacatagacgatcccatgagcaagaagatcaccaaggaaatggtttctatgctctggggttccatgcttcatccgcctcaaagtttccgcggagaaaaacaccagtatcgcactgctgatgggagcaatcacaatgttatgtatccgtggcttggccaagctggaaaaccatacgccaagagtgtccagggcactacagctcagaaaggagctcgaccgcagcctgaagacctcttcgaccttcttatggctcgccctgaaaacgaccacaacgagagcgataccgggatctctagcatgttgctctaccaggccacaatagtgatacacgatgttttcagatccaatgattatgacaagaacatctccgatacttcatcctatctcgacctggctcccctgtacggcaaagaccaggaagcgcaagacactgtccgcactttcagcgaggggcgtttgaaacccgataccttcgctgagcataggctgctaaaccaaccaccagcggtgtctattttccttattatgtataatcgcttccataactacgttgccgagcgactactacagattaacgagggcgatcgattttctctacctgctaattatcgggaccttggcccgaaggagcaggaccaagcccgcaaagaacaggatcaggagctttttcaggtcgctcgcctcgtcacatgtgggctatacgcacaaatcgccatccacgattacctcagaacactcatattaatacattcaaaagacagtccctggacgctcgaccctcgtacttcattccccgatggctatgacaagagaggtttacagcgaggcgagggtaatatggtgtctgtcgagttcaatctgctctatcgtttccacagcccattgtcggaacgcgactgcgactggtcgacggagcttttcaagatgtggctgtccatgggagtcaaggacagtgctaccccggaggaaatccaggcaggtacatatatcacgccagagatgctaaagaatgaggaaattcctgttccgttcatgcaaaagctgatcgcgatgcaaaatgcaaaggctgcgcgtgacacaaaggcattgaaagaaactccatactttccaggaggattcgatcgcgtgggtggcccgagaggagggtttgttttcacccgagacgaggccggcaagttcaatgacaagcaattggtagcggagctcatacgcgcaagcgaagaccctatctgctcatttggctcgcagggaattcccaagatcttcaagtctgtcgagatgataggcatcctgcaggcacgcaagtgggaggtcgcttcgctcaacgagttccgtgctttctttggcatggagcggcacaaaagcttcgaggatatcaatagtgacccatatatccagcagacactgcgagatctttacgacgacgtcgatcaggttgagctgtaccccggtttcgttgtggaaggccagggacgtgcctgcgaccccaacaattcgtgcgggagcggtgcgggaacagccttatggcgtggtattttctccgatgctgtcactctagtccgctccgatcgcttctacactctcgactggaacgtcgactctctcactacctggggcatgaaggagctcacttcagaccccaaaatcaacaagggtgggatgatgtacaagttgtatcaccacgccttccccggcttcttccattacaacgccttacatctgtggcagccttatcacactcctgcaagcaatctcatctttgcgcaagagcaggggcatttgcacaagctcaacattgatgattatgaatatcggttcgacaatgatagtgaagacgtctggcgaatactcgatactaaacggtcggacaacggaaaatatgcaacggacttcaaaaagctgtcgagtatcgacaagtccattagagttgatcagatcgaagggaggcgcaaggaacgtaaccaaaagatgaagacgttaggagcccgttttgcgaaaggagagatcaccaaaaaggagtattatattcaacggaacgcaatgaagcctatacccatgtttcggttacggcgcaggctcggaagagctgatggttatgaaaacagcgatttgagatggcagcggggtggcgagctggccaagcccattagtcgcattcctcaggaggaatctagctacgatgtcatccgttccgccatcctgggccgtcagtcgtgtgtcaactggttgaaccgggacgttggttcagaccatgacatccccgcaggcgcggttcgggaagttatgttgaacaagtttgacaagtgggaagaagctatcgccattctagaagacaatctcttaggcgggcaagaccaagaacagatccttcgcgagtaccttgatgaactagctcagcagattcgactacgcgaggaacgcgattacaacgtgcccaatcacagtggcaccgggaaggtctaccagttggacgtagtgcgcgacttcgcaatacccttcatcgtccgcttcgttgctgacgttcttggtttctgggaaaaaatcaagacacccgaattccccgatcgggagcacgacgagaacgagatatatcaacacatcgtaaactgtcagaattggcgctcttggaatgcagatcaaaccaagatgatgcagcgccgcgaagccttccagaagtcgtcaatgaagctcaaggaacttgccgagttcggggttggccgctggactgccggtctcttcaacttctatgggtacggtcgctcgtacggtagcaagggagacggaagccgggttcatgcgcttcggatgtcttccgttcgcgccattcaggccttgttagccaagtacgaacctgatgtggtcgctgctatcatgctgagcaacgtgctcacaatgacgaacacggcggtcatcaggtttactgaggttcttgcatactttctgcagcccgaaagtaaatcaggagaatcgccacgtagtcataccccacgctcggaactatgggaggcactacaagacctagctaacgtccgggactcggataatgccctcgaagccgcgagggagatcgatggttacgtgcttgaggcttggcgacttggcacaacgctgaagcctgcttacagatacaaccctaaagaagtcggcaacccagtgcaactaagccccggcaaaacgaggaacaaggacggcgacctgaaccaagacgagcttggcaacccggtcattggaccgcggttcgtcgagaaaggtgatctagtcatcatcaatcttcaaaaggctatgcaagacccagatgtatttgttaacccggcctcattcaaccctcgacgtacccgcacggactatctgctatacggacgattcgatagcaaagaaaagctcatgaaagagccctccgtcgccatggtcatgaccattgcggtgcagagtgccatgctcaagcacatggcgcgcctcttgaacatccgcccggcacatgggcgggctggtcgtctcagaaccctgatcgagaaggaccacagatcgaaattagagagagtgatgtacttgaattcacaatggaacgagctgacaccatggcccgcaacttggacactgagatatgatggcgagggcaagggtgcatgggagccaccagcgaaaagattcggcctgtcggatggtatggtcaagttgacggaggagatgcttgacggaatgctcgatgaagctacaaagaggacggcaaaatagccatttgatactcgttttagcaggcaagaaaacatctgtaagaatgagcgaagatgtttaagatcaatttgcatagtatatcgtgctaggcgaacggcgtttggat

SEQ ID NO: 3350 - DNA, 2811 bp, Muscodor strobelii
  misc_feature: SGI cDNA ID NO. 560772
  misc_feature: Encodes the peptide sequence at SEQ ID NO 3351
atgtggctgtccatgggagtcaaggacagtgctaccccggaggaaatccaggcaggtacatatatcacgccagagatgctaaagaatgaggaaattcctgttccgttcatgcaaaagctgatcgcgatgcaaaatgcaaaggctgcgcgtgacacaaaggcattgaaagaaactccatactttccaggaggattcgatcgcgtgggtggcccgagaggagggtttgttttcacccgagacgaggccggcaagttcaatgacaagcaattggtagcggagctcatacgcgcaagcgaagaccctatctgctcatttggctcgcagggaattcccaagatcttcaagtctgtcgagatgataggcatcctgcaggcacgcaagtgggaggtcgcttcgctcaacgagttccgtgctttctttggcatggagcggcacaaaagcttcgaggatatcaatagtgacccatatatccagcagacactgcgagatctttacgacgacgtcgatcaggttgagctgtaccccggtttcgttgtggaaggccagggacgtgcctgcgaccccaacaattcgtgcgggagcggtgcgggaacagccttatggcgtggtattttctccgatgctgtcactctagtccgctccgatcgcttctacactctcgactggaacgtcgactctctcactacctggggcatgaaggagctcacttcagaccccaaaatcaacaagggtgggatgatgtacaagttgtatcaccacgccttccccggcttcttccattacaacgccttacatctgtggcagccttatcacactcctgcaagcaatctcatctttgcgcaagagcaggggcatttgcacaagctcaacattgatgattatgaatatcggttcgacaatgatagtgaagacgtctggcgaatactcgatactaaacggtcggacaacggaaaatatgcaacggacttcaaaaagctgtcgagtatcgacaagtccattagagttgatcagatcgaagggaggcgcaaggaacgtaaccaaaagatgaagacgttaggagcccgttttgcgaaaggagagatcaccaaaaaggagtattatattcaacggaacgcaatgaagcctatacccatgtttcggttacggcgcaggctcggaagagctgatggttatgaaaacagcgatttgagatggcagcggggtggcgagctggccaagcccattagtcgcattcctcaggaggaatctagctacgatgtcatccgttccgccatcctgggccgtcagtcgtgtgtcaactggttgaaccgggacgttggttcagaccatgacatccccgcaggcgcggttcgggaagttatgttgaacaagtttgacaagtgggaagaagctatcgccattctagaagacaatctcttaggcgggcaagaccaagaacagatccttcgcgagtaccttgatgaactagctcagcagattcgactacgcgaggaacgcgattacaacgtgcccaatcacagtggcaccgggaaggtctaccagttggacgtagtgcgcgacttcgcaatacccttcatcgtccgcttcgttgctgacgttcttggtttctgggaaaaaatcaagacacccgaattccccgatcgggagcacgacgagaacgagatatatcaacacatcgtaaactgtcagaattggcgctcttggaatgcagatcaaaccaagatgatgcagcgccgcgaagccttccagaagtcgtcaatgaagctcaaggaacttgccgagttcggggttggccgctggactgccggtctcttcaacttctatgggtacggtcgctcgtacggtagcaagggagacggaagccgggttcatgcgcttcggatgtcttccgttcgcgccattcaggccttgttagccaagtacgaacctgatgtggtcgctgctatcatgctgagcaacgtgctcacaatgacgaacacggcggtcatcaggtttactgaggttcttgcatactttctgcagcccgaaagtaaatcaggagaatcgccacgtagtcataccccacgctcggaactatgggaggcactacaagacctagctaacgtccgggactcggataatgccctcgaagccgcgagggagatcgatggttacgtgcttgaggcttggcgacttggcacaacgctgaagcctgcttacagatacaaccctaaagaagtcggcaacccagtgcaactaagccccggcaaaacgaggaacaaggacggcgacctgaaccaagacgagcttggcaacccggtcattggaccgcggttcgtcgagaaaggtgatctagtcatcatcaatcttcaaaaggctatgcaagacccagatgtatttgttaacccggcctcattcaaccctcgacgtacccgcacggactatctgctatacggacgattcgatagcaaagaaaagctcatgaaagagccctccgtcgccatggtcatgaccattgcggtgcagagtgccatgctcaagcacatggcgcgcctcttgaacatccgcccggcacatgggcgggctggtcgtctcagaaccctgatcgagaaggaccacagatcgaaattagagagagtgatgtacttgaattcacaatggaacgagctgacaccatggcccgcaacttggacactgagatatgatggcgagggcaagggtgcatgggagccaccagcgaaaagattcggcctgtcggatggtatggtcaagttgacggaggagatgcttgacggaatgctcgatgaagctacaaagaggacggcaaaatag

SEQ ID NO: 3351 - protein, 936 aa, Muscodor strobelii
  misc_feature: SGI Peptide ID NO. 560772
  misc_feature (134)..(180): Pfam Id: PF03098 Pfam Desc: Animal haem peroxidase
  misc_feature (771)..(803): Pfam Id: PF00067 Pfam Desc: Cytochrome P450
  misc_feature (75)..(284): NCBI GI: 256726308 Blast Desc: NECHADRAFT_44108 [Nectria haematococca mpVI 77-13-4]
  misc_feature (3)..(285): NCBI GI: 46139263 Blast Desc: FG11146.1 [Gibberella zeae PH-1]
  misc_feature (72)..(285): NCBI GI: 164422839 Blast Desc: NCU09670 [Neurospora crassa OR74A] gi|157069844|gb|EAA31524.2| conserved [Neurospora crassa OR74A]
  misc_feature (79)..(293): NCBI GI: 145245942 Blast Desc: An12g01320 [Aspergillus niger] gi|134079931|emb|CAK41061.1| protein product [Aspergillus niger]
  misc_feature (79)..(341): NCBI GI: 238489785 Blast Desc: prostaglandin G/H synthase 2/cyclooxygenase 2, pgh2/cox2, [Aspergillus flavus NRRL3357] gi|220698518|gb|EED54858.1| prostaglandin G/H synthase 2, flavus
  misc_feature (79)..(293): NCBI GI: 115387417 Blast Desc: conserved [Aspergillus terreus NIH2624] gi|114195298|gb|EAU36998.1| conserved [Aspergillus terreus NIH2624]
  misc_feature (79)..(341): NCBI GI: 169763822 Blast Desc: [Aspergillus oryzae RIB40] gi|83770839|dbj|BAE60972.1| protein product [Aspergillus oryzae] gi|226442047|gb|ACO57613.1| fatty acid peroxidase ppoD [Aspergillus flavus]
  misc_feature (79)..(293): NCBI GI: 46111573 Blast Desc: FG02668.1 [Gibberella zeae PH-1]
  misc_feature (73)..(276): NCBI GI: 171695494 Blast Desc: protein product [Podospora anserina] gi|170947989|emb|CAP60153.1| protein product [Podospora anserina]
  misc_feature (79)..(284): NCBI GI: 256726240 Blast Desc: [Nectria haematococca mpVI 77-13-4]
MWLSMGVKDSATPEEIQAGTYITPEMLKNEEIPVPFMQKLIAMQNAKAARDTKALKETPYFPGGFDRVGGPRGGFVFTRDEAGKFNDKQLVAELIRASEDPICSFGSQGIPKIFKSVEMIGILQARKWEVASLNEFRAFFGMERHKSFEDINSDPYIQQTLRDLYDDVDQVELYPGFVVEGQGRACDPNNSCGSGAGTALWRGIFSDAVTLVRSDRFYTLDWNVDSLTTWGMKELTSDPKINKGGMMYKLYHHAFPGFFHYNALHLWQPYHTPASNLIFAQEQGHLHKLNIDDYEYRFDNDSEDVWRILDTKRSDNGKYATDFKKLSSIDKSIRVDQIEGRRKERNQKMKTLGARFAKGEITKKEYYIQRNAMKPIPMFRLRRRLGRADGYENSDLRWQRGGELAKPISRIPQEESSYDVIRSAILGRQSCVNWLNRDVGSDHDIPAGAVREVMLNKFDKWEEAIAILEDNLLGGQDQEQILREYLDELAQQIRLREERDYNVPNHSGTGKVYQLDVVRDFAIPFIVRFVADVLGFWEKIKTPEFPDREHDENEIYQHIVNCQNWRSWNADQTKMMQRREAFQKSSMKLKELAEFGVGRWTAGLFNFYGYGRSYGSKGDGSRVHALRMSSVRAIQALLAKYEPDVVAAIMLSNVLTMTNTAVIRFTEVLAYFLQPESKSGESPRSHTPRSELWEALQDLANVRDSDNALEAAREIDGYVLEAWRLGTTLKPAYRYNPKEVGNPVQLSPGKTRNKDGDLNQDELGNPVIGPRFVEKGDLVIINLQKAMQDPDVFVNPASFNPRRTRTDYLLYGRFDSKEKLMKEPSVAMVMTIAVQSAMLKHMARLLNIRPAHGRAGRLRTLIEKDHRSKLERVMYLNSQWNELTPWPATWTLRYDGEGKGAWEPPAKRFGLSDGMVKLTEEMLDGMLDEATKRTAK

SEQ ID NO: 3352 - DNA, 3870 bp, Muscodor strobelii; identical to SEQ ID NO: 3349
  misc_feature: SGI EST ID NO. CUFF.8412.0
  misc_feature: Variant of the nucleotide sequence at SEQ ID NO 3350

SEQ ID NO: 3353 - DNA, 399 bp, Muscodor strobelii
  misc_feature: SGI cDNA ID NO. 560773
  misc_feature: Encodes the peptide sequence at SEQ ID NO 3354
atgttcgatcaacttcccgacgatctcaagaacaggatctttgacgactgcgaagctcagttgtgttcagatgcagcacatgacttggtgcatcgcatacaagcagagagacaggaggacgcgaggaaggagttgggatccgtacaacctatggggcaacctagtaactggatcatcggtgggatctttctaggaacatccgtgttgatgagtgtagcgattggctatgcatactggttgagcaaaaaggaaaacaaagtcaaagatagagagcatccgccaaaattcgccgttcaggttaaaattacaccaggcgatgtcatggagggccccgaagaaccttggtctagtccaccggcctactcgctagacgacgaaagtcaggttgcggcaagataa

SEQ ID NO: 3354 - protein, 132 aa, Muscodor strobelii
  misc_feature: SGI Peptide ID NO. 560773
MFDQLPDDLKNRIFDDCEAQLCSDAAHDLVHRIQAERQEDARKELGSVQPMGQPSNWIIGGIFLGTSVLMSVAIGYAYWLSKKENKVKDREHPPKFAVQVKITPGDVMEGPEEPWSSPPAYSLDDESQVAAR

SEQ ID NO: 3355 - DNA, 357 bp, Muscodor strobelii
  misc_feature: SGI cDNA ID NO. 560774
  misc_feature: Encodes the peptide sequence at SEQ ID NO 3356
atggatacaatgctagccttaacgcacggaaaggacaagctcgtcttgcatcaggcacctcaacagaccgttgctactttgagagaagcatttgaccatattggaacgagtgaaacaagaggcaagactcacgtattagaaatcaagggaaaaccttgggataatgctaagaagcgtcgttcactgaaggtgcagtgcactattaaagtgttgcagacgctagaggatcaaggctggcaactccacgcctcattcaacaatcatcagggaagcatcatgcgtgaaaatggcgatgcctggctattgtcctttccgactatgtctctgcaattagaaacagtcccggggaactggtga

SEQ ID NO: 3356 - protein, 118 aa, Muscodor strobelii
  misc_feature: SGI Peptide ID NO. 560774
MDTMLALTHGKDKLVLHQAPQQTVATLREAFDHIGTSETRGKTHVLEIKGKPWDNAKKRRSLKVQCTIKVLQTLEDQGWQLHASFNNHQGSIMRENGDAWLLSFPTMSLQLETVPGNW

SEQ ID NO: 3357 - DNA, 801 bp, Muscodor strobelii
  misc_feature: SGI cDNA ID NO. 560775
  misc_feature: Elevated expression when VOC is produced
  misc_feature: Encodes the peptide sequence at SEQ ID NO 3358
atgctaaaacttgcggtcgcgttccccgtagtgatggtggctctcacggcgcttgctatctatatccagatcacagcaagttcactatctatgccccttgccacgggtacaactatactcaccatcttgctgcctttatttgcgacagccaatattctgtacactccagtactaggccgcatgctcaagaataataatcttcagcagttccttccacctatcttgcagatcagtcaaggtatcctcactgtcatcattgcaacacttgcttttcagggcttcctccctgggaccagcttggactgtgacataaagactagctggcaacagctttggcacaggcatgacgggcatgctatagagcgcattcagaactcatttgactgctgcggattaaataccgtcaatgatcgtgcttggccgcaacatagctgcccagaaatctacgatcggcgtatttcgtgttttctcccgtggcgatcatcgattcagaggacgtccggccttgagtttaccgttgcgatcgtgatcggtatcattcagctcgcacatctggcttttgtcaggagacgccgttataaagaagatgcccgagcttatactaagcgcgcggtacatcccattgaggatggccagcgtctaattgaagaaggcgatgcagaataccatgacgaccaagaagaaggacatgacgatgtgaacacatctcaatcacttcctaatgtgccccaagatcaagcgcatcaccgcgtcgagccctctggactaggccgcgaggaagaaaatcagtggcgatcgtaa

SEQ ID NO: 3358 - protein, 266 aa, Muscodor strobelii
  misc_feature: SGI Peptide ID NO. 560775
  misc_feature (10)..(264): NCBI GI: 256734670 Blast Desc: NECHADRAFT_75166 [Nectria haematococca mpVI 77-13-4]
  misc_feature (1)..(264): NCBI GI: 46108160 Blast Desc: FG00962.1 [Gibberella zeae PH-1]
  misc_feature (7)..(258): NCBI GI: 160693694 Blast Desc: tetraspanin Tsp3 [Sclerotinia sclerotiorum]
  misc_feature (7)..(258): NCBI GI: 156056581 Blast Desc: [Sclerotinia sclerotiorum 1980] gi|154701807|gb|EDO01546.1| [Sclerotinia sclerotiorum 1980]
  misc_feature (7)..(258): NCBI GI: 154296156 Blast Desc: BC1G_12905 [Botryotinia fuckeliana B05.10] gi|150843469|gb|EDN18662.1| BC1G_12905 [Botryotinia fuckeliana B05.10]
  misc_feature (12)..(182): NCBI GI: 189200400 Blast Desc: conserved [Pyrenophora tritici-repentis Pt-1C-BFP] gi|187983636|gb|EDU49124.1| conserved [Pyrenophora tritici-repentis Pt-1C-BFP]
  misc_feature (4)..(242): NCBI GI: 261202462 Blast Desc: tetraspanin Tsp3 [Ajellomyces dermatitidis SLH14081] gi|239590542|gb|EEQ73123.1| tetraspanin Tsp3 [Ajellomyces dermatitidis SLH14081]
  misc_feature (27)..(191): NCBI GI: 145251199 Blast Desc: An15g05840 [Aspergillus niger] gi|134082643|emb|CAK42537.1| protein product [Aspergillus niger]
  misc_feature (13)..(189): NCBI GI: 261357086 Blast Desc: [Verticillium albo-atrum VaMs.102]
  misc_feature (2)..(221): NCBI GI: 258575157 Blast Desc: [Uncinocarpus reesii 1704] gi|237902026|gb|EEP76427.1| [Uncinocarpus reesii 1704]
  misc_feature: Useful for introducing or modulating the production of volatile compounds
MLKLAVAFPVVMVALTALAIYIQITASSLSMPLATGTTILTILLPLFATANILYTPVLGRMLKNNNLQQFLPPILQISQGILTVIIATLAFQGFLPGTSLDCDIKTSWQQLWHRHDGHAIERIQNSFDCCGLNTVNDRAWPQHSCPEIYDRRISCFLPWRSSIQRTSGLEFTVAIVIGIIQLAHLAFVRRRRYKEDARAYTKRAVHPIEDGQRLIEEGDAEYHDDQEEGHDDVNTSQSLPNVPQDQAHHRVEPSGLGREEENQWRS

SEQ ID NO: 3359 - DNA, 1574 bp, Muscodor strobelii
  misc_feature: SGI EST ID NO. CUFF.8430.0
  misc_feature: Variant of the nucleotide sequence at SEQ ID NO 3357
cccgttctaggtaaatggcaatgttggactaccgtgtcatttttttcgttcactgtctagcgggacaccacatcaaccacgtcacgcctgtaataggctgcccaatgatagtttcaactatgaatgcctttcaatctgcagacccgcgctgctttggagataaactgcatcgcgtcgtctgcccctcaccaggcgtatccttccatccgtctcacaacgtctgccccctccccgtttctcaattggcgtgaaatcattacgttgaaaagcttcggacttgttgaactcgacaaatattagatccaatcatattggttccattgtgcttctatgttccgcgcgtggcccgtattgctcaatcatgctaaaacttgcggtcgcgttccccgtagtgatggtggctctcacggcgcttgctatctatatccagatcacagcaagttcactatctatgccccttgccacgggtacaactatactcaccatcttgctgcctttatttgcgacagccaatattctgtacactccagtactaggccgcatgctcaagaataataatcttcagcagttccttccacctatcttgcagatcagtcaaggtatcctcactgtcatcattgcaacacttgcttttcagggcttcctccctgggaccagcttggactgtgacataaagactagctggcaacagctttggcacaggcatgacgggcatgctatagagcgcattcagaactcatttgactgctgcggattaaataccgtcaatgatcgtgcttggccgcaacatagctgcccagaaatctacgatcggcgtatttcgtgttttctcccgtggcgatcatcgattcagaggacgtccggccttgagtttaccgttgcgatcgtgatcggtatcattcagctcgcacatctggcttttgtcaggagacgccgttataaagaagatgcccgagcttatactaagcgcgcggtacatcccattgaggatggccagcgtctaattgaagaaggcgatgcagaataccatgacgaccaagaagaaggacatgacgatgtgaacacatctcaatcacttcctaatgtgccccaagatcaagcgcatcaccgcgtcgagccctctggactaggccgcgaggaagaaaatcagtggcgatcgtaacttgttcctcgaagaaagggccctgagatccgtcggacagcacatatccaatatgttgcaagatttctccgtcttgtaacgccagtatttgtgaagcattcgaagacctatctgatggttacactgatatcttctgtgttccttttgaaaccatcctttgcgctcgttcatccagttgattttttaagggtttgaggtctaggagtgaagtacacatcacgtccgacacaaccctggcctaatcgatactgccaggtttcctatgaagcacggactttcatgcatgtaaaattatttatttgcatatcacttcgtccataatatgaatggctcgtgccatcgttgcgtaggggattagagctgtagatatggtgtcgttattgcgctatcaattcgaccgtttaatccaaga

SEQ ID NO: 3360 - DNA, 666 bp, Muscodor strobelii
  misc_feature: SGI cDNA ID NO. 560776
  misc_feature: Elevated expression when VOC is produced
  misc_feature: Encodes the peptide sequence at SEQ ID NO 3361
atggaaagctcatccggaccgctcggctttttggagcggctgttgccctctacgagcaaatatggtcagcttgacgaagaagtcgatcccgtcgtagcacaggagcgctggttaaagaaatactactttgcgcgtgtcgccttttccgctgtctgggtagctgccgctttcactattggctcatcatacgccttcgtgggcgccgtgctactcgtcatttacccgctctgggatgctgcagcaaacttcgttgatgctcagcgcagtggcggactcgcggtcaaccggactcaggctatcaacttagcagccagtcttgcgactacaatcgcggcgctcattgccgtcatgattaacatgcactgggtactcggtgtgtatggcgcgtgggccatacttagcgggctcatgcagcttggcacggccgttcgccgctggaagtccgctggcgcgcagtgggccatgtgcctcagtggagcccagtcgagtcttgcgggcgcatttttcatcttccaggccacgaagactgaggaaccatctatcaaggacattgccggctatgcagctttcggtgccttctacttccttgtgtccgcactgtggttgacggtcaaggagctacgttcgcctaagaaatcaagtggacttgacgaggacgacttttaa

SEQ ID NO: 3361 - protein, 221 aa, Muscodor strobelii
  misc_feature: SGI Peptide ID NO. 560776
  misc_feature (34)..(211): NCBI GI: 241203579 Blast Desc: Rleg_0837 [Rhizobium leguminosarum bv. trifolii WSM1325] gi|240857469|gb|ACS55136.1| conserved [Rhizobium leguminosarum bv. trifolii WSM1325]
  misc_feature (34)..(211): NCBI GI: 116250993 Blast Desc: transmembrane protein [Rhizobium leguminosarum bv. viciae 3841] gi|115255641|emb|CAK06722.1| transmembrane protein [Rhizobium leguminosarum bv. viciae 3841]
  misc_feature (33)..(208): NCBI GI: 260463268 Blast Desc: conserved [Mesorhizobium opportunistum WSM2075] gi|259030858|gb|EEW32133.1| conserved [Mesorhizobium opportunistum WSM2075]
  misc_feature (33)..(208): NCBI GI: 107029197 Blast Desc: Bcen_6458 [Burkholderia cenocepacia AU 1054] gi|116687068|ref|YP_840315.1| Bcen2424_6693 [Burkholderia cenocepacia HI2424] gi|105898361|gb|ABF81319.1| conserved AU
  misc_feature (25)..(205): NCBI GI: 27379118 Blast Desc: blr4007 [Bradyrhizobium japonicum USDA 110] gi|27352268|dbj|BAC49272.1| blr4007 [Bradyrhizobium japonicum USDA 110]
  misc_feature (32)..(211): NCBI GI: 186470656 Blast Desc: transmembrane protein [Burkholderia phymatum STM815] gi|184196965|gb|ACC74928.1| transmembrane protein [Burkholderia phymatum STM815]
  misc_feature (33)..(208): NCBI GI: 217977557 Blast Desc: Msil_1377 [Methylocella silvestris BL2] gi|217502933|gb|ACK50342.1| conserved [Methylocella silvestris BL2]
  misc_feature (33)..(208): NCBI GI: 197295226 Blast Desc: BCAS0377 [Burkholderia cenocepacia J2315] gi|195944705|emb|CAR57309.1| membrane protein [Burkholderia cenocepacia J2315]
  misc_feature (25)..(208): NCBI GI: 170690212 Blast Desc: conserved [Burkholderia graminis C4D1M] gi|170144647|gb|EDT12808.1| conserved [Burkholderia graminis C4D1M]
  misc_feature (34)..(212): NCBI GI: 206577229 Blast Desc: KPK_2234 [Klebsiella pneumoniae 342] gi|206566287|gb|ACI08063.1| membrane protein [Klebsiella pneumoniae 342]
  misc_feature: Useful for introducing or modulating the production of volatile compounds
MESSSGPLGFLERLLPSTSKYGQLDEEVDPVVAQERWLKKYYFARVAFSAVWVAAAFTIGSSYAFVGAVLLVIYPLWDAAANFVDAQRSGGLAVNRTQAINLAASLATTIAALIAVMINMHWVLGVYGAWAILSGLMQLGTAVRRWKSAGAQWAMCLSGAQSSLAGAFFIFQATKTEEPSIKDIAGYAAFGAFYFLVSALWLTVKELRSPKKSSGLDEDDF

SEQ ID NO: 3362 - DNA, 3462 bp, Muscodor strobelii
  misc_feature: SGI cDNA ID NO. 560777
  misc_feature: Encodes the peptide sequence at SEQ ID NO 3363
atggctggggaccttaagttccaagctggcgaggcgtacggagatgcaccaaagcagtcctcgaccgattttctatcggatccccttaaggttgcaacagatatcctgaaagagtgcacagatatcaaaaaccgcgtttcccctcaggaggtagtgaccttgatcgaaagccttttgaaacatggccaacctctcgatgataaaaaggggactacggagttactgatcggcatcttaacctctctgccgtcgacatcagctgcgaggactcacctgacaaacaagctcattgacacactttggaacaatcttcaacatccaccgttgagctacgtgggcggtgacgtcaagtatgaagtagtcagctcaggaagctctacgagccctcaaacgtcaccgtcttatgatgtagttgagttcactgtccctgatagcgaaatcactcttcgtgaagtcgtgccccagcctcctaatggcatgcatcattaccgaacaccggatggaagctgcaataatatcctcaaccctgatcttggtaaagctggaacaccgtacgccaagtctgttaggaatagcaagcggcttcatggagtcaagcccgacccaggtctgctgtttgacctcttgatggctcgtgaagatgagacattcaaagagaatccagcgggcatctcttcaatgctattctatcacgcgtcgatcattattcacgatatttttcgcacgaaccggacagatatgaacaagtctgacacgtcttcatatcttgacctcgcaccactatatggttcatcgctgcgagaccaagtggagatccgaacgatgaaagagggcaagctcaagcctgataccttccatgagaaacgcttgattgggctccctgctggtgtcaacgtcatgcttgttctctatagccgctttcataactatgtagccgacatacttctcaagatcaacgagaatggtcgcttcacactgtcttgtccggctgacgcaagcgctgaagacaaagctcgagcagtggcaaaacaggatcatgatctgttcaacacagcacgcctcattgtcggaggcttgtacatcaacatctccttgcatgattacttgagggcaatcaccaatacgcaccactctaagagtgactggactcttgacccgcgtgttgagatcaagcagtatgatggtgaaggtgtcccgcgtggtgttgggaatcaagtcagcgtggaattcaatctgctatatcgcttccactcctgcatctccaagaaggatgagcgatggatcaacggcttcttcttgaagttgttccccggtcgcagaccagaagacttggagaacgtcagctggtcggagcttggccaggccctgctgaagtttgagcaaaatacacccaaagatccaagtaagcggaccttcgatgacctagaacgccaagccgatggaactttcagggacgacgatcttgtgcgtatactcaatgaagcaatgcaggacccagccggttgttttggagctcgcatggtacccaaggcgctgaaaatggtcgaaattctcggaatcaatcaggctcgcaaatggcaggtcgcatcgctgaacgagttccgtgacttcttcggcctcaaacgatgggaaaagttcagtgacatcaattccgatccgcaaatcgccagtatcttagagaaattgtactcagatccggatatggttgagttgtatcccggtctgatgattgaggatatcaagcccgtccggaacacaggcagtggtatctgcccaacttacaccgtcggtcgtgccgtgctttctgatgccgtcacgctcgtcagatcagatagatttaatacgctcgactacactgtctccaatttgaccagttggggttacaacgaagtccaacaggatcccaaaactatgggaggctcgatgctctacaagctgattcaacgagctctccccggttggtttccgtacaactcggtttcggtcatgcagccgatgtacaccaagaaagccaacacggcaattgcgaaggagcttggaacccttgctcaatttacacttgatgatcctaagccaccgccgaagcctgtcgttttgttcaccagtgcggctatcaagcaagtgctaaatagcccgaagcaatatgttctgccgtggctcacgccattgaatgcgctctttgttactgaaaagaaagatatcagctggtggtatatgcttgcaggcgatggccctaggaatatcgagcatcggacgagcatgcgcaaggcatttggaaagctcccggatgtcggcaatgccattcgagagctggtggaacgtgtcggcgaccaactgattgggaaggagacttttgaattaaaggaaggccttagccagattgatattatccgggatattgcgattcctctgaacgcgcggatgctggctgacctcttctcgctcgatctgaagtgcgacgagaacccagatggagtcctcgaggcagcagagctctacgatcatctcctgaacattcgcatttggggagcgaacaataacgaccctgcccaggcatggaatcgccgtcgcaaagctcaggaaagtgtccaggtcattatcaaaacaactcgtaagctcgtcgatgagattactctctgccacgggttcggactgggtctgctttctgctctttcgagccctctctctcgacgagtgaatttccaggcgaactcgcttcgatccagcgggtggaaactagtagaagagctcctttcccaagggacatctgcagaacagattgttgatacgctttggctgacggcgtttggtggcatcggtgtgcttgtcactactttctacgagattatggaattcttcctgaagccggacaatgcgtcgatctgggccgaaattcaggacctcgcgcaaaaaggagacagcgcggctattgaagcttatgttcacgaggcacagcgtcttaccaccacgcagcggaacgtacgcgtcgcagttgctccaggcgaactagaaggtaaacagatccagcctggtaatcttgtggttatgatgcttggcgagattgggcgcaatagcaacgaagttgacgacccgacgaaattcgatccgcatcgcaaggcgaccgacgtaacggctttcagctatgggcagcacgagtgcttcgccaaacagctagctcccgcattcttggctggactcgtgaagctcgtcgctggcctgaagaacattcgcccagcaccaggacaaatgggccaggtgaagacgattcgcgtcggttcggacaaggtatatctcaacgacagttggtcgtatctttgcttcgatgctagcacttggaagatccatttcgatggctatgggcaaggaaattttacgggcgaaaggcagccgacggagaagatggagatgcaggagtattactacctgcttcagaaacgcaaggccgatttactgagctcttga

SEQ ID NO: 3363 - protein, 1153 aa, Muscodor strobelii
  misc_feature: SGI Peptide ID NO. 560777
  misc_feature (161)..(666): Pfam Id: PF03098 Pfam Desc: Animal haem peroxidase
  misc_feature (161)..(185): Pfam Id: PF03098 Pfam Desc: Animal haem peroxidase
  misc_feature (532)..(579): Pfam Id: PF03098 Pfam Desc: Animal haem peroxidase
  misc_feature (6)..(1111): NCBI GI: 115387417 Blast Desc: conserved [Aspergillus terreus NIH2624] gi|114195298|gb|EAU36998.1| conserved [Aspergillus terreus NIH2624]
  misc_feature (4)..(1122): NCBI GI: 238489785 Blast Desc: prostaglandin G/H synthase 2/cyclooxygenase 2, pgh2/cox2, [Aspergillus flavus NRRL3357] gi|220698518|gb|EED54858.1| prostaglandin G/H synthase 2, flavus
  misc_feature (4)..(1114): NCBI GI: 145245942 Blast Desc: An12g01320 [Aspergillus niger] gi|134079931|emb|CAK41061.1| protein product [Aspergillus niger]
  misc_feature (4)..(1122): NCBI GI: 169763822 Blast Desc: [Aspergillus oryzae RIB40] gi|83770839|dbj|BAE60972.1| protein product [Aspergillus oryzae] gi|226442047|gb|ACO57613.1| fatty acid peroxidase ppoD [Aspergillus flavus]
  misc_feature (50)..(1117): NCBI GI: 261202252 Blast Desc: fatty acid oxygenase [Ajellomyces dermatitidis SLH14081] gi|239590437|gb|EEQ73018.1| fatty acid oxygenase [Ajellomyces dermatitidis SLH14081]
  misc_feature (50)..(1117): NCBI GI: 239612148 Blast Desc: fatty acid oxygenase [Ajellomyces dermatitidis ER-3]
  misc_feature (50)..(1113): NCBI GI: 225557208 Blast Desc: fatty acid oxygenase [Ajellomyces capsulatus G186AR]
  misc_feature (50)..(1117): NCBI GI: 226277556 Blast Desc: conserved [Paracoccidioides brasiliensis Pb01]
  misc_feature (50)..(1117): NCBI GI: 225683465 Blast Desc: linoleate diol synthase [Paracoccidioides brasiliensis Pb03]
  misc_feature (50)..(1117): NCBI GI: 240277758 Blast Desc: linoleate diol synthase [Ajellomyces capsulatus H143]
  misc_feature (66)..(839): SWISSPROT Homolog: EC 1.13.11.44 Linoleate diol synthase
MAGDLKFQAGEAYGDAPKQSSTDFLSDPLKVATDILKECTDIKNRVSPQEVVTLIESLLKHGQPLDDKKGTTELLIGILTSLPSTSAARTHLTNKLIDTLWNNLQHPPLSYVGGDVKYEVVSSGSSTSPQTSPSYDVVEFTVPDSEITLREVVPQPPNGMHHYRTPDGSCNNILNPDLGKAGTPYAKSVRNSKRLHGVKPDPGLLFDLLMAREDETFKENPAGISSMLFYHASIIIHDIFRTNRTDMNKSDTSSYLDLAPLYGSSLRDQVEIRTMKEGKLKPDTFHEKRLIGLPAGVNVMLVLYSRFHNYVADILLKINENGRFTLSCPADASAEDKARAVAKQDHDLFNTARLIVGGLYINISLHDYLRAITNTHHSKSDWTLDPRVEIKQYDGEGVPRGVGNQVSVEFNLLYRFHSCISKKDERWINGFFLKLFPGRRPEDLENVSWSELGQALLKFEQNTPKDPSKRTFDDLERQADGTFRDDDLVRILNEAMQDPAGCFGARMVPKALKMVEILGINQARKWQVASLNEFRDFFGLKRWEKFSDINSDPQIASILEKLYSDPDMVELYPGLMIEDIKPVRNTGSGICPTYTVGRAVLSDAVTLVRSDRFNTLDYTVSNLTSWGYNEVQQDPKTMGGSMLYKLIQRALPGWFPYNSVSVMQPMYTKKANTAIAKELGTLAQFTLDDPKPPPKPVVLFTSAAIKQVLNSPKQYVLPWLTPLNALFVTEKKDISWWYMLAGDGPRNIEHRTSMRKAFGKLPDVGNAIRELVERVGDQLIGKETFELKEGLSQIDIIRDIAIPLNARMLADLFSLDLKCDENPDGVLEAAELYDHLLNIRIWGANNNDPAQAWNRRRKAQESVQVIIKTTRKLVDEITLCHGFGLGLLSALSSPLSRRVNFQANSLRSSGWKLVEELLSQGTSAEQIVDTLWLTAFGGIGVLVTTFYEIMEFFLKPDNASIWAEIQDLAQKGDSAAIEAYVHEAQRLTTTQRNVRVAVAPGELEGKQIQPGNLVVMMLGEIGRNSNEVDDPTKFDPHRKATDVTAFSYGQHECFAKQLAPAFLAGLVKLVAGLKNIRPAPGQMGQVKTIRVGSDKVYLNDSWSYLCFDASTWKIHFDGYGQGNFTGERQPTEKMEMQEYYYLLQKRKADLLSS

SEQ ID NO: 3364 - DNA, 3761 bp, Muscodor strobelii
  misc_feature: SGI EST ID NO. CUFF.8629.2
  misc_feature: Variant of the nucleotide sequence at SEQ ID NO 3362
cgccatgcttgcaacttacaatgctaataccaagtatcaggactacggagttactgatcggcatcttaacctctctgccgtcgacatcagctgcgaggactcacctgacaaacaagctcattgacacactttggaacaatcttcaacatccaccgttgagctacgtgggcggtgacgtcaagtatgaagtagtcagctcaggaagctctacgagccctcaaacgtcaccgtcttatgatgtagttgagttcactgtccctgatagcgaaatcactcttcgtgaagtcgtgccccagcctcctaatggcatgcatcattaccgaacaccggatggaagctgcaataatatcctcaaccctgatcttggtaaagctggaacaccgtacgccaagtctgttaggaatagcaagcggcttcatggagtcaagcccgacccaggtctgctgtttgacctcttgatggctcgtgaagatgagacattcaaagagaatccagcgggcatctcttcaatgctattctatcacgcgtcgatcattattcacgatatttttcgcacgaaccggacagatatgaacaagtctgacacgtcttcatatcttgacctcgcaccactatatggttcatcgctgcgagaccaagtggagatccgaacgatgaaagagggcaagctcaagcctgataccttccatgagaaacgcttgattgggctccctgctggtgtcaacgtcatgcttgttctctatagccgctttcataactatgtagccgacatacttctcaagatcaacgagaatggtcgcttcacactgtcttgtccggctgacgcaagcgctgaagacaaagctcgagcagtggcaaaacaggatcatgatctgttcaacacagcacgcctcattgtcggaggcttgtacatcaacatctccttgcatgattacttgagggcaatcaccaatacgcaccactctaagagtgactggactcttgacccgcgtgttgagatcaagcagtatgatggtgaaggtgtcccgcgtggtgttgggaatcaagtcagcgtggaattcaatctgctatatcgcttccactcctgcatctccaagaaggatgagcgatggatcaacggcttcttcttgaagttgttccccggtcgcagaccagaagacttggagaacgtcagctggtcggagcttggccaggccctgctgaagtttgagcaaaatacacccaaagatccaagtaagcggaccttcgatgacctagaacgccaagccgatggaactttcagggacgacgatcttgtgcgtatactcaatgaagcaatgcaggacccagccggttgttttggagctcgcatggtacccaaggcgctgaaaatggtcgaaattctcggaatcaatcaggctcgcaaatggcaggtcgcatcgctgaacgagttccgtgacttcttcggcctcaaacgatgggaaaagttcagtgacatcaattccgatccgcaaatcgccagtatcttagagaaattgtactcagatccggatatggttgagttgtatcccggtctgatgattgaggatatcaagcccgtccggaacacaggcagtggtatctgcccaacttacaccgtcggtcgtgccgtgctttctgatgccgtcacgctcgtcagatcagatagatttaatacgctcgactacactgtctccaatttgaccagttggggttacaacgaagtccaacaggatcccaaaactatgggaggctcgatgctctacaagctgattcaacgagctctccccggttggtttccgtacaactcggtttcggtcatgcagccgatgtacaccaagaaagccaacacggcaattgcgaaggagcttggaacccttgctcaatttacacttgatgatcctaagccaccgccgaagcctgtcgttttgttcaccagtgcggctatcaagcaagtgctaaatagcccgaagcaatatgttctgccgtggctcacgccattgaatgcgctctttgttactgaaaagaaagatatcagctggtggtgtgtattaagcaattcgattcctttttctaattcgtgaatctctagaaggatctatgctaacatacgttatagtaagtagcgctcgtttcaatcgtagaaccccgcaacacccgagaaattccggaatatgacaacgtcattccagaccatcacgaatagaaaaagggactaacatattttgatacaccagatatgcttgcaggcgatggccctaggaatatcgagcatcggacgagcatgcgcaaggcatttggaaagctcccggatgtcggcaatgccattcgagagctggtggaacgtgtcggcgaccaactgattgggaaggagacttttgaattaaaggaaggccttagccagattgatattatccgggatattgcgattcctctgaacgcgcggatgctggctgacctcttctcgctcgatctgaagtgcgacgagaacccagatggagtcctcgaggcagcagagctctacgatcatctcctgaacattcgcatttggggagcgaacaataacgaccctgcccaggcatggaatcgccgtcgcaaagctcaggaaagtgtccaggtcattatcaaaacaactcgtaagctcgtcgatgagattactctctgccacgggttcggactgggtctgctttctgctctttcgagccctctctctcgacgagtgaatttccaggcgaactcgcttcgatccagcgggtggaaactagtagaagagctcctttcccaagggacatctgcagaacagattgttgatacgctttggctgacggcgtttggtggcatcggtgtgcttgtcactactgtaagtgtctgtgtctgaattccgatatggtgtgtatgtctaatgttatggccattagttctacgagattatggaattcttcctgaagccggacaatgcgtcgatctgggccgaaattcaggacctcgcgcaaaaaggagacagcgcggctattgaagcttatgttcacgaggcacagcgtcttaccaccacgcagcggaacgtacgcgtcgcagttgctccaggcgaactagaaggtaaacagatccagcctggtaatcttgtggttatgatgcttgtaagttatctcaaaatcgtcacttcgtcttaccaagatatgttttccctgatcctctgctaatagatcacagggcgagattgggcgcaatagcaacgaagttgacgacccgacgaaattcgatccgcatcgcaaggcgaccgacgtaacggctttcagctatgggcagcacgagtgcttcgccaaacagctagctcccgcattcttggctggactcgtgaagctcgtcgctggcctgaagaacattcgcccagcaccaggacaaatgggccaggtgaagacgattcgcgtcggttcggacaaggtatatctcaacgacagttggtcgtatctttgcttcgatgctagcagtaggtctcccgatagggtttgtcacgtaaagaaaatagaggctgacacgtcgcacaacagcttggaagatccatttcgatggctatgggcaaggaaattttacgggcgaaaggcagccgacggagaagatggagatgcaggagtattactacctgcttcagaaacgcaaggccgatttactgagctcttgatgatgaatacgaagctgtgtgccgaggcccgagcttagattgaggaggaaattgataggttttgaatcgacagattgaattgaag

SEQ ID NO: 3365 - DNA, 1641 bp, Muscodor strobelii
  misc_feature: SGI cDNA ID NO. 560778
  misc_feature: Encodes the peptide sequence at SEQ ID NO 3366
atgcctgacatagacggaatggcaaatcacacgaatggcgtcgtgtctgcagaccgaaagaagacccacgtagccaagaagcttgtgttatgctttgatggcactgggaacacattcagcggatcaaatgctgatacaaatgtcgtgaagctattgaacaagcttgatcgtcatgctgatcgccagtttcattattaccaaactggtattggtacatacgatatcaatgaaaggtcggtaaataagacttggtatggagaggtgaagagctctattgcaatgacgatcgaccaaggaattggaaacacgtttgatgcgcatgttatggcaggttatagatttctcatgaagttctatgacacggacgccaaaatatacatgttcggtttcagtcgcggggctttcactgcgaaattccttgcacgcatggtttcaacggttggacttttatgcaagggcaacgaggaaatggtgccttttgcgtatcgactctatcaacgctatctagccggcgaattcgaagactttgcaaatcaacaagcacaaggctatggcgacgaagacggagatgggatcgctcctgatggcgcgactggtgcgatgtttcaagacaatctagaaggagatcacaatccccacggtcgaagattcgagacagcacataacgaagtgacagcttttagtaacacgttctgtcgcaaggaacgaattgagcacaaagatggcaccatcgaggatgtcaatatcaaggtctactttcttgggatatgggactgcgtaaactctgtcgcgcctctagaacgccatactccaacacccgtgcctgtcaagggcacagcgcaatatgttcgacacgcagtagctgtagatgagcgccgcgtcaagttcaaaccggctctactagctcaagacattcgcgctacgggcgacactgacgaagacatcaaggaggtttggtttccaggctgtcatggggacgttggaggcggatggccatcgtctaccgatcatcctctcgataccaataagaagatgacattctggcaacgcgttaagaacatctggacaactcgaaaacctaccgaagctacaagagacatacgaaaggatccttttcaaatgagcgacatcccacttgcctggatgatccgtgaactggaactcgtcggccaagccgatcccacagcagctattcagttttgcgggaacgtgaggggcttcaaacgagcatttcaagccaggaaaaatcaggcgcttacaggcttcattcatgattctcttagcttcggctatgggacaggcttcttcacagtgcttctctggaaattcatggaatggctaccattcatcacgcgctgggagatggagaagaacgcctgggtcaacgtccgcttcccgctcaatggtggcggacctcgggacatcccgcgcgacgccgtgttgcacgagtcgctgatctggcgattacgcaatgacgcgtcgtatcacccaaagaacaatcacggcggatggctgcagccttgcctcaagcacaaaggtgttgtcacctcggttgagccgattctggagatacaaggtgttgccgacgctgatcaccagacgtactgcttcaaggacatgagtaatggccattctgcgtaa

SEQ ID NO: 3366 - protein, 546 aa, Muscodor strobelii
  misc_feature: SGI Peptide ID NO. 560778
  misc_feature (26)..(535): NCBI GI: 256725837 Blast Desc: NECHADRAFT_81948 [Nectria haematococca mpVI 77-13-4]
  misc_feature (26)..(510): NCBI GI: 46111571 Blast Desc: FG02667.1 [Gibberella zeae PH-1]
  misc_feature (7)..(521): NCBI GI: 256730350 Blast Desc: NECHADRAFT_95014 [Nectria haematococca mpVI 77-13-4]
  misc_feature (116)..(529): NCBI GI: 226532365 Blast Desc: LOC100273595 [Zea mays] gi|194704760|gb|ACF86464.1| [Zea mays]
  misc_feature (26)..(485): NCBI GI: 145245940 Blast Desc: An12g01310 [Aspergillus niger] gi|134079930|emb|CAK41060.1| protein product [Aspergillus niger]
  misc_feature (6)..(490): NCBI GI: 115387415 Blast Desc: conserved [Aspergillus terreus NIH2624] gi|114195297|gb|EAU36997.1| conserved [Aspergillus terreus NIH2624]
  misc_feature (25)..(485): NCBI GI: 119191956 Blast Desc: CIMG_00355 [Coccidioides immitis RS]
  misc_feature (25)..(485): NCBI GI: 240106282 Blast Desc: CPC735_058450 [Coccidioides posadasii C735 delta SOWgp]
  misc_feature (21)..(485): NCBI GI: 261202254 Blast Desc: conserved [Ajellomyces dermatitidis SLH14081] gi|239590438|gb|EEQ73019.1| conserved [Ajellomyces dermatitidis SLH14081]
  misc_feature (20)..(486): NCBI GI: 225683466 Blast Desc: conserved [Paracoccidioides brasiliensis Pb03]
MPDIDGMANHTNGVVSADRKKTHVAKKLVLCFDGTGNTFSGSNADTNVVKLLNKLDRHADRQFHYYQTGIGTYDINERSVNKTWYGEVKSSIAMTIDQGIGNTFDAHVMAGYRFLMKFYDTDAKIYMFGFSRGAFTAKFLARMVSTVGLLCKGNEEMVPFAYRLYQRYLAGEFEDFANQQAQGYGDEDGDGIAPDGATGAMFQDNLEGDHNPHGRRFETAHNEVTAFSNTFCRKERIEHKDGTIEDVNIKVYFLGIWDCVNSVAPLERHTPTPVPVKGTAQYVRHAVAVDERRVKFKPALLAQDIRATGDTDEDIKEVWFPGCHGDVGGGWPSSTDHPLDTNKKMTFWQRVKNIWTTRKPTEATRDIRKDPFQMSDIPLAWMIRELELVGQADPTAAIQFCGNVRGFKRAFQARKNQALTGFIHDSLSFGYGTGFFTVLLWKFMEWLPFITRWEMEKNAWVNVRFPLNGGGPRDIPRDAVLHESLIWRLRNDASYHPKNNHGGWLQPCLKHKGVVTSVEPILEIQGVADADHQTYCFKDMSNGHSA

SEQ ID NO: 3367 - DNA, 3227 bp, Muscodor strobelii
  misc_feature: SGI EST ID NO. CUFF.8465.0
  misc_feature: Variant of the nucleotide sequence at SEQ ID NO 3365
ctggtattggtacatacgatatcaatgaaaggtcggtaaataagacttggtatggagaggtgaagagctctattgcaatgacgatcgaccaaggaattggaaacacgtttgatgcgcatgttatggcaggttatagatttctcatgaagttctatgacacggacgccaaaatatacatgttcggtttcagtcgcggggctttcactgcgaaattccttgcacgcatggtttcaacggttggacttttatgcaagggcaacgaggaaatggtgccttttgcgtatcgactctatcaacgctatctagccggcgaattcgaagactttgcaaatcaacaagcacaaggctatggcgacgaagacggagatgggatcgctcctgatggcgcgactggtgcgatgtttcaagacaatctagaaggagatcacaatccccacggtcgaagattcgagacagcacataacgaagtgacagcttttagtaacacgttctgtcgcaaggaacgaattgagcacaaagatggcaccatcgaggatgtcaatatcaaggtctactttcttgggatatgggactgcgtaaactctgtcgcgcctctagaacgccatactccaacacccgtgcctgtcaagggcacagcgcaatatgttcgacacgcagtagctgtagatgagcgccgcgtcaagttcaaaccggctctactagctcaagacattcgcgctacgggcgacactgacgaagacatcaaggaggtttggtttccaggctgtcatggggacgttggaggcggatggccatcgtctaccgatcatcctctcgataccaataagaagatgacattctggcaacgcgttaagaacatctggacaactcgaaaacctaccgaagctacaagagacatacgaaaggatccttttcaaatgagcgacatcccacttgcctggatgatccgtgaactggaactcgtcggccaagccgatcccacagcagctattcagttttgcgggaacgtgaggggcttcaaacgagcatttcaagccaggaaaaatcaggcgcttacaggcttcattcatgattctcttagcttcggctatgggacaggcttcttcacagtgcttctctggaaattcatgggtaagtacgctcctaattacacttacttcgtctacacatatcccacgcacaagacccaatactaacatccctagaatggctaccattcatcacgcgctgggagatggagaagaacgcctgggtcaacgtccgcttcccgctcaatggtggcggacctcgggacatcccgcgcgacgccgtgttgcacgagtcgctgatctggcgattacgcaatgacgcgtcgtatcacccaaagaacaatcacggcggatggctgcagccttgcctcaagcacaaaggtgttgtcacctcggttgagccgattctggagatacaaggtgttgccgacgctgatcaccagacgtactgcttcaaggacatgagtaatggccattctgcgtaaaattgtgcgcagcgaacctggcgagtaatcaagtgatgcattgtttcctcgtatcgggacagagaacgctcttgtgttcgttcatcgtggggcggaggaaacaacctgggctaatactgaagatcgactcagaggtgttattggtatggcattgcggtcgctaagaaatagatacactcactctttctgtcttactcatcgcccatcctgccctcatgatcagcaaattgaagaccttctcgttgaagtagaatgcatgataaaaagccgacactcatcgtctatctctcctagaaacagacatataaactttacggtcgatacgaggataatgacgtaccttttacacaccaagcgagcaccacaaacatcaagctcggctgaaagagtacacaggcccaatgaagtctccgtcagcgtacacagcccatgcagcttcccatgagaggcgatgccagcaacaccccaggcacccgcttgatgaaaatcaccttctgggttggtcgcatcagaaacgagctgtctctgtgagcaaacaacccaaaatgacaatcgaaaggcgcgtaactcataaccgatctattaaattcacgggataagcatcctagaccgctcggcgttgtggattatgtagtatcagtgaccttccctactcagatttcatagtcagcaatattcatcatgcggctttcttcatcaacaacggttgcaattcacctccttacaaaaccaatactgagcttttcaaaaccccatactgtacgtcaaaatgacccaggtgtaatcgacaacgatgccgatatcgtatactgcggtaaacccgacgaggcgccaatcaagaccaccggcgatcccgaagatggccccgggttctggataacgaaccaagacgacgatccggacgtgatgtatttcctctatgaaaacagcagagatgaacatccttggaaatacctctcaatcccctcgggcagccgagcatttgtgcaagtatgtccaacttggcaaggccgtgtagtccgcggcatcactcgcgtaaacacagacggcaacccgcataacctcggcacctggttcaagtcctccatcgatccctcactgggatggatgtggggcgacatctccttcctcgaaggttgcgatggtggcggtcgcgtctcctcaaccgacatggacgggtctaacacaacacgtagctgtatgatcgatctgctaaccgatgcgcctcccgccgcactcgtgaagaaggatagtggaagcatggcgatcgctaagactgttggtgacggtgcgaatgatgacgcgaggggttatgagagtggcatgtgtagccctgatgaggtttggattgacgttgccaattcgcatcccgttatcaagtctatgaatgggcggttggagtttgtgttctataggggtagagcttgagagtactcatctcttcgatggtgtcttcgctcgaggatccacgtcgaatgaattgtggttggggatgagttacagggggtcgccgacctcgctattacggccatgagaggcatgtcagattggatctgtctgataatgtgcatagccattgaaaactctagatgacgcgatatctatgccacactgacgcagaatcagattgcttcttttgcgtgcattgagaaatgtgcgcgtgttgttgacgaaatctatgctttcgattgacacgagtattattctgctggtg

SEQ ID NO: 3368 - DNA, 747 bp, Muscodor strobelii
  misc_feature: SGI cDNA ID NO. 560779
  misc_feature: Encodes the peptide sequence at SEQ ID NO 3369
atgcggctttcttcatcaacaacggttgcaattcacctccttacaaaaccaatactgagcttttcaaaaccccatactgtacgtcaaaatgacccaggtgtaatcgacaacgatgccgatatcgtatactgcggtaaacccgacgaggcgccaatcaagaccaccggcgatcccgaagatggccccgggttctggataacgaaccaagacgacgatccggacgtgatgtatttcctctatgaaaacagcagagatgaacatccttggaaatacctctcaatcccctcgggcagccgagcatttgtgcaagtatgtccaacttggcaaggccgtgtagtccgcggcatcactcgcgtaaacacagacggcaacccgcataacctcggcacctggttcaagtcctccatcgatccctcactgggatggatgtggggcgacatctccttcctcgaaggttgcgatggtggcggtcgcgtctcctcaaccgacatggacgggtctaacacaacacgtagctgtatgatcgatctgctaaccgatgcgcctcccgccgcactcgtgaagaaggatagtggaagcatggcgatcgctaagactgttggtgacggtgcgaatgatgacgcgaggggttatgagagtggcatgtgtagccctgatgaggtttggattgacgttgccaattcgcatcccgttatcaagtctatgaatgggcggttggagtttgtgttctataggggtagagcttga

SEQ ID NO: 3369 - protein, 248 aa, Muscodor strobelii
  misc_feature: SGI Peptide ID NO. 560779
  misc_feature (49)..(246): NCBI GI: 171680731 Blast Desc: protein product [Podospora anserina] gi|170939993|emb|CAP65219.1| protein product [Podospora anserina]
  misc_feature (50)..(248): NCBI GI: 212530368 Blast Desc: PMAA_036190 [Penicillium marneffei ATCC 18224] gi|210074739|gb|EEA28826.1| PMAA_036190 [Penicillium marneffei ATCC 18224]
MRLSSSTTVAIHLLTKPILSFSKPHTVRQNDPGVIDNDADIVYCGKPDEAPIKTTGDPEDGPGFWITNQDDDPDVMYFLYENSRDEHPWKYLSIPSGSRAFVQVCPTWQGRVVRGITRVNTDGNPHNLGTWFKSSIDPSLGWMWGDISFLEGCDGGGRVSSTDMDGSNTTRSCMIDLLTDAPPAALVKKDSGSMAIAKTVGDGANDDARGYESGMCSPDEVWIDVANSHPVIKSMNGRLEFVFYRGRA

SEQ ID NO: 3370 - DNA, 3227 bp, Muscodor strobelii; identical to SEQ ID NO: 3367
  misc_feature: SGI EST ID NO. CUFF.8465.0
  misc_feature: Variant of the nucleotide sequence at SEQ ID NO 3368

SEQ ID NO: 3371 - DNA, 228 bp, Muscodor strobelii
  misc_feature: SGI cDNA ID NO. 560780
  misc_feature: Encodes the peptide sequence at SEQ ID NO 3372
atggctgacaattccaatccgggaaactctgccaaccggcccaaagaagaggttcaggaaatcgcatctaaaggcggccaggcaagccaagcgggcggctttgccagcatggatgctgacaagcagcgggagattgcttcagagggagggaaggcatcttcgggttcattcgagccagggagcgaaaaagcccgtgaagctggacagaagggcggctcctcatcgtaa

SEQ ID NO: 3372 - protein, 75 aa, Muscodor strobelii
  misc_feature: SGI Peptide ID NO. 560780
  misc_feature (1)..(75): NCBI GI: 261356986 Blast Desc: conidiation-specific protein [Verticillium albo-atrum VaMs.102]
  misc_feature (4)..(75): NCBI GI: 85107974 Blast Desc: conidiation-specific protein 10 [Neurospora crassa OR74A] gi|116919|sp|P10713.1|CON10_NEUCR RecName: Full=Conidiation-specific protein 10 gi|168783|gb|AAA33572.1| 10
  misc_feature (1)..(75): NCBI GI: 67537690 Blast Desc: CONX_NEUCR CONIDIATION-SPECIFIC PROTEIN 10 [Aspergillus nidulans FGSC A4] gi|40741903|gb|EAA61093.1| CONX_NEUCR CONIDIATION-SPECIFIC PROTEIN 10 [Aspergillus nidulans
  misc_feature (1)..(75): NCBI GI: 189208923 Blast Desc: conidiation-specific protein 10 [Pyrenophora tritici-repentis Pt-1C-BFP] gi|187976887|gb|EDU43513.1| conidiation-specific protein 10 [Pyrenophora tritici-repentis
  misc_feature (1)..(75): NCBI GI: 145247642 Blast Desc: An12g10240 [Aspergillus niger] gi|134080809|emb|CAL00924.1| protein product [Aspergillus niger]
  misc_feature (1)..(75): NCBI GI: 238483975 Blast Desc: conidiation-specific protein (Con-10), [Aspergillus flavus NRRL3357] gi|220701276|gb|EED57614.1| conidiation-specific protein (Con-10), [Aspergillus flavus NRRL3357]
  misc_feature (1)..(75): NCBI GI: 238493409 Blast Desc: conidiation-specific family protein [Aspergillus flavus NRRL3357] gi|220696435|gb|EED52777.1| conidiation-specific family protein [Aspergillus flavus NRRL3357]
  misc_feature (1)..(75): NCBI GI: 119467416 Blast Desc: conidiation-specific protein (Con-10), [Neosartorya fischeri NRRL 181] gi|119405666|gb|EAW15617.1| conidiation-specific protein (Con-10), [Neosartorya fischeri NRRL
  misc_feature (1)..(70): NCBI GI: 258566479 Blast Desc: conidiation-specific protein 10 [Uncinocarpus reesii 1704] gi|237907685|gb|EEP82086.1| conidiation-specific protein 10 [Uncinocarpus reesii 1704]
  misc_feature (1)..(75): NCBI GI: 115388964 Blast Desc: conidiation-specific protein 10 [Aspergillus terreus NIH2624] gi|114194383|gb|EAU36083.1| conidiation-specific protein 10 [Aspergillus terreus NIH2624]
MADNSNPGNSANRPKEEVQEIASKGGQASQAGGFASMDADKQREIASEGGKASSGSFEPGSEKAREAGQKGGSSS

SEQ ID NO: 3373 - DNA, 452 bp, Muscodor strobelii
  misc_feature: SGI EST ID NO. CUFF.8450.0
  misc_feature: Variant of the nucleotide sequence at SEQ ID NO 3371
cggccaggcaagccaagcgggcggctttgccagcatggatgctgacaagcagcgggagattgcttcagagggagggaaggcatcttcgggttcattcgagccagggagcgaaaaagcccgtgaagctggacagaagggcggctcctcatcgtaaaccagcaacattctttcatgtcaggaacggctcatgcagtataaacccacgctggccgtggagcgctctttatggcatcattgttcttgcagttcaatacgttcactacggaatttggagagagtagatgctagatcacatgtagcatctttcgggaatagatctgactgcatcataatgctttgcctgtcaatgtctggacggtcgattgatttgttatacaaacaacttcacgccaatagaatcagccagaagattgtttttcgagtgaaaggatgggatgaaatacctattttac

SEQ ID NO: 3374 - DNA, 1452 bp, Muscodor strobelii
  misc_feature: SGI cDNA ID NO. 560781
  misc_feature: Encodes the peptide sequence at SEQ ID NO 3375
atgttcgacagtgagcgacgactggtccatcccggcctccatctcggcttgggattgtcggcagttcttgtgtgtttgatttctcgctatggcgccggaaccctgccgttcatcattctcttcctcttccgatatgtcagagtgcttggcaatctctactcttatctcttcctctatcgcgtcgtagcagtaccgagaaatgcccatatcaaacctgagaatgttgcagtcctgcttcagtctgttggtgatatggacgaacagttcgaagaatgcgtcaagtgcatcgtacgtcagaagccttacgaacttatcatatgcactacctcgaccaacggtaaccttcagcgactgaaagtggctcgggataagatacagttacagctgaaggaagaagcagaaggcttgtcataccttcaagtccctattcattgtcatgccataggggaatcgaatagacgcaaacaattcctttattcactagagactccactgagtctgtatgagacgcaatccgattccacgaatccttcagccacaccacatccacgaccgccagacagcgtgttagacaacaaggctgtcacggctgtgattatgtgcgacgaccactgctatcctcgaccaggactcatagagcacgcgctagcgcccctgaacatccgcgaaaaggtctgggtggtcaatgtatccgaaagagtccggcgtctacgacaggcgacatggaccaaagacttcatcaactacgtcgcctgcgtgttcgctgcaaggcataacttcgagtgtgccgcgacctatgcccgggatagaggttatctcgacgtttcgggccgatttctgctaatgcgcaaagagttctggcgggacaaagatacgcgagaagcctatgcgactgaatgttggggcggtagcaatcaagtgctgataccggatgacgatgcctggataggccgtcaatgcgctcggaatgatcaagaagtggcgtttcagcttgacgagaagcacatgcttgagattgatttgggaaacaaagactggactaagcttaagaaccagctacttcgctgggcgaggacttcgttccgtactggatggacggctctgtatgatgatgagatgtggaggaaaagaccatggaccgcctatgccgctaacctcgcgggcatgactaatcttgcactcccgctcgatcttctcctcggctggaatttgtattgcgccacaggcctcctggcccaaccttcgttcagattatctttcctctgtttctggctgttcactaagttcctagagcccagtggacactggagagaagagaagcgagacctgatatacgccataccgggaatcatattcggctggtattacagtattatcaagctttacgcccttcttacagtctacgatatgggatggtcaggacaggctttcaatgatgagctgcaagattag

SEQ ID NO: 3375 - protein, 483 aa, Muscodor strobelii
  misc_feature: SGI Peptide ID NO. 560781
  misc_feature (34)..(479): NCBI GI: 121714871 Blast Desc: capsule polysaccharide synthase Cps1, [Aspergillus clavatus NRRL 1] gi|119403201|gb|EAW13619.1| capsule polysaccharide synthase Cps1, [Aspergillus clavatus NRRL 1]
  misc_feature (34)..(475): NCBI GI: 159123858 Blast Desc: capsule polysaccharide synthase Cps1, [Aspergillus fumigatus A1163]
  misc_feature (34)..(475): NCBI GI: 146324703 Blast Desc: capsule polysaccharide synthase Cps1 [Aspergillus fumigatus Af293] gi|129555460|gb|EBA27212.1| capsule polysaccharide synthase Cps1, [Aspergillus fumigatus Af293]
  misc_feature (34)..(475): NCBI GI: 119483946 Blast Desc: capsule polysaccharide synthase Cps1, [Neosartorya fischeri NRRL 181] gi|119410032|gb|EAW19979.1| capsule polysaccharide synthase Cps1, [Neosartorya fischeri NRRL 181]
  misc_feature (37)..(475): NCBI GI: 154322529 Blast Desc: BC1G_00607 [Botryotinia fuckeliana B05.10] gi|150847941|gb|EDN23134.1| BC1G_00607 [Botryotinia fuckeliana B05.10]
  misc_feature (37)..(479): NCBI GI: 212546101 Blast Desc: polysaccharide synthase Cps1, [Penicillium marneffei ATCC 18224] gi|210064724|gb|EEA18819.1| polysaccharide synthase Cps1, [Penicillium marneffei ATCC 18224]
  misc_feature (37)..(479): NCBI GI: 256731615 Blast Desc: NECHADRAFT_48936 [Nectria haematococca mpVI 77-13-4]
  misc_feature (37)..(479): NCBI GI: 242824380 Blast Desc: polysaccharide synthase Cps1, [Talaromyces stipitatus ATCC 10500] gi|242824390|ref|XP_002488248.1| polysaccharide synthase Cps1, [Talaromyces stipitatus ATCC 10500] polysaccharide
  misc_feature (35)..(478): NCBI GI: 212545693 Blast Desc: capsule polysaccharide synthase Cps1, [Penicillium marneffei ATCC 18224] gi|210064520|gb|EEA18615.1| capsule polysaccharide synthase Cps1, [Penicillium marneffei ATCC 18224]
  misc_feature (37)..(467): NCBI GI: 242824385 Blast Desc: polysaccharide synthase Cps1, [Talaromyces stipitatus ATCC 10500] gi|218713168|gb|EED12593.1| polysaccharide synthase Cps1, [Talaromyces stipitatus ATCC 10500]
MFDSERRLVHPGLHLGLGLSAVLVCLISRYGAGTLPFIILFLFRYVRVLGNLYSYLFLYRVVAVPRNAHIKPENVAVLLQSVGDMDEQFEECVKCIVRQKPYELIICTTSTNGNLQRLKVARDKIQLQLKEEAEGLSYLQVPIHCHAIGESNRRKQFLYSLETPLSLYETQSDSTNPSATPHPRPPDSVLDNKAVTAVIMCDDHCYPRPGLIEHALAPLNIREKVWVVNVSERVRRLRQATWTKDFINYVACVFAARHNFECAATYARDRGYLDVSGRFLLMRKEFWRDKDTREAYATECWGGSNQVLIPDDDAWIGRQCARNDQEVAFQLDEKHMLEIDLGNKDWTKLKNQLLRWARTSFRTGWTALYDDEMWRKRPWTAYAANLAGMTNLALPLDLLLGWNLYCATGLLAQPSFRLSFLCFWLFTKFLEPSGHWREEKRDLIYAIPGIIFGWYYSIIKLYALLTVYDMGWSGQAFNDELQD

SEQ ID NO: 3376 - DNA, 2619 bp, Muscodor strobelii
  misc_feature: SGI cDNA ID NO. 560782
  misc_feature: Encodes the peptide sequence at SEQ ID NO 3377
atggctaccccaagtctgagcagctttcttttcacgtaccgccaatacaaagacgatacagattccattgctgcatggcttgccgaaaatgcagtccgttgccgatacaagattgcaccacttgggcagcctgtagcggcgaccaccggcagactcaagggcaaagcgcgcaagcaagcccgccaggtaccggtcaccgacatccagaaacgtcctcagtaccgcatcaaagtatccgatttcgtggccatgtccaaggtcattgcgcagcatcgccccaaggtggaagtagcgaaagcaattaatactctttttgatcgcaccatccacggccgccagacctttgctcaagtatatgcgaacggtgcctcgggggcatccggtccctcgggcaccgcagctagcaatgagcggcactcgcacttcattgacatactgaatgcggcctgggagaatcttgtacctttccaagcgtcccggaaagtcgctaggaaagcactatccgccactgaagacaagacagttctgacggaggtcacaaatcgttttgcagatcttcaagttgaacatcccctcgagcagcaggagtcctcttcaacagagcctacggaggtcgtgcaaagtaccaagatatccgacatcaaggtagtagtcgaagaggacgatggcgatgtcgaagaagctttctttgctgccctttacgcctttttctccgagcttaacgatattcgcgactgcttactcttcttgtggtcacaggattcaggacctgagacaatggtcgttgctaacaccgccatccacatggttaggcgcagcgaggcggccttggacgcccttctggaacgtccaaaagcctttcccgcctccagagtgcccgcctggatgtttccttgggtgatgcttctgcacaaggaaggggcacccaagcattctgatctaggctcgttgatcgaaacagtgagagacgtgcccaatatcatgggtgaggtcaatgacaactggaaatgggattcattcgtcttcttcgatgcctggagaattgtgaagttcggcgccatcggattatccgaagcaaagcctgatgctaagtatggtcctggggacgccgagagactcaggatattcaaatccgtacttcattatgcaaccctgtttgactcctcgcgcattgtcgaagatgagatttctcgcggcattcgcacagtcacagaaacgaaaacgccttccatatgggcagcgttcggattccagttgctcctcgacatcgtgagagttcgtggtgaggagggtctcgacaagggcttccgagaacttagagggtacactggtgttcggaccagtttcgcccgggacgatattgccacgaaggtcctactccccccgattgggccggtacccccacatattcgctttctagagaacttcctcgatgacatggcagaacaggccttgatgggggagaacgaggagtgggacgacgaaccagacttcgcgacgtccataatgaaacaaatcatggaccctaggcggttactgaagcaaaatccccttcggtgtggccttctccaatatcacttgcatcagcaattacatgaccaagcagtgacttttgataacggtttgctcatgatgacacccatgatccatttatattctgcctgtcggctttgctttcccgaatcgccagtctggccagatatggaattcgtcatacaatctcaagacgttgatcgcttgttcttcgggggttcgcccactacattgaaagagtccgttacgaaagtagctttagcaatgggcgtttctaccactgccatggcccgaaacaggcgcttttcaaaagtgaaaatgaactcggacaaactgcgcttggttgcaaacggctgcccagtcggtcgtttcttcgcagagtggcttggtaacccacccgcagacgccgacataatcctccccgctattctgagactgttagacgatccgacgtctgtagacacgatgtggaagatgggctaccacgacgagagtgagaagcctgactatctaaaagattggccattgccacacacaaattcgaggtccgttttgaacaacatgtggtacttcctgcaatgcgaatcggatattactttttttgactggctgtccatgatgcgaacgtgcagtgatctcgggacgcgcattgccaacgccctcggaaaggaggaaccaaacatgttctcatgggtgacccacgagctactccgcgaagcggagatgacacaagcacttggtgacaacctgggctcctcaagcaattccatgctaaatagcagtggtctgaaaaaagcacaccaaatgattcaggagctcgtcacaagacccctgagccccgacgaaatggaaaaaccgatgcctaaggtcgcagaacaaggtctgcaggcctttggcggcgacaataatctttgtcgtctcgctatctggtataaaatggatcggcctgggatattcagtcagagtgtggaagatgtgcgaggaaagctgtacgcaaactggtctgatgacttagtgaagcaaggcgtcgtattcgacgagatgaaaaggcaaaatgaaaaaatgacacgtgaagaagcacactga

SEQ ID NO: 3377 - protein, 872 aa, Muscodor strobelii
  misc_feature: SGI Peptide ID NO. 560782
  misc_feature (12)..(723): NCBI GI: 189189652 Blast Desc: PTRG_00832 [Pyrenophora tritici-repentis Pt-1C-BFP] gi|187972771|gb|EDU40270.1| PTRG_00832 [Pyrenophora tritici-repentis Pt-1C-BFP]
  misc_feature (178)..(735): NCBI GI: 189211723 Blast Desc: [Pyrenophora tritici-repentis Pt-1C-BFP] gi|187979389|gb|EDU46015.1| [Pyrenophora tritici-repentis Pt-1C-BFP]
  misc_feature (12)..(660): NCBI GI: 225556801 Blast Desc: conserved [Ajellomyces capsulatus G186AR]
  misc_feature (12)..(839): NCBI GI: 240111699 Blast Desc: CPC735_011620 [Coccidioides posadasii C735 delta SOWgp]
  misc_feature (12)..(724): NCBI GI: 119172852 Blast Desc: CIMG_09993 [Coccidioides immitis RS]
  misc_feature (12)..(541): NCBI GI: 238488349 Blast Desc: conserved [Aspergillus flavus NRRL3357] gi|220697800|gb|EED54140.1| conserved [Aspergillus flavus NRRL3357]
  misc_feature (12)..(785): NCBI GI: 238844174 Blast Desc: conserved [Microsporum canis CBS 113480]
  misc_feature (12)..(274): NCBI GI: 169762544 Blast Desc: [Aspergillus oryzae RIB40] gi|83770200|dbj|BAE60333.1| protein product [Aspergillus oryzae]
  misc_feature (382)..(775): NCBI GI: 169624449 Blast Desc: SNOG_15484 [Phaeosphaeria nodorum SN15] gi|160705172|gb|EAT77149.2| SNOG_15484 [Phaeosphaeria nodorum SN15]
  misc_feature (12)..(613): NCBI GI: 67522242 Blast Desc: AN1578.2 [Aspergillus nidulans FGSC A4] gi|40745129|gb|EAA64285.1| AN1578.2 [Aspergillus nidulans FGSC A4] gi|259486908|tpe|CBF85149.1| TPA: conserved [Aspergillus FGSC
MATPSLSSFLFTYRQYKDDTDSIAAWLAENAVRCRYKIAPLGQPVAATTGRLKGKARKQARQVPVTDIQKRPQYRIKVSDFVAMSKVIAQHRPKVEVAKAINTLFDRTIHGRQTFAQVYANGASGASGPSGTAASNERHSHFIDILNAAWENLVPFQASRKVARKALSATEDKTVLTEVTNRFADLQVEHPLEQQESSSTEPTEVVQSTKISDIKVVVEEDDGDVEEAFFAALYAFFSELNDIRDCLLFLWSQDSGPETMVVANTAIHMVRRSEAALDALLERPKAFPASRVPAWMFPWVMLLHKEGAPKHSDLGSLIETVRDVPNIMGEVNDNWKWDSFVFFDAWRIVKFGAIGLSEAKPDAKYGPGDAERLRIFKSVLHYATLFDSSRIVEDEISRGIRTVTETKTPSIWAAFGFQLLLDIVRVRGEEGLDKGFRELRGYTGVRTSFARDDIATKVLLPPIGPVPPHIRFLENFLDDMAEQALMGENEEWDDEPDFATSIMKQIMDPRRLLKQNPLRCGLLQYHLHQQLHDQAVTFDNGLLMMTPMIHLYSACRLCFPESPVWPDMEFVIQSQDVDRLFFGGSPTTLKESVTKVALAMGVSTTAMARNRRFSKVKMNSDKLRLVANGCPVGRFFAEWLGNPPADADIILPAILRLLDDPTSVDTMWKMGYHDESEKPDYLKDWPLPHTNSRSVLNNMWYFLQCESDITFFDWLSMMRTCSDLGTRIANALGKEEPNMFSWVTHELLREAEMTQALGDNLGSSSNSMLNSSGLKKAHQMIQELVTRPLSPDEMEKPMPKVAEQGLQAFGGDNNLCRLAIWYKMDRPGIFSQSVEDVRGKLYANWSDDLVKQGVVFDEMKRQNEKMTREEAH

SEQ ID NO: 3378 - DNA, 2616 bp, Muscodor strobelii
  misc_feature: SGI EST ID NO. CUFF.8563.1
  misc_feature: Variant of the nucleotide sequence at SEQ ID NO 3376
aagcctttcccgcctccagagtgcccgcctggatgtttccttgggtgatgcttctgcacaaggaaggggcacccaagcattctgatctaggctcgttgatcgaaacagtgagagacgtgcccaatatcatgggtgaggtcaatgacaactggaaatgggattcattcgtcttcttcgatgcctggagaattgtgaagttcggcgccatcggattatccgaagcaaagcctgatgctaagtatggtcctggggacgccgagagactcaggatattcaaatccgtacttcattatgcaaccctgtttgactcctcgcgcattgtcgaagatgagatttctcgcggcattcgcacagtcacagaaacgaaaacgccttccatatgggcagcgttcggattccagttgctcctcgacatcgtgagagttcgtggtgaggagggtctcgacaagggcttccgagaacttagagggtacactggtgttcggaccagtttcgcccgggacgatattgccacgaaggtcctactccccccgattgggccggtacccccacatattcgctttctagagaacttcctcgatgacatggcagaacaggccttgatgggggagaacgaggagtgggacgacgaaccagacttcgcgacgtccataatgaaacaaatcatggaccctaggcggttactgaagcaaaatccccttcggtgtggccttctccaatatcacttgcatcagcaattacatgaccaagcagtgacttttgataacggtttgctcatgatgacacccatgatccatttatattctgcctgtcggctttgctttcccgaatcgccagtctggccagatatggaattcgtcatacaatctcaagacgttgatcgcttgttcttcgggggttcgcccactacattgaaagagtccgttacgaaagtagctttagcaatgggcgtttctaccactgccatggcccgaaacaggcgcttttcaaaagtgaaaatgaactcggacaaactgcgcttggttgcaaacggctgcccagtcggtcgtttcttcgcagagtggcttggtaacccacccgcagacgccgacataatcctccccgctattctgagactgttagacgatccgacgtctgtagacacgatgtggaagatgggctaccacgacgagagtgagaagcctgactatctaaaagattggccattgccacacacaaattcgaggtccgttttgaacaacatgtggtacttcctgcaatgcgaatcggatattactttttttgactggctgtccatgatgcgaacgtgcagtgatctcgggacgcgcattgccaacgccctcggaaaggaggaaccaaacatgttctcatgggtgacccacgagctactccgcgaagcggagatgacacaagcacttggtgacaacctgggctcctcaagcaattccatgctaaatagcagtggtctgaaaaaagcacaccaaatgattcaggagctcgtcacaagacccctgagccccgacgaaatggaaaaaccgatgcctaaggtcgcagaacaaggtctgcaggcctttggcggcgacaataatctttgtcgtctcgctatctggtataaaatggatcggcctgggatattcagtcagagtgtggaagatgtgcgaggaaagctgtacgcaaactggtctgatgacttagtgaagcaaggcgtcgtattcgacgagatgaaaaggcaaaatgaaaaaatgacacgtgaagaagcacactgaggaggaggaaccatccggactgaagagcgagagacgaccagaaaggctggcaaatagccatgcgcatgccctctggctcctgcgctgggtaagaatatttgcttgagtgtaagcttacgcttttgcctaattacgcggcgtcacgagactgctattctagtaaagaactgttgaccaatgtgaaagcttcagggatcgagttatcaaattcgcaagtctaaatatagtgttattgcggctaagatacacaaggacaatgaaaaggataggctttggccagtgggcagcacatttcgggatgcggctattttccttggcttagcgtattgaattgcgttttattggggctcccacctgaacctttgttcaggtaaacggcgattatatatgtttcgccttgcagaatactaaatctaactacgttaggctctctgagaaaatgcgatctggatgaaataatattcttgagttatttggaatgaaagtgtaacgagaacagcctcacgtgttttagatcactcgtcacatggttctccgcgacgagtaagcgcgaggaactagaaatcggtgtcgatctatttttggtctatatctatggggatctatagacgtctttgggccagctcactcgacttggccatatcactaatctacctctatcactctagttttggtgaccaacgcaacgctgtagcttgccgcagccattttaacgcctggtcctgcagctagtttcgtccagtctgagtggtctacacacttccgacagctaatcttgcagctcatcattgaaagcctgtcctgaccatcccatatcgtagactgtaagaagggcgtaaagcttgataat

SEQ ID NO: 3379 - DNA, 510 bp, Muscodor strobelii
  misc_feature: SGI cDNA ID NO. 560783
  misc_feature: Encodes the peptide sequence at SEQ ID NO 3380
atgttttgtctacggagctggctcccgctcctcttcatccccaccaacgcctcgcccgccttcatcttcctcttcttcgtctgcacatacttcctcaaccggccctgcgtctactgctccgtcctgctcatcatcctcttcttcacctcctgctactggtccgaccgctgcttcttcgacttcaacagcaactggttccaccagcgcagtgcccaccccaccccctcgaccgctccctggctgcccgccaccttcacgaagtcgcccctccatgtagacaataacaccgccgccatcacggtgacagcctcagacgaaatctatgacggcctcaactcctctgccgtcgagatgctcaacaccacggcgtccgccctcgctggcatcgccgccgacgagctcgcccgcaagaaggctgagtggaccggtctcggcatcgaatggttgcgcagcctgctcggtcgcagggagtggcgcatcgagtgcatggacctgaacatccggctctag

SEQ ID NO: 3380 - protein, 169 aa, Muscodor strobelii
  misc_feature: SGI Peptide ID NO. 560783
  misc_feature (1)..(56): Pfam Id: PF06726 Pfam Desc: Bladder cancer-related protein BC10
  misc_feature (1)..(169): NCBI GI: 46109502 Blast Desc: FG01633.1 [Gibberella zeae PH-1]
  misc_feature (1)..(169): NCBI GI: 85109996 Blast Desc: NCU05373 [Neurospora crassa OR74A] gi|28924854|gb|EAA33950.1| conserved [Neurospora crassa OR74A]
  misc_feature (1)..(169): NCBI GI: 116200299 Blast Desc: CHGG_08305 [Chaetomium globosum CBS 148.51] gi|88179584|gb|EAQ87052.1| CHGG_08305 [Chaetomium globosum CBS 148.51]
  misc_feature (1)..(169): NCBI GI: 156050449 Blast Desc: SS1G_07811 [Sclerotinia sclerotiorum 1980] gi|154692212|gb|EDN91950.1| SS1G_07811 [Sclerotinia sclerotiorum 1980]
  misc_feature (7)..(169): NCBI GI: 261356915 Blast Desc: conserved [Verticillium albo-atrum VaMs.102]
  misc_feature (1)..(169): NCBI GI: 171683748 Blast Desc: protein product [Podospora anserina] gi|170941834|emb|CAP67487.1| protein product [Podospora anserina]
  misc_feature (1)..(169): NCBI GI: 154298263 Blast Desc: BC1G_11976 [Botryotinia fuckeliana B05.10] gi|150858162|gb|EDN33354.1| BC1G_11976 [Botryotinia fuckeliana B05.10]
  misc_feature (1)..(169): NCBI GI: 226290441 Blast Desc: conserved [Paracoccidioides brasiliensis Pb18]
  misc_feature (1)..(169): NCBI GI: 226283015 Blast Desc: conserved [Paracoccidioides brasiliensis Pb01]
  misc_feature (1)..(169): NCBI GI: 212538127 Blast Desc: conserved [Penicillium marneffei ATCC 18224] gi|210068961|gb|EEA23052.1| conserved [Penicillium marneffei ATCC 18224]
MFCLRSWLPLLFIPTNASPAFIFLFFVCTYFLNRPCVYCSVLLIILFFTSCYWSDRCFFDFNSNWFHQRSAHPTPSTAPWLPATFTKSPLHVDNNTAAITVTASDEIYDGLNSSAVEMLNTTASALAGIAADELARKKAEWTGLGIEWLRSLLGRREWRIECMDLNIRL

SEQ ID NO: 3381 - DNA, 2842 bp, Muscodor strobelii
  misc_feature: SGI EST ID NO. CUFF.8545.0
  misc_feature: Variant of the nucleotide sequence at SEQ ID NO 3379
agcgacatgacactcgcagagtggaatcaggcactgaacgtgaaggtgacaggttcgcgcaacctgtgggagacgttgagctccagcaacgcggacggcagcctcgacttcttcgtcatgctatcgtccatgatctcgacaatcggcaacacgggccaggccaattacggcgcgggcaactcgttccaggacgcctacgcaaggcatctggcttcgcaaggccacaacgctgtgacgatcaatgtgcccatgatgagcgacgcgggcatcatcgccaccaagcccggcctgggagagtacttcatctcgattggctggccgcacatgatgacggacgaactgatcacgtctatggactactactgccgccccttggctaagactggagaggtgacggtggagggagcgcaggttgtgccgcggatgtggctgccccgatacactaaagccgaaggcgcgatcgagcttctgtgggagtatgacccgatgttcagccagatggtgctgcacggcgcgcaagctggacaagctgcgggtgcgaagacctcgggcaatagtacagcggcgtcgctgcttggatcggcccaatctcaagaggaggcacatcaagtcgtgctccaggcgctgctggagaagctgacaaaggtgctcagcgtcgatctggccgagctcgacgcttcgaggcccatgcatgcgtacggcgtggactcgctggtggccgtcgagctccggacatggatgaccaaggtgatcggttccgacgtgtcggtgtttgagatgacaggcggccagcgcatcgagcagatcgccgccaaggctgccgcgacgtccagattcgtacagctgccggccgcggcctagattgtatgatgccgtgtctgcatgatacacgcctaaagtatcaacctacgcctagattgcaaatggctactacaagcaagtgctgtgtggatatcttcgcatgttgtgtctcaaacgaccttgccgtagctttcgggttgttcaattgctgtcgagatacaagcccggcttcgaatgagctgtccatcggggacgagaaccatgtccacctcaaatgtgagagtgccttttctcggtcaatgtccaacccctttgcgctcctaggttgaattgaaaaggtggttaagggtacactcggacgagccatacaagccgtgcaaggtgtacctatgatttgtgtggcctacggctgtggaccaggcccaagaagagatagccaagtcaatagatgcagcgttgaatagatatctttcttgctacagttcttgaattttgaaaaatttgaaacgacacgtgcaggagtataatgcttctgccattctcaagtgttccacaccgtgactatcatgaattgttcgctatcaagcgtgctgctcgatgcctccaaaatctctaaggacagcgaccccaccttgagttttaccatagctacctccaagcaatttggtaaggaaatactcgataacatgggattcatcgggttactcgcagtcggttagatgcgtgttactctgcgctagagtaacagggcacgctcctgcttcaagttggtgatttggcagagatttggcataaggcaggcgtggtagggagtcacacgcgtcagtcggggctagcatcgggatgtagctgccccagatttccgacattgaattaaggctatgtactaaggctggattagataatcagagacgcgttacctaatcggacagccgatgacctcttttccgccctgaaacttggacccggtaccaaccaagccaactgcttcggccgccactttcgccgccgcactctgactgcacacacccgcaccgcctctcaccaacaaaggcgtgtctgtccttggatctctttgatcgccgccacctccaccgccgccttgcccggccagccgattagccactgcccaccaccaccgccttgggctctgagcccttcccgtcgacaccctcgacaccctgagaaacacaccccaccggcgccatgttttgtctacggagctggctcccgctcctcttcatccccaccaacgcctcgcccgccttcatcttcctcttcttcgtctgcacatacttcctcaaccggccctgcgtctactgctccgtcctgctcatcatcctcttcttcacctcctgctactggtccgaccgctgcttcttcgacttcaacagcaactggttccaccagcgcagtgcccaccccaccccctcgaccgctccctggctgcccgccaccttcacgaagtcgcccctccatgtagacaataacaccgccgccatcacggtgacagcctcagacgaaatctatgacggcctcaactcctctgccgtcgagatgctcaacaccacggcgtccgccctcgctggcatcgccgccgacgagctcgcccgcaagaaggctgagtggaccggtctcggcatcgaatggttgcgcagcctgctcggtcgcagggagtggcgcatcgagtgcatggacctgaacatccggctctagagcaagcgagagagagagacagacagacagacagacagagaagggtgaatgaggcatgagaactttgtggatcttgtctagagtcacggtggcagatttggggtttgtttccgggaacatggacagttgcatggcgtcggcgttcagcgtttgggtatagagtccgaggcacctggtacatgagcctcaagatgtatattcgcccgtcctgcatacattgtagcattttgtcggccgctcgagccgtttggccagtgctaatcatatgatgctcacattctgtgcataatttgatacaattgttttctatatgagatgttcgtgg

SEQ ID NO: 3382 - DNA, 7305 bp, Muscodor strobelii
  misc_feature: SGI cDNA ID NO. 560784
  misc_feature: Encodes the peptide sequence at SEQ ID NO 3383
atgtctgtagaaccaattgcagtcatcggtctagactgcaaatacccatgcgatggagatacaccagagaagttttacgaattcctccttgagggtaggtcagcgaggaaacctataccggcggatcgatacaatgcagccgctttctggcatccggataacaaaagagatggagtgattggcggtaaggaagctcacttcatcaacgcgaatgtgaaggctttcgacgccccctttttctcaattaccccagccgaggccaactgcatggatcctcagcaacgaatgctattggagtgcgcctatacagcgtttgaaagcgctggtgccaccatcgatcagcttcagggatctcagacgggtgttttcgtggggtcattcgtctgggattacaaagacattatgaggaaagatctcgatggaaacatgttgtatacaggatccggttctatacccgccacactggctggacgtgtttcgtacttctacaatctcaaaggaccggctcttctggtcgataccgcctgctcgagtagtatggtgtcactccatcaggctatagtcagcttgaaacaaggggactgtgacatggcccttgcgtgcggcaccaacttgatactcggccccgaaatgggcttggagttgaacggtttgggtgtgctcgacaggacttctacatcatatacctacgatgagcgggccggcggctacggcagaggtgaggctatcggtgccatagtgctcaagcgcatgtcagatgcattacgcgatggtgatactattcgcgccgtcatccggaactcaggctccaaccaagacggtcgctctaatgggctgacggctcccgacaagaatgctcaagttgccctcatgcgcaagacatacgagcaagcgggtctcgatccatcaataacgcggttcttcgaagcccacggcacaggaacacaagcgggagatccgatagaggcatccgcaattagcgaggtgttctctcgctatcgatcagctgaagagccgctgcttgtcggagcaatcaagacaaacgtcggccattctgagggagcttccggaatcgagtctgtcatcaagtgtattctcactgtcgaaaacggcatcatcccggccaatgcgtggttcaagaaggcgaaccccaaaatcccaatggataagtggcacttcgattttgtcacaaaggccttaccatggccgaagacggaacatggcattcgtcggatttctatcaactctttcggtgtctccggtacgaatgctcacgtcgtgatggacgatgctatttcatacttgaaagaacgtggctgcagcgcgcctcacaagacaatagaagtccctagattgcctgatgcagattcaaactactcaagccttgcagccagcacttcaagcgtcttagacgaggagtcggacctctcgggcatctcaacgcccgcgagcagtagcccgagcttcacaaacagtgattcgactctcacagcgcctcagttatttgtgctcagttcgcacgatcaggacggaatctccagattgtgtaatgtgtacaagcagagcttgccacgcttcaaggattcactatgcgacatgagttttactctggcagcgaagagaacccgattcaactggcgggtggctattgtcgccgactcgatggcttcactgcgagaagccctgtccgagaaacagcaagccatacgagtgccagccgagcctggcctcggactcgttttcaccggtcaaggcgcgcagtgggctcgcatgggcttggaactggtgcatttcccggtgttcaaaaacagcatcgaagaagcggataagtttatgagcaagctaggtagctcgtggtctgcattggacgagctttccaaatctgcaggacagtccaaagtcaacgaagccgagctctcgcagcctttgtgcacaatccttcaagtggcgcttgtagacttgctcacatcttggggtgtcacagcccgcgccgtagccggccactcctcaggcgaaatcgccgcagcatacgctgttggggctgtatccaaggagactgcctggaaagtggctttctggcgcggtaacaaaggagccaaactactgcgaactagcactggtactaaaactactatggccgccgtgggactcggcttaggaaaagccaacgaagctatcgacaaagtcaatcaggcaggcttccagaacaccaagaagctcactgtcgcttgtatgaacagcaaggacagccataccatcagcggagacgccgtgcagatcgaagcgcttgtggaaatgctgaaggaggacggagtcttcgcacggaaactggccgtcgaattggcataccattctccatacatggagcccatggcagcggagtacaccgaagctatgggtacacttgaacccggatcttggaccagtgacgcgcctagacccaagtatttctcatcgaccaacggcacgctggttgaccactctagcctgcttaaagcggattactggacgaagaacctcgtctcgcccgttcgcttcaatgaggccatgaaggccatgttcgaggctcagacaaccaacaatgcccacctagtgacagacgttctcgaagttggtcctcacgctgccctcagtggcccactccggaacatcatcgacgaggccaggggtaatggtgccgtgcgttatcacagcattctgagacgtggagcacctgatttggtgacggcgctgcagggtgcgggatcgctcttcacccgtggcatcaagattgacctcgctcaggtcaaccacgtcgaaggctacgagccctcgcttgtgatcggcctccctcgctatccttttaatcactccaaagagtactggaacgagagccgcctcagcagaaacattcgcctacgtccccatgctcgccatgagctgcttggagtgactgggaacgactgggatgggacatatgatgccgtctggcgcaattggattcgactctcagagaacccttgggttgaggatcacgtcgtttctgacgcggtcttgtaccctgccgctggcatggtggtcatggcagttgaaggttgtcgccagctagcagagcgctcgaacccggacaagactattaaggggctccggcttagggaggtttctttccattcggcaattcaggttccgagtgagggtgtcgagtcgcatctatatctgcgacctgtgaagcaagccgcaatcgagacgaagcaatcggaatggcgtgaattccaagtttgcacggcacaggaagatgattcatggagagagcattgccgcggccagatcttgattgagtacgaagaatcagattcggccgtagacggcggtcttgaggagaagctcttgggagccaagtgtctgagtaatcttgacgaagcccgcaagctatgtaccacccaggttgacgcaaaagatgtgtacgatggatggaagaaactaggccttgctttcggcccgttatttcagacagtccaagagccatacgttgagtgcaactcgggtaaggccgttgccaaggtcgtgtcgacggtaccgatgctggaaaaactcatgccttacgaatttgtccagccacatcttattcaccccaccacacttgatggcattttccaggtcagtctcgctccactcatcgccaaccctgcgcgtgagcagaagagcccaattgtcgtgagcttcatcgacgaactatggatttctgccacgcagccgtcagccaacacatactatgaggcctctgccgagaccagatctgcagcccggaagcaatttgaaatgacttgtaccgccgttgcggccgacaccagggagcctacggtactggtgaaaggattgaagataaccgagcttgaagacgacaaccaaaccgctgcgtcggagaataacatcctcaatcgatcatggaacttcaagtggcaaccagatatcgagcgtctgaaccgggaagaaaccgagaagctctttagcacagacggtggattcgtgagatatctggacgctttagcgcataagttcccttcggccaagatcctcgacataaatgcccaggctgccagaccgactcaagatgtactcgcgactctcgggaagcgtttctctgaatatcacgtcgcgtcaactggaggtcaggagaacgagaagcctttggacgagcgcgtaagcttccatacactcgacttatgccgggctcccgacacccagggcttcgaggcaaagacttatgatacaatcatcgccacaacagctttaggcgcacgtagagacctcgatatcacattggcaaacatacaaagccttctgaaatctggtgggaaattcattctgagtgccccagagagtattccagcaactcaagaatgggattcacgattgaccaagctcggttttgccggaatcgaagtttcattccaagacgcaggtcgcacagtgatggtgaccagtgtgccgagtgcaaccaatgagtcatcttctataccgtcccagagctacttcatcgctgtaaactcgacgtctgcgctgcagatgtccgtagccgacaagttgtcatccacactgtcggcaaggggtcaggcagtagtgagcggttcgctgaaggaattctccgagctcgcctcgacgaagggccaagagcacctcaaagagttcacatgcatcctgttgccagaattacaggagagtctcctcaccgctgtcacagaagagagcctgtccgtcttgaagacgatgatggcgaactgcaaaaggatcctctgggtgaataaggatggctcgccggacacagatctggtgccgggcttcgcattgtgcctccgtcttgaaagaccagatctcgatttcacaatccttacattccagccttctgaagctatggaagttatagctgccaagatcatcgagatcgacgacgtcactgtggcggcaggcgatgggcccaaggagacagtctacaaagtgcaagacggcgtggtgaacgtagtacggacagtcgaggccgaggctgtgacaaatcatatcaagaaactcagctcgaccgcagagattgtagatacggccttcggcgccgacccatctcgctcgttgcgcctccagatccaggagatcgggcttctcgacacattgcgctttgacgacgaccaattatacaccactgcgcttgatgatactgaagttgagttccggaccatggctgtcggcgtcaacttcaaagacttggccgtgatgttgggtaagattgacgagaaacctacgggtcttgaagccgcgggtatcgtcacaagggtcggagccggtgtgacgcgattcaagaaaggcgatcgtgtcttcagtctcacatacaagggcgcctactcgacgcacgctaggggagtagaaggcaccaccgcgcatatgccggagggtctgtcgtttgctgatgcagcggcgatcccagtcgtatacctgactgcctacaaatgcctttacgacatcggcgacttggacaaacgcgtccgccgcggcaagaagccgactgttctgattcacacggctgctggtggtcttggccaagcggccgttcagctggcgcagcgagagggtgcggagatcttcgtgacagtgggtagcttggagaagcgggacttcgtcgagaggacatacggcattcctcgcgatcacatcttctcgagtagagacttgacgttcaagactggtgtcatgcgcatgacgaacggccgtggtgttgatatcatccttaacagtctggacggtgacaagctacgagcaacctgggagtgtatcgcaccgttcggaagcttcgccgaggttggcctgacggatatcgagtcgagagcacgcatccccatgggatcgtttgcacgaggcgtcagatttgaagccatggagttgtcgtatatgcaaagaatggacatgggactgctagaagacctctgggagcggactgtaacaagcgtgttggaccaggggctcaagcgcacgacgccaatcacgacgttctccatttcaaacatccaggaggccctccgcgatatgcaagcaggcaaacatctcggcaaaatggtgattgtacctaacgagaacgacatcgtgccggtggtacaggcgccgaagcctttatccgagtttgctgccgacgcgacgtacgtcgtttctggcggattcggaggtctggggcagagattcatacgctggatggtaaagcagggagcgcggaacctcatcgtcctttcgagatctgggcctaaggatgcctccgccaaagcactcgtcgccgacctaggccgtgagggtgtgaagatagcagccccagcttgcgacatcacgaataagaccatccttaaaaatacgatcctctcctgtctctcgactatgccaccggtcagaggatgtatacaagcctctgtcacacttgctgataaccgcttcagcgacatgacactcgcagagtggaatcaggcactgaacgtgaaggtgacaggttcgcgcaacctgtgggagacgttgagctccagcaacgcggacggcagcctcgacttcttcgtcatgctatcgtccatgatctcgacaatcggcaacacgggccaggccaattacggcgcgggcaactcgttccaggacgcctacgcaaggcatctggcttcgcaaggccacaacgctgtgacgatcaatgtgcccatgatgagcgacgcgggcatcatcgccaccaagcccggcctgggagagtacttcatctcgattggctggccgcacatgatgacggacgaactgatcacgtctatggactactactgccgccccttggctaagactggagaggtgacggtggagggagcgcaggttgtgccgcggatgtggctgccccgatacactaaagccgaaggcgcgatcgagcttctgtgggagtatgacccgatgttcagccagatggtgctgcacggcgcgcaagctggacaagctgcgggtgcgaagacctcgggcaatagtacagcggcgtcgctgcttggatcggcccaatctcaagaggaggcacatcaagtcgtgctccaggcgctgctggagaagctgacaaaggtgctcagcgtcgatctggccgagctcgacgcttcgaggcccatgcatgcgtacggcgtggactcgctggtggccgtcgagctccggacatggatgaccaaggtgatcggttccgacgtgtcggtgtttgagatgacaggcggccagcgcatcgagcagatcgccgccaaggctgccgcgacgtccagattcgtacagctgccggccgcggcctag

SEQ ID NO: 3383 - protein, 2434 aa, Muscodor strobelii
  misc_feature: SGI Peptide ID NO. 560784
  misc_feature (578)..(924): Pfam Id: PF00698 Pfam Desc: Acyl transferase domain
  misc_feature (1728)..(1804): Pfam Id: PF08240 Pfam Desc: Alcohol dehydrogenase GroES-like domain
  misc_feature (2052)..(2223): Pfam Id: PF00106 Pfam Desc: short chain dehydrogenase
  misc_feature (1841)..(1985): Pfam Id: PF00107 Pfam Desc: Zinc-binding dehydrogenase
  misc_feature (4)..(254): Pfam Id: PF00109 Pfam Desc: Beta-ketoacyl synthase, N-terminal domain
  misc_feature (262)..(380): Pfam Id: PF02801 Pfam Desc: Beta-ketoacyl synthase, C-terminal domain
  misc_feature (2052)..(2236): Pfam Id: PF08659 Pfam Desc: KR domain
  misc_feature (579)..(924): Pfam Id: PF00698 Pfam Desc: Acyl transferase domain
  misc_feature (1728)..(1781): Pfam Id: PF08240 Pfam Desc: Alcohol dehydrogenase GroES-like domain
  misc_feature (1841)..(1964): Pfam Id: PF00107 Pfam Desc: Zinc-binding dehydrogenase
  misc_feature (1403)..(1447): Pfam Id: PF08242 Pfam Desc: Methyltransferase domain
  misc_feature (4)..(2428): NCBI GI: 40787382 Blast Desc: polyketide synthase [Cochliobolus heterostrophus]
  misc_feature (499)..(2428): NCBI GI: 145607782 Blast Desc: MGG_13591 [Magnaporthe grisea 70-15] gi|145015284|gb|EDJ99820.1| MGG_13591 [Magnaporthe grisea 70-15]
  misc_feature (3)..(2410): NCBI GI: 121700450 Blast Desc: polyketide synthase, [Aspergillus clavatus NRRL 1] gi|119396632|gb|EAW07064.1| polyketide synthase, [Aspergillus clavatus NRRL 1]
  misc_feature (1)..(2428): NCBI GI: 212531917 Blast Desc: polyketide synthase, [Penicillium marneffei ATCC 18224] gi|210071479|gb|EEA25568.1| polyketide synthase, [Penicillium marneffei ATCC 18224]
  misc_feature (4)..(2434): NCBI GI: 212541686 Blast Desc: polyketide synthase, [Penicillium marneffei ATCC 18224] gi|210068297|gb|EEA22389.1| polyketide synthase, [Penicillium marneffei ATCC 18224]
  misc_feature (1)..(2428): NCBI GI: 256721575 Blast Desc: NECHADRAFT_78513 [Nectria haematococca mpVI 77-13-4]
  misc_feature (3)..(2427): NCBI GI: 145244150 Blast Desc: An11g05940 [Aspergillus niger] gi|134079268|emb|CAK40750.1| protein product [Aspergillus niger]
  misc_feature (3)..(2428): NCBI GI: 115386854 Blast Desc: ATEG_07282 [Aspergillus terreus NIH2624] gi|114190966|gb|EAU32666.1| ATEG_07282 [Aspergillus terreus NIH2624]
  misc_feature (5)..(2428): NCBI GI: 187940971 Blast Desc: reducing polyketide synthase [Pochonia chlamydosporia]
  misc_feature (5)..(2426): NCBI GI: 46138067 Blast Desc: FG10548.1 [Gibberella zeae PH-1]
  misc_feature (4)..(1238): SWISSPROT Homolog: EC 2.3.1.161 Lovastatin nonaketide synthase
  misc_feature: Useful for fungicidal and/or biocontrol applications
MSVEPIAVIGLDCKYPCDGDTPEKFYEFLLEGRSARKPIPADRYNAAAFWHPDNKRDGVIGGKEAHFINANVKAFDAPFFSITPAEANCMDPQQRMLLECAYTAFESAGATIDQLQGSQTGVFVGSFVWDYKDIMRKDLDGNMLYTGSGSIPATLAGRVSYFYNLKGPALLVDTACSSSMVSLHQAIVSLKQGDCDMALACGTNLILGPEMGLELNGLGVLDRTSTSYTYDERAGGYGRGEAIGAIVLKRMSDALRDGDTIRAVIRNSGSNQDGRSNGLTAPDKNAQVALMRKTYEQAGLDPSITRFFEAHGTGTQAGDPIEASAISEVFSRYRSAEEPLLVGAIKTNVGHSEGASGIESVIKCILTVENGIIPANAWFKKANPKIPMDKWHFDFVTKALPWPKTEHGIRRISINSFGVSGTNAHVVMDDAISYLKERGCSAPHKTIEVPRLPDADSNYSSLAASTSSVLDEESDLSGISTPASSSPSFTNSDSTLTAPQLFVLSSHDQDGISRLCNVYKQSLPRFKDSLCDMSFTLAAKRTRFNWRVAIVADSMASLREALSEKQQAIRVPAEPGLGLVFTGQGAQWARMGLELVHFPVFKNSIEEADKFMSKLGSSWSALDELSKSAGQSKVNEAELSQPLCTILQVALVDLLTSWGVTARAVAGHSSGEIAAAYAVGAVSKETAWKVAFWRGNKGAKLLRTSTGTKTTMAAVGLGLGKANEAIDKVNQAGFQNTKKLTVACMNSKDSHTISGDAVQIEALVEMLKEDGVFARKLAVELAYHSPYMEPMAAEYTEAMGTLEPGSWTSDAPRPKYFSSTNGTLVDHSSLLKADYWTKNLVSPVRFNEAMKAMFEAQTTNNAHLVTDVLEVGPHAALSGPLRNIIDEARGNGAVRYHSILRRGAPDLVTALQGAGSLFTRGIKIDLAQVNHVEGYEPSLVIGLPRYPFNHSKEYWNESRLSRNIRLRPHARHELLGVTGNDWDGTYDAVWRNWIRLSENPWVEDHVVSDAVLYPAAGMVVMAVEGCRQLAERSNPDKTIKGLRLREVSFHSAIQVPSEGVESHLYLRPVKQAAIETKQSEWREFQVCTAQEDDSWREHCRGQILIEYEESDSAVDGGLEEKLLGAKCLSNLDEARKLCTTQVDAKDVYDGWKKLGLAFGPLFQTVQEPYVECNSGKAVAKVVSTVPMLEKLMPYEFVQPHLIHPTTLDGIFQVSLAPLIANPAREQKSPIVVSFIDELWISATQPSANTYYEASAETRSAARKQFEMTCTAVAADTREPTVLVKGLKITELEDDNQTAASENNILNRSWNFKWQPDIERLNREETEKLFSTDGGFVRYLDALAHKFPSAKILDINAQAARPTQDVLATLGKRFSEYHVASTGGQENEKPLDERVSFHTLDLCRAPDTQGFEAKTYDTIIATTALGARRDLDITLANIQSLLKSGGKFILSAPESIPATQEWDSRLTKLGFAGIEVSFQDAGRTVMVTSVPSATNESSSIPSQSYFIAVNSTSALQMSVADKLSSTLSARGQAVVSGSLKEFSELASTKGQEHLKEFTCILLPELQESLLTAVTEESLSVLKTMMANCKRILWVNKDGSPDTDLVPGFALCLRLERPDLDFTILTFQPSEAMEVIAAKIIEIDDVTVAAGDGPKETVYKVQDGVVNVVRTVEAEAVTNHIKKLSSTAEIVDTAFGADPSRSLRLQIQEIGLLDTLRFDDDQLYTTALDDTEVEFRTMAVGVNFKDLAVMLGKIDEKPTGLEAAGIVTRVGAGVTRFKKGDRVFSLTYKGAYSTHARGVEGTTAHMPEGLSFADAAAIPVVYLTAYKCLYDIGDLDKRVRRGKKPTVLIHTAAGGLGQAAVQLAQREGAEIFVTVGSLEKRDFVERTYGIPRDHIFSSRDLTFKTGVMRMTNGRGVDIILNSLDGDKLRATWECIAPFGSFAEVGLTDIESRARIPMGSFARGVRFEAMELSYMQRMDMGLLEDLWERTVTSVLDQGLKRTTPITTFSISNIQEALRDMQAGKHLGKMVIVPNENDIVPVVQAPKPLSEFAADATYVVSGGFGGLGQRFIRWMVKQGARNLIVLSRSGPKDASAKALVADLGREGVKIAAPACDITNKTILKNTILSCLSTMPPVRGCIQASVTLADNRFSDMTLAEWNQALNVKVTGSRNLWETLSSSNADGSLDFFVMLSSMISTIGNTGQANYGAGNSFQDAYARHLASQGHNAVTINVPMMSDAGIIATKPGLGEYFISIGWPHMMTDELITSMDYYCRPLAKTGEVTVEGAQVVPRMWLPRYTKAEGAIELLWEYDPMFSQMVLHGAQAGQAAGAKTSGNSTAASLLGSAQSQEEAHQVVLQALLEKLTKVLSVDLAELDASRPMHAYGVDSLVAVELRTWMTKVIGSDVSVFEMTGGQRIEQIAAKAAATSRFVQLPAAA

SEQ ID NO: 3384 - DNA, 771 bp, Muscodor strobelii
  misc_feature: SGI cDNA ID NO. 560785
  misc_feature: Encodes the peptide sequence at SEQ ID NO 3385
atggaggtactttgtcttggcttctcacgcacaggtacaaactctctgtgcaaagctatggaacttctcagcacgccctgctatcacgcctttgagctcctcgatggcccggactccctcagtcaatgcgagaaatgggaccgggcgatcagggccaaattcttcggcgaaggcaaaccatttggccgcgacgagtgggatgacctgctcggaaactacggtgcagtgacggacgtgccgtctatctgctttgcggacgagctaatggaagcgtacccggaagccaaggtcgtgctggtggaacgtgatattgagcgctggtaccggagttttgacgacgccgttattaagaacgttttcaaccctgtgctcaatgcagtggcattttttgatcattggtatcttggcccaatcttgaaagtgcatcaggactacacccttggttggataggtgctggaacgaaggaagagacgcaggccaggtcgcggtcattctatcgtgagtattacgcacacctgcgagctgtgacaccacccgagaggctatttgagtataagcttggtagcggctgggaaccgctttgcgagtttctaggcaaatcagttcctgatgtcccattccctcatgtcaacgaagctgcagcattggacaagaagatacaaggtgttatacggaaagggatggtcagtgtggccaggaaagcgtttttttacgtgcttcttcctaccgtagctctgggaacaagctacaggtactacgtgaggaattga

SEQ ID NO: 3385 - protein, 256 aa, Muscodor strobelii
  misc_feature: SGI Peptide ID NO. 560785
  misc_feature (1)..(249): NCBI GI: 145239849 Blast Desc: An08g04530 [Aspergillus niger] gi|134077085|emb|CAK45426.1| protein product [Aspergillus niger]
  misc_feature (16)..(247): NCBI GI: 169765908 Blast Desc: [Aspergillus oryzae RIB40] gi|83765280|dbj|BAE55423.1| protein product [Aspergillus oryzae]
  misc_feature (16)..(247): NCBI GI: 238482519 Blast Desc: efflux pump antibiotic resistance protein, [Aspergillus flavus NRRL3357] gi|220700548|gb|EED56886.1| efflux pump antibiotic resistance protein, [Aspergillus flavus NRRL3357]
  misc_feature (16)..(231): NCBI GI: 256722558 Blast Desc: NECHADRAFT_49708 [Nectria haematococca mpVI 77-13-4]
  misc_feature (1)..(219): NCBI GI: 256727924 Blast Desc: NECHADRAFT_7929 [Nectria haematococca mpVI 77-13-4]
  misc_feature (18)..(244): NCBI GI: 115397361 Blast Desc: [Aspergillus terreus NIH2624] gi|114192463|gb|EAU34163.1| [Aspergillus terreus NIH2624]
  misc_feature (3)..(236): NCBI GI: 256728010 Blast Desc: NECHADRAFT_45960 [Nectria haematococca mpVI 77-13-4]
  misc_feature (1)..(249): NCBI GI: 226287907 Blast Desc: [Paracoccidioides brasiliensis Pb18]
  misc_feature (1)..(226): NCBI GI: 255940216 Blast Desc: Pc16g05330 [Penicillium chrysogenum Wisconsin 54-1255] gi|211585500|emb|CAP93203.1| Pc16g05330 [Penicillium chrysogenum Wisconsin 54-1255]
  misc_feature (3)..(215): NCBI GI: 46120454 Blast Desc: FG04874.1 [Gibberella zeae PH-1]
MEVLCLGFSRTGTNSLCKAMELLSTPCYHAFELLDGPDSLSQCEKWDRAIRAKFFGEGKPFGRDEWDDLLGNYGAVTDVPSICFADELMEAYPEAKVVLVERDIERWYRSFDDAVIKNVFNPVLNAVAFFDHWYLGPILKVHQDYTLGWIGAGTKEETQARSRSFYREYYAHLRAVTPPERLFEYKLGSGWEPLCEFLGKSVPDVPFPHVNEAAALDKKIQGVIRKGMVSVARKAFFYVLLPTVALGTSYRYYVRN

SEQ ID NO: 3386 - DNA, 252 bp, Muscodor strobelii
  misc_feature: SGI EST ID NO. CUFF.8476.0
  misc_feature: Variant of the nucleotide sequence at SEQ ID NO 3384
tgcgcgtctcgattgtctaaaccctctttattaataccgaaccaaacttcttcataacttgaaagatcgcattcgaacaccaattcggaaatcaactcgtcggtgttgaatacaatgtctgagactgagaagtttcagagccgcaggcaagtaccgatggaggtactttgtcttggcttctcacgcacaggtacaaactctctgtgcaaagctatggaacttctcagcacgccctgctatcacgcctttgag

SEQ ID NO: 3387 - DNA, 1581 bp, Muscodor strobelii
  misc_feature: SGI cDNA ID NO. 560786
  misc_feature: Encodes the peptide sequence at SEQ ID NO 3388
atgcgcagcggtatagtggtactgacccttgtttgggttgttctgctctatttcttctatctgttcgtttattatatattagcgcaacgcaaccagagatctaaagcgcgtcaactaggttgtgaaaatgcgccggaagagaggaatcgcttgcccttaggcatagacaatttgacgcggacgcttgccgcagacaaggagcagcaatttcccgttgacatccagaagagattcaatgaggtcggttcgtatactcactggtattcgatgcttgggacaagaaacatacggactgccgatccaagaaacattcagcatatactagcaaatcaatttgaagactgggatctgggaccgacgaggcttggcagtttttatccactgttaggccgcggaatcttcacaactgatggagcgcactggaaaagatcacgggctttgattcgaccacaattcactagagatcaggttagtgacctgaacctcgaagaaactcatgtccaaaacttgttgaaagttttggaaacttcaataggtgcagacggatggatcaacaagattgatgttctgccctttttcttccggatcactatggactcggcaaccgaattcatcttcggcgagtctgtaaacagtcagcttagtatactccccagctaccaggtcacgccaattgggggttcggagaccgattttgcgtccgccttcgatactgctcaaatgggagtggcaatgcggttacggttccttgaatttcactggctctggagcaccaaagagtttcgtcgtacgtgcaaagtcgtacatgactttgttgaccatttcgtccgacttgccttagctaagcaggcccaaaagaaggatggggagttcaaagatagggaaaagggaaagtacactttcattgaagccttggcttctgagactcaagacccgctggaactccgctacgagttgctccatatccttctcgctggtcgcgacacgacagcagctcacctgggatgggttttccacagtctagcacgcgatccggcgcgctacgagaaactacgcagcatcatcttgcagaacttcggcacatatgatcaacctagagatatcacgtacaccaggctgaaagcttgcaaatacctccagcaggtcaacgacgaaaccatgcgtctactccccgtcgttccttggaactttcgctacgctaacaaagacaccactttgcctcgtggtggtggcgtggatggtgaatcgccggtcttcatccccaagggcacgacatgtgactacagcatttatgtcatgcatcgtcgaaaggatctttggggtgatgatgcagataaattcaatcctgagaggtgggagacgaagagagctctgtgggagtatctaccttttaacggcggccctagaatatgcatcgggcagcagttcgctttgacagaggcgagctatgtgattgtacgtctactacagaaattcgataaaatcgaggctttggacaaggatgagattgtcagacataactttggtctaaacaatagtatcggtaacggggtcaatgtaagattacatgcggctgcatag

SEQ ID NO: 3388 - protein, 526 aa, Muscodor strobelii
  misc_feature: SGI Peptide ID NO. 560786
  misc_feature (45)..(520): Pfam Id: PF00067 Pfam Desc: Cytochrome P450
  misc_feature (129)..(493): Pfam Id: PF00067 Pfam Desc: Cytochrome P450
  misc_feature (9)..(526): NCBI GI: 154303347 Blast Desc: BC1G_09422 [Botryotinia fuckeliana B05.10] gi|150854985|gb|EDN30177.1| BC1G_09422 [Botryotinia fuckeliana B05.10]
  misc_feature (12)..(525): NCBI GI: 154300280 Blast Desc: BC1G_11329 [Botryotinia fuckeliana B05.10] gi|150856652|gb|EDN31844.1| BC1G_11329 [Botryotinia fuckeliana B05.10]
  misc_feature (10)..(525): NCBI GI: 156054264 Blast Desc: SS1G_05980 [Sclerotinia sclerotiorum 1980] gi|154703760|gb|EDO03499.1| SS1G_05980 [Sclerotinia sclerotiorum 1980]
  misc_feature (35)..(525): NCBI GI: 255950120 Blast Desc: Pc22g19240 [Penicillium chrysogenum Wisconsin 54-1255] gi|211592844|emb|CAP99212.1| Pc22g19240 [Penicillium chrysogenum Wisconsin 54-1255]
  misc_feature (7)..(525): NCBI GI: 189200681 Blast Desc: cytochrome P450 52A12 [Pyrenophora tritici-repentis Pt-1C-BFP] gi|187983776|gb|EDU49264.1| cytochrome P450 52A12 [Pyrenophora tritici-repentis Pt-1C-BFP]
  misc_feature (4)..(526): NCBI GI: 145248373 Blast Desc: An13g03000 [Aspergillus niger] gi|134081187|emb|CAK41696.1| protein product [Aspergillus niger]
  misc_feature (4)..(526): NCBI GI: 159129370 Blast Desc: cytochrome P450 family protein, [Aspergillus fumigatus A1163]
  misc_feature (21)..(525): NCBI GI: 115401146 Blast Desc: ATEG_07540 [Aspergillus terreus NIH2624] gi|114190102|gb|EAU31802.1| ATEG_07540 [Aspergillus terreus NIH2624]
  misc_feature (4)..(526): NCBI GI: 71001214 Blast Desc: cytochrome P450 family protein [Aspergillus fumigatus Af293] gi|66852926|gb|EAL93250.1| cytochrome P450 family protein, [Aspergillus fumigatus Af293]
  misc_feature (4)..(526): NCBI GI: 119480837 Blast Desc: cytochrome P450 family protein, [Neosartorya fischeri NRRL 181] gi|119408601|gb|EAW18550.1| cytochrome P450 family protein, [Neosartorya fischeri NRRL 181]
  misc_feature (127)..(504): SWISSPROT Homolog: EC 1.14.14.1 Unspecific monooxygenase
MRSGIVVLTLVWVVLLYFFYLFVYYILAQRNQRSKARQLGCENAPEERNRLPLGIDNLTRTLAADKEQQFPVDIQKRFNEVGSYTHWYSMLGTRNIRTADPRNIQHILANQFEDWDLGPTRLGSFYPLLGRGIFTTDGAHWKRSRALIRPQFTRDQVSDLNLEETHVQNLLKVLETSIGADGWINKIDVLPFFFRITMDSATEFIFGESVNSQLSILPSYQVTPIGGSETDFASAFDTAQMGVAMRLRFLEFHWLWSTKEFRRTCKVVHDFVDHFVRLALAKQAQKKDGEFKDREKGKYTFIEALASETQDPLELRYELLHILLAGRDTTAAHLGWVFHSLARDPARYEKLRSIILQNFGTYDQPRDITYTRLKACKYLQQVNDETMRLLPVVPWNFRYANKDTTLPRGGGVDGESPVFIPKGTTCDYSIYVMHRRKDLWGDDADKFNPERWETKRALWEYLPFNGGPRICIGQQFALTEASYVIVRLLQKFDKIEALDKDEIVRHNFGLNNSIGNGVNVRLHAAA

SEQ ID NO: 3389 - DNA, 826 bp, Muscodor strobelii
  misc_feature: SGI EST ID NO. CUFF.8486.0
  misc_feature: Variant of the nucleotide sequence at SEQ ID NO 3387
caggctttgattcgaccacaattcactagagatcaggttagtgacctgaacctcgaagaaactcatgtccaaaacttgttgaaagttttggaaacttcaataggtgcagacggatggatcaacaagattgatgttctgccctttttcttccggatcactatggactcggcaaccgaattcatcttcggcgagtctgtaaacagtcagcttagtatactccccagctaccaggtcacgccaattgggggttcggagaccgattttgcgtccgccttcgatactgctcaaatgggagtggcaatgcggttacggttccttgaatttcactggctctggagcaccaaagagtttcgtcgtacgtgcaaagtcgtacatgactttgttgaccatttcgtccgacttgccttagctaagcaggcccaaaagaaggatggggagttcaaagatagggaaaagggaaagtacactttcattgaagccttggcttctgagactcaagacccgctggaactccgctacgagttgctccatatccttctcgctggtcgcgacacgacagcagctcacctgggatgggttttccacagtctagcacgcgatccggcgcgctacgagaaactacgcagcatcatcttgcagaacttcggcacatatgatcaacctagagatatcacgtacaccaggctgaaagcttgcaaatacctccagcaggtcaacgacgaaaccatgcgtctactccccgtcgttccttggaactttcgctacgctaacaaagacaccactttgcctcgtggtggtggcgtggatggtgaatcgccggtcttca

SEQ ID NO: 3390 - DNA, 4908 bp, Muscodor strobelii
  misc_feature: SGI cDNA ID NO. 560787
  misc_feature: Reduced expression when VOC is produced
  misc_feature: Encodes the peptide sequence at SEQ ID NO 3391
atggcgagctacaacagtggcaaccggccgcctgccgggcccgaccaggaccactaccagtccatgttcgcccgtttgcaagctgcccaggccgcacagcaacagcaccaccaccatcttcacaaccagagccacaatctgggcaacggcgaggattctcctgctctgccccttccccataacccgcacgacctgctcgcgcgcttccactcgctcaacgccgaggacaacccgcacgactactacggccagcactccaatgccgagtcgccagtgatcggcctcgacgactacccgccgcccgccgcgcccacgccgccctcgggctttggccactcgcaccatccccccctcggcctgtctggcctcggccccatcggcagcatgccttccttcggtgccaatgccggcaccctgtccaaggccgagcagagcaacagcctgctgaacctgctcaagttcaacaacacggccacccagccgcagacctcgcagcccaactcgcacgactcccccgccggaagtgcccacggcggcagtgctcatggcggcagcagcgcccgcggcctcaccttccccactggcaacagcggtaacagcaacgtccagtcgtcgcacgcgggcaaccctccgcccatccacgccccggtccccatgcctgccgaccctcaaggcctgcttgcgactcttatgaagggtaacatgcacaacgagggctccgcgtccaggcccgaccagcaacaccagcagaatctgcagcatcagcagcatcaacagctccagcagcagccgccccagcagatcaccatgcctccgtcctggaacgtcggtccgccgtccaacacccaggagtacctgctcaacctgctgcatcgccccaagcctgcccagaacgaccagccctcgaccaacgagtcctcccagccggccatcctgacgccccagtccaacaaccgctcctccgccgactaccacggcgagtactcccacaagcacgtcatgtcgggcaacgcctcgcacgactccaccccgctgcctcacaactacgccccgtctcctcccgccaactacgactaccagtccccgtcctcgcagcacgtcgagcagatcgagtaccaccgcgacgccgactactcccgtgaaaaggagtattcccgcgacaaggactactcgcccgacgaggactactcccacaaggacaagtacctcgaggaggaagaggaggatgtctaccctcgccgcaaggactacgacgacgaggacgactaccaggagaaggagtaccaagataaggagtataaggagtatccacgtgacgaccatgacgatgactacccccgcgagaagaacaccgagaccgtgtccgaggccatgaatgacctcgcccagaaggccgaccaagaggcccaggaggcgctggcccgggccgagcaggaagaggtacaggcccaaatcgccgccgatctggaggacatgatgagcgccaggactgacgccgagttccaggaatcggccgaggccgccgcgcgagacatcaagcgcgagctcgaccgcgaggagaataccgacgccctcgaggaccagtactcgcccggcgtcgccaaggccatccgcgagatcgtggacgacgtcgcgctgggccccgtcgtcgacagctgggagagcgccgaggccgacgagatcgtcgtcatcgaggatccggtccagcctgtcaaggtgtataacttccccatgaagccctggatctccatcaccatgctcgactcgttcgacgagccccgcccccagttccgcgacgacgtcatcctcgacatcgcccgcctcaagaaggagttcgaccagatcgacaggaacctggtctcggccaccgaggcgtacatggtctacggcatgtccaaggccggcggcgtgcgcgtgatccgccaggaagacggcaaagacgccaagctgttcaccgacactaaggatcgcgtgttcaacgttgccgtctcctacacgaccgacgacgccgacagcccccccgaggagtctctgataggaacgggcatcagcggcactgtctactacgtccagatccgcggaggcggcaaggaccacatcgaggagtccaaccccgagcaggccggctttgccctcccgcccgccagcacccaagagggcgacgcacctggaggcgtcctcaagactcgcgccaggacttcttctacgcacccggagtacttcgccgttggtcgcggcaagaccatcaacatcatctggccggctgtcatcatgcagaagaacatcttcaagtctggccatgaccgcgtcgtcgacacggagcgcctcgcccgcgagtgttctctgcgcatcaacacgggcaaggcaggcaaggacttcaccttcagccaggacgattcgaccatagtgtcgttggacaaggccgggcgcgtcaagttctgggatgtgcgcgagctcacggccgtcgacggcgactcggatctccgcttccccatgccagcccacatgtccctcgaggtcaaggagcccatgatgaccttgaacacaacccccgagggtgaaaaagcgtggcccacctctgtgttattgctggataagcaacggccttaccagaagcgctgcgccctacgctacatgatcgttggcatgaagcagaaccacacgctgcagctgtgggacctcgcactgggcaagcccgtgcaggaattcaacctcccccatagcaaggagtccgatgccgtctgcagtgtcagctaccaccccccgacgggcatcatcgtggtcggccacccgacccgcaactcggtctatttcctccatctgtcggctccaaagtataacattaaggggttaactcaagtcgactacatccagaagctcatggccaaggatccatcgatacctgaaccggactcgaccgccgtgattagtggtgtacgggaatactcattcgcaaacaaggggctgctccggagtctatatctactgacgaatccctcgtgttcctcgtcgagcgacgagacctcgctgttcgatctctatgccatgcactccaagggtgtcacagccgtcaccgtgaagcaggcggatctgggatggacccaggataataaggttatcactagtgttgatgccgccgatgctggacttgttcaaatttccaagcttaaggaactgcccaaccctctcgtcctcgaccctcatccacaggcaccagatgagctggttccacctattaagattgccactagatcgtcggccaaggatacgccgccccctcaggccacctcgcacttgtcttctcaagaaaccagcaagaaaggcgccgacacgaacggtcacagccaaggccaaagcgatcgtaaggagatcgatgccccttcaacgcccttcaaccaacttgagaagtccgagaagaaggcccgaaagaagagagagaaggcagcagctgctgccgccgccgctgagaaaatggctaacgagaacggtggtcaatccaacggcacctcgcaggcccctcgcgtcgagccgaccaagaatacggcatcgccattccccgccatggccaatgacgccactcaacagggcttcaagcagatgcagtccgcacttaccgacaagttaggcgccatcattagcaacgaactcaaggaccagcgtgtcaagatcgagaccgagttccgcaatcgcgagaacacctttgccaagagtcagaaggagctgctcgaactcgtccagcaagtgctcaacgataacactcaagctgtcttgtccaggactatcgccgaccagttcgaggagactgttgttccccacatcacgaacgttatgacgaagaccattgagacacagatcgactcgagagtcggtggtaaagtatcgcattctatccagaatcaaatgcagaagtctcttcccaacgccgtctcgcaggcgctccagaaagccgatctgaccaagtccatccctgaaaagctggcgtccagcgtggctctcgacatggagaagtctttccgtgacgtgctcgtggacaccatcacgcccatcttcggtgacatggccactgcggcatcgcatacgatgctcgccgaagtccagcgccgcactgcggaacagttggaagaattcgagcgtcgtcacattgcagacacccgcaagattgatcagcttacaaacctggttgccaaactctcagacaccgtcggtagcatggcttcttcgcaagctcagttccaagatcagctgcttaagatgcagcgccgcatgcctcaggaacgcgctcccgctcaacatcaacaccagcttcagcaccagcccacgcagtctatcccatctcaagctgcatcctacgcaagcccatctgcgacgtcgagcaacgcgggcaatcagatggtgccgtacagccacagcaaccagtcttccaacgccaaggatctcgagctcgaccgtacgatttcccacgtggcctctttgatgagccgcggagagtatgagccggccttgatccattgggtccagtccaacaaccacaggcaggaaatcttcgaccagtacatggccaaggcgtttcctctcaggcacatgaacgacatgtccacactggtctcactttccactgcctcggtcgtcgttgaacagttggagggcccgctgcttatggagagagtcaactgggtcgaggttgttctggataatctgtaccaaaatctccacgacgtcaatgacccccaactacgtgatgtgatcccaggcatcatgggcaccttcgtcaataacctcgaaaagctactcatgcgcgtcaattcccacgcgccgtccgaccccatcctcccccgtctttccaacatgaggaaccaggcgaaaaagatcagagactttaccacgccgcgctccgcccccggttactag

SEQ ID NO: 3391 - protein, 1635 aa, Muscodor strobelii
  misc_feature: SGI Peptide ID NO. 560787
  misc_feature (448)..(1630): NCBI GI: 39951471 Blast Desc: MGG_01378 [Magnaporthe grisea 70-15] gi|145020796|gb|EDK04925.1| MGG_01378 [Magnaporthe grisea 70-15]
  misc_feature (437)..(1630): NCBI GI: 256730720 Blast Desc: [Nectria haematococca mpVI 77-13-4]
  misc_feature (453)..(1617): NCBI GI: 46109500 Blast Desc: FG01632.1 [Gibberella zeae PH-1]
  misc_feature (448)..(1629): NCBI GI: 85110000 Blast Desc: NCU05375 [Neurospora crassa OR74A] gi|16416001|emb|CAB91315.2| conserved [Neurospora crassa] gi|28924856|gb|EAA33952.1| [Neurospora crassa OR74A]
  misc_feature (446)..(1633): NCBI GI: 116200295 Blast Desc: CHGG_08303 [Chaetomium globosum CBS 148.51] gi|88179582|gb|EAQ87050.1| CHGG_08303 [Chaetomium globosum CBS 148.51]
  misc_feature (452)..(1626): NCBI GI: 171683746 Blast Desc: protein product [Podospora anserina] gi|170941833|emb|CAP67486.1| protein product [Podospora anserina]
  misc_feature (449)..(1630): NCBI GI: 154298261 Blast Desc: BC1G_11975 [Botryotinia fuckeliana B05.10] gi|150858161|gb|EDN33353.1| BC1G_11975 [Botryotinia fuckeliana B05.10]
  misc_feature (448)..(1622): NCBI GI: 261356916 Blast Desc: conserved [Verticillium albo-atrum VaMs.102]
  misc_feature (452)..(1624): NCBI GI: 226281988 Blast Desc: conserved [Paracoccidioides brasiliensis Pb01]
  misc_feature (142)..(1624): NCBI GI: 225682993 Blast Desc: conserved [Paracoccidioides brasiliensis Pb03]
  misc_feature: Useful for introducing or modulating the production of volatile compounds
MASYNSGNRPPAGPDQDHYQSMFARLQAAQAAQQQHHHHLHNQSHNLGNGEDSPALPLPHNPHDLLARFHSLNAEDNPHDYYGQHSNAESPVIGLDDYPPPAAPTPPSGFGHSHHPPLGLSGLGPIGSMPSFGANAGTLSKAEQSNSLLNLLKFNNTATQPQTSQPNSHDSPAGSAHGGSAHGGSSARGLTFPTGNSGNSNVQSSHAGNPPPIHAPVPMPADPQGLLATLMKGNMHNEGSASRPDQQHQQNLQHQQHQQLQQQPPQQITMPPSWNVGPPSNTQEYLLNLLHRPKPAQNDQPSTNESSQPAILTPQSNNRSSADYHGEYSHKHVMSGNASHDSTPLPHNYAPSPPANYDYQSPSSQHVEQIEYHRDADYSREKEYSRDKDYSPDEDYSHKDKYLEEEEEDVYPRRKDYDDEDDYQEKEYQDKEYKEYPRDDHDDDYPREKNTETVSEAMNDLAQKADQEAQEALARAEQEEVQAQIAADLEDMMSARTDAEFQESAEAAARDIKRELDREENTDALEDQYSPGVAKAIREIVDDVALGPVVDSWESAEADEIVVIEDPVQPVKVYNFPMKPWISITMLDSFDEPRPQFRDDVILDIARLKKEFDQIDRNLVSATEAYMVYGMSKAGGVRVIRQEDGKDAKLFTDTKDRVFNVAVSYTTDDADSPPEESLIGTGISGTVYYVQIRGGGKDHIEESNPEQAGFALPPASTQEGDAPGGVLKTRARTSSTHPEYFAVGRGKTINIIWPAVIMQKNIFKSGHDRVVDTERLARECSLRINTGKAGKDFTFSQDDSTIVSLDKAGRVKFWDVRELTAVDGDSDLRFPMPAHMSLEVKEPMMTLNTTPEGEKAWPTSVLLLDKQRPYQKRCALRYMIVGMKQNHTLQLWDLALGKPVQEFNLPHSKESDAVCSVSYHPPTGIIVVGHPTRNSVYFLHLSAPKYNIKGLTQVDYIQKLMAKDPSIPEPDSTAVISGVREYSFANKGLLRSLYLLTNPSCSSSSDETSLFDLYAMHSKGVTAVTVKQADLGWTQDNKVITSVDAADAGLVQISKLKELPNPLVLDPHPQAPDELVPPIKIATRSSAKDTPPPQATSHLSSQETSKKGADTNGHSQGQSDRKEIDAPSTPFNQLEKSEKKARKKREKAAAAAAAAEKMANENGGQSNGTSQAPRVEPTKNTASPFPAMANDATQQGFKQMQSALTDKLGAIISNELKDQRVKIETEFRNRENTFAKSQKELLELVQQVLNDNTQAVLSRTIADQFEETVVPHITNVMTKTIETQIDSRVGGKVSHSIQNQMQKSLPNAVSQALQKADLTKSIPEKLASSVALDMEKSFRDVLVDTITPIFGDMATAASHTMLAEVQRRTAEQLEEFERRHIADTRKIDQLTNLVAKLSDTVGSMASSQAQFQDQLLKMQRRMPQERAPAQHQHQLQHQPTQSIPSQAASYASPSATSSNAGNQMVPYSHSNQSSNAKDLELDRTISHVASLMSRGEYEPALIHWVQSNNHRQEIFDQYMAKAFPLRHMNDMSTLVSLSTASVVVEQLEGPLLMERVNWVEVVLDNLYQNLHDVNDPQLRDVIPGIMGTFVNNLEKLLMRVNSHAPSDPILPRLSNMRNQAKKIRDFTTPRSAPGY

SEQ ID NO: 3392 - DNA, 5615 bp, Muscodor strobelii
  misc_feature: SGI EST ID NO. CUFF.8984.1
  misc_feature: Variant of the nucleotide sequence at SEQ ID NO 3390
cccaatcccaccgcctgtttcgctgctgcagctctctgcactctgcactctccaatctgcaagcaagagcaacggagcaagagggcagcagcacttgggacttacctaacttgtgtcttcctgttttttgtttctcctcccaccatccacagccatccttttccgcatcgaccgtcgtttgtcgatgccctacgcgtggttgtgagagggtgcactgtttcgcatttgactttttccgcgcgtcgtcgcttgtcgattgtctcacaccgcccgcgggtgtctctgccatcagcatggcgagctacaacagtggcaaccggccgcctgccgggcccgaccaggaccactaccagtccatgttcgcccgtttgcaagctgcccaggccgcacagcaacagcaccaccaccatcttcacaaccagagccacaatctgggcaacggcgaggattctcctgctctgccccttccccataacccgcacgacctgctcgcgcgcttccactcgctcaacgccgaggacaacccgcacgactactacggccagcactccaatgccgagtcgccagtgatcggcctcgacgactacccgccgcccgccgcgcccacgccgccctcgggctttggccactcgcaccatccccccctcggcctgtctggcctcggccccatcggcagcatgccttccttcggtgccaatgccggcaccctgtccaaggccgagcagagcaacagcctgctgaacctgctcaagttcaacaacacggccacccagccgcagacctcgcagcccaactcgcacgactcccccgccggaagtgcccacggcggcagtgctcatggcggcagcagcgcccgcggcctcaccttccccactggcaacagcggtaacagcaacgtccagtcgtcgcacgcgggcaaccctccgcccatccacgccccggtccccatgcctgccgaccctcaaggcctgcttgcgactcttatgaagggtaacatgcacaacgagggctccgcgtccaggcccgaccagcaacaccagcagaatctgcagcatcagcagcatcaacagctccagcagcagccgccccagcagatcaccatgcctccgtcctggaacgtcggtccgccgtccaacacccaggagtacctgctcaacctgctgcatcgccccaagcctgcccagaacgaccagccctcgaccaacgagtcctcccagccggccatcctgacgccccagtccaacaaccgctcctccgccgactaccacggcgagtactcccacaagcacgtcatgtcgggcaacgcctcgcacgactccaccccgctgcctcacaactacgccccgtctcctcccgccaactacgactaccagtccccgtcctcgcagcacgtcgagcagatcgagtaccaccgcgacgccgactactcccgtgaaaaggagtattcccgcgacaaggactactcgcccgacgaggactactcccacaaggacaagtacctcgaggaggaagaggaggatgtctaccctcgccgcaaggactacgacgacgaggacgactaccaggagaaggagtaccaagataaggagtataaggagtatccacgtgacgaccatgacgatgactacccccgcgagaagaacaccgagaccgtgtccgaggccatgaatgacctcgcccagaaggccgaccaagaggcccaggaggcgctggcccgggccgagcaggaagaggtacaggcccaaatcgccgccgatctggaggacatgatgagcgccaggactgacgccgagttccaggaatcggccgaggccgccgcgcgagacatcaagcgcgagctcgaccgcgaggagaataccgacgccctcgaggaccagtactcgcccggcgtcgccaaggccatccgcgagatcgtggacgacgtcgcgctgggccccgtcgtcgacagctgggagagcgccgaggccgacgagatcgtcgtcatcgaggatccggtccagcctgtcaaggtgtataacttccccatgaagccctggatctccatcaccatgctcgactcgttcgacgagccccgcccccagttccgcgacgacgtcatcctcgacatcgcccgcctcaagaaggagttcgaccagatcgacaggaacctggtctcggccaccgaggcgtacatggtctacggcatgtccaaggccggcggcgtgcgcgtgatccgccaggaagacggcaaagacgccaagctgttcaccgacactaaggatcgcgtgttcaacgttgccgtctcctacacgaccgacgacgccgacagcccccccgaggagtctctgataggaacgggcatcagcggcactgtctactacgtccagatccgcggaggcggcaaggaccacatcgaggagtccaaccccgagcaggccggctttgccctcccgcccgccagcacccaagagggcgacgcacctggaggcgtcctcaagactcgcgccaggacttcttctacgcacccggagtacttcgccgttggtcgcggcaagaccatcaacatcatctggccggctgtcatcatgcagaagaacatcttcaagtctggccatgaccgcgtcgtcgacacggagcgcctcgcccgcgagtgttctctgcgcatcaacacgggcaaggcaggcaaggacttcaccttcagccaggacgattcgaccatagtgtcgttggacaaggccgggcgcgtcaagttctgggatgtgcgcgagctcacggccgtcgacggcgactcggatctccgcttccccatgccagcccacatgtccctcgaggtcaaggagcccatgatgaccttgaacacaacccccgagggtgaaaaagcgtggcccacctctgtgttattgctggataagcaacggccttaccagaagcgctgcgccctacgctacatgatcgttggcatgaagcagaaccacacgctgcagctgtgggacctcgcactgggcaagcccgtgcaggaattcaacctcccccatagcaaggagtccgatgccgtctgcagtgtcagctaccaccccccgacgggcatcatcgtggtcggccacccgacccgcaactcggtctatttcctccatctgtcggctccaaagtataacattaaggggttaactcaagtcgactacatccagaagctcatggccaaggatccatcgatacctgaaccggactcgaccgccgtgattagtggtgtacgggaatactcattcgcaaacaaggggctgctccggagtctatatctactgacgaatccctcgtgttcctcgtcgagcgacgagacctcgctgttcgatctctatgccatgcactccaagggtgtcacagccgtcaccgtgaagcaggcggatctgggatggacccaggataataaggttatcactagtgttgatgccgccgatgctggacttgttcaaatttccaagcttaaggaactgcccaaccctctcgtcctcgaccctcatccacaggcaccagatgagctggttccacctattaagattgccactagatcgtcggccaaggatacgccgccccctcaggccacctcgcacttgtcttctcaagaaaccagcaagaaaggcgccgacacgaacggtcacagccaaggccaaagcgatcgtaaggagatcgatgccccttcaacgcccttcaaccaacttgagaagtccgagaagaaggcccgaaagaagagagagaaggcagcagctgctgccgccgccgctgagaaaatggctaacgagaacggtggtcaatccaacggcacctcgcaggcccctcgcgtcgagccgaccaagaatacggcatcgccattccccgccatggccaatgacgccactcaacagggcttcaagcagatgcagtccgcacttaccgacaagttaggcgccatcattagcaacgaactcaaggaccagcgtgtcaagatcgagaccgagttccgcaatcgcgagaacacctttgccaagagtcagaaggagctgctcgaactcgtccagcaagtgctcaacgataacactcaagctgtcttgtccaggactatcgccgaccagttcgaggagactgttgttccccacatcacgaacgttatgacgaagaccattgagacacagatcgactcgagagtcggtggtaaagtatcgcattctatccagaatcaaatgcagaagtctcttcccaacgccgtctcgcaggcgctccagaaagccgatctgaccaagtccatccctgaaaagctggcgtccagcgtggctctcgacatggagaagtctttccgtgacgtgctcgtggacaccatcacgcccatcttcggtgacatggccactgcggcatcgcatacgatgctcgccgaagtccagcgccgcactgcggaacagttggaagaattcgagcgtcgtcacattgcagacacccgcaagattgatcagcttacaaacctggttgccaaactctcagacaccgtcggtagcatggcttcttcgcaagctcagttccaagatcagctgcttaagatgcagcgccgcatgcctcaggaacgcgctcccgctcaacatcaacaccagcttcagcaccagcccacgcagtctatcccatctcaagctgcatcctacgcaagcccatctgcgacgtcgagcaacgcgggcaatcagatggtgccgtacagccacagcaaccagtcttccaacgccaaggatctcgagctcgaccgtacgatttcccacgtggcctctttgatgagccgcggagagtatgagccggccttgatccattgggtccagtccaacaaccacaggcaggaaatcttcgaccagtacatggccaaggcgtttcctctcaggcacatgaacgacatgtccacactggtctcactttccactgcctcggtcgtcgttgaacagttggagggcccgctgcttatggagagagtcaactgggtcgaggttgttctggataatctgtaccaaaatctccacgacgtcaatgacccccaactacgtgatgtgatcccaggcatcatgggcaccttcgtcaataacctcgaaaagctactcatgcgcgtcaattcccacgcgccgtccgaccccatcctcccccgtctttccaacatgaggaaccaggcgaaaaagatcagagactttaccacgccgcgctccgcccccggttactagcctcccttctcacgatgcaatgcatggcgttgcgacttcggcttcggcttcgttttcggacctcggatttctggtaatgcgtggctagttatcggctctcgtttcggtttcatcatgaaatggttgaatgaacagcatagcatgaatctacattgcaacgcaggagcaaaaagttcattaatgtatttccatggctggggcgggtgtaactcattcttctccttcgtcgctacggttatccttctacacatggccataccctgtacttaatcccacgactgacgcttgctcatttttaatggctcataggtactcatcacatagtagtattaatatgggagttattctcatcaatgccattgcttacttgtacgcttgggcttcttcgccctcttcttcccctctatatgatta

SEQ ID NO: 3393 - DNA, 1056 bp, Muscodor strobelii
  misc_feature: SGI cDNA ID NO. 560788
  misc_feature: Encodes the peptide sequence at SEQ ID NO 3394
atgcttgccctcatacttcttatcttggccggttcctcaagctctctcctactcccagcatcagcttcagaatggggcgttgatgtcaacttcacacacaccttcttccactcagcagctgccgaagagaatcgcgcccgaaatgaagatatccattatccagaaattatctcacacaataccaccgtccgtgagctgcacacgcatctcgacaaacagagtatgaagcgccgtttagagaagatgacgtcgttccacgaccggttttttactactgaatacggaaagagtacttcatactgggtgcgtgacgaagtgactgccctcgtcaagaacactctgggtaacactttgggcaatagtgtagaggagaatgttgagattaagatttttgaacacgataaacgacagggtgataaatactatgagcattggaaccaagtcagcgttattgttactgtgcctggaaagtcgaacaagaaggtcgttgttggtggtcatttggactcagtgaactcgaaagacgatgataacggatcaggctcagtaacaataatggaagccctccaagcgctcctctattctcccctgatcgcctctagacaagccgagaacacaatcgaatttcactggtactcggcagaagaagtaggactattcggctcccaacagatcttcggctcatatggtgaaaagggagaacaagtcgtggccatgttgaatcaggacatgacggcgtatgataacgggccaatggggctgaatacggatcaaaattcgcatgttggtcttaacaagttcgttgagaagattcttgatgcctacacaacaattggttatgtgaagagcgcttgcaactacccctgcagcgaccacgcctctgcgaccaaggccgggtatccagcaacattcgtattcgaaaccgaatttaagaaatcaaatccctatatacacacacactacgacaatctcacacacgtcaactacgatcacatgctgcagcatgctgaactcgtcgtggggtttgtttacgaactcgcttttactaagttttag

SEQ ID NO: 3394 - protein, 351 aa, Muscodor strobelii
  misc_feature: SGI Peptide ID NO. 560788
  misc_feature (160)..(333): Pfam Id: PF04389 Pfam Desc: Peptidase family M28
  misc_feature (52)..(349): NCBI GI: 240111426 Blast Desc: leucine aminopeptidase, [Coccidioides posadasii C735 delta SOWgp]
  misc_feature (52)..(349): NCBI GI: 119188941 Blast Desc: CIMG_04518 [Coccidioides immitis RS]
  misc_feature (44)..(351): NCBI GI: 169618822 Blast Desc: SNOG_12603 [Phaeosphaeria nodorum SN15] gi|111058781|gb|EAT79901.1| SNOG_12603 [Phaeosphaeria nodorum SN15]
  misc_feature (45)..(351): NCBI GI: 189210549 Blast Desc: leucine aminopeptidase 2 [Pyrenophora tritici-repentis Pt-1C-BFP] gi|187977699|gb|EDU44325.1| leucine aminopeptidase 2 [Pyrenophora tritici-repentis Pt-1C-BFP]
  misc_feature (45)..(351): NCBI GI: 256726837 Blast Desc: [Nectria haematococca mpVI 77-13-4]
  misc_feature (51)..(351): NCBI GI: 46121733 Blast Desc: FG05245.1 [Gibberella zeae PH-1]
  misc_feature (51)..(351): NCBI GI: 145583571 Blast Desc: aminopeptidase [Hypocrea lixii]
  misc_feature (45)..(351): NCBI GI: 156049821 Blast Desc: LAP2 [Sclerotinia sclerotiorum 1980] gi|154693016|gb|EDN92754.1| LAP2 [Sclerotinia sclerotiorum 1980]
  misc_feature (51)..(351): NCBI GI: 212535816 Blast Desc: aminopeptidase, [Penicillium marneffei ATCC 18224] gi|210070463|gb|EEA24553.1| aminopeptidase, [Penicillium marneffei ATCC 18224]
  misc_feature (36)..(351): NCBI GI: 240109673 Blast Desc: Peptidase family M28 protein [Coccidioides posadasii C735 delta SOWgp]
  misc_feature (57)..(346): SWISSPROT Homolog: EC 3.4.11.10 Bacterial leucyl aminopeptidase
MLALILLILAGSSSSLLLPASASEWGVDVNFTHTFFHSAAAEENRARNEDIHYPEIISHNTTVRELHTHLDKQSMKRRLEKMTSFHDRFFTTEYGKSTSYWVRDEVTALVKNTLGNTLGNSVEENVEIKIFEHDKRQGDKYYEHWNQVSVIVTVPGKSNKKVVVGGHLDSVNSKDDDNGSGSVTIMEALQALLYSPLIASRQAENTIEFHWYSAEEVGLFGSQQIFGSYGEKGEQVVAMLNQDMTAYDNGPMGLNTDQNSHVGLNKFVEKILDAYTTIGYVKSACNYPCSDHASATKAGYPATFVFETEFKKSNPYIHTHYDNLTHVNYDHMLQHAELVVGFVYELAFTKF

SEQ ID NO: 3395 - DNA, 1197 bp, Muscodor strobelii
  misc_feature: SGI cDNA ID NO. 560789
  misc_feature: Encodes the peptide sequence at SEQ ID NO 3396
atggcaatccaatcaccgctcagctcaccgggtactgcgaggttcgatgggttcgctagtcagagatcatctctgtttggaggccctgtcacgcaagaagctcagcagcaaacagagtcagggccgaaggaggcatcttccccgctgcgatctcagccactacctccgcctgcacctattgaatatgtagtcattgatccaaatggcgatttgtttcttcatgtcgaggatggcgaaggtgacacctcgaccgaagcaatggaacttcgcgtcgacgcccaaaccttggcaaagtcagcgaaatactgggagacattcttatttggcagcttttcggagagcaagcagttccaggacaagggaacaaaatggagggtcgaaatatccgaaacagatccttctacgatgagatatctgttagaaataattcatggccaataccacgagaaaagcatcggtgaccgtcttctatacgagttatgcgtcttgacagacaaatacgatatgacacacgtgttacgtccttgggcgcgcagctggtctcggtcgactgacttggatcaacactggccacgacggctctggattgcatggatacttggtgacctaatgccgtttgtgaaaatcgctcggggtgtggccagggagtttactcccttgcaaattgagatcaaagattttggctcgagagattctaaagcagaactatcgagtggaatcatggagcctcttggtgtctatgagcaaattgaagcacttcgtttggacacgatcacactcattctcaagcacctcagcaatatgattcaaccctggataacgagagattcatcttcctgctacgaaacgccttcgagcagcaagagcaactgtcaagcgctcatgctcggcacggcaatccagtcgcttcattcgcttggcctttggcctataccagacccggaagcagtggaaatgagtgttgcagcccttgtagagagactgcagagattcgaatgcaaaggtgcatgttccattcaccgcccgtcaactgtatactatgcctatcctcctcgtgtgctggattttcgccacaggcttcaaacggtcttggatttcatgccatttccgcttaaaggcatgcaggcgcgtttactgcttgaccgaggcgatgattctgggcttgcgcctctcagtagcttcgagagttattattaa

SEQ ID NO: 3396 - protein, 398 aa, Muscodor strobelii
  misc_feature: SGI Peptide ID NO. 560789
  misc_feature (63)..(328): NCBI GI: 39942070 Blast Desc: MGG_03115 [Magnaporthe grisea 70-15] gi|145015914|gb|EDK00404.1| MGG_03115 [Magnaporthe grisea 70-15]
  misc_feature (63)..(371): NCBI GI: 261353831 Blast Desc: conserved [Verticillium albo-atrum VaMs.102]
  misc_feature (63)..(328): NCBI GI: 256724501 Blast Desc: NECHADRAFT_88143 [Nectria haematococca mpVI 77-13-4]
  misc_feature (61)..(277): NCBI GI: 85085459 Blast Desc: NCU04437 [Neurospora crassa OR74A] gi|28918606|gb|EAA28278.1| [Neurospora crassa OR74A] gi|40882183|emb|CAF06009.1| related to nuclear pore protein
  misc_feature (60)..(253): NCBI GI: 154296228 Blast Desc: BC1G_12941 [Botryotinia fuckeliana B05.10] gi|150843505|gb|EDN18698.1| BC1G_12941 [Botryotinia fuckeliana B05.10]
  misc_feature (65)..(201): NCBI GI: 170940282 Blast Desc: protein product [Podospora anserina]
  misc_feature (52)..(185): NCBI GI: 116201353 Blast Desc: CHGG_08561 [Chaetomium globosum CBS 148.51] gi|88177079|gb|EAQ84547.1| CHGG_08561 [Chaetomium globosum CBS 148.51]
  misc_feature (2)..(201): NCBI GI: 39942748 Blast Desc: MGG_03454 [Magnaporthe grisea 70-15] gi|145009998|gb|EDJ94654.1| MGG_03454 [Magnaporthe grisea 70-15]
  misc_feature (27)..(201): NCBI GI: 170940283 Blast Desc: protein product [Podospora anserina]
  misc_feature (63)..(209): NCBI GI: 46108528 Blast Desc: FG01146.1 [Gibberella zeae PH-1]
MAIQSPLSSPGTARFDGFASQRSSLFGGPVTQEAQQQTESGPKEASSPLRSQPLPPPAPIEYVVIDPNGDLFLHVEDGEGDTSTEAMELRVDAQTLAKSAKYWETFLFGSFSESKQFQDKGTKWRVEISETDPSTMRYLLEIIHGQYHEKSIGDRLLYELCVLTDKYDMTHVLRPWARSWSRSTDLDQHWPRRLWIAWILGDLMPFVKIARGVAREFTPLQIEIKDFGSRDSKAELSSGIMEPLGVYEQIEALRLDTITLILKHLSNMIQPWITRDSSSCYETPSSSKSNCQALMLGTAIQSLHSLGLWPIPDPEAVEMSVAALVERLQRFECKGACSIHRPSTVYYAYPPRVLDFRHRLQTVLDFMPFPLKGMQARLLLDRGDDSGLAPLSSFESYY

SEQ ID NO: 3397 - DNA, 1704 bp, Muscodor strobelii
  misc_feature: SGI EST ID NO. CUFF.8523.0
  misc_feature: Variant of the nucleotide sequence at SEQ ID NO 3395
atgaagcatctttacgctttcaaacgaatcatctgatgtaatgacaaggcatcagaactgtcagttctacgtagctttgaatattatcattcccgtattctttcagcctcccattatcgaaatgctactcaatcgcattttagctgagaccgaagtgcacggaccactatcacctgaaactgctcgacagacgcgttcatatcaattcctatcccccctttcaatcacaattgctcatggcaatccaatcaccgctcagctcaccgggtactgcgaggttcgatgggttcgctagtcagagatcatctctgtttggaggccctgtcacgcaagaagctcagcagcaaacagagtcagggccgaaggaggcatcttccccgctgcgatctcagccactacctccgcctgcacctattgaatatgtagtcattgatccaaatggcgatttgtttcttcatgtcgaggatggcgaaggtgacacctcgaccgaagcaatggaacttcgcgtcgacgcccaaaccttggcaaagtcagcgaaatactgggagacattcttatttggcagcttttcggagagcaagcagttccaggacaagggaacaaaatggagggtcgaaatatccgaaacagatccttctacgatgagatatctgttagaaataattcatggccaataccacgagaaaagcatcggtgaccgtcttctatacgagttatgcgtcttgacagacaaatacgatatgacacacgtgttacgtccttgggcgcgcagctggtctcggtcgactgacttggatcaacactggccacgacggctctggattgcatggatacttggtgacctaatgccgtttgtgaaaatcgctcggggtgtggccagggagtttactcccttgcaaattgagatcaaagattttggctcgagagattctaaagcagaactatcgagtggaatcatggagcctcttggtgtctatgagcaaattgaagcacttcgtttggacacgatcacactcattctcaagcacctcagcaatatgattcaaccctggataacgagagattcatcttcctgctacgaaacgccttcgagcagcaagagcaactgtcaagcgctcatgctcggcacggcaatccagtcgcttcattcgcttggcctttggcctataccagacccggaagcagtggaaatgagtgttgcagcccttgtagagagactgcagagattcgaatgcaaaggtgcatgttccattcaccgcccgtcaactgtatactatgcctatcctcctcgtgtgctggattttcgccacaggcttcaaacggtcttggatttcatgccatttccgcttaaaggcatgcaggcgcgtttactgcttgaccgaggcgatgattctgggcttgcgcctctcagtagcttcgagagttattattaaagcgagagtctcggatcaatatcttggtaagcgtaggcatttgcctcagatcgcagaaaatcatatgtaattatcttttgttttgtagagacctttgtaaagtgatcgaggcttctagatggaaagagattctgcatttcgtgcaacaattgccttgggtgacgtggtgttctagctactgaatactacttgttcaatactaaagaagtcgagttactgccattgagctcttaatacaagatatatgttcgaccactgaaagccattgttg

SEQ ID NO: 3398 - DNA, 1191 bp, Muscodor strobelii
  misc_feature: SGI cDNA ID NO. 560790
  misc_feature: Encodes the peptide sequence at SEQ ID NO 3399
atgacttccatcgatgatactatcacgttgctgagcaagatcggacccgagctggccaactccgagccagatcgtctccgtctcagcgatgcacttctctctgctcttcggaagattcaatctccttgggacgttgcttgtgctcacggctggattgaacttaccactacggcggccatcaagacactaattgacaccggtcttttcacagcatgggccgaacacggaggcgagcccatgacaactcagaggttttctgagttgacaggggctgacgcggtgctattaggtcgccttcttaggcatcttgctgcccaacatctcattgctgaagctggcgaagacatgtatgcttcaacaccgtggtccttggctttgggaacagaccctgcaactgtatcgatctacggaacattttatcatgaagtgaatgccccattagcaatttcacttccatctttcttgaaagaaacgggcttcaaaaacccgacagagcttcagaacagcaatttccaacgtgttcatggtcaaggttctacatatttcggattcatctcgtcttcggatgcccgcaacaaagactttgccaatgccatggagtgccatgctcgaggtaatgttctgccgtggacagaagtgttcgatacggatcagatcgtggccaatgccaaacctggacgtgctctcgttgtcgacgtcggtggtagcaaggggcacgatctcgacaagttccgacaaaagcacccgggcattcctcacggaagtcttgttctgcaagatcttccagaagtcttgaaaaacttagctgtggaccccaccatcactatttgtccccatgacttcttcactccccagccagtcaggcacgccggaatatattaccttcacttgatccttcatgattggccggatgaacgggcgattgagattctgaggagaattgcagacgcgatggagcctggatattccagaatcttgctccatgaagacgtcgtctctacacgagacccctcaattcaagccaccgtagcggacatgacaatgatgatgtgcttctcttcagcagagagaacagaaaaagagtggcgcgtattagttgaacgggtcgatggtctacggatcgtgaaagtttggcgcaaaccactcagtcttggtggcatcgtagaaattgaacgacttgactcggtctga

SEQ ID NO: 3399 - protein, 396 aa, Muscodor strobelii
  misc_feature: SGI Peptide ID NO. 560790
  misc_feature (110)..(367): Pfam Id: PF00891 Pfam Desc: O-methyltransferase
  misc_feature (230)..(367): Pfam Id: PF00891 Pfam Desc: O-methyltransferase
  misc_feature (1)..(391): NCBI GI: 46111923 Blast Desc: FG02843.1 [Gibberella zeae PH-1]
  misc_feature (20)..(391): NCBI GI: 256722561 Blast Desc: NECHADRAFT_96534 [Nectria haematococca mpVI 77-13-4]
  misc_feature (3)..(391): NCBI GI: 255933237 Blast Desc: Pc12g12810 [Penicillium chrysogenum Wisconsin 54-1255] gi|211582708|emb|CAP80908.1| Pc12g12810 [Penicillium chrysogenum Wisconsin 54-1255]
  misc_feature (8)..(391): NCBI GI: 115385781 Blast Desc: conserved [Aspergillus terreus NIH2624] gi|114187884|gb|EAU29584.1| conserved [Aspergillus terreus NIH2624]
  misc_feature (20)..(391): NCBI GI: 145235619 Blast Desc: An03g05790 [Aspergillus niger] gi|134058145|emb|CAK38339.1| protein product [Aspergillus niger]
  misc_feature (6)..(391): NCBI GI: 67541563 Blast Desc: AN6945.2 [Aspergillus nidulans FGSC A4] gi|40738510|gb|EAA57700.1| AN6945.2 [Aspergillus nidulans FGSC A4] gi|259480556|tpe|CBF71797.1| TPA: O-methyltransferase, FGSC
  misc_feature (11)..(391): NCBI GI: 240107098 Blast Desc: sterigmatocystin 8-O-methyltransferase precursor, [Coccidioides posadasii C735 delta SOWgp]
  misc_feature (24)..(391): NCBI GI: 145228783 Blast Desc: An01g02640 [Aspergillus niger] gi|134054792|emb|CAK43632.1| protein product [Aspergillus niger]
  misc_feature (17)..(391): NCBI GI: 121709769 Blast Desc: o-methyltransferase [Aspergillus clavatus NRRL 1] gi|119400664|gb|EAW11089.1| o-methyltransferase [Aspergillus clavatus NRRL 1]
  misc_feature (6)..(391): NCBI GI: 212533155 Blast Desc: O-methyltransferase, [Penicillium marneffei ATCC 18224] gi|210072098|gb|EEA26187.1| O-methyltransferase, [Penicillium marneffei ATCC 18224]
  misc_feature (76)..(378): SWISSPROT Homolog: EC 2.1.1.110 Sterigmatocystin 8-O-methyltransferase
MTSIDDTITLLSKIGPELANSEPDRLRLSDALLSALRKIQSPWDVACAHGWIELTTTAAIKTLIDTGLFTAWAEHGGEPMTTQRFSELTGADAVLLGRLLRHLAAQHLIAEAGEDMYASTPWSLALGTDPATVSIYGTFYHEVNAPLAISLPSFLKETGFKNPTELQNSNFQRVHGQGSTYFGFISSSDARNKDFANAMECHARGNVLPWTEVFDTDQIVANAKPGRALVVDVGGSKGHDLDKFRQKHPGIPHGSLVLQDLPEVLKNLAVDPTITICPHDFFTPQPVRHAGIYYLHLILHDWPDERAIEILRRIADAMEPGYSRILLHEDVVSTRDPSIQATVADMTMMMCFSSAERTEKEWRVLVERVDGLRIVKVWRKPLSLGGIVEIERLDSV

SEQ ID NO: 3400 - DNA, 1191 bp, Muscodor strobelii
  misc_feature: SGI cDNA ID NO. 560791
  misc_feature: Encodes the peptide sequence at SEQ ID NO 3401
atgacttccatcgatgatactatcacgttgctgagcaagatcggacccgagctggccaactccgagccagatcgtctccgtctcagcgatgcacttctctctgctcttcggaagattcaatctccttgggacgttgcttgtgctcacggctggattgaacttaccactacggcggccatcaagacactaattgacaccggtcttttcacagcatgggccgaacacggaggcgagcccatgacaactcagaggttttctgagttgacaggggctgacgcggtgctattaggtgaggctagaaagatttgtgctgcccaacatctcattgctgaagctggcgaagacatgtatgcttcaacaccgtggtccttggctttgggaacagaccctgcaactgtatcgatctacggaacattttatcatgaagtgaatgccccattagcaatttcacttccatctttcttgaaagaaacgggcttcaaaaacccgacagagcttcagaacagcaatttccaacgtgttcatggtcaaggttctacatatttcggattcatctcgtcttcggatgcccgcaacaaagactttgccaatgccatggagtgccatgctcgaggtaatgttctgccgtggacagaagtgttcgatacggatcagatcgtggccaatgccaaacctggacgtgctctcgttgtcgacgtcggtggtagcaaggggcacgatctcgacaagttccgacaaaagcacccgggcattcctcacggaagtcttgttctgcaagatcttccagaagtcttgaaaaacttagctgtggaccccaccatcactatttgtccccatgacttcttcactccccagccagtcaggcacgccggaatatattaccttcacttgatccttcatgattggccggatgaacgggcgattgagattctgaggagaattgcagacgcgatggagcctggatattccagaatcttgctccatgaagacgtcgtctctacacgagacccctcaattcaagccaccgtagcggacatgacaatgatgatgtgcttctcttcagcagagagaacagaaaaagagtggcgcgtattagttgaacgggtcgatggtctacggatcgtgaaagtttggcgcaaaccactcagtcttggtggcatcgtagaaattgaacgacttgactcggtctga

SEQ ID NO: 3401 - protein, 396 aa, Muscodor strobelii
  misc_feature: SGI Peptide ID NO. 560791
  misc_feature (110)..(367): Pfam Id: PF00891 Pfam Desc: O-methyltransferase
  misc_feature (230)..(367): Pfam Id: PF00891 Pfam Desc: O-methyltransferase
  misc_feature (1)..(391): NCBI GI: 46111923 Blast Desc: FG02843.1 [Gibberella zeae PH-1]
  misc_feature (20)..(391): NCBI GI: 256722561 Blast Desc: NECHADRAFT_96534 [Nectria haematococca mpVI 77-13-4]
  misc_feature (8)..(391): NCBI GI: 115385781 Blast Desc: conserved [Aspergillus terreus NIH2624] gi|114187884|gb|EAU29584.1| conserved [Aspergillus terreus NIH2624]
  misc_feature (3)..(391): NCBI GI: 255933237 Blast Desc: Pc12g12810 [Penicillium chrysogenum Wisconsin 54-1255] gi|211582708|emb|CAP80908.1| Pc12g12810 [Penicillium chrysogenum Wisconsin 54-1255]
  misc_feature (20)..(391): NCBI GI: 145235619 Blast Desc: An03g05790 [Aspergillus niger] gi|134058145|emb|CAK38339.1| protein product [Aspergillus niger]
  misc_feature (2)..(391): NCBI GI: 238503662 Blast Desc: O-methyltransferase, [Aspergillus flavus NRRL3357] gi|220690534|gb|EED46883.1| O-methyltransferase, [Aspergillus flavus NRRL3357]
  misc_feature (6)..(391): NCBI GI: 145245013 Blast Desc: An11g08080 [Aspergillus niger] gi|134079469|emb|CAK46001.1| protein product [Aspergillus niger]
  misc_feature (6)..(391): NCBI GI: 67541563 Blast Desc: AN6945.2 [Aspergillus nidulans FGSC A4] gi|40738510|gb|EAA57700.1| AN6945.2 [Aspergillus nidulans FGSC A4] gi|259480556|tpe|CBF71797.1| TPA: O-methyltransferase, FGSC
  misc_feature (24)..(391): NCBI GI: 145228783 Blast Desc: An01g02640 [Aspergillus niger] gi|134054792|emb|CAK43632.1| protein product [Aspergillus niger]
  misc_feature (11)..(391): NCBI GI: 240107098 Blast Desc: sterigmatocystin 8-O-methyltransferase precursor, [Coccidioides posadasii C735 delta SOWgp]
  misc_feature (76)..(378): SWISSPROT Homolog: EC 2.1.1.110 Sterigmatocystin 8-O-methyltransferase
MTSIDDTITLLSKIGPELANSEPDRLRLSDALLSALRKIQSPWDVACAHGWIELTTTAAIKTLIDTGLFTAWAEHGGEPMTTQRFSELTGADAVLLGEARKICAAQHLIAEAGEDMYASTPWSLALGTDPATVSIYGTFYHEVNAPLAISLPSFLKETGFKNPTELQNSNFQRVHGQGSTYFGFISSSDARNKDFANAMECHARGNVLPWTEVFDTDQIVANAKPGRALVVDVGGSKGHDLDKFRQKHPGIPHGSLVLQDLPEVLKNLAVDPTITICPHDFFTPQPVRHAGIYYLHLILHDWPDERAIEILRRIADAMEPGYSRILLHEDVVSTRDPSIQATVADMTMMMCFSSAERTEKEWRVLVERVDGLRIVKVWRKPLSLGGIVEIERLDSV

SEQ ID NO: 3402 - DNA, 954 bp, Muscodor strobelii
  misc_feature: SGI cDNA ID NO. 560792
  misc_feature: Encodes the peptide sequence at SEQ ID NO 3403
atgcagtggacgtccactaccgccaacgatggctgcgagctggctatgcagacctctttgcaaatgcccgtccccgcgcaacagatacctgactgctgcattttgctacttcatggtttcagcggctcaagcgattacttcacccgcaacttctcgggcatttcatcaaggtattgggtcgtcgcacccgacatgcgcggccatggtaaatcggggcgaaccgatggtggctatcacgtcgcacgcctagctgccgatctccggcacatcattacctatctccgagcttcatcggacaaagatatcaacatcatccccgtggggtgttccattggagccgccgtggtctggacttatattgagctctttggatgcgacgtctgcggtttcgtcttcgtcgaccgagctcctctacaagaccgctcgcctttcgaggattggaatgagaagaaggcacacaaaggttgctatgacgaagcgacgatgaaatctgcgcagaatttttggattcacaactcggcagccgcgcacctagatctggcacagtcttcgctgggatacttacatgcgccgagcgccgatgatggggtaactgaggagcaaaagaaggaagacgcggacttcttcactagcaaaagtgcgctgtgcgaccagagatggctcgcaaagctcctatgcgatcacaccaggtacgaccatcgagactccctcgatctcatagacagaccagccctggtgatgtacggcaatagatcaggatgttttacacacgaaggcgtgtcggagacggcaacacggatcaatcgtagttgcaagcggaaacaagagatggcctccgtgagcacatttaattctgggcattggctgttttacgaggaacccgacaaattcaatcgagagattctcacttttgctgagagatgtattactagtactgaagtgctgatggaatga

SEQ ID NO: 3403 - protein, 317 aa, Muscodor strobelii
  misc_feature: SGI Peptide ID NO. 560792
  misc_feature (58)..(303): Pfam Id: PF00561 Pfam Desc: alpha/beta hydrolase fold
  misc_feature (58)..(119): Pfam Id: PF00561 Pfam Desc: alpha/beta hydrolase fold
  misc_feature (1)..(304): NCBI GI: 46125463 Blast Desc: FG07109.1 [Gibberella zeae PH-1]
  misc_feature (1)..(308): NCBI GI: 256733080 Blast Desc: NECHADRAFT_100057 [Nectria haematococca mpVI 77-13-4]
  misc_feature (1)..(312): NCBI GI: 261358728 Blast Desc: conserved [Verticillium albo-atrum VaMs.102]
  misc_feature (1)..(307): NCBI GI: 171685314 Blast Desc: protein product [Podospora anserina] gi|170942618|emb|CAP68270.1| protein product [Podospora anserina]
  misc_feature (1)..(314): NCBI GI: 116208500 Blast Desc: CHGG_03543 [Chaetomium globosum CBS 148.51] gi|88184140|gb|EAQ91608.1| CHGG_03543 [Chaetomium globosum CBS 148.51]
  misc_feature (34)..(308): NCBI GI: 164425907 Blast Desc: NCU11287 [Neurospora crassa OR74A] gi|157071116|gb|EDO65187.1| conserved [Neurospora crassa OR74A]
  misc_feature (8)..(304): NCBI GI: 169602649 Blast Desc: SNOG_04328 [Phaeosphaeria nodorum SN15] gi|160706220|gb|EAT88088.2| SNOG_04328 [Phaeosphaeria nodorum SN15]
  misc_feature (33)..(306): NCBI GI: 156048360 Blast Desc: SS1G_08911 [Sclerotinia sclerotiorum 1980] gi|154693308|gb|EDN93046.1| SS1G_08911 [Sclerotinia sclerotiorum 1980]
  misc_feature (33)..(304): NCBI GI: 154300706 Blast Desc: BC1G_10941 [Botryotinia fuckeliana B05.10] gi|150856548|gb|EDN31740.1| BC1G_10941 [Botryotinia fuckeliana B05.10]
  misc_feature (25)..(305): NCBI GI: 226461545 Blast Desc: [Micromonas pusilla CCMP1545]
MQWTSTTANDGCELAMQTSLQMPVPAQQIPDCCILLLHGFSGSSDYFTRNFSGISSRYWVVAPDMRGHGKSGRTDGGYHVARLAADLRHIITYLRASSDKDINIIPVGCSIGAAVVWTYIELFGCDVCGFVFVDRAPLQDRSPFEDWNEKKAHKGCYDEATMKSAQNFWIHNSAAAHLDLAQSSLGYLHAPSADDGVTEEQKKEDADFFTSKSALCDQRWLAKLLCDHTRYDHRDSLDLIDRPALVMYGNRSGCFTHEGVSETATRINRSCKRKQEMASVSTFNSGHWLFYEEPDKFNREILTFAERCITSTEVLME

SEQ ID NO: 3404 - DNA, 1969 bp, Muscodor strobelii
  misc_feature: SGI EST ID NO. CUFF.8541.0
  misc_feature: Variant of the nucleotide sequence at SEQ ID NO 3402
tgatgatataagctatggtgggctgaaattcctagcaagaagctcgtattcattataaagcaacgaattattattattatacgatcggtccgaaaccccttacttgtcgaagatggcagttgtggcatatccactagtccaaccaccaagtaaatattctggtctccctgccggcctgcattgtggccagctttccatctctaccttttcgccgtgccggttggatcgtccggggggcaatctcaggtatcccgtgcttcctacttcgaagggctcaaagtcaagagttcgaggagcacgaagctgagcttcctcatccgacacccttcccacaaccccgctatcagaggagcgtgtattgagcgaacccctcaaaatacttcgaacgttagaaatcagaaggcgcgactttcaatacggaaactaaaatagtatgtacttcaagcgatagggaaaaggctgggtcgacttggagtgggtggtaagaaatgctgaattggtgattcaaggaaaactcgatgaggggccaatttctaggtgactcaagtcgggtggggtgtcttagaaaccacaatgacgcttctatctccaccgcggagtgtttgtaacgctcacaacactgacagtatccaagaggccagagacaagtcgcgattcaagttaacatgcagtggacgtccactaccgccaacgatggctgcgagctggctatgcagacctctttgcaaatgcccgtccccgcgcaacagatacctgactgctgcattttgctacttcatggtttcagcggctcaagcgattacttcacccgcaacttctcgggcatttcatcaaggtattgggtcgtcgcacccgacatgcgcggccatggtaaatcggggcgaaccgatggtggctatcacgtcgcacgcctagctgccgatctccggcacatcattacctatctccgagcttcatcggacaaagatatcaacatcatccccgtggggtgttccattggagccgccgtggtctggacttatattgagctctttggatgcgacgtctgcggtttcgtcttcgtcgaccgagctcctctacaagaccgctcgcctttcgaggattggaatgagaagaaggcacacaaaggttgctatgacgaagcgacgatgaaatctgcgcagaatttttggattcacaactcggcagccgcgcacctagatctggcacagtcttcgctgggatacttacatgcgccgagcgccgatgatggggtaactgaggagcaaaagaaggaagacgcggacttcttcactagcaaaagtgcgctgtgcgaccagagatggctcgcaaagctcctatgcgatcacaccaggtacgaccatcgagactccctcgatctcatagacagaccagccctggtgatgtacggcaatagatcaggatgttttacacacgaaggcgtgtcggagacggcaacacggatcaatcgtagttgcaagcggaaacaagagatggcctccgtgagcacatttaattctgggcattggctgttttacgaggaacccgacaaattcaatcgagagattctcacttttgctgagagatgtattactagtactgaagtgctgatggaatgatgggcgaccttgacagtcgaatgctgacacgtactggccgtcgtaaagtgcaccaatcgggatgcattctctacagtattatcccgcctactacatgagatcgtgagcgatagcaactacaagaccctgcaaactgttacagtaaatctcatgttgaaggctagcattcgaggagttgcctcaacaacacttgctgttatatttggatgttggggaagtcttttttatcgagatgccgtcatcctggatgtaataagatgtgtgtgaaatgcggcaaggtatatctccgtcgagaatggacataggtgatagcgcatgacactgagcaactgcggtgtcatacattgcgg

SEQ ID NO: 3405 - DNA, 669 bp, Muscodor strobelii
  misc_feature: SGI cDNA ID NO. 560793
  misc_feature: Encodes the peptide sequence at SEQ ID NO 3406
atgaagactacgatcacagcagtatcggtgctcttcgccgtcggagctatcgctgcagcaaacgacgatcctgcaacatgcccgcccattgattgggacaatccggctgatgagccagggaacccgggatatcgcgatatcgacttctacttcaataagacgggccaaattcatatgcgcccaggttgtacctactggcgccagaactacccaagagatatcacgacagatgccattggatgcctcaacgaggatggccttgtcgtgcctattgccgataacgattgtgccaatttccactacatacccgcgacaggcaaattagaaaactacacggttgagatattccgaactatcaagaaagactacgcttgtggatggacgttcgacgataagatgacgtggagctgcaaggaagaagaaagctctgacttctttcctgagagcttactcgcaccgtctggagacacaccatacttcttcggtgactacacgggaggtgtgatctcgactgagctcttcacatggtggattcagcatccaccgagcagtgtcaatgatgcccagcatttggagtatcgtattccagacaacccttactccaatcagacattcgagcctggcgacggtacttatccggtcttaatggagctagtagtcctcgagtga

SEQ ID NO: 3406 - protein, 222 aa, Muscodor strobelii
  misc_feature: SGI Peptide ID NO. 560793
MKTTITAVSVLFAVGAIAAANDDPATCPPIDWDNPADEPGNPGYRDIDFYFNKTGQIHMRPGCTYWRQNYPRDITTDAIGCLNEDGLVVPIADNDCANFHYIPATGKLENYTVEIFRTIKKDYACGWTFDDKMTWSCKEEESSDFFPESLLAPSGDTPYFFGDYTGGVISTELFTWWIQHPPSSVNDAQHLEYRIPDNPYSNQTFEPGDGTYPVLMELVVLE

SEQ ID NO: 3407 - DNA, 1962 bp, Muscodor strobelii
  misc_feature: SGI EST ID NO. CUFF.8648.0
  misc_feature: Variant of the nucleotide sequence at SEQ ID NO 3405
cttaattcagacttgcgtattagctaacaaaacctgcttcacaatgaagactacgatcacagcagtatcggtgctcttcgccgtcggagctatcgctgcagcaaacgacgatcctgcaacatgcccgcccattgattgggacaatccggctgatgagccagggaacccgggatatcgcgatatcgacttctacttcaataagacgggccaaattcatatgcgcccaggttgtacctactggcgccagaactacccaagagatatcacgacagatgccattggatgcctcaacgaggatggccttgtcgtgcctattgccgataacgattgtgccaatttccactacatacccgcgacaggcaaattagaaaactacacggttgagatattccgaactatcaagaaagactacgcttgtggatggacgttcgacgataagatgacgtggagctgcaaggaagaagaaagctctgacttctttcctgagagcttactcgcaccgtctggagacacaccatacttcttcggtgactacacgggaggtgtgatctcgactgagctcttcacatggtggattcagcatccaccgagcagtgtcaatgatgcccagcatttggagtatcgtattccagacaacccttactccaatcagacattcgagcctggcgacggtacttatccggtcttaatggagctagtagtcctcgagtgatcgagtgcaagggcaactaaacggcgtgcgtagacatgtcgagagcttcagtacgcgcattgacacggaatctctacatgtttcccttgcctaaatatacttgaccgtatgcagctcagcatcatcatcgtcaagtttatatatctttcaaatagtcaaacaccagactagattgacacgattcatcttataattatgattgaagacatgtcggatattgtaagagcgcacttggtagtataacaagagtataccgaagggaatttattgctacaatgccgccgcttatctaactgaggtattgttgaaactatgtcacacgttgacccgactagacgaacaatcgaaaggattaccatttgtaattatgtcaaatttccgaaataacttgtctagcggtgaaaagtatccataatgctatgtgcaatatggccccaaatttgatggaccactttaggcttgtccagcgcctgacgtattccagtggacctccaggacagatagtagagattcgtcgggccgaaccactcgatggagaacgaatctcctatcagccgctgttagaagtgatttccactcgtccatatatctttcgcggctgttgaaatagcatttcacgctcatatccaccgccctatgaaaattttgtcagcaagcctattctcctatagtatcagctcacagctacacacctcatgacccgttctctccagagtggtattgcgtccggttcaggcatacatgcgtcttggatgagaatttttgcccccgggcgaagggcaggtatctgcgctttcaagatgcggacggcagactcatcggcccagttgcgaaggaccatgcgaaagaaatagacttctgcttgtaccgtctgcggctcaaaaagttcgtgtttcatgaactgaacacgctctttcagctgttcgggtacgcctgcatcggcaccttcgatcatcatcgctgaatcctgtactagtagtttgatattctcaaatttgcttgctaggtctatcgcgacttgcccgcgagaaccaccaacgttgactacgagtgcctctttgagagaggcccaatcataggccttagacacagcttcatcgccacaacccggaacatgttccagggctttcgacccgcctgcgaaacgcattgctcgctcggggtcggtgctgaggacatcgaataccgacttgccgccattggcgagagcgaacccctgatagtgttaatacacggcagcagaggtattg

SEQ ID NO: 3408 - DNA, 1275 bp, Muscodor strobelii
  misc_feature: SGI cDNA ID NO. 560794
  misc_feature: Elevated expression when VOC is produced
  misc_feature: Encodes the peptide sequence at SEQ ID NO 3409
atggcaccagctagcaccacccccaaaatagtcgagttggcgaataagataagcagctccgttgcagagttgcagggtagtctgtctaaaaagggaatagaatcgccatcctttgacgaagatagccctccctacctccctgccgacgtggcacgaattcgagatgatgtcctcgatgcgactgctgagcttcatgaggttctcatggaacccctaatgttgatctacaagtttgccggtgtctcgaatgtcatcagcattgatacaatttgtcgtttccatatcttggatatggtgccctctggggggcagatctcctttgaagatattaccaagaaaacaagtctggacacggggctcgtgcggcgcctgttgagacacgccatatcgatgcgtattctgagagaaccagaacctggtatggtagcacatacgaaaatttctaagttcttagccatcccttacatcagtgcgtgggtcaattttgaaaacaaggatacctatccagctattcctagggtcgcagacgccattgagaaatggccgtcttcggaggaaccgagcgaaactgggttcgctctcgccaatggcggcaagtcggtattcgatgtcctcagcaccgaccccgagcgagcaatgcgtttcgcaggcgggtcgaaagccctggaacatgttccgggttgtggcgatgaagctgtgtctaaggcctatgattgggcctctctcaaagaggcactcgtagtcaacgttggtggttctcgcgggcaagtcgcgatagacctagcaagcaaatttgagaatatcaaactactagtacaggattcagcgatgatgatcgaaggtgccgatgcaggcgtacccgaacagctgaaagagcgtgttcagttcatgaaacacgaactttttgagccgcagacggtacaagcagaagtctatttctttcgcatggtccttcgcaactgggccgatgagtctgccgtccgcatcttgaaagcgcagatacctgcccttcgcccgggggcaaaaattctcatccaagacgcatgtatgcctgaaccggacgcaataccactctggagagaacgggtcatgagggcggtggatatgagcgtgaaatgctatttcaacagccgcgaaagatatatggacgagtggaaatcacttctaacagcggctgataggagattcgttctccatcgagtggttcggcccgacgaatctctactatctgtcctggaggtccactggaatacgtcaggcgctggacaagcctaa

SEQ ID NO: 3409 - protein, 424 aa, Muscodor strobelii
  misc_feature: SGI Peptide ID NO. 560794
  misc_feature (137)..(390): Pfam Id: PF00891 Pfam Desc: O-methyltransferase
  misc_feature (192)..(390): Pfam Id: PF00891 Pfam Desc: O-methyltransferase
  misc_feature (1)..(421): NCBI GI: 116206014 Blast Desc: CHGG_02300 [Chaetomium globosum CBS 148.51] gi|88182897|gb|EAQ90365.1| CHGG_02300 [Chaetomium globosum CBS 148.51]
  misc_feature (1)..(417): NCBI GI: 156030706 Blast Desc: SS1G_14292 [Sclerotinia sclerotiorum 1980] gi|154700683|gb|EDO00422.1| SS1G_14292 [Sclerotinia sclerotiorum 1980]
  misc_feature (3)..(417): NCBI GI: 171677656 Blast Desc: protein product [Podospora anserina] gi|170936896|emb|CAP61555.1| protein product [Podospora anserina]
  misc_feature (8)..(416): NCBI GI: 238841485 Blast Desc: sterigmatocystin 8-O-methyltransferase [Microsporum canis CBS 113480]
  misc_feature (1)..(417): NCBI GI: 145604617 Blast Desc: MGG_13861 [Magnaporthe grisea 70-15] gi|145012605|gb|EDJ97259.1| MGG_13861 [Magnaporthe grisea 70-15]
  misc_feature (1)..(417): NCBI GI: 145614843 Blast Desc: MGG_14022 [Magnaporthe grisea 70-15] gi|145021775|gb|EDK05852.1| MGG_14022 [Magnaporthe grisea 70-15]
  misc_feature (1)..(365): NCBI GI: 149209215 Blast Desc: MGCH7_ch7g100 [Magnaporthe grisea 70-15] gi|86196055|gb|EAQ70693.1| MGCH7_ch7g100 [Magnaporthe grisea 70-15]
  misc_feature (5)..(417): NCBI GI: 189208266 Blast Desc: sterigmatocystin 8-O-methyltransferase precursor [Pyrenophora tritici-repentis Pt-1C-BFP] gi|187976559|gb|EDU43185.1| sterigmatocystin precursor Pt-1C-BFP]
  misc_feature (4)..(416): NCBI GI: 242800307 Blast Desc: O-methyltransferase, [Talaromyces stipitatus ATCC 10500] gi|218716905|gb|EED16326.1| O-methyltransferase, [Talaromyces stipitatus ATCC 10500]
  misc_feature (4)..(416): NCBI GI: 212534482 Blast Desc: O-methyltransferase, [Penicillium marneffei ATCC 18224] gi|210069796|gb|EEA23886.1| O-methyltransferase, [Penicillium marneffei ATCC 18224]
  misc_feature (81)..(401): SWISSPROT Homolog: EC 2.1.1.110 Sterigmatocystin 8-O-methyltransferase
  misc_feature: Useful for introducing or modulating the production of volatile compounds
MAPASTTPKIVELANKISSSVAELQGSLSKKGIESPSFDEDSPPYLPADVARIRDDVLDATAELHEVLMEPLMLIYKFAGVSNVISIDTICRFHILDMVPSGGQISFEDITKKTSLDTGLVRRLLRHAISMRILREPEPGMVAHTKISKFLAIPYISAWVNFENKDTYPAIPRVADAIEKWPSSEEPSETGFALANGGKSVFDVLSTDPERAMRFAGGSKALEHVPGCGDEAVSKAYDWASLKEALVVNVGGSRGQVAIDLASKFENIKLLVQDSAMMIEGADAGVPEQLKERVQFMKHELFEPQTVQAEVYFFRMVLRNWADESAVRILKAQIPALRPGAKILIQDACMPEPDAIPLWRERVMRAVDMSVKCYFNSRERYMDEWKSLLTAADRRFVLHRVVRPDESLLSVLEVHWNTSGAGQA

SEQ ID NO: 3410 - DNA, 2194 bp, Muscodor strobelii
  misc_feature: SGI EST ID NO. CUFF.8649.1
  misc_feature: Variant of the nucleotide sequence at SEQ ID NO 3408
gctaacttcaggacctgttggattgtcatacaacgaacacgatacttcttattgctaccaatagcctatgttcaacttcgtgcaagggattggatgagaagaaacaagcagaacgcatgcaagctgagaaggatcactggcacagctcaatcgtcgcaactcttcctttcggatatcatctctctacaattgcagcaccacatctatcatattggctctctctctctctctttttttcacatatcatttgccgtcccgctgctcaagcaaaatggcaccagctagcaccacccccaaaatagtcgagttggcgaataagataagcagctccgttgcagagttgcagggtagtctgtctaaaaagggaatagaatcgccatcctttgacgaagatagccctccctacctccctgccgacgtggcacgaattcgagatgatgtcctcgatgcgactgctgagcttcatgaggttctcatggaacccctaatgttgatctacaagtttgccggtgtctcgaatgtcatcagcattgatacaatttgtcgtttccatatcttggatatggtgccctctggggggcagatctcctttgaagatattaccaagaaaacaagtctggacacggggctcgtgcggcgcctgttgagacacgccatatcgatgcgtattctgagagaaccagaacctggtatggtagcacatacgaaaatttctaagttcttagccatcccttacatcagtgcgtgggtcaattttgaaaacaaggatacctatccagctattcctagggtcgcagacgccattgagaaatggccgtcttcggaggaaccgagcgaaactgggttcgctctcgccaatggcggcaagtcggtattcgatgtcctcagcaccgaccccgagcgagcaatgcgtttcgcaggcgggtcgaaagccctggaacatgttccgggttgtggcgatgaagctgtgtctaaggcctatgattgggcctctctcaaagaggcactcgtagtcaacgttggtggttctcgcgggcaagtcgcgatagacctagcaagcaaatttgagaatatcaaactactagtacaggattcagcgatgatgatcgaaggtgccgatgcaggcgtacccgaacagctgaaagagcgtgttcagttcatgaaacacgaactttttgagccgcagacggtacaagcagaagtctatttctttcgcatggtccttcgcaactgggccgatgagtctgccgtccgcatcttgaaagcgcagatacctgcccttcgcccgggggcaaaaattctcatccaagacgcatgtatgcctgaaccggacgcaataccactctggagagaacgggtcatgagggcggtggatatgagcgtgaaatgctatttcaacagccgcgaaagatatatggacgagtggaaatcacttctaacagcggctgataggagattcgttctccatcgagtggttcggcccgacgaatctctactatctgtcctggaggtccactggaatacgtcaggcgctggacaagcctaaagtggtccatcaaatttggggccatattgcacatagcattatggatacttttcaccgctagacaagttatttcggaaatttgacataattacaaatggtaatcctttcgattgttcgtctagtcgggtcaacgtgtgacatagtttcaacaatacctcagttagataagcggcggcattgtagcaataaattcccttcggtatactcttgttatactaccaagtgcgctcttacaatatccgacatgtcttcaatcataattataagatgaatcgtgtcaatctagtctggtgtttgactatttgaaagatatataaacttgacgatgatgatgctgagctgcatacggtcaagtatatttaggcaagggaaacatgtagagattccgtgtcaatgcgcgtactgaagctctcgacatgtctacgcacgccgtttagttgcccttgcactcgatcactcgaggactactagctccattaagaccggataagtaccgtcgccaggctcgaatgtctgattggagtaagggttgtctggaatacgatactccaaatgctgggcatcattgacactgctcggtggatgctgaatccaccatgtgaagagctcagtcgagatcacacctcccgtgtagtcaccgaagaagta

SEQ ID NO: 3411 - DNA, 1107 bp, Muscodor strobelii
  misc_feature: SGI cDNA ID NO. 560795
  misc_feature: Encodes the peptide sequence at SEQ ID NO 3412
atgaaaatgcgcactgcaagtctggcggcgttgctagccttttcatctaccgttcaatgcacacccacgcatcaatttgaccatttcttcccaggctggaacaacctcatccaagggtatctacgtgaacctgattgcgctccgagttatgctacatacttgaccggaaatgttaataagacactgggtgctcaatcactagtcaatccggtgattgactgtgtcctgactcagatgcccgagtcacgcaaagcagaattggcagcgagtaatctcgtcctcggtcttgtccccacgattctgtcaagtctgggcagcacaaccgccgaaacggcccttgttggcatccggcggcctttcctaggctttctgatcgctgcaggcagcccaacagtagcactgatgaagagcggtgactttgctgaatctctgtccaagtttgttgatggcaaagatctgacagggataaacgtgccgggcatgggctggagccatgttgatgcgaagtgggcatttccaatcaccattttggaatatctcatggttgcgggtgcattagcgaatgttgtcgatttggcgtatgaactgggtgtccatgccgttgccgtgtttgcacctgatactatattcggtgtgccactgtggacatttcttgctgccataattcacctggcttctgtactcacgatctggttgagagtacggcttacacaggcgacagagaaggacgagtactatcgtaagacagggacagtaacgtcttcatggttgcccaagcagttcctcccatctgctttccagccgatgatgagattagagtggaaacgagagcacctgctgttccatatccttacatggctcatatcgctaggcatactgatacaagtgctctttggtacattggttttgtcggggctgctgttcttcagcttggttgactcgctgactatcgtgctgcgatacatactaagtgctgttctctgccgcgcagtagtgaggttagaactgtcggggatgagcgcatcactcgcaccggctcctagtgagggtagcagtaaagagatcgaggcacgagtagatggcgagtatgtagggagagcttattga

SEQ ID NO: 3412 - protein, 368 aa, Muscodor strobelii
  misc_feature: SGI Peptide ID NO. 560795
  misc_feature (16)..(361): NCBI GI: 145609221 Blast Desc: MGG_07429 [Magnaporthe grisea 70-15] gi|145016612|gb|EDK01042.1| MGG_07429 [Magnaporthe grisea 70-15]
  misc_feature (25)..(354): NCBI GI: 238490752 Blast Desc: conserved [Aspergillus flavus NRRL3357] gi|220697026|gb|EED53367.1| conserved [Aspergillus flavus NRRL3357]
  misc_feature (25)..(354): NCBI GI: 169772847 Blast Desc: [Aspergillus oryzae RIB40] gi|83768753|dbj|BAE58890.1| protein product [Aspergillus oryzae]
  misc_feature (32)..(351): NCBI GI: 256732224 Blast Desc: NECHADRAFT_93753 [Nectria haematococca mpVI 77-13-4]
  misc_feature (26)..(360): NCBI GI: 46127805 Blast Desc: FG08280.1 [Gibberella zeae PH-1]
  misc_feature (1)..(363): NCBI GI: 116203777 Blast Desc: CHGG_09772 [Chaetomium globosum CBS 148.51] gi|88175900|gb|EAQ83368.1| CHGG_09772 [Chaetomium globosum CBS 148.51]
  misc_feature (21)..(339): NCBI GI: 256726714 Blast Desc: NECHADRAFT_25871 [Nectria haematococca mpVI 77-13-4]
  misc_feature (25)..(338): NCBI GI: 46111045 Blast Desc: FG02404.1 [Gibberella zeae PH-1]
  misc_feature (21)..(343): NCBI GI: 171686992 Blast Desc: protein product [Podospora anserina] gi|170943457|emb|CAP69110.1| protein product [Podospora anserina]
  misc_feature (3)..(364): NCBI GI: 116199195 Blast Desc: CHGG_07753 [Chaetomium globosum CBS 148.51] gi|88179032|gb|EAQ86500.1| CHGG_07753 [Chaetomium globosum CBS 148.51]
MKMRTASLAALLAFSSTVQCTPTHQFDHFFPGWNNLIQGYLREPDCAPSYATYLTGNVNKTLGAQSLVNPVIDCVLTQMPESRKAELAASNLVLGLVPTILSSLGSTTAETALVGIRRPFLGFLIAAGSPTVALMKSGDFAESLSKFVDGKDLTGINVPGMGWSHVDAKWAFPITILEYLMVAGALANVVDLAYELGVHAVAVFAPDTIFGVPLWTFLAAIIHLASVLTIWLRVRLTQATEKDEYYRKTGTVTSSWLPKQFLPSAFQPMMRLEWKREHLLFHILTWLISLGILIQVLFGTLVLSGLLFFSLVDSLTIVLRYILSAVLCRAVVRLELSGMSASLAPAPSEGSSKEIEARVDGEYVGRAY

SEQ ID NO: 3413 - DNA, 562 bp, Muscodor strobelii
  misc_feature: SGI EST ID NO. CUFF.8553.0
  misc_feature: Variant of the nucleotide sequence at SEQ ID NO 3411
ctttctatcactccagatataacaagttgggcgccctcgatactcgggctctgtgtaagggttacgaagtagagcgattcattttcgtcgacattcaaagcgctggtcgccattcttgatcatgaaaatgcgcactgcaagtctggcggcgttgctagccttttcatctaccgttcaatgcacacccacgcatcaatttgaccatttcttcccaggctggaacaacctcatccaagggtatctacgtgaacctgattgcgctccgagttatgctacatacttgaccggaaatgttaataagacactgggtgctcaatcactagtcaatccggtgattgactgtgtcctgactcagatgcccgagtcacgcaaagcagaatgtatgtgacctagcacgcctcactctttcaagccctgatttcatgcttcgatatcttcgaaactggcaaggtctgacagtttctccagtggcagcgagtaatctcgtcctcggtcttgtccccacgattctgtcaagtctgggcagcacaaccgccgaaacggcccttgttggcatccggcg

SEQ ID NO: 3414 - DNA, 813 bp, Muscodor strobelii
  misc_feature: SGI cDNA ID NO. 560796
  misc_feature: Encodes the peptide sequence at SEQ ID NO 3415
atggcggtccagaatgtgccgagccttatccaggatcctccggaagagattcccttattacaaaatatatctgcagccatcttcgttccaaccgaacaagacttcacttcacccgccccaacagtcaatcatgatcccatcgctcgtgtagagcgcaccatcgcggtgctcgaagaacacaaagagcgtgtacagcaacaaatgctctggatgtttacccgcgaagcgaagcgcattagcaaagatggactgaaagaacagtcatattatgacgtacaccaccaggtcgtcaacgcaccgccagcaacccgcgaccatgagctcaatctcgaggagcggatcttaagcgagagcgcatgggaggtgaaccagatcttaaatcgcgagcgcgatggaacaagcagcacgggttcccacaatggaaatgaccactaccgaccgcgtgacaacccactgccgaagcgcagggaatctattgcaccaatcgtgcctaagtccttactaataaccgagaaggtgatgccgagtcttgaggctccccgtgtcgtggcttcgaagtgggtttacaatgagatccattggagctgggaaatactggaaggccatgcgaaagccgtcagggatgagacggccgcgcgacgaggaaatttacagctgcagatgcaggggaatttcttaccgactagcaacgctcgtccggggcctccggacttgagtggtaaggagacgaataggtctagatacccgagggatccaaaagaccgtagaggctcgaatgcatcgattgatggtaataagatggatcttgactga

SEQ ID NO: 3415 - protein, 270 aa, Muscodor strobelii
  misc_feature: SGI Peptide ID NO. 560796
  misc_feature (13)..(93): NCBI GI: 85083788 Blast Desc: NCU01764 [Neurospora crassa OR74A] gi|7800873|emb|CAB91231.1| [Neurospora crassa] gi|28918274|gb|EAA27951.1| [Neurospora crassa OR74A]
  misc_feature (16)..(79): NCBI GI: 116204675 Blast Desc: CHGG_10221 [Chaetomium globosum CBS 148.51] gi|88176349|gb|EAQ83817.1| CHGG_10221 [Chaetomium globosum CBS 148.51]
MAVQNVPSLIQDPPEEIPLLQNISAAIFVPTEQDFTSPAPTVNHDPIARVERTIAVLEEHKERVQQQMLWMFTREAKRISKDGLKEQSYYDVHHQVVNAPPATRDHELNLEERILSESAWEVNQILNRERDGTSSTGSHNGNDHYRPRDNPLPKRRESIAPIVPKSLLITEKVMPSLEAPRVVASKWVYNEIHWSWEILEGHAKAVRDETAARRGNLQLQMQGNFLPTSNARPGPPDLSGKETNRSRYPRDPKDRRGSNASIDGNKMDLD

SEQ ID NO: 3416 - DNA, 750 bp, Muscodor strobelii
  misc_feature: SGI cDNA ID NO. 560797
  misc_feature: Encodes the peptide sequence at SEQ ID NO 3417
atggccgaaccatcagcagcggagtctgcatcgcggcagtggccacctgccatgctcgatcttcaacgccgcgctcgtgaaactctatctgttggattccaagcatttgacacattcccatgggtgaaggatcagatgtttaagagcaacttgatgcgtcttttatacagcttgaaccctgatggcccggagctggcggctgccgcgttgcgaacacgcgttgagagatttgcacaacagaccggtatcttcatcgatgctaccgcttatctgagttggcatcaacaggagacgaagagctctcaaccccggttgttttcggaagaagacattttgaaagagaaacaaagcaatcccgcaccgaccgaaaggagactcgcgattcttgactcagaacttggatactctcaaaaagaagacgcaggcgtagtatcagatcaagcacccgatgcagatgtcctaagctggcaaaagtcggctcctacggtacaactatacgtcccgaaagacaaagagccatcgagtcccgacaaagagccctatcctaagaaatttcaagatatctttgagtttttggaaagtggaaaagagatccccggtatccgtaaaattccagacactgttatagacgaccctgcgattaccactcagggcagcagagctgcgccgctcaaaccgtgggagagaagggcccaggatactagtacgaacatcgagcagcccccggccggggcaggagctcaggcatga

SEQ ID NO: 3417 - protein, 249 aa, Muscodor strobelii
  misc_feature: SGI Peptide ID NO. 560797
  misc_feature (33)..(243): NCBI GI: 46121651 Blast Desc: FG05204.1 [Gibberella zeae PH-1]
  misc_feature (16)..(230): NCBI GI: 261356687 Blast Desc: conserved [Verticillium albo-atrum VaMs.102]
  misc_feature (8)..(231): NCBI GI: 256732963 Blast Desc: NECHADRAFT_78784 [Nectria haematococca mpVI 77-13-4]
  misc_feature (33)..(229): NCBI GI: 116204671 Blast Desc: CHGG_10219 [Chaetomium globosum CBS 148.51] gi|88176347|gb|EAQ83815.1| CHGG_10219 [Chaetomium globosum CBS 148.51]
  misc_feature (33)..(232): NCBI GI: 85083796 Blast Desc: NCU01766 [Neurospora crassa OR74A] gi|16416088|emb|CAD01111.1| [Neurospora crassa] gi|28918276|gb|EAA27953.1| [Neurospora crassa OR74A]
  misc_feature (33)..(228): NCBI GI: 39942146 Blast Desc: [Magnaporthe grisea 70-15] gi|145015868|gb|EDK00358.1| [Magnaporthe grisea 70-15]
  misc_feature (177)..(247): NCBI GI: 71019367 Blast Desc: UM03767.1 [Ustilago maydis 521] gi|46099569|gb|EAK84802.1| UM03767.1 [Ustilago maydis 521]
  misc_feature (180)..(230): NCBI GI: 241954288 Blast Desc: protein product [Candida dubliniensis CD36] gi|223643206|emb|CAX42080.1| protein product [Candida dubliniensis CD36]
  misc_feature (173)..(232): NCBI GI: 260941670 Blast Desc: CLUG_05015 [Clavispora lusitaniae ATCC 42720] gi|238851424|gb|EEQ40888.1| CLUG_05015 [Clavispora lusitaniae ATCC 42720]
  misc_feature (180)..(230): NCBI GI: 68466045 Blast Desc: CaO19.12049 [Candida albicans SC5314] gi|68466340|ref|XP_722652.1| CaO19.4580 [Candida albicans SC5314] gi|46444642|gb|EAL03915.1| CaO19.4580 [Candida albicans SC5314]
MAEPSAAESASRQWPPAMLDLQRRARETLSVGFQAFDTFPWVKDQMFKSNLMRLLYSLNPDGPELAAAALRTRVERFAQQTGIFIDATAYLSWHQQETKSSQPRLFSEEDILKEKQSNPAPTERRLAILDSELGYSQKEDAGVVSDQAPDADVLSWQKSAPTVQLYVPKDKEPSSPDKEPYPKKFQDIFEFLESGKEIPGIRKIPDTVIDDPAITTQGSRAAPLKPWERRAQDTSTNIEQPPAGAGAQA

SEQ ID NO: 3418 - DNA, 5278 bp, Muscodor strobelii
  misc_feature: SGI EST ID NO. CUFF.8719.0
  misc_feature: Variant of the nucleotide sequence at SEQ ID NO 3416
cgggtccgtcagggcataggcatgggcattggcatgagcatgggcattgctgttggggcgggacgaggggcgggacgaggagcagcgctgcagggtgagcgaggggtggtggtggtgcccgtggtgcagatggctgccgtgggtgagggcaatgcgtcgcggcgacgagccgggcgatcggtacaggccgcggacggtggcttggcaggtggtccgcagggctcgggcggcggcgcgacgcatctgggtggtcggggtgggcggcctgtcgagagtcgagcaggacggacgatgtcgcaggtgtcgcgtgtggtgtgcgaagccagaggtaaaggtggagatgagcgacgggcggcgagttggtaatcgcagtgggaagcagccgagcagccaagccacggggccgttgacgggggaagagcgacagagcccgacagggatcgctaatggctgcagcacgggagtggatcgatacggatgtcaggtactacctaattcacctactgaagctcatgcacaagcggtggtagtggatgagagaagatagacgagtgaagagtgaacaggtgtacgggcgtcaataaggtaatctagctatcaagaagcagtatgaaacacggcgactgagacaagttgcagttgcctagcatctgcaagtcgcgcagacccagtgtcaaagaccagtcaaggtccgcgacgacgaggttttcattagctatctgagctctctacccagctcgtagtctagaatacagcatcgcagacctgcatctcaggtatttagatatcttatgtacctacattatacatacatgtatgacatcttgtcacatgaattagcagacgtgtggtcagcacgatcttgcttgttgccgttgcaagtactcactcctcatcgacgttaatactcgtctgcatatacaatctcaaatagccgtgtcaaaatcgccattgcctgctccttgatcatccgcttcaaaccatctttcgcccgcacacaggcttcatataccataacaacggcaatcccgcaagtcctgcccaagtgcaagacgcgaagaaacaaaatgcattaccagggtaacaagaggcttaacggaaggatggctaatggacacaccagcaacattgctcagaggggcggccgattggatttgactgccttagggctccgcttagcttctgatgtctcttcatagtatgaagaccgtcgttgctcaaacttgtcttcactggtcattactcgtcgtacgtgcttcgcgtcgtagaaaggccgagaacgcaaagtttcccgcggcatacgttaagggatagtccgagtagccagtatgcctgatgattgtggtgtaaataacggtgtcgatgccggtgacgaaagcgatggtagccgtgatctcaagctataggtaatgtatgcttcaacgcatcttcactgataccataccagataccgtcccgcaatccacataggtaggcgttgttgacctcatcatgattggcgttgttatcgttgaccccgtcgttttcgagctgcttcacttggatgctttgatatccgatgtcatgctccaagatctcgtcctggcagccgaaaggtcatcatggtatttgatagccatatcgagaatgggggtaggatcggcccgtgtcggggcggggatagagtgcaatgtgtgtgtggaagcgaggtggggaattggggaaagtgtgggattgtggcagccgagaacatcaagacagaacctcagattttatgtcctgcgctttcacgaggggttgagatcgacgactattaattgtctacattcgaagcgcggctcaagttcaatttgatcagtgtgatgtccggcgatatataggcacgtcgctaagagaaaagtatcattacaagaccaatgctcggcgaactatcacgcatggtcgaatcttgacctctcaactatctgatgcgactggggaagttgagagcttgataaccaacagtcccttgctcaaacagccaaggccaagccgaattgacaattagtatccacgtctcaaaccaaactccctaacctcgccgacaattcaatcggagctttccatacttgcgacgggctctttttgagtctcatatggtatatccgacctaagttaacaccgatcacgtcgcataacaactccatcttcaaccctatggccgaaccatcagcagcggagtctgcatcgcggcagtggccacctgccatgctcgatcttcaacgccgcgctcgtgaaactctatctgttggattccaagcatttgacacattcccatgggtgaaggatcagatgtttaagagcaacttgatgcgtcttttatacagcttgaaccctgatggcccggagctggcggctgccgcgttgcgaacacgcgttgagagatttgcacaacagaccggtatcttcatcgatgctaccgcttatctgagttggcatcaacaggagacgaagagctctcaaccccggttgttttcggaagaagacattttgaaagagaaacaaagcaatgtgaggctaccacctcgccgtcgccatttgatatctctgttgtagctcgatgagtgaggcattactgacaaagagcagcccgcaccgaccgaaaggagactcgcgattcttgactcagaacttggatactctcaaaaagaagacgcaggcgtagtatcagatcaagcacccgatgcagatgtcctaagctggcaaaagtcggctcctacggtacaactatacgtcccgaaagacaaagagccatcgagtcccgacaaagagccctatcctaagaaatttcaagatatctttgagtttttggaaagtggaaaagagatccccggtatccgtaaaattccagacactgttatagacgaccctgcgattaccactcagggcagcagagctgcgccgctcaaaccgtgggagagaagggcccaggatactagtacgaacatcgagcagcccccggccggggcaggagctcaggcatgagctcttaacagagggagacaagacaaacgtcgaatttttcgtatttgaatgagcttcttgacaggcaacggactgtacataagtttacacagggattgacagagccaacgtctcttgcagtctcaatccctcccgcaacattgtaacaagtgatgatacgagtcatggctgcgagaccttcgcctttgtttccggccacggctcccaaattcgtacgtgaattatggtagtagactatcttgtagtcgtccgttattgatgtaatgcggttcgatcatggcttatgccccaagcgatccagtgttattttaccgatgaaaatagccctttttgtgaccttatcagtcaagatccatcttattaccatcaatcgatgcattcgagcctctacggtcttttggatccctcgggtatctagacctattcgtctccttaccactcaagtccggaggccccggacgagcgttgctagtcggtaagaaattcccctgcatctgcagctgtaaatttcctcgtcgcgcggccgtctcatccctgacggctttcgcatggccttccagtatttcccagctccaatggatctcattgtaaacccacttcgaagccacgacacggggagcctcaagactcggcatcaccttctcggttattagtaaggacttaggcacgattggtgcaatagattccctgcgcttcggcagtgggttgtcacgcggtcggtagtggtcatttccattgtgggaacccgtgctgcttgttccatcgcgctcgcgatttaagatctggttcacctcccatgcgctctcgcttaagatccgctcctcgagattgagctcatggtcgcgggttgctggcggtgcgttgacgacctggtggtgtacgtcataatatgactgttctttcagtccatctttgctaatgcgcttcgcttcgcgggtaaacatccagagcatttgttgctgtacacgctctttgtgttcttcgagcaccgcgatggtgcgctctacacgagcgatgggatcatgattgactgttggggcgggtgaagtgaagtcttgttcggttggaacgaagatggctgcagatatattttgtaataagggaatctcttccggaggatcctggataaggctcggcacattctggaccgccatggccgctttacgtctgctttcgtgtgcagtgatgaatggaagtatagccgttagtcgtcatctagcctggtagatcttatcgcgtcatgcccaaacagaggaggataggtcaagacattgcccgaaggcatcgatgaatgcagactttgcccggtccagtgagtatggtaagagtcgcactcgattgcaatgatttagtacggtttgctgttttggtgagccgctctcatgaattatggcagtggcttcactcggttgtctggcaaaaggttgcttcgtctaggggtcacgacgtccttcaccctatggatatcccgaaaagatccgggaatatcaaagattggaggtagtatcgactttagtactttagtcgtatcggggaaacagttggtgatgattttatgtgatgttcttacgaaaggtcacagctgagaaccacaataggcaagacacatgggaaaggtggatagcgggccaggactcaactctgcagggagcttctcgaaacactgagttacaggtgaccgctcggtggctggcagccgctaacctggaaaacagaggcggtgggcgcgcctctgtccagccaaatgtgaggtccatcatcatacccagccatgaaagatgcttgtgttaaataggtacctagccatgaggtccaaaatcgatatattgattagatatttttcttgatttgtaccagctttctttatagaggaacgcgacgatccccgcgtagtattcattgcgatgcgcaatctaaatgacaaaagaacctccatgttccgcctcgccgatagtgaatctcgcctagaatgagctttgctttcaaggtgtatcccatagttcaataagctctccctacatactcgccatctactcgtgcctcgatctctttactgctaccctcactaggagccggtgcgagtgatgcgctcatccccgacagttctaacctcactactgcgcggcagagaacagcacttagtatgtatcgcagcacgatagtcagcgagtcaaccaagctgaagaacagcagccccgacaaaaccaatgtaccaaagagcacttgtatcagtatgcctagcgatatgagccatgtaaggatatggaacagcagg

SEQ ID NO: 3419 - DNA, 1644 bp, Muscodor strobelii
  misc_feature: SGI cDNA ID NO. 560798
  misc_feature: Encodes the peptide sequence at SEQ ID NO 3420
atggatcccagcaagaatgccagcgccgtgcaagacgaatacatcgccaagccggtacccgtcgacgccgaggccgtcaaacatggcgatacttctgcgcagctcatcggtaataagcgcgtgaccgtcactgaagaagataataaacgcattaggagacagaccgataaagtcatcctggtgatccttgtatgggtgtactttcttcaaattctcgacaagaccgtcttgggatatgccgcgacatacggcttgaaagaagcaaatcacttagtaggtaaccaatactcattggttggctcgattcagcctatcgcgcaactcgcgtggttgccgttctcgagtttcctcgtcgtcagagtacctcaccgcattctcatgcctgtcttgatcttgggctggggaatcgcggagacttctattgccgcgtgctctagcttttcgcacttgcttgctgcgagattcttcctcggtctcttcgaggctggttgcttgcctatgttcagcgttattacttcgcagtggtatcgtcgtgctgaacaacctcttcgtgtcgccgcgtggtatggcacaaatggtattgcgactatcgttgccgctgcgctttcgtacggacttgcgcacatccgatctcctttactcgagtcttggcagattatcttcctagtagttggcctcttgactatcgtatcaagccccttcgtatactggaaactcgacaacgacatcccctcagcacgcttcctctcagaagaggacaagcccaaggcagtcgagcgcctacgagccaaccagaccggtacaggatcccgcgaattcaaatggaagcagatcctcgagctctttctggacccaaagacatgggtctggcttgctatggcgacattcgtcaacgttggcgctggtgtatcgagtattttcggacctttgattgtcaacggattggggttcgacaagtataccacctcattgctcaacattccttatgggttcattttgtgggccgtcacgatgattacttcgtgggcttgccaacgattcaagactaagtttatcataatgatgcttactgtcttgcctgtcattgccggtcttgcgatcctgtacgctgttccgcgtgatgggcacactggcgctctgcttgcggggtactatctgctgtcattcttgtatggctgtgtgcctgtccagctcgcttggatggtggccaatactgctggatcgacgaagaagtccgcggttatgtctgtgtacaatgccgcagcctcaaccggatccatcgtcggtccgctcctattcaccgccaaggatgcacccgcgtatctccccggcctccgcacggttctcgggttcttcatcgccacattcggcatcacggtgattcaaaccgtctacctcgcgttcctgaacagacttcaagagcgtcgtcgtgtgcgcaatggaaagccggccaagataaaggatacgagtatggaagacaagtatcaagacatggaggagtcaactggtggggttctgacaagcgagggtgcagctgaaggtattaatgcggctgagcagggcattgatcattcgcaagttggaaagaatgccttcttggatttgacggatcgggagaatgatgagtttgtttatgttttgtaa

SEQ ID NO: 3420 - protein, 547 aa, Muscodor strobelii
  misc_feature: SGI Peptide ID NO. 560798
  misc_feature (63)..(430): Pfam Id: PF07690 Pfam Desc: Major Facilitator Superfamily
  misc_feature (4)..(546): NCBI GI: 119473921 Blast Desc: MFS transporter, [Neosartorya fischeri NRRL 181] gi|119406989|gb|EAW16939.1| MFS transporter, [Neosartorya fischeri NRRL 181]
  misc_feature (1)..(546): NCBI GI: 169784482 Blast Desc: [Aspergillus oryzae RIB40] gi|238508366|ref|XP_002385378.1| MFS transporter, [Aspergillus flavus NRRL3357] gi|83775449|dbj|BAE65569.1| protein product MFS
  misc_feature (1)..(546): NCBI GI: 242799639 Blast Desc: pantothenate transporter, [Talaromyces stipitatus ATCC 10500] gi|218716767|gb|EED16188.1| pantothenate transporter, [Talaromyces stipitatus ATCC 10500]
  misc_feature (4)..(546): NCBI GI: 121712248 Blast Desc: MFS transporter, [Aspergillus clavatus NRRL 1] gi|119401891|gb|EAW12313.1| MFS transporter, [Aspergillus clavatus NRRL 1]
  misc_feature (4)..(546): NCBI GI: 70986002 Blast Desc: MFS transporter [Aspergillus fumigatus Af293] gi|66846133|gb|EAL86466.1| MFS transporter, [Aspergillus fumigatus Af293] gi|159128364|gb|EDP53479.1| MFS transporter,
  misc_feature (40)..(546): NCBI GI: 115436974 Blast Desc: conserved [Aspergillus terreus NIH2624] gi|114188508|gb|EAU30208.1| conserved [Aspergillus terreus NIH2624]
  misc_feature (1)..(546): NCBI GI: 145248509 Blast Desc: An13g03680 [Aspergillus niger] gi|134081258|emb|CAK41764.1| protein product [Aspergillus niger]
  misc_feature (15)..(546): NCBI GI: 255938462 Blast Desc: Pc14g00060 [Penicillium chrysogenum Wisconsin 54-1255] gi|211584622|emb|CAP74147.1| Pc14g00060 [Penicillium chrysogenum Wisconsin 54-1255]
  misc_feature (16)..(546): NCBI GI: 67526637 Blast Desc: AN3776.2 [Aspergillus nidulans FGSC A4] gi|40740794|gb|EAA59984.1| AN3776.2 [Aspergillus nidulans FGSC A4] gi|259481671|tpe|CBF75409.1| TPA: MFS transporter, nidulans
  misc_feature (21)..(546): NCBI GI: 212541110 Blast Desc: allantoate permease, [Penicillium marneffei ATCC 18224] gi|210068009|gb|EEA22101.1| allantoate permease, [Penicillium marneffei ATCC 18224]
MDPSKNASAVQDEYIAKPVPVDAEAVKHGDTSAQLIGNKRVTVTEEDNKRIRRQTDKVILVILVWVYFLQILDKTVLGYAATYGLKEANHLVGNQYSLVGSIQPIAQLAWLPFSSFLVVRVPHRILMPVLILGWGIAETSIAACSSFSHLLAARFFLGLFEAGCLPMFSVITSQWYRRAEQPLRVAAWYGTNGIATIVAAALSYGLAHIRSPLLESWQIIFLVVGLLTIVSSPFVYWKLDNDIPSARFLSEEDKPKAVERLRANQTGTGSREFKWKQILELFLDPKTWVWLAMATFVNVGAGVSSIFGPLIVNGLGFDKYTTSLLNIPYGFILWAVTMITSWACQRFKTKFIIMMLTVLPVIAGLAILYAVPRDGHTGALLAGYYLLSFLYGCVPVQLAWMVANTAGSTKKSAVMSVYNAAASTGSIVGPLLFTAKDAPAYLPGLRTVLGFFIATFGITVIQTVYLAFLNRLQERRRVRNGKPAKIKDTSMEDKYQDMEESTGGVLTSEGAAEGINAAEQGIDHSQVGKNAFLDLTDRENDEFVYVL

SEQ ID NO: 3421 - DNA, 1239 bp, Muscodor strobelii
  misc_feature: SGI EST ID NO. CUFF.8601.0
  misc_feature: Variant of the nucleotide sequence at SEQ ID NO 3419
cctcggtctcttcgaggctggttgcttgcctatgttcagcgttattacttcgcagtggtatcgtcgtgctgaacaacctcttcgtgtcgccgcgtggtatggcacaaatggtattgcgactatcgttgccgctgcgctttcgtacggacttgcgcacatccgatctcctttactcgagtcttggcagattatcttcctagtagttggcctcttgactatcgtatcaagccccttcgtatactggaaactcgacaacgacatcccctcagcacgcttcctctcagaagaggacaagcccaaggcagtcgagcgcctacgagccaaccagaccggtacaggatcccgcgaattcaaatggaagcagatcctcgagctctttctggacccaaagacatgggtctggcttgctatggcgacattcgtcaacgttggcgctggtgtatcgagtattttcggacctttgattgtcaacggattggggttcgacaagtataccacctcattgctcaacattccttatgggttcattttgtgggccgtcacgatgattacttcgtgggcttgccaacgattcaagactaagtttatcataatgatgcttactgtcttgcctgtcattgccggtcttgcgatcctgtacgctgttccgcgtgatgggcacactggcgctctgcttgcggggtactatctgctgtcattcttgtatggctgtgtgcctgtccagctcgcttggatggtggccaatactgctggatcgacgaagaagtccgcggttatgtctgtgtacaatgccgcagcctcaaccggatccatcgtcggtccgctcctattcaccgccaaggatgcacccgcgtatctccccggcctccgcacggttctcgggttcttcatcgccacattcggcatcacggtgattcaaaccgtctacctcgcgttcctgaacagacttcaagagcgtcgtcgtgtgcgcaatggaaagccggccaagataaaggatacgagtatggaagacaagtatcaagacatggaggagtcaactggtggggttctgacaagcgagggtgcagctgaaggtattaatgcggctgagcagggcattgatcattcgcaagttggaaagaatgccttcttggatttgacggatcgggagaatgatgagtttgtttatgttttgtaagctggagatgaattgtatatatgcaaggtcgaattgaatgtgtcgaaatgactgaagttgag

SEQ ID NO: 3422 - DNA, 1440 bp, Muscodor strobelii
  misc_feature: SGI cDNA ID NO. 560799
  misc_feature: Encodes the peptide sequence at SEQ ID NO 3423
atggatttagagacaaaactcggcaactctcaaacttcagagtcgtcacaggcgactgtcagcaaaacaacccagctgtcaacccagctgtcatcgctcccacaagagattctagacgaaatagtcctcttggcagtcaagattcgcggtcctggcctcgaacgcgcggcccgcctacgatacgtcagcaaggcatggaatgcgatggttcttgaggccatctacgaatctggactgactggtaatacatgggtagggaacatgcccttttttgcaccctacctcgcgaagacgtacatgatgcaaggcgctcggagctacaacgggccgtccgacacgctcctagctcgcaacgttcgatatgtcgccacgtgtatcgtgagccaccgaaacaatggactcattgatggccacaacttcgatactatcagagactgtatctctgacatcatcccggcgatgcaagtgtctgggcgtcgtgtgcttccttggacgcgtcccgatggccgaagggagaaacagggccagctcgcactactcgcggctgctacgtggattaatgaagcaactcttgtacgcgaacttttgcccgggtttcacgactgccttcatatgctatgggacactcgcataaggtcgctgggctttgatgcgctgtccgattctcctatagaacttgcagcttatcgaggtaacaccgagatcctgggccatttcttggacatctccacaaccgacagtaaagttgacaacaacattcatgacgcaacatggcggctggctctacgttctgctattcggggaaaccagctctccaccgtcgagtttctgttagaatgggcagaaaagcaccatatgcttgaccgcaatccacccaaaattacccacatcaacttcaattatgaggccgatgcagaaatctatacgcgcctcataccaggagccgcccaatacttcgactacggtatttacctcaattggattgcaaagcgtgggagtttggctttgcttaaatatgtcatctggttgcaaggcgcgaagtttttaatcgagaatgattatcgaagctttaatgatgccgtagagagcgcggctcatggcggacgggtggacaatctggaataccttcttgccgaagtaatgccttccataaaacgctcaccctcatcaatctgtggaatcccggcacttgcccctagttgccgcaaccccgatgttatgcgaatcatcattgaagccagcattcgagaaggttgcgatacagaatggggtggggcgctatatttcttaatagtgaaagagaacgttccggtgatgaacgtgctattacgctacgagaaagatggaatcattactctcggcagctcatataagactgaagctcgacgaattgccgaggagctgggcctagagtctatggctgagatgctcacggactga

SEQ ID NO: 3423 - protein, 479 aa, Muscodor strobelii
  misc_feature: SGI Peptide ID NO. 560799
MDLETKLGNSQTSESSQATVSKTTQLSTQLSSLPQEILDEIVLLAVKIRGPGLERAARLRYVSKAWNAMVLEAIYESGLTGNTWVGNMPFFAPYLAKTYMMQGARSYNGPSDTLLARNVRYVATCIVSHRNNGLIDGHNFDTIRDCISDIIPAMQVSGRRVLPWTRPDGRREKQGQLALLAAATWINEATLVRELLPGFHDCLHMLWDTRIRSLGFDALSDSPIELAAYRGNTEILGHFLDISTTDSKVDNNIHDATWRLALRSAIRGNQLSTVEFLLEWAEKHHMLDRNPPKITHINFNYEADAEIYTRLIPGAAQYFDYGIYLNWIAKRGSLALLKYVIWLQGAKFLIENDYRSFNDAVESAAHGGRVDNLEYLLAEVMPSIKRSPSSICGIPALAPSCRNPDVMRIIIEASIREGCDTEWGGALYFLIVKENVPVMNVLLRYEKDGIITLGSSYKTEARRIAEELGLESMAEMLTD

SEQ ID NO: 3424 - DNA, 1449 bp, Muscodor strobelii
  misc_feature: SGI cDNA ID NO. 560800
  misc_feature: Encodes the peptide sequence at SEQ ID NO 3425
atggacgagaaaacgcagaccgataaccctctaaccctttcaccgtcacaggcaattatcgcagggaagacgcgtttctcatcactccctcaggagctaatcgacgacatcgttttctgggcagtgaagattcgcggcttcaggcgcgcaagtcggctacgatacgttagcaagcaatggaacgagatggttctagacgccttataccgagctgaagtcatcgaggagcacacattatggctcatcccatcatattcatggtgccttgccaagatggtcatgggacctcaaatgcagtccgagctaccggtcgcgcgcatgcttcgacagatcgccacacgcatcgcaagccatagagataacattgatggcgatggtcacagcttcgatgctatcagagcctatgttttcgatatcattccgttgttacgtcccccgtttggaagatttgagcgtaatgtgcgcgtcgaagatgcggagcttgctgtcgacaagcataataagcagttcaatctcgcactattagcggctgccgcgtggatcaacgagataactctggtgcgcgaaattctgcccttgtttcacgattgtcccgatatcctatacgccaagtccggtctcgatcttggatttgtctcggtatgcggcgcgccgattcaagcagcggcctaccgaggtaacatcaaaattctagccctttttctagacgccaacaccgacagttccaaagacatgttaagctcagacatgtggagctcgccgtggcagtgtgccctagtcagtgctattgaaggggatcaaccatctactatcgagtttctgttgggtcggcgagtcaaatccacgccccacgaagacccatacctacatctccagcccgaaaccacggtatacatcgagatattcagacgcctttttccatggacacgcggacacgattatcatagccatcgcgatcgattccatagcgccgtccgagacgggcagtttgccgtccttaaatatctcatcgaggaagtggacatgcttctcttggctgggaatggcgcccattggctgaaacctgctataaagaatgcggcagaggatggacggcttgaagacctacaatatctacttggcaggaagctttcttccatactgccattgtccttacccacttgcatcactcaacactttaccaatcacacggtattcgcggccgcccgttcccgcaatacaaacatcatgaagactgtcattacagcgtgcattgaagagaagtggaatgcagatcttggtcgcgcgctagccattgcggtcgaagaggaaaatgaacgggtggtaagcttgctgctacagtatgataaagtcgggatcatcacaatcgacaatacatcaaagactgaagctcgaaattttgcggaagattttggctttgagtctatgcttaagattctggctggctaa

SEQ ID NO: 3425 - protein, 482 aa, Muscodor strobelii
  misc_feature: SGI Peptide ID NO. 560800
  misc_feature (41)..(480): NCBI GI: 169594874 Blast Desc: SNOG_00167 [Phaeosphaeria nodorum SN15] gi|111070542|gb|EAT91662.1| SNOG_00167 [Phaeosphaeria nodorum SN15]
MDEKTQTDNPLTLSPSQAIIAGKTRFSSLPQELIDDIVFWAVKIRGFRRASRLRYVSKQWNEMVLDALYRAEVIEEHTLWLIPSYSWCLAKMVMGPQMQSELPVARMLRQIATRIASHRDNIDGDGHSFDAIRAYVFDIIPLLRPPFGRFERNVRVEDAELAVDKHNKQFNLALLAAAAWINEITLVREILPLFHDCPDILYAKSGLDLGFVSVCGAPIQAAAYRGNIKILALFLDANTDSSKDMLSSDMWSSPWQCALVSAIEGDQPSTIEFLLGRRVKSTPHEDPYLHLQPETTVYIEIFRRLFPWTRGHDYHSHRDRFHSAVRDGQFAVLKYLIEEVDMLLLAGNGAHWLKPAIKNAAEDGRLEDLQYLLGRKLSSILPLSLPTCITQHFTNHTVFAAARSRNTNIMKTVITACIEEKWNADLGRALAIAVEEENERVVSLLLQYDKVGIITIDNTSKTEARNFAEDFGFESMLKILAG

SEQ ID NO: 3426 - DNA, 338 bp, Muscodor strobelii
  misc_feature: SGI EST ID NO. CUFF.8617.0
  misc_feature: Variant of the nucleotide sequence at SEQ ID NO 3424
agtggatcaacgagataactctggtgcgcgaaattctgcccttgtttcacgattgtcccgatatcctatacgccaagtccggtctcgatcttggatttgtctcggtatgcggcgcgccgattcaagcagcggcctaccgaggtaacatcaaaattctagccctttttctagacgccaacaccgacagttccaaagacatgttaagctcagacatgtggagctcgccgtggcagtgtgccctagtcagtgctattgaaggggatcaaccatctactatcgagtttctgttgggtcggcgagtcaaatccacgccccacgaagacccatacctacatctc

SEQ ID NO: 3427 - DNA, 840 bp, Muscodor strobelii
  misc_feature: SGI cDNA ID NO. 560801
  misc_feature: Encodes the peptide sequence at SEQ ID NO 3428
atgtctccaagcgcaacaactgagcaagcaggtccgccaggagccaaggcaccccaactaacacaagagcctcttcgtgctaagagctacttcgctgagcgatccgcgcacgaaatgagcaagaaccttcagattcccacccgaacgctacgagagactctggcatgcgcttgtaggatgatcgcgtccaagatggaagatgccggactcgccggtcaaatctcagcacgatcggaaaggggtaataatttctattggaccttgcggtttggtctgggctgggatgaagctacgccggacgacttcatcgaagtggatggcgacttgaacactatcacgggaaatgggatggcgaacccagctacacgatttcatctatgggtttactcgggcagaccggacgtgcacagcatcgttcatgttcattcaccttggactgcagctctagtagctgcgaagcagccgctcgtcgtctgtcagatggatatgacagtgtttcaagacgactgcgcattcctggcagaatggccaggtctaccgatcgcggatcaagagggtgtcattatcacggaggctctagaacagaaaaggtctatcttgcttgcgcatcatggcatgttgacggctggcagtacagtcagagaggctgcctatctggctgttaacttagagagggcagctcgcattcagatccgtgctgctactttcggcgaagtcaagccaattaacggtgccatggcagctgaggctcgcgactatcttctacggcctaaaatcgttgatgctacgttcgagtactggtatcgacagacgaagccaatcaagccccttgacttctaa

SEQ ID NO: 3428 - protein, 279 aa, Muscodor strobelii
  misc_feature: SGI Peptide ID NO. 560801
  misc_feature (52)..(244): Pfam Id: PF00596 Pfam Desc: Class II Aldolase and Adducin N-terminal domain
  misc_feature (25)..(271): NCBI GI: 209883859 Blast Desc: class II aldolase/adducin family protein [Oligotropha carboxidovorans OM5] gi|209872055|gb|ACI91851.1| class II aldolase/adducin family protein [Oligotropha carboxidovorans OM5]
  misc_feature (25)..(272): NCBI GI: 113867876 Blast Desc: class II aldolase/adducin domain protein [Ralstonia eutropha H16] gi|113526652|emb|CAJ92997.1| Ribulose-5-phosphate 4-epimerase or related epimerase or aldolase [Ralstonia eutropha
  misc_feature (26)..(271): NCBI GI: 91786194 Blast Desc: class II aldolase/adducin domain protein [Polaromonas sp. JS666] gi|91695419|gb|ABE42248.1| class II aldolase/adducin-like [Polaromonas sp. JS666]
  misc_feature (28)..(271): NCBI GI: 33596284 Blast Desc: BPP1650 [Bordetella parapertussis 12822] gi|33602054|ref|NP_889614.1| BB3078 [Bordetella bronchiseptica RB50] gi|33566053|emb|CAE36951.1| aldolase [Bordetella aldolase
  misc_feature (28)..(271): NCBI GI: 33593632 Blast Desc: BP2662 [Bordetella pertussis Tohama I] gi|33563705|emb|CAE42938.1| aldolase [Bordetella pertussis Tohama I]
  misc_feature (27)..(270): NCBI GI: 91781542 Blast Desc: Bxe_A4303 [Burkholderia xenovorans LB400] gi|91685496|gb|ABE28696.1| class II aldolase [Burkholderia xenovorans LB400]
  misc_feature (27)..(276): NCBI GI: 238026933 Blast Desc: class II aldolase [Burkholderia glumae BGR1] gi|237876127|gb|ACR28460.1| class II aldolase [Burkholderia glumae BGR1]
  misc_feature (28)..(269): NCBI GI: 169628143 Blast Desc: class II aldolase/adducin domain protein [Mycobacterium abscessus ATCC 19977] gi|169240110|emb|CAM61138.1| class II aldolase [Mycobacterium abscessus]
  misc_feature (27)..(276): NCBI GI: 41407156 Blast Desc: MAP1058 [Mycobacterium avium subsp. paratuberculosis K-10] gi|41395507|gb|AAS03375.1| MAP_1058 [Mycobacterium avium subsp. paratuberculosis K-10]
  misc_feature (28)..(273): NCBI GI: 15595421 Blast Desc: class II aldolase/adducin domain protein [Pseudomonas aeruginosa PAO1] gi|116053937|ref|YP_788375.1| class II aldolase/adducin domain protein [Pseudomonas aeruginosa class II
  misc_feature (67)..(242): SWISSPROT Homolog: EC 4.1.2.17 L-fuculose-phosphate aldolase
MSPSATTEQAGPPGAKAPQLTQEPLRAKSYFAERSAHEMSKNLQIPTRTLRETLACACRMIASKMEDAGLAGQISARSERGNNFYWTLRFGLGWDEATPDDFIEVDGDLNTITGNGMANPATRFHLWVYSGRPDVHSIVHVHSPWTAALVAAKQPLVVCQMDMTVFQDDCAFLAEWPGLPIADQEGVIITEALEQKRSILLAHHGMLTAGSTVREAAYLAVNLERAARIQIRAATFGEVKPINGAMAAEARDYLLRPKIVDATFEYWYRQTKPIKPLDF

SEQ ID NO: 3429 - DNA, 1501 bp, Muscodor strobelii
  misc_feature: SGI EST ID NO. CUFF.8622.0
  misc_feature: Variant of the nucleotide sequence at SEQ ID NO 3427
gcgaactatactcacaaccgccgactttggaccccgagtccgctgtattgagcctcttcaacgtctttattataccggtctcgacttcacattcgcggccgtctgtagaactatctcaacactcttcaagatgtctccaagcgcaacaactgagcaagcaggtccgccaggagccaaggcaccccaactaacacaagagcctcttcgtgctaagagctacttcgctgagcgatccgcgcacgaaatgagcaagaaccttcagattcccacccgaacgctacgagagactctggcatgcgcttgtaggatgatcgcgtccaagatggaagatgccggactcgccggtcaaatctcagcacgatcggaaaggggtaataatttctattggaccttgcggtttggtctgggctgggatgaagctacgccggacgacttcatcgaagtggatggcgacttgaacactatcacgggaaatgggatggcgaacccagctacacgatttcatctatgggtttactcgggcagaccggacgtgcacagcatcgttcatgttcattcaccttggactgcagctctagtagctgcgaagcagccgctcgtcgtctgtcagatggatatgacagtgtttcaagacgactgcgcattcctggcagaatggccaggtctaccgatcgcggatcaagagggtgtcattatcacggaggctctagaacagaaaaggtctatcttgcttgcgcatcatggcatgttgacggctggcagtacagtcagagaggctgcctatctggctgttaacttagagagggcagctcgcattcagatccgtgctgctactttcggcgaagtcaagccaattaacggtgccatggcagctgaggctcgcgactatcttctacggcctaaaatcgttgatgctacgttcgagtactggtatcgacagacgaagccaatcaagccccttgacttctaatgacttgaatgcaaagtttcattcattacaagttgggaaacgacgcatattatccgattgcgatgatcatgaacgataacataatggaacggactgctattgatcatggaggacacaatgggcggacgttggcggagaagtttggattggtacaagcgacatgccacacccacataagtacctatgtatgaagaatcagatgaagcattaagggtctattgtacatgacctgccaatgggaatcagagtgatcaggcatgtgccgtttccagggacgacattacggtgttgtcaggcgatgacaatggatagcttgcaatgctcgtaacctggacaataagtgagcaatggccactgtgaggaaattatatatacagctgtggactgccagaatttcaaggtcctattctttcatccacctgatcaagtttctcaaacagtgaccttcgccatcaacacctatcttcctcgtaatacggagacgtcacagaggcacacacaagcacgtcataactcaagacagacgatcac

SEQ ID NO: 3430 - DNA, 306 bp, Muscodor strobelii
  misc_feature: SGI cDNA ID NO. 560802
  misc_feature: Reduced expression when VOC is produced
  misc_feature: Encodes the peptide sequence at SEQ ID NO 3431
atgatcttctaccttgtttcaaagctaaatgagctgtttgacgcggtcagcgccgatatgatttcctactctccgagacttgacggcgacttcgaggacttcgcctcttgggacacatcgacacaagacacccttcgacgaatcacgaccgatatgtacattcgaccggtctcaagcgaagagttcttgttgtcctacatcatcatgtgggctatgggaaattgcatgatgcccagtcatgtcagacgacttgtggatgatctccatatctcaaccatcactagccgtttgtatcaagacgattaa

SEQ ID NO: 3431 - protein, 101 aa, Muscodor strobelii
  misc_feature: SGI Peptide ID NO. 560802
  misc_feature: Useful for introducing or modulating the production of volatile compounds
MIFYLVSKLNELFDAVSADMISYSPRLDGDFEDFASWDTSTQDTLRRITTDMYIRPVSSEEFLLSYIIMWAMGNCMMPSHVRRLVDDLHISTITSRLYQDD

SEQ ID NO: 3432 - DNA, 3408 bp, Muscodor strobelii
  misc_feature: SGI EST ID NO. CUFF.8626.0
  misc_feature: Variant of the nucleotide sequence at SEQ ID NO 3430
ccggatagtatgatagctttagtaagcggcacaatgacattcaatgaacatatgtttctaggtctcgcctcctgacgatcacgtgtgctacgctttcacactgccttccggggctagccggaagttgcgtagttgccttgtggtggtctcacctattcaatccatgtcatgcttttccgatatctgttctggggtgccatcctgatattcttcagagtgaggaatcggtggtcgtaagctttcattcttcttgaaactcagttgtcctgaacgaaaatggtctgccgaaggcatcacatccgagtcacagcgcacgtttgttacatctaactcccactttgatatctacgcgttcagaatcggaaatacggtccactcatgagtcatgctccggagatattggtttatatatacaagcagatagcccccttctgcagaaagagcgtgacatcccaatttctattctcgtgcgagttgctatccttactacctgacttctctacgattaatctacctcttttacatacacgcaagaatgatcttagctaccatgtgtttgttgggatgcatgatactcagggggccgtggaatggcctgtgcgcttatgaatggagaccagttgtagaacagaatccggaaggagtcattcttgattattgatagtaattgaaaagcaatggctttttgctcattcaatgtttacctgccttgccggcgcgccgctgcagtaggtgtttgcgtttatatttcacctgacgagctacatttcctttccaaccctccacccacactcttgcatcaaccttcggaatcccacgtacactgagactcctctatttctgctgttatctcatggggtagcctcatcgcgagtgtttttgaaaagcgctgcgagctatatttagcggcattacagagaccacccatccccaaccccttcttcccgactatcagtccctaccgcacatcattgtcactccagggtaatttcgctcagggccgactctcccattcgctatctgccttacgtacatcctgatcgaatgatgtcgcttgtctcggccaccgcatcatccctcgccagcgtcacctcaggactcgaaatccaaactccgaggtctagtcgaggtgacaatgcctctcattctacgcacactgatggatatcttcctcttctacccgctgaactgaagataattgtattcaaacaactgtcagatagtagggcagttgcggccctggctagctcttgcaaaagtctaggagctgtcttcgaactatacaaggcggaaatctgcaaggccgtcggtttgggcatgattgccactacgcttggacatcctgattgggaattcgcgaagccttgcattgcactggccatgatcaccagggctgaccacccactctctgttgtggcttatcttttaaaggggagtcatttcaccgtagctgacttgggaatgttggagcacggactctcggttttgccggccgatcttagacgacaacacggagacaagatcgtgtgtcatagggtcttttggccgactttatcttggagagagtggttaatgattcccaggcccatgcgcagacttcacgaactcaagaccgcaatgatcttctaccttgtttcaaagctaaatgagctgtttgacgcggtcagcgccgatatgatttcctactctccgagacttgacggcgacttcgaggacttcgcctcttgggacacatcgacacaagacacccttcgacgaatcacgaccgatatgtacattcgaccggtctcaagcgaagagttcttgttgtcctacatcatcatgtgggctatgggaaattgcatgatgcccagtcatgtcagacgacttgtggatgatctccatatctcaaccatcactagccgtttgtatcaagacgattaatcacaccaaccatattagtccatagagaatgggcgatgattcgagcgttttcaaagaatcaattttccggaacaggtctcggactatttctattgcaggatcatctgactacctaaggacataaggaatatccactgacgacaaacgtggagattgagcaatgcctccagactattaccagcgattctcagaaggcgcgatgccgtggcagtctgtcgacaccacgtccaggctgctctggcccatgactctatacctcgcgagattagcggagtaagtccactagagagactcaagcgggtggttttattcttcatcaattttcacaaagcgactgtggcttcaacgcgttaaggggagcggctccgaaggagaagtttcttattttcttcatcactttcaacgggaacattattcctcctaggcattacctgttagctacacaggacaggttttctattctcatcatgttccatgggcgattctttctttctcatatcagatgatgctgggactaccgagctttatctagctctaacaggcaaaagaagttatcatgaggatgcagtttcgtagagaacatagacacagtttacggtgtctcagccatcattgtccttacatcgttgtgctcaagtggcctatcagatgattatccgccgcgccactcgtccatgatacgtctattgttttttcctgggactatcaatatagcaccaactctgctcaatgctacaaaatgatactgtctcacggaggtgagactggtgatcgtggaagcttgcggaagtgctgtagacgctcatgtaggaagaataataacaagaggactttctaaccatcttccaaattcgccggcgtataacacccgtatatatatatgaatcagagactccgttccatactccctggaacgtactgtattaactcagatgataatccgaataaacgggccactttgtgacttgccgcctatacacctagaatttggggaatatctaacacgtccatttgctcagatctgaagcatctcagtcctaattatccaacgtgggcaaatactttatatggcgtgatatttgaacagattcaactgataaggctttccgacttgtgttacgctcgtgctgcagttctggcaacggcactatgccaaaggactgtacatgtaccctcatattgaaagcaccttaatgtaagagaaattttgaacctcgcctactagccaatattatttatcactccattctccctatgatacgccattcaaactactctattgcattcctctgtacggaatccatatcgaccggagccgtctataggaagtgagaagcaaagcaaatgtgatcatgcgtactcagaatgtgcacaacactacagatccataatttttgcacattgaagcagttcttgtgccagagtaatgttttcatatgacgttggcttttaacttagtcacaactgaagcacatagatctcgaa

SEQ ID NO: 3433 - DNA, 348 bp, Muscodor strobelii
  misc_feature: SGI cDNA ID NO. 560803
  misc_feature: Reduced expression when VOC is produced
  misc_feature: Encodes the peptide sequence at SEQ ID NO 3434
atggtgtctgttagctccagtatcgaaattgccaggtctcctgcacaagttaaacgagttttcaccgatttctctagatattatgaatgggtcaaaggatcaatcaaaggggtccaggtggcctctgctgacggaactataaatgccggagacaaagtcaaaatctcgtttcctggcatgggcacgttttcaggtcatattgcggaaaactccgagaccgaatttgcatggcagaacaagtggccaggcctgctttccgctaaacacacgtttcgctttgagccaagcaagattaccccaggacatacaaccttcatcaacctcggaacgagtttacgggtgccttga

SEQ ID NO: 3434 - protein, 115 aa, Muscodor strobelii
  misc_feature: SGI Peptide ID NO. 560803
  misc_feature (6)..(105): NCBI GI: 256728745 Blast Desc: NECHADRAFT_86000 [Nectria haematococca mpVI 77-13-4]
  misc_feature (2)..(107): NCBI GI: 256727236 Blast Desc: NECHADRAFT_99072 [Nectria haematococca mpVI 77-13-4]
  misc_feature (4)..(108): NCBI GI: 156044450 Blast Desc: [Sclerotinia sclerotiorum 1980] gi|154694717|gb|EDN94455.1| [Sclerotinia sclerotiorum 1980]
  misc_feature (2)..(107): NCBI GI: 189204474 Blast Desc: conserved [Pyrenophora tritici-repentis Pt-1C-BFP] gi|187985671|gb|EDU51159.1| conserved [Pyrenophora tritici-repentis Pt-1C-BFP]
  misc_feature (4)..(105): NCBI GI: 154304895 Blast Desc: [Botryotinia fuckeliana B05.10] gi|150853895|gb|EDN29087.1| [Botryotinia fuckeliana B05.10]
  misc_feature (1)..(96): NCBI GI: 255948016 Blast Desc: Pc22g07540 [Penicillium chrysogenum Wisconsin 54-1255] gi|211591792|emb|CAP98042.1| Pc22g07540 [Penicillium chrysogenum Wisconsin 54-1255]
  misc_feature (1)..(107): NCBI GI: 116182874 Blast Desc: [Chaetomium globosum CBS 148.51] gi|88186362|gb|EAQ93830.1| [Chaetomium globosum CBS 148.51]
  misc_feature (1)..(94): NCBI GI: 121715081 Blast Desc: conserved [Aspergillus clavatus NRRL 1] gi|119403306|gb|EAW13724.1| conserved [Aspergillus clavatus NRRL 1]
  misc_feature (1)..(94): NCBI GI: 119483722 Blast Desc: NFIA_094870 [Neosartorya fischeri NRRL 181] gi|119409920|gb|EAW19867.1| conserved [Neosartorya fischeri NRRL 181]
  misc_feature (7)..(96): NCBI GI: 227978857 Blast Desc: uncharacterized conserved protein [Tsukamurella paurometabola DSM 20162] gi|227966215|gb|EEK01524.1| uncharacterized conserved protein [Tsukamurella paurometabola DSM
  misc_feature: Useful for introducing or modulating the production of volatile compounds
MVSVSSSIEIARSPAQVKRVFTDFSRYYEWVKGSIKGVQVASADGTINAGDKVKISFPGMGTFSGHIAENSETEFAWQNKWPGLLSAKHTFRFEPSKITPGHTTFINLGTSLRVP

SEQ ID NO: 3435 - DNA, 2805 bp, Muscodor strobelii
  misc_feature: SGI EST ID NO. CUFF.8668.2
  misc_feature: Variant of the nucleotide sequence at SEQ ID NO 3433
aacgtgctcatcaaagctagtgagaactacgagcgcatcaatgaagggtttgcggaagcattgtgtacgataagcgaaggcgttatcgaatgtagaacggagcttgaaatgtttcagacgccggatatgatgaagcgcatttcagacctctacgcacacatattcatattcttgtcggatgttatggactggatgatgctgaagagccgacagagacttttgaaatcgttcaatgagaatttctctaagaagtttgaagatcaagtgactctgatagcaaccaaggctgaaaatatccgcaatttcgcagcacagagctccagggccgagcagagagacatgagattgacggtggagagtttggctcaggatttccgcattggccttgttggagaagagcgccgacatgcagaaatggttcgattagccgaagagataagatgccagcttgctgagagtgatcgccaaaaacagttgttggctgacgaggttgcaaacttccgaagattgggtggcttagtctacaatatgttgcaggacgaagcgactgtatggttgggggatatgcgctctatcgacgatgatccaacacaatatacccgatacccggcactcacatatcggtcaaagacatccaatacgacaaacatacaagacagctcatcaaatacaatgcgttatctctctcaagacatactattcagctcacggcacctagaagactttttccacagagatcgtattagaatcagtgatgatcgcgcttcaccactcagaacggtaccgaaagctctcagacggctgtctgagtggatgaacgagcaatcagcgaacgtcttatggattgaaggaccaccaatcgttgcgagcgatcttagcaaccccatttctatgctcgctaacaaagtcattgacttagctgagaaggcagacattcctgcgatatcctttttctgtgaactgcgccgaaaagagaccctgaggcccggaaatgaaacgattgagagtcaagcatgtgtctccatgatatgcgcgctgatccgacagatgctggaacatcttggccccaatgtcgagacaaaggcagatctttcaacagcacgattcctccgcgtggacggatgtatcttaggctggtctgaattggtccagattttccgcgatcttttgactcttatgcccaacactttgctctgcgtaattgatgggcttcactggctcgatgataggagcacgcttggatccatgggagagttgcttgaggtaatgagaggaacgaagatgagagtgcttttcaccacaacgggccgttccgcctgcctccgcaaacagctgggcaaagaggagacatttgcgatcgagaaggcagacttgaggagcaatgtctgggagacggtgaaaagtgagtaccgagtgaggtgatcctggttatgctcgtgtaaaagtcaagatacaatcgaagtagaggccatgtttttaagactacagcgcgtcatacctcatttgcattgtgactgcgaatttgccgtgtgttcgagagcgaccgttcgtagctaggacttagcgacgtcaattttgcgacacgtcagcacgtcgtgtatcatagctcgcacatctcatattcgtgtgtccttcggcaggttacggagtcttatagcaccccgcacacacacacacccgtacgcctctgagcatggtggaagatcgcctcgtcgtggaccatggctctgaatttcgaaacgttttcgcgcttctgccggtcgggtcacggtcgcgtgcgggatggtaagatggtacacgctttacctagtacggacgtggcttggcattgaacagctaagatttatggttactgcgtctgacaagggtaggcgcccacttttactgcgcgagaagcgaccgagtccgcgagaatcaagtttgcagcagaggaatataaatattcaactgagaattgaatggaaaaggagacgaatttgataaacaggtacataagaaacatcaagggaccctagaaactacctcaggatataacgcgcttctattctgacgagtaccttttttttcaattggatctagtgccaagcttcaacaccaatctatttatagtatcagactcgacataatggtgtctgttagctccagtatcgaaattgccaggtctcctgcacaagttaaacgagttttcaccgatttctctagatattatgaatgggtcaaaggatcaatcaaaggggtccaggtggcctctgctgacggaactataaatgccggagacaaagtcaaaatctcgtttcctggcatgggcacgttttcaggtcatattgcggaaaactccgagaccgaatttgcatggcagaacaagtggccaggcctgctttccgctaaacacacgtttcgctttgagccaagcaagattaccccaggacatacaaccttcatcaacctcggaacgagtttacgggtgccttgacatatttgacgtacctcatgggaggatcgagcggaaagacatcaccgggatttgagctgttcaacaagagtctgaaggagagggcagagagtttgcctgaatgagggttgttcgagatatctgcgcgtccacatggtgatcttgaacaaaaaacttacggactagctactatgatgtaacatgtatacaatatgtctcagaaattacgataatatcctttccaagctttcccggatttcgccgtaactatgcgcggtttaagttgatggttcttaaagttctgactattgaatgaggcgattattgttgatttctgtactgttgaaaacctg

SEQ ID NO: 3436 - DNA, 1902 bp, Muscodor strobelii
  misc_feature: SGI cDNA ID NO. 560804
  misc_feature: Elevated expression when VOC is produced
  misc_feature: Encodes the peptide sequence at SEQ ID NO 3437
atgccttcgacaccagacgatgcacgcacctctcgcagacttgtgaggatgtacagtagcgatgtcgagggtaggctaccagacggtagtcttgtgcatcgcttggggcagactctagcccgcgacaggccggatcccaaagatgtgatgtatccatggcgccgattttatgctccagtagagctggagaagctagacaaacatccagtaaacgaaatagttatagtcgaatccgagaagctccggggaaaattgttatctttcctaaaaagctgtactgatcatgatcgtctcgacctcacccgttttgagcctaccatggagagtgttgttgagatcgttcaggaactggctgcttcaactagcagtgtgaaagagaacagccgcaaaggcaaagcaaagaagctcttgcgcaggttctgcggagcgatttacgctcataagacaatgttggagatcatccctcaaggcacaataaacgtgctcatcaaagctagtgagaactacgagcgcatcaatgaagggtttgcggaagcattgtgtacgataagcgaaggcgttatcgaatgtagaacggagcttgaaatgtttcagacgccggatatgatgaagcgcatttcagacctctacgcacacatattcatattcttgtcggatgttatggactggatgatgctgaagagccgacagagacttttgaaatcgttcaatgagaatttctctaagaagtttgaagatcaagtgactctgatagcaaccaaggctgaaaatatccgcaatttcgcagcacagagctccagggccgagcagagagacatgagattgacggtggagagtttggctcaggatttccgcattggccttgttggagaagagcgccgacatgcagaaatggttcgattagccgaagagataagatgccagcttgctgagagtgatcgccaaaaacagttgttggctgacgaggttgcaaacttccgaagattgggtggcttagtctacaatatgttgcaggacgaagcgactgtatggttgggggatatgcgctctatcgacgatgaagatccaacacaatatacccgatacccggcactcacatatcggtcaaagacatccaatacgacaaacatacaagacagctcatcaaatacaatgcgttatctctctcaagacatactattcagctcacggcacctagaagactttttccacagagatcgtattagaatcagtgatgatcgcgcttcaccactcagaacggtaccgaaagctctcagacggctgtctgagtggatgaacgagcaatcagcgaacgtcttatggattgaaggaccaccaatcgttgcgagcgatcttagcaaccccatttctatgctcgctaacaaagtcattgacttagctgagaaggcagacattcctgcgatatcctttttctgtgaactgcgccgaaaagagaccctgaggcccggaaatgaaacgattgagagtcaagcatgtgtctccatgatatgcgcgctgatccgacagatgctggaacatcttggccccaatgtcgagacaaaggcagatctttcaacagcacgattcctccgcgtggacggatgtatcttaggctggtctgaattggtccagattttccgcgatcttttgactcttatgcccaacactttgctctgcgtaattgatgggcttcactggctcgatgataggagcacgcttggatccatgggagagttgcttgaggtaatgagaggaacgaagatgagagtgcttttcaccacaacgggccgttccgcctgcctccgcaaacagctgggcaaagaggagacatttgcgatcgagaaggcagacttgaggagcaatgtctgggagacggtgaaaagtgagtaccgagtgaggtga

SEQ ID NO: 3437 - protein, 633 aa, Muscodor strobelii
  misc_feature: SGI Peptide ID NO. 560804
  misc_feature (1)..(623): NCBI GI: 145604078 Blast Desc: MGG_14097 [Magnaporthe grisea 70-15] gi|145012163|gb|EDJ96819.1| MGG_14097 [Magnaporthe grisea 70-15]
  misc_feature (113)..(609): NCBI GI: 169617696 Blast Desc: SNOG_12030 [Phaeosphaeria nodorum SN15] gi|111059322|gb|EAT80442.1| SNOG_12030 [Phaeosphaeria nodorum SN15]
  misc_feature (131)..(596): NCBI GI: 71001230 Blast Desc: conserved [Aspergillus fumigatus Af293] gi|66852934|gb|EAL93258.1| conserved [Aspergillus fumigatus Af293] gi|159129378|gb|EDP54492.1| conserved [Aspergillus A1163]
  misc_feature (136)..(601): NCBI GI: 255950156 Blast Desc: Pc22g19420 [Penicillium chrysogenum Wisconsin 54-1255] gi|211592862|emb|CAP99230.1| Pc22g19420 [Penicillium chrysogenum Wisconsin 54-1255]
  misc_feature (44)..(567): NCBI GI: 145252718 Blast Desc: An16g05640 [Aspergillus niger] gi|134083426|emb|CAK46904.1| protein product [Aspergillus niger]
  misc_feature (131)..(596): NCBI GI: 119480853 Blast Desc: NFIA_085110 [Neosartorya fischeri NRRL 181] gi|119408609|gb|EAW18558.1| conserved [Neosartorya fischeri NRRL 181]
  misc_feature (106)..(618): NCBI GI: 67539760 Blast Desc: AN6050.2 [Aspergillus nidulans FGSC A4] gi|40738835|gb|EAA58025.1| AN6050.2 [Aspergillus nidulans FGSC A4] gi|259479765|tpe|CBF70286.1| TPA: conserved [Aspergillus FGSC
  misc_feature (53)..(609): NCBI GI: 121715322 Blast Desc: conserved [Aspergillus clavatus NRRL 1] gi|119403427|gb|EAW13844.1| conserved [Aspergillus clavatus NRRL 1]
  misc_feature (63)..(601): NCBI GI: 115395878 Blast Desc: [Aspergillus terreus NIH2624] gi|114193147|gb|EAU34847.1| [Aspergillus terreus NIH2624]
  misc_feature (133)..(572): NCBI GI: 242795208 Blast Desc: conserved [Talaromyces stipitatus ATCC 10500] gi|218719122|gb|EED18542.1| conserved [Talaromyces stipitatus ATCC 10500]
  misc_feature: Useful for introducing or modulating the production of volatile compounds
MPSTPDDARTSRRLVRMYSSDVEGRLPDGSLVHRLGQTLARDRPDPKDVMYPWRRFYAPVELEKLDKHPVNEIVIVESEKLRGKLLSFLKSCTDHDRLDLTRFEPTMESVVEIVQELAASTSSVKENSRKGKAKKLLRRFCGAIYAHKTMLEIIPQGTINVLIKASENYERINEGFAEALCTISEGVIECRTELEMFQTPDMMKRISDLYAHIFIFLSDVMDWMMLKSRQRLLKSFNENFSKKFEDQVTLIATKAENIRNFAAQSSRAEQRDMRLTVESLAQDFRIGLVGEERRHAEMVRLAEEIRCQLAESDRQKQLLADEVANFRRLGGLVYNMLQDEATVWLGDMRSIDDEDPTQYTRYPALTYRSKTSNTTNIQDSSSNTMRYLSQDILFSSRHLEDFFHRDRIRISDDRASPLRTVPKALRRLSEWMNEQSANVLWIEGPPIVASDLSNPISMLANKVIDLAEKADIPAISFFCELRRKETLRPGNETIESQACVSMICALIRQMLEHLGPNVETKADLSTARFLRVDGCILGWSELVQIFRDLLTLMPNTLLCVIDGLHWLDDRSTLGSMGELLEVMRGTKMRVLFTTTGRSACLRKQLGKEETFAIEKADLRSNVWETVKSEYRVR

SEQ ID NO: 3438 - DNA, 2805 bp, Muscodor strobelii; identical to SEQ ID NO: 3435
  misc_feature: SGI EST ID NO. CUFF.8668.2
  misc_feature: Variant of the nucleotide sequence at SEQ ID NO 3436

SEQ ID NO: 3439 - DNA, 1068 bp, Muscodor strobelii
  misc_feature: SGI cDNA ID NO. 560805
  misc_feature: Encodes the peptide sequence at SEQ ID NO 3440
atgtcacattcagcaataagcggcgagacttatgagagcaaggacaatgactttcacaagacctcttctccttcagcggacgataaggcatgcggagcttggataagataccgggaggaacatcgaaaccaagccaccggagaacttctcatgtcacgcgatacagaaggcccggattcttcaggcaatgatcacagtggagctgccttttcgttagtcacgacatacaagcacgcgttgtcaggggtcgaaatacgctctagtacaactggacatcaggctcaggacgtgaggaatatgctgggtgtagccagtcagcatccgacctacgcgctacacttgcactcgctcgccattgtcaacgctctgagaaacgtcgtcaaatattacccatctcaagatttgtcgggcaagatcatcatcgattggccgtatccaattctagtccatcactatgaagaacttgctggatttcgcgacaaaatcgcacaaaaacaggagaaagatctatgcgctagagagaaaggagcttgtaagcatattgacttactattgaaattcctcgatgacggcatcatggagaaagtacgagaagaacaagaacggaacgccagggggtttaatacttgggaatactgttgggttggtcggaagcctggaactacgatgatccaagagttggtcaacaccgggaaaatcgaaatcgaccctttagccgtagtttgtcacacaatgacaggaggcatctttgaacatccctggcgcagctggacacaagtgaactgggctctagcatacaacggcgttcgacttggaagatgtgagacttccttcaacattccgaaatatgatggtgagcaaaagatcggttatgaaaaggtcggcgatctcaacgcccaagagctgccgatcaaagtagcaaatcagattcaatatggcagaatttactgggacctactgaagaaacaatgcaaacatcacaagggcaagactcaaaattttccttttaacgaggtatgcctacacccccatcacctacagaactcattcaaattgatatatcgctag

SEQ ID NO: 3440 - protein, 355 aa, Muscodor strobelii
  misc_feature: SGI Peptide ID NO. 560805
  misc_feature (35)..(339): NCBI GI: 145604080 Blast Desc: MGG_14098 [Magnaporthe grisea 70-15] gi|145012164|gb|EDJ96820.1| MGG_14098 [Magnaporthe grisea 70-15]
  misc_feature (112)..(322): NCBI GI: 46107594 Blast Desc: FG00680.1 [Gibberella zeae PH-1]
  misc_feature (65)..(294): NCBI GI: 171683057 Blast Desc: protein product [Podospora anserina] gi|170941488|emb|CAP67139.1| protein product [Podospora anserina]
  misc_feature (67)..(327): NCBI GI: 171678733 Blast Desc: protein product [Podospora anserina] gi|170937436|emb|CAP62094.1| protein product [Podospora anserina]
  misc_feature (35)..(341): NCBI GI: 256723030 Blast Desc: NECHADRAFT_102062 [Nectria haematococca mpVI 77-13-4]
  misc_feature (112)..(294): NCBI GI: 156033037 Blast Desc: SS1G_13594 [Sclerotinia sclerotiorum 1980] gi|154698997|gb|EDN98735.1| SS1G_13594 [Sclerotinia sclerotiorum 1980]
  misc_feature (120)..(294): NCBI GI: 171681319 Blast Desc: protein product [Podospora anserina] gi|170940618|emb|CAP65846.1| protein product [Podospora anserina]
  misc_feature (112)..(294): NCBI GI: 145244845 Blast Desc: An11g07150 [Aspergillus niger] gi|134079383|emb|CAK40765.1| protein product [Aspergillus niger]
  misc_feature (112)..(354): NCBI GI: 169617698 Blast Desc: SNOG_12031 [Phaeosphaeria nodorum SN15] gi|160703459|gb|EAT80443.2| SNOG_12031 [Phaeosphaeria nodorum SN15]
  misc_feature (114)..(226): NCBI GI: 171687645 Blast Desc: protein product [Podospora anserina] gi|170943784|emb|CAP69436.1| protein product [Podospora anserina]
MSHSAISGETYESKDNDFHKTSSPSADDKACGAWIRYREEHRNQATGELLMSRDTEGPDSSGNDHSGAAFSLVTTYKHALSGVEIRSSTTGHQAQDVRNMLGVASQHPTYALHLHSLAIVNALRNVVKYYPSQDLSGKIIIDWPYPILVHHYEELAGFRDKIAQKQEKDLCAREKGACKHIDLLLKFLDDGIMEKVREEQERNARGFNTWEYCWVGRKPGTTMIQELVNTGKIEIDPLAVVCHTMTGGIFEHPWRSWTQVNWALAYNGVRLGRCETSFNIPKYDGEQKIGYEKVGDLNAQELPIKVANQIQYGRIYWDLLKKQCKHHKGKTQNFPFNEVCLHPHHLQNSFKLIYR

SEQ ID NO: 3441 - DNA, 3663 bp, Muscodor strobelii
  misc_feature: SGI EST ID NO. CUFF.8632.0
  misc_feature: Variant of the nucleotide sequence at SEQ ID NO 3439
ctacgcttagattttctcagcggataagagcattgccgagtcaggcaggcgtacgacacattgtgcttttgtctttagcatcagcgatagtctttcgttattgctatcgcgacattttgttatttgttattgacaaacacatggtcaaccacattaaatctagacagaagaagcagcaacggcaatggcgctacccatgtcgcgagtcacttctttggtagacacaataagcggcgagacttatgagagcaaggacaatgactttcacaagacctcttctccttcagcggacgataaggcatgcggagcttggataagataccgggaggaacatcgaaaccaagccaccggagaacttctcatgtcacgcgatacagaaggcccggattcttcaggcaatgatcacagtggagctgccttttcgttagtcacgacatacaagcacgcgttgtcaggggtcgaaatacgctctagtacaactggacatcaggctcaggacgtgaggaatatgctgggtgtagccagtcagcatccgacctacgcgctacacttgcactcgctcgccattgtcaacgctctgagaaacgtcgtcaaatattacccatctcaagatttgtcgggcaagatcatcatcgattggccgtatccaattctagtccatcactatgaagaacttgctggatttcgcgacaaaatcgcacaaaaacaggagaaagatctatgcgctagagagaaaggagcttgtaagcatattgacttactattgaaattcctcgatgacggcatcatggagaaagtacgagaagaacaagaacggaacgccagggggtttaatacttgggaatactgttgggttggtcggaagcctggaactacgatgatccaagagttggtcaacaccgggaaaatcgaaatcgaccctttagccgtagtttgtcacacaatgacaggaggcatctttgaacatccctggcgcagctggacacaagtgaactgggctctagcatacaacggcgttcgacttggaagatgtgagacttccttcaacattccgaaatatgatggtgagcaaaagatcggttatgaaaaggtcggcgatctcaacgcccaagagctgccgatcaaagtagcaaatcagattcaatatggcagaatttactgggacctactgaagaaacaatgcaaacatcacaagggcaagactcaaaattttccttttaacgaggtgaatggcctggtgatggtagatctcaaaaattattactcaactggagccagcgttccatcactcatggacagctcagattgccgtaaatattcatctgaatgtaaatgtgcggtgtgtatgagtaaaccgcagcaggaggcgaagaccgttgcgctgtttgaagactataacggtatcgatcctatcttgactaaacatgaaccgactacgcatcaatatcttctatgcccgttcgagattcgagctttcgtttttgagacacgcgcttgggagctacttcacctgaagaacttctccgagcccaaattcgatgaggctcaaataaactatcttgtcatggatccccagagaaaacaatcattgaaggcccttgctaagagctttgctcggataaccaagaacaacgaaacactcgatcgcccaccctggacagcggattttgtgaaaggcaaaggccatggcatgatattccttctgcatggtcgaccaggggtagggaaaacatgtacagcagaatgcattgcggctttcacccaacgccctttgatgatactcacagcaagtgatatcggaactgatccaaaggatgtagaacgcaacttgacgacccagttccaaacagccagaagctggaatgccgtgttgcttatcgatgaagccgacgtcttcatggaacggagatctagtgcggatctcactcgcaatagcctggttgccggctttttacgagcgctagaattctttgatggcattctgtttctgactaccaatcgagtgggaactttcgatgatgcgttcatctcccgagttcatgttcaattgtattacccagatttcgacgatgatcaacgccagaaaatctggaagaccttcattgataagcttgccagagaacgcggagactattttagattgaacatcgacgcaaaagattacatacgtggcaaagagatgcaagcactcaaatggaatggtcgcgaaattaggaatgcttttcagacggccgtatcactagccgagtatgattctaacaaggatgaagaaggcaagattgtcatcacagacgatcatctacgtgcggtggttgagctttcgaaagatttcaaagattatctgaacgagcttcatcaaggcgacgaggctaagcgtgccgagcgacattacgaacgattagattcattccagtgacatggtcattcttgctgtgcgtacgcagatacaggcgatcaccgcacttttactgtgctcggacggagctttgctagttctctcaccgacatagatattcctagtcttccgcttgagacatggttgggctctctttgtattctcgtatcaacagtgcacataaacgacagactttttgacttaggtagtcaatggccactttgtttacgttgacatttccattatatcgcaacactctcctcccttggcgaacatgatccgcagatcgccaaccaaaagctctggctgctcccatgcagcaaaatggccaccggtttcgtgctctcgcttgatagaattttattgttagtcgatatcagttcttgacgaccgtgtgtggaaatttaaactgggatattagttaagtatcatcaacacatacctcaaatacgacgtctccgagcctccgattccacgcccgcggagtactgaatatttctttgggaaagtaagagaatccctatcgatcagtaatcattggtatgatctcaaaagagttgtgagaatacgacgtacgagtttgactccaggcgcagaaatgccagccttagcataccattcgcccttgtgagcttcatgatagatgaccgcacttgctgccggtcccgctcggctaaaccaatacaaactcacccactcacacacttcttgtgtagtccagttatagtcatccgtccacgagacgagcttatcgtatatccacgtcagcacgccaatcggagaatctgcaagtgcaacaccgatagtgttgggtcttgtcttctgaatttgagagtatcctgacccatgttcttggaggtcataagccgccttcagaccttcgctctctctggtactatagagattcaagaaatgtgtgaccaggaaccgtaagaaggcaaatggggatgtcggcggtggcggcgcgccggcgatgaagtttagatggcttgcccgcagtgactcgggataaaaagcaccgattgttagagtaattgaacttccctagatcttgcttagcttaaaaatgctgtctcatactagccaatcttacccagtcaccaccctgagaagcatattgcttgtagccaagagtttgcatcagctgatggcaagtctcggcatattgcctaagcccaaaatccggacgatcaattcgacttgagaacccaaaattgggtagcgatggcacaactacatggaaagccggccctccgttctgctcactt

SEQ ID NO: 3442 - DNA, 2205 bp, Muscodor strobelii
  misc_feature: SGI cDNA ID NO. 560806
  misc_feature: Elevated expression when VOC is produced
  misc_feature: Encodes the peptide sequence at SEQ ID NO 3443
atgtcacattcagcaataagcggcgagacttatgagagcaaggacaatgactttcacaagacctcttctccttcagcggacgataaggcatgcggagcttggataagataccgggaggaacatcgaaaccaagccaccggagaacttctcatgtcacgcgatacagaaggcccggattcttcaggcaatgatcacagtggagctgccttttcgttagtcacgacatacaagcacgcgttgtcaggggtcgaaatacgctctagtacaactggacatcaggctcaggacgtgaggaatatgctgggtgtagccagtcagcatccgacctacgcgctacacttgcactcgctcgccattgtcaacgctctgagaaacgtcgtcaaatattacccatctcaagatttgtcgggcaagatcatcatcgattggccgtatccaattctagtccatcactatgaagaacttgctggatttcgcgacaaaatcgcacaaaaacaggagaaagatctatgcgctagagagaaaggagcttgtaagcatattgacttactattgaaattcctcgatgacggcatcatggagaaagtacgagaagaacaagaacggaacgccagggggtttaatacttgggaatactgttgggttggtcggaagcctggaactacgatgatccaagagttggtcaacaccgggaaaatcgaaatcgaccctttagccgtagtttgtcacacaatgacaggaggcatctttgaacatccctggcgcagctggacacaagtgaactgggctctagcatacaacggcgttcgacttggaagatgtgagacttccttcaacattccgaaatatgatggtgagcaaaagatcggttatgaaaaggtcggcgatctcaacgcccaagagctgccgatcaaagtagcaaatcagattcaatatggcagaatttactgggacctactgaagaaacaatgcaaacatcacaagggcaagactcaaaattttccttttaacgaggtgaatggcctggtgatggtagatctcaaaaattattactcaactggagccagcgttccatcactcatggacagctcagattgccgtaaatattcatctgaatgtaaatgtgcggtgtgtatgagtaaaccgcagcaggaggcgaagaccgttgcgctgtttgaagactataacggtatcgatcctatcttgactaaacatgaaccgactacgcatcaatatcttctatgcccgttcgagattcgagctttcgtttttgagacacgcgcttgggagctacttcacctgaagaacttctccgagcccaaattcgatgaggctcaaataaactatcttgtcatggatccccagagaaaacaatcattgaaggcccttgctaagagctttgctcggataaccaagaacaacgaaacactcgatcgcccaccctggacagcggattttgtgaaaggcaaaggccatggcatgatattccttctgcatggtcgaccaggggtagggaaaacatgtacagcagaatgcattgcggctttcacccaacgccctttgatgatactcacagcaagtgatatcggaactgatccaaaggatgtagaacgcaacttgacgacccagttccaaacagccagaagctggaatgccgtgttgcttatcgatgaagccgacgtcttcatggaacggagatctagtgcggatctcactcgcaatagcctggttgccggctttttacgagcgctagaattctttgatggcattctgtttctgactaccaatcgagtgggaactttcgatgatgcgttcatctcccgagttcatgttcaattgtattacccagatttcgacgatgatcaacgccagaaaatctggaagaccttcattgataagcttgccagagaacgcggagactattttagattgaacatcgacgcaaaagattacatacgtggcaaagagatgcaagcactcaaatggaatggtcgcgaaattaggaatgcttttcagacggccgtatcactagccgagtatgattctaacaaggatgaagaaggcaagattgtcatcacagacgatcatctacgtgcggtggttgagctttcgaaagatttcaaagattatctgaacgagcttcatcaaggcgacgaggctaagcgtgccgagcgacattacgaacgattagattcattccagtga

SEQ ID NO: 3443 - protein, 734 aa, Muscodor strobelii
  misc_feature: SGI Peptide ID NO. 560806
  misc_feature (495)..(661): Pfam Id: PF00004 Pfam Desc: ATPase family associated with various cellular activities (AAA)
  misc_feature (495)..(637): Pfam Id: PF00004 Pfam Desc: ATPase family associated with various cellular activities (AAA)
  misc_feature (35)..(732): NCBI GI: 145604080 Blast Desc: MGG_14098 [Magnaporthe grisea 70-15] gi|145012164|gb|EDJ96820.1| MGG_14098 [Magnaporthe grisea 70-15]
  misc_feature (112)..(733): NCBI GI: 169617698 Blast Desc: SNOG_12031 [Phaeosphaeria nodorum SN15] gi|160703459|gb|EAT80443.2| SNOG_12031 [Phaeosphaeria nodorum SN15]
  misc_feature (112)..(711): NCBI GI: 46107594 Blast Desc: FG00680.1 [Gibberella zeae PH-1]
  misc_feature (107)..(723): NCBI GI: 145244845 Blast Desc: An11g07150 [Aspergillus niger] gi|134079383|emb|CAK40765.1| protein product [Aspergillus niger]
  misc_feature (112)..(724): NCBI GI: 156033037 Blast Desc: SS1G_13594 [Sclerotinia sclerotiorum 1980] gi|154698997|gb|EDN98735.1| SS1G_13594 [Sclerotinia sclerotiorum 1980]
  misc_feature (112)..(723): NCBI GI: 46111087 Blast Desc: FG02425.1 [Gibberella zeae PH-1]
  misc_feature (35)..(727): NCBI GI: 256723030 Blast Desc: NECHADRAFT_102062 [Nectria haematococca mpVI 77-13-4]
  misc_feature (101)..(733): NCBI GI: 189192951 Blast Desc: conserved [Pyrenophora tritici-repentis Pt-1C-BFP] gi|187978378|gb|EDU45004.1| conserved [Pyrenophora tritici-repentis Pt-1C-BFP]
  misc_feature (262)..(724): NCBI GI: 154301437 Blast Desc: BC1G_10388 [Botryotinia fuckeliana B05.10] gi|150856128|gb|EDN31320.1| BC1G_10388 [Botryotinia fuckeliana B05.10]
  misc_feature (395)..(731): NCBI GI: 212528958 Blast Desc: conserved [Penicillium marneffei ATCC 18224] gi|210074034|gb|EEA28121.1| conserved [Penicillium marneffei ATCC 18224]
  misc_feature: Useful for introducing or modulating the production of volatile compounds
MSHSAISGETYESKDNDFHKTSSPSADDKACGAWIRYREEHRNQATGELLMSRDTEGPDSSGNDHSGAAFSLVTTYKHALSGVEIRSSTTGHQAQDVRNMLGVASQHPTYALHLHSLAIVNALRNVVKYYPSQDLSGKIIIDWPYPILVHHYEELAGFRDKIAQKQEKDLCAREKGACKHIDLLLKFLDDGIMEKVREEQERNARGFNTWEYCWVGRKPGTTMIQELVNTGKIEIDPLAVVCHTMTGGIFEHPWRSWTQVNWALAYNGVRLGRCETSFNIPKYDGEQKIGYEKVGDLNAQELPIKVANQIQYGRIYWDLLKKQCKHHKGKTQNFPFNEVNGLVMVDLKNYYSTGASVPSLMDSSDCRKYSSECKCAVCMSKPQQEAKTVALFEDYNGIDPILTKHEPTTHQYLLCPFEIRAFVFETRAWELLHLKNFSEPKFDEAQINYLVMDPQRKQSLKALAKSFARITKNNETLDRPPWTADFVKGKGHGMIFLLHGRPGVGKTCTAECIAAFTQRPLMILTASDIGTDPKDVERNLTTQFQTARSWNAVLLIDEADVFMERRSSADLTRNSLVAGFLRALEFFDGILFLTTNRVGTFDDAFISRVHVQLYYPDFDDDQRQKIWKTFIDKLARERGDYFRLNIDAKDYIRGKEMQALKWNGREIRNAFQTAVSLAEYDSNKDEEGKIVITDDHLRAVVELSKDFKDYLNELHQGDEAKRAERHYERLDSFQ

SEQ ID NO: 3444 - DNA, 3663 bp, Muscodor strobelii; identical to SEQ ID NO: 3441
  misc_feature: SGI EST ID NO. CUFF.8632.0
  misc_feature: Variant of the nucleotide sequence at SEQ ID NO 3442

SEQ ID NO: 3445 - DNA, 1209 bp, Muscodor strobelii
  misc_feature: SGI cDNA ID NO. 560807
  misc_feature: Encodes the peptide sequence at SEQ ID NO 3446
atggagacaatacgcccctttcgaatcgatgtcccgtcctcggcaattgaggctctgaatcggcggttggaaatttcacgaataccggaacttttcgaggcggattgggagcgaggccctccagctgaagatatcaaaagaatctccaagtattggctcgaggagtttaattggcgatctttcgagcagcgtttgaatgagttgcctcaatacgaggcgaccgttactgtcaatggctttgatccattccaagtacatttcatccatcaacgcagcaagtctgcgggtgctatcccactgctaatagttcatggctggccgggcagcttttacgaaatgtcgcgaatactaccaatgctcaaagaaagtgagcagaacggagggccggctttccatgtagttgtgccatcgctacccaattttgggttctcaagtcgaattgatcgtccggattttgggcttaggcaatatgccgagacttgccatcagctgatgcaaactcttggctacaagcaatatgcttctcagggtggtgactggggaagttcaattactctaacaatcggtgctttttatcccgagtcactgcgggcaagccatctaaacttcatcgccggcgcgccgccaccgccgacatccccatttgccttcttacggttcctggtcacacatttcttgaatctctatagtaccagagagagcgaaggtctgaaggcggcttatgacctccaagaacatgggtcaggatactctcaaattcagaagacaagacccaacactatcggtgttgcacttgcagattctccgattggcgtgctgacgtggatatacgataagctcgtctcgtggacggatgactataactggactacacaagaagtgtgtgagtgggtgagtttgtattggtttagccgagcgggaccggcagcaagtgcggtcatctatcatgaagctcacaagggcgaatggtatgctaaggctggcatttctgcgcctggagtcaaactcggattctcttactttcccaaagaaatattcagtactccgcgggcgtggaatcggaggctcggagacgtcgtatttgagcgagagcacgaaaccggtggccattttgctgcatgggagcagccagagcttttggttggcgatctgcggatcatgttcgccaagggaggagagtgttgcgatataatggaaatgtcaacgtaa

SEQ ID NO: 3446 - protein, 402 aa, Muscodor strobelii
  misc_feature: SGI Peptide ID NO. 560807
  misc_feature (131)..(386): Pfam Id: PF00561 Pfam Desc: alpha/beta hydrolase fold
  misc_feature (5)..(117): Pfam Id: PF06441 Pfam Desc: Epoxide hydrolase N terminus
  misc_feature (131)..(223): Pfam Id: PF00561 Pfam Desc: alpha/beta hydrolase fold
  misc_feature (5)..(398): NCBI GI: 255950628 Blast Desc: Pc22g21860 [Penicillium chrysogenum Wisconsin 54-1255] gi|211593098|emb|CAP99474.1| Pc22g21860 [Penicillium chrysogenum Wisconsin 54-1255]
  misc_feature (4)..(399): NCBI GI: 256730470 Blast Desc: NECHADRAFT_30008 [Nectria haematococca mpVI 77-13-4]
  misc_feature (1)..(402): NCBI GI: 116203331 Blast Desc: CHGG_09550 [Chaetomium globosum CBS 148.51] gi|88178068|gb|EAQ85536.1| CHGG_09550 [Chaetomium globosum CBS 148.51]
  misc_feature (1)..(398): NCBI GI: 169608071 Blast Desc: SNOG_07102 [Phaeosphaeria nodorum SN15] gi|111064633|gb|EAT85753.1| SNOG_07102 [Phaeosphaeria nodorum SN15]
  misc_feature (4)..(398): NCBI GI: 189188968 Blast Desc: epoxide hydrolase 1 [Pyrenophora tritici-repentis Pt-1C-BFP] gi|187972429|gb|EDU39928.1| epoxide hydrolase 1 [Pyrenophora tritici-repentis Pt-1C-BFP]
  misc_feature (1)..(394): NCBI GI: 238841134 Blast Desc: epoxide hydrolase [Microsporum canis CBS 113480]
  misc_feature (4)..(399): NCBI GI: 46109710 Blast Desc: FG01737.1 [Gibberella zeae PH-1]
  misc_feature (4)..(397): NCBI GI: 261354772 Blast Desc: epoxide hydrolase [Verticillium albo-atrum VaMs.102]
  misc_feature (6)..(399): NCBI GI: 156048390 Blast Desc: SS1G_08926 [Sclerotinia sclerotiorum 1980] gi|154693323|gb|EDN93061.1| SS1G_08926 [Sclerotinia sclerotiorum 1980]
  misc_feature (1)..(394): NCBI GI: 159125001 Blast Desc: epoxide hydrolase, [Aspergillus fumigatus A1163]
  misc_feature (2)..(385): SWISSPROT Homolog: EC 3.3.2.9 Microsomal epoxide hydrolase
METIRPFRIDVPSSAIEALNRRLEISRIPELFEADWERGPPAEDIKRISKYWLEEFNWRSFEQRLNELPQYEATVTVNGFDPFQVHFIHQRSKSAGAIPLLIVHGWPGSFYEMSRILPMLKESEQNGGPAFHVVVPSLPNFGFSSRIDRPDFGLRQYAETCHQLMQTLGYKQYASQGGDWGSSITLTIGAFYPESLRASHLNFIAGAPPPPTSPFAFLRFLVTHFLNLYSTRESEGLKAAYDLQEHGSGYSQIQKTRPNTIGVALADSPIGVLTWIYDKLVSWTDDYNWTTQEVCEWVSLYWFSRAGPAASAVIYHEAHKGEWYAKAGISAPGVKLGFSYFPKEIFSTPRAWNRRLGDVVFEREHETGGHFAAWEQPELLVGDLRIMFAKGGECCDIMEMST

SEQ ID NO: 3447 - DNA, 1615 bp, Muscodor strobelii
  misc_feature: SGI EST ID NO. CUFF.8633.2
  misc_feature: Variant of the nucleotide sequence at SEQ ID NO 3445
aagtgagcagaacggagggccggctttccatgtagttgtgccatcgctacccaattttgggttctcaagtcgaattgatcgtccggattttgggcttaggcaatatgccgagacttgccatcagctgatgcaaactcttggctacaagcaatatgcttctcagggtggtgactggggaagttcaattactctaacaatcggtgctttttatcccgagtcactgcgggcaagccatctaaacttcatcgccggcgcgccgccaccgccgacatccccatttgccttcttacggttcctggtcacacatttcttgaatctctatagtaccagagagagcgaaggtctgaaggcggcttatgacctccaagaacatgggtcaggatactctcaaattcagaagacaagacccaacactatcggtgttgcacttgcagattctccgattggcgtgctgacgtggatatacgataagctcgtctcgtggacggatgactataactggactacacaagaagtgtgtgagtgggtgagtttgtattggtttagccgagcgggaccggcagcaagtgcggtcatctatcatgaagctcacaagggcgaatggtatgctaaggctggcatttctgcgcctggagtcaaactcggattctcttactttcccaaagaaatattcagtactccgcgggcgtggaatcggaggctcggagacgtcgtatttgagcgagagcacgaaaccggtggccattttgctgcatgggagcagccagagcttttggttggcgatctgcggatcatgttcgccaagggaggagagtgttgcgatataatggaaatgtcaacgtaaacaaagtggccattgactacctaagtcaaaaagtctgtcgtttatgtgcactgttgatacgagaatacaaagagagcccaaccatgtctcaagcggaagactaggaatatctatgtcggtgagagaactagcaaagctccgtccgagcacagtaaaagtgcggtgatcgcctgtatctgcgtacgcacagcaagaatgaccatgtcactggaatgaatctaatcgttcgtaatgtcgctcggcacgcttagcctcgtcgccttgatgaagctcgttcagataatctttgaaatctttcgaaagctcaaccaccgcacgtagatgatcgtctgtgatgacaatcttgccttcttcatccttgttagaatcatactcggctagtgatacggccgtctgaaaagctaagtcatattagcatgatacttcgattatcatcaattgcccggaatatccttgagtgtctggtccttaccattcctaatttcgcgaccattccatttgagtgcttgcatctctttgccacgtatgtaatcttttgcgtcgatgttcaatctaaaatagtctccgcgttctctggcaagcttatcaatgaaggtcttccagattttctggcgttgatcatcgtcgaaatctgggtaatacaattgaacatgaactcgggagatgaacgcatcatcgaaagttcccactcgattggtagtcagaaacagaatgccatcaaagaattctagcgctcgtaaaaagcctaccgcaatgttagcaactcccgaa

SEQ ID NO: 3448 - DNA, 1215 bp, Muscodor strobelii
  misc_feature: SGI cDNA ID NO. 560808
  misc_feature: Encodes the peptide sequence at SEQ ID NO 3449
atggagacaatacgcccctttcgaatcgatgtcccgtcctcggcaattgaggctctgaatcggcggttggaaatttcacgaataccggaacttttcgaggcggattgggagcgaggccctccagctgaagatatcaaaagaatctccaagtattggctcgaggagtttaattggcgatctttcgagcagcgtttgaatgagttgcctcaatacgaggcgaccgttactgtcaatggctttgatccattccaagtacatttcatccatcaacgcagcaagtctgcgggtgctatcccactgctaatagttcatggctggccgggcagcttttacgaaatgtcgcgaatactaccaatgctcaaagaaagtgagcagaacggagggccggctttccatgtagttgtgccatcgctacccaattttgggttctcaagtcgaattgatcgtccggattttgggcttaggcaatatgccgagacttgccatcagctgatgcaaactcttggctacaagcaatatgcttctcagggtggtgactggggaagttcaattactctaacaatcggtgctttttatcccgagtcactgcgggcaagccatctaaacttcatcgccggcgcgccgccaccgccgacatccccatttgccttcttacggttcctggtcacacatttcttgaatctctatagtaccagagagagcgaaggtctgaaggcggcttatgacctccaagaacatgggtcaggatactctcaaattcagaagacaagacccaacactatcggtgttgcacttgcagattctccgattggcgtgctgacgtggatatacgataagctcgtctcgtggacggatgactataactggactacacaagaagtgtgtgagtgggtgagtttgtattggtttagccgagcgggaccggcagcaagtgcggtcatctatcatgaagctcacaagggcgaatggtatgctaaggctggcatttctgcgcctggagtcaaactcggattctcttactttcccaaagaaatattcagtactccgcgggcgtggaatcggaggctcggagacgtcgtatttgaggtatgtcgagagcacgaaaccggtggccattttgctgcatgggagcagccagagcttttggttggcgatctgcggatcatgttcgccaagggaggagagtgttgcgatataatggaaatgtcaacgtaa

SEQ ID NO: 3449 - protein, 404 aa, Muscodor strobelii
  misc_feature: SGI Peptide ID NO. 560808
  misc_feature (131)..(388): Pfam Id: PF00561 Pfam Desc: alpha/beta hydrolase fold
  misc_feature (5)..(117): Pfam Id: PF06441 Pfam Desc: Epoxide hydrolase N terminus
  misc_feature (131)..(223): Pfam Id: PF00561 Pfam Desc: alpha/beta hydrolase fold
  misc_feature (5)..(400): NCBI GI: 255950628 Blast Desc: Pc22g21860 [Penicillium chrysogenum Wisconsin 54-1255] gi|211593098|emb|CAP99474.1| Pc22g21860 [Penicillium chrysogenum Wisconsin 54-1255]
  misc_feature (4)..(401): NCBI GI: 256730470 Blast Desc: NECHADRAFT_30008 [Nectria haematococca mpVI 77-13-4]
  misc_feature (1)..(400): NCBI GI: 169608071 Blast Desc: SNOG_07102 [Phaeosphaeria nodorum SN15] gi|111064633|gb|EAT85753.1| SNOG_07102 [Phaeosphaeria nodorum SN15]
  misc_feature (1)..(404): NCBI GI: 116203331 Blast Desc: CHGG_09550 [Chaetomium globosum CBS 148.51] gi|88178068|gb|EAQ85536.1| CHGG_09550 [Chaetomium globosum CBS 148.51]
  misc_feature (4)..(400): NCBI GI: 189188968 Blast Desc: epoxide hydrolase 1 [Pyrenophora tritici-repentis Pt-1C-BFP] gi|187972429|gb|EDU39928.1| epoxide hydrolase 1 [Pyrenophora tritici-repentis Pt-1C-BFP]
  misc_feature (1)..(396): NCBI GI: 238841134 Blast Desc: epoxide hydrolase [Microsporum canis CBS 113480]
  misc_feature (4)..(401): NCBI GI: 46109710 Blast Desc: FG01737.1 [Gibberella zeae PH-1]
  misc_feature (4)..(399): NCBI GI: 261354772 Blast Desc: epoxide hydrolase [Verticillium albo-atrum VaMs.102]
  misc_feature (6)..(401): NCBI GI: 156048390 Blast Desc: SS1G_08926 [Sclerotinia sclerotiorum 1980] gi|154693323|gb|EDN93061.1| SS1G_08926 [Sclerotinia sclerotiorum 1980]
  misc_feature (1)..(396): NCBI GI: 159125001 Blast Desc: epoxide hydrolase, [Aspergillus fumigatus A1163]
  misc_feature (2)..(387): SWISSPROT Homolog: EC 3.3.2.9 Microsomal epoxide hydrolase
METIRPFRIDVPSSAIEALNRRLEISRIPELFEADWERGPPAEDIKRISKYWLEEFNWRSFEQRLNELPQYEATVTVNGFDPFQVHFIHQRSKSAGAIPLLIVHGWPGSFYEMSRILPMLKESEQNGGPAFHVVVPSLPNFGFSSRIDRPDFGLRQYAETCHQLMQTLGYKQYASQGGDWGSSITLTIGAFYPESLRASHLNFIAGAPPPPTSPFAFLRFLVTHFLNLYSTRESEGLKAAYDLQEHGSGYSQIQKTRPNTIGVALADSPIGVLTWIYDKLVSWTDDYNWTTQEVCEWVSLYWFSRAGPAASAVIYHEAHKGEWYAKAGISAPGVKLGFSYFPKEIFSTPRAWNRRLGDVVFEVCREHETGGHFAAWEQPELLVGDLRIMFAKGGECCDIMEMST

SEQ ID NO: 3450 - DNA, 1615 bp, Muscodor strobelii; identical to SEQ ID NO: 3447
  misc_feature: SGI EST ID NO. CUFF.8633.2
  misc_feature: Variant of the nucleotide sequence at SEQ ID NO 3448

SEQ ID NO: 3451 - DNA, 1368 bp, Muscodor strobelii
  misc_feature: SGI cDNA ID NO. 560809
  misc_feature: Encodes the peptide sequence at SEQ ID NO 3452
atgagaagaatatgctcatcgcaaaggttgaaagctgtactcatctcattgtcatgcctctcaatctacatctggctcacgtcccgagcccgcggagaactcaatcccttacatctcaaccaagacaatgttgcggcccctagcaccgcaccttcagatgatcataatgtgttaaatctctcaaaatctgaatgtcgtgctgtcttcccggatctgttcatagatctcgacaaaacgatcgcattaggatcgttcactttgaggctagcccaggacaccggaccagttcaagtcaagatcaagaacaaccaattgtacatattaaaactcgagggaaaggggacattatcacctgagctcgttcaaatacgcaaagcagcgctctaccaaatacaccgcgcccttctgacttctcccatcattctacccgacagcatattctctctcaacatacgcgaccaaccctatggcactgcattctcatacacgcgccctgcttacccagcgcctgcatccgctctcccaccgctcgagcgcgccttcctcatgcctcacttctcacactggacatgggatctcccgagcgttggatcattccgttgggcgtcagatgcaattaagagaatagaaaatgagatagccttcaagcagaagaataaccgcgtcgtctggcgaggaacaaagggtttcaacggcgtacaccacccgactctgcgccaggacctactcaaagttaccgaaggtgcagattgggccgatgtcagggcgctggatagctacaccctcgatagaaacaaggaaaatgggaaagaatcggataacgacggaagcgagacaagagacgccagcatactaatgatagaagacttctgccgttacaaatacatcctctacaccgacggcgtgacctacagtgggcgactgtccttccaccaactctgcgccagcgttctcattacggccccaattgcgtggctacagcacactacgcatctaattaaaccccttttctcatgtgatttagaacttggcagcaaacggacctggacactggatgagggcgtcagagatgcttggcccgtgcattatagtgctgaggaagcgaacgccgttttcgtgagcccggactggactgatctcgaagacacgatcaagtggttggaggaccatcaggatattgcggagggcattgcgaagaggcagagggaactatatgctgagaagggttacttgagtccggccgccgaagcgtgctattggcgggctttgattaaggggtggagcgaagttgtgaggttcgatgaaaacgaatggaatgaggagttgggaattagttgggaagatttctctatcggtgaagactggtga

SEQ ID NO: 3452 - protein, 455 aa, Muscodor strobelii
  misc_feature: SGI Peptide ID NO. 560809
  misc_feature (45)..(451): NCBI GI: 116201527 Blast Desc: CHGG_08648 [Chaetomium globosum CBS 148.51] gi|88177166|gb|EAQ84634.1| CHGG_08648 [Chaetomium globosum CBS 148.51]
  misc_feature (56)..(444): NCBI GI: 29150125 Blast Desc: [Neurospora crassa]
  misc_feature (75)..(455): NCBI GI: 164426694 Blast Desc: NCU11268 [Neurospora crassa OR74A] gi|157071438|gb|EAA28391.2| conserved [Neurospora crassa OR74A]
  misc_feature (10)..(452): NCBI GI: 159125788 Blast Desc: conserved [Aspergillus fumigatus A1163]
  misc_feature (10)..(453): NCBI GI: 119499505 Blast Desc: NFIA_041910 [Neosartorya fischeri NRRL 181] gi|119414674|gb|EAW24613.1| [Neosartorya fischeri NRRL 181]
  misc_feature (10)..(452): NCBI GI: 70985550 Blast Desc: conserved [Aspergillus fumigatus Af293] gi|66845909|gb|EAL86243.1| conserved [Aspergillus fumigatus Af293]
  misc_feature (2)..(451): NCBI GI: 171677945 Blast Desc: protein product [Podospora anserina] gi|170937041|emb|CAP61700.1| protein product [Podospora anserina]
  misc_feature (60)..(451): NCBI GI: 39971479 Blast Desc: MGG_07055 [Magnaporthe grisea 70-15] gi|145019515|gb|EDK03743.1| MGG_07055 [Magnaporthe grisea 70-15]
  misc_feature (14)..(451): NCBI GI: 154293302 Blast Desc: BC1G_14446 [Botryotinia fuckeliana B05.10] gi|150845591|gb|EDN20784.1| BC1G_14446 [Botryotinia fuckeliana B05.10]
  misc_feature (210)..(451): NCBI GI: 156061171 Blast Desc: SS1G_02728 [Sclerotinia sclerotiorum 1980] gi|154700132|gb|EDN99870.1| SS1G_02728 [Sclerotinia sclerotiorum 1980]
MRRICSSQRLKAVLISLSCLSIYIWLTSRARGELNPLHLNQDNVAAPSTAPSDDHNVLNLSKSECRAVFPDLFIDLDKTIALGSFTLRLAQDTGPVQVKIKNNQLYILKLEGKGTLSPELVQIRKAALYQIHRALLTSPIILPDSIFSLNIRDQPYGTAFSYTRPAYPAPASALPPLERAFLMPHFSHWTWDLPSVGSFRWASDAIKRIENEIAFKQKNNRVVWRGTKGFNGVHHPTLRQDLLKVTEGADWADVRALDSYTLDRNKENGKESDNDGSETRDASILMIEDFCRYKYILYTDGVTYSGRLSFHQLCASVLITAPIAWLQHTTHLIKPLFSCDLELGSKRTWTLDEGVRDAWPVHYSAEEANAVFVSPDWTDLEDTIKWLEDHQDIAEGIAKRQRELYAEKGYLSPAAEACYWRALIKGWSEVVRFDENEWNEELGISWEDFSIGEDW

SEQ ID NO: 3453 - DNA, 1779 bp, Muscodor strobelii
  misc_feature: SGI cDNA ID NO. 560810
  misc_feature: Encodes the peptide sequence at SEQ ID NO 3454
atgttccgactattccatcgcattaaaaatcgtatcacagcaatgcctttcgggtcgtgggttgttccatccatcacggcagctactgccgttgccgttgcatctcgttatgaacgcactgccccagaccctgctaccacatgtcgtatcattccaggagacgccttatggccaacggagagtgcctgggcggatctgaacgctaccctgcatggaaacttgatcacttctgtcccagttgcggctgtctgccacacaacccttttcgaccaagcaaacgatctattcgacaaagacaaatgtgctactctacaaagcatgtggtattaccccaggacggacttagcgtcttcatgttctccaatggcatacccattttccaacaatagctgcaatcctttcagtgatccggataccccctgcacgagtggaggtcacgctgtttacaccatcaacgccacgagtattgctgacttccaaacagccataagctttgccaagcgccataacattcgccttgtcattcgcaatacaggtcacgactacctcggcaaatctactggagcccactcgctagccgtgtggactcggtacatgaaagcgatgagtctggttgcgtacgatgatggcttgtacaggggacccgcgcttaaggccggtgcgggggtagaggttatcgaggcttacacattcgcatcgtctcataacctggtaatagctggtggcaactgtcctacagtcggtctcgcgggcgggttcacccaaggaggaggccacggcccctttgtatcacaatacgggcttagtgctgaccaagtccttgagttcgaagttgtcacgggctccggtgagctcatgaaagcttcagcatcccagaacagtgacttgttttgggccctacgaggaggtgggggaggaacgtttggcatcgtcgcctccattacagttaaagcatttcctgacgctaaaacatctggcggctcgatgactattctgaacaatggaacaaacgcagacatgctgtattctgcggtcacaccttttatccgacacacgcttcccgctcttgtagatgcgggtgtctttgtagtatggatattggcgccgtttggtttcatgatctcgcctgccctcgcgcctggactcccgttggctgatctggaagcgctcatgaagcccatgacccaggaacttgacgcagtcggtctgacatacgactactctctaactcagtttccctcctttctgtcgacttacaacgcgcttcagataatctcaagctggaatgtatctgattacaatattggaaatcggctcatcccgcgagatgtggcgactcagcgtaccgatgatgtcgtcaaaactctgcgggaaatctcttcaaaaacgatcttatctggcgtaagctacaatctcgctcgtcccaatgtatcggctgatgcggtttccgtcaatccatacatccgtactgctcttttcggcgtgacagttggaacccctataaactatacagactggcctaagacaaaggaagcgcaggatcgaattacatacgagtttctcccagcgctggcaaaattgacaccagggggcgctgcttacttgaatgaagccgacttccagctacccaactttcaacaagtgatatacggcaagaactacgagaggcttctggatattaagaagaaatacgaccccactgacattttctatgccaagactgcggtaggtagcgatcattgggcagagaacagcgacggaagattgtgcaaggcctaa

SEQ ID NO: 3454 - protein, 592 aa, Muscodor strobelii
  misc_feature: SGI Peptide ID NO. 560810
  misc_feature (533)..(577): Pfam Id: PF08031 Pfam Desc: Berberine and berberine like
  misc_feature (147)..(289): Pfam Id: PF01565 Pfam Desc: FAD binding domain
  misc_feature (46)..(591): NCBI GI: 154313031 Blast Desc: BC1G_05517 [Botryotinia fuckeliana B05.10] gi|150849602|gb|EDN24795.1| BC1G_05517 [Botryotinia fuckeliana B05.10]
  misc_feature (43)..(591): NCBI GI: 115386510 Blast Desc: ATEG_07110 [Aspergillus terreus NIH2624] gi|114190794|gb|EAU32494.1| ATEG_07110 [Aspergillus terreus NIH2624]
  misc_feature (42)..(592): NCBI GI: 255949596 Blast Desc: Pc22g16510 [Penicillium chrysogenum Wisconsin 54-1255] gi|211592582|emb|CAP98939.1| Pc22g16510 [Penicillium chrysogenum Wisconsin 54-1255]
  misc_feature (19)..(592): NCBI GI: 212540954 Blast Desc: isoamyl alcohol oxidase, [Penicillium marneffei ATCC 18224] gi|210067931|gb|EEA22023.1| isoamyl alcohol oxidase, [Penicillium marneffei ATCC 18224]
  misc_feature (48)..(591): NCBI GI: 242765564 Blast Desc: FAD/FMN-containing isoamyl alcohol oxidase MreA [Talaromyces stipitatus ATCC 10500] gi|218724196|gb|EED23613.1| FAD/FMN-containing isoamyl alcohol oxidase MreA [Talaromyces ATCC
  misc_feature (19)..(592): NCBI GI: 242800117 Blast Desc: isoamyl alcohol oxidase, [Talaromyces stipitatus ATCC 10500] gi|218716866|gb|EED16287.1| isoamyl alcohol oxidase, [Talaromyces stipitatus ATCC 10500]
  misc_feature (46)..(592): NCBI GI: 85102097 Blast Desc: NCU04108 [Neurospora crassa OR74A] gi|21622328|emb|CAD36969.1| isoamyl alcohol oxidase [Neurospora crassa] gi|28922807|gb|EAA32028.1| NCU04108 [Neurospora crassa
  misc_feature (24)..(591): NCBI GI: 121703467 Blast Desc: FAD binding domain protein [Aspergillus clavatus NRRL 1] gi|119398141|gb|EAW08572.1| FAD binding domain protein [Aspergillus clavatus NRRL 1]
  misc_feature (47)..(592): NCBI GI: 212531397 Blast Desc: FAD/FMN-containing isoamyl alcohol oxidase MreA [Penicillium marneffei ATCC 18224] gi|210071219|gb|EEA25308.1| FAD/FMN-containing isoamyl alcohol oxidase MreA [Penicillium ATCC
  misc_feature (46)..(592): NCBI GI: 159122500 Blast Desc: FAD/FMN-containing isoamyl alcohol oxidase MreA [Aspergillus fumigatus A1163]
MFRLFHRIKNRITAMPFGSWVVPSITAATAVAVASRYERTAPDPATTCRIIPGDALWPTESAWADLNATLHGNLITSVPVAAVCHTTLFDQANDLFDKDKCATLQSMWYYPRTDLASSCSPMAYPFSNNSCNPFSDPDTPCTSGGHAVYTINATSIADFQTAISFAKRHNIRLVIRNTGHDYLGKSTGAHSLAVWTRYMKAMSLVAYDDGLYRGPALKAGAGVEVIEAYTFASSHNLVIAGGNCPTVGLAGGFTQGGGHGPFVSQYGLSADQVLEFEVVTGSGELMKASASQNSDLFWALRGGGGGTFGIVASITVKAFPDAKTSGGSMTILNNGTNADMLYSAVTPFIRHTLPALVDAGVFVVWILAPFGFMISPALAPGLPLADLEALMKPMTQELDAVGLTYDYSLTQFPSFLSTYNALQIISSWNVSDYNIGNRLIPRDVATQRTDDVVKTLREISSKTILSGVSYNLARPNVSADAVSVNPYIRTALFGVTVGTPINYTDWPKTKEAQDRITYEFLPALAKLTPGGAAYLNEADFQLPNFQQVIYGKNYERLLDIKKKYDPTDIFYAKTAVGSDHWAENSDGRLCKA

SEQ ID NO: 3455 - DNA, 1290 bp, Muscodor strobelii
  misc_feature: SGI cDNA ID NO. 560811
  misc_feature: Encodes the peptide sequence at SEQ ID NO 3456
atgaagaccgctcaaggtctcagtctggcgttgtgcgtcttagctccactggcagcagtagcaaacgccgcgccaactgaagtaacacaaaccgagatcaacatacacaatggaagcagcacgcaaaatgcactcgattcactaggcgagatggacatgctaagcgacatcgatttgcagcaggaagtcacccgaccccgtcgagccgaacttgcgatcgacgccttgaatacctggtataaccaggactctggactatgggaacatgccggggctccctggtggatgagcgccgtctgcctacgtttgctcattgactacaccgtgaaaacaggtcacgataaatacatggcgcaggccagaaacactttcgaccgtgcccgcggcccagtgtggtggtggaggcaaggcggcggcgacttccgcggcgattccacggacgatactggctggtgggcaatggccatgatgtcgatggtacgtgtagaaagatctcacgcgagttatttttttgattatattcccaagacatggtaccaagcgactggcaacacagagtatttggaaatcgccaaaaaggatgaggagtatatgtataagtactggggaggaaccggtacttcctgcggtgctggactgatctgggatatccgccgggaaaaatatgtcaacgccatctcgaattcgctctacttcgagctgactatcactctgcataacagtatccctggggaccgagattatctaaggcgggccatggaaacatgggtcttcatacagcactctgggatgatcaacaaggattggcttctcaacgacgggatggttgaggacccaaaacgctgcgaacccaacggcggacaggtctggtcatacaatcaaggtgtcatccttaatgcccttgtcgggttggctcaagcgcttaatgataagcgagttctgaagaacgcgcggaacatcgcggatgcggttatcaacagcgagtacatgtcgccaaaccgggtgctcaacgagccgggttgcgcaacagttgagagttgttttccgaatggggagatattcaagggtatctttatgcgtgctctttcaaatctgaattcagctttggaggatcatccttatgacttttatcttgcgcataacgctcgttgggcgtatcatcgcgccagggaggtgaaggacggctcttttacggactggtatgggtttaagtggcagggtccgttcgataaggctggagttgggcagcaggctgctgctgctaacttgcttgttgctaatttgtattaa

SEQ ID NO: 3456 - protein, 429 aa, Muscodor strobelii
  misc_feature: SGI Peptide ID NO. 560811
  misc_feature (50)..(428): Pfam Id: PF03663 Pfam Desc: Glycosyl hydrolase family 76
  misc_feature (79)..(428): NCBI GI: 256773449 Blast Desc: glycosyl hydrolase [Streptomyces hygroscopicus ATCC 53653]
  misc_feature (68)..(428): NCBI GI: 284044020 Blast Desc: glycoside hydrolase family 76 [Conexibacter woesei DSM 14684] gi|283948241|gb|ADB50985.1| glycoside hydrolase family 76 [Conexibacter woesei DSM 14684]
  misc_feature (76)..(428): NCBI GI: 116192165 Blast Desc: CHGG_05800 [Chaetomium globosum CBS 148.51] gi|88181713|gb|EAQ89181.1| CHGG_05800 [Chaetomium globosum CBS 148.51]
  misc_feature (49)..(428): NCBI GI: 85083916 Blast Desc: NCU00086 [Neurospora crassa OR74A] gi|28918298|gb|EAA27974.1| [Neurospora crassa OR74A]
  misc_feature (64)..(428): NCBI GI: 71023981 Blast Desc: UM06073.1 [Ustilago maydis 521] gi|46101663|gb|EAK86896.1| UM06073.1 [Ustilago maydis 521]
  misc_feature (68)..(426): NCBI GI: 115374487 Blast Desc: glycosyl hydrolase [Stigmatella aurantiaca DW4/3-1] gi|115368466|gb|EAU67420.1| glycosyl hydrolase [Stigmatella aurantiaca DW4/3-1]
  misc_feature (68)..(426): NCBI GI: 256679903 Blast Desc: glycosyl hydrolase [Streptomyces sp. SPB78]
  misc_feature (72)..(426): NCBI GI: 258650648 Blast Desc: glycoside hydrolase family 76 [Nakamurella multipartita DSM 44233] gi|258553873|gb|ACV76815.1| glycoside hydrolase family 76 [Nakamurella multipartita DSM 44233]
  misc_feature (68)..(426): NCBI GI: 284029634 Blast Desc: glycoside hydrolase family 76 [Kribbella flavida DSM 17836] gi|283808927|gb|ADB30766.1| glycoside hydrolase family 76 [Kribbella flavida DSM 17836]
  misc_feature (68)..(426): NCBI GI: 29827168 Blast Desc: glycosyl hydrolase [Streptomyces avermitilis MA-4680] gi|29604266|dbj|BAC68337.1| glycosyl hydrolase, secreted [Streptomyces avermitilis MA-4680]
  misc_feature (92)..(362): SWISSPROT Homolog: EC 3.2.1.101 Mannan endo-1,6-alpha-mannosidase
MKTAQGLSLALCVLAPLAAVANAAPTEVTQTEINIHNGSSTQNALDSLGEMDMLSDIDLQQEVTRPRRAELAIDALNTWYNQDSGLWEHAGAPWWMSAVCLRLLIDYTVKTGHDKYMAQARNTFDRARGPVWWWRQGGGDFRGDSTDDTGWWAMAMMSMVRVERSHASYFFDYIPKTWYQATGNTEYLEIAKKDEEYMYKYWGGTGTSCGAGLIWDIRREKYVNAISNSLYFELTITLHNSIPGDRDYLRRAMETWVFIQHSGMINKDWLLNDGMVEDPKRCEPNGGQVWSYNQGVILNALVGLAQALNDKRVLKNARNIADAVINSEYMSPNRVLNEPGCATVESCFPNGEIFKGIFMRALSNLNSALEDHPYDFYLAHNARWAYHRAREVKDGSFTDWYGFKWQGPFDKAGVGQQAAAANLLVANLY

SEQ ID NO: 3457 - DNA, 2979 bp, Muscodor strobelii
  misc_feature: SGI cDNA ID NO. 560812
  misc_feature: Reduced expression when VOC is produced
  misc_feature: Encodes the peptide sequence at SEQ ID NO 3458
atgtccaaatacaaggacaaggagagtggcgtgactctcttcatgttcaacgccaaatggatttcatggtcccataccgtccttgcatacactgcgttcctaggtgccctggccatgggcatgtacttgcattttcacaagatcgtccataatcagtactatggctatcctcaagagtggtttccctccgtttcagctaccattggcgattggtatcccgagagatctttcttcatgcttttcatagctttgacgtcagatctccttgttgacagtatgatgacaggtcctcggtttgcgcttgtgactctatggtatctactgactgctaaatccggcaagcgccttccgaaattcatcgccggagtgggtattttcagaacactcacctgcggaggttggacatatataacatcaaccgacgatcacgactggcatgacatcttcatgatctcatacctcgtggcaacaattccttggactataggatgcctgatcttgagctcacctaatgcaaaggcaatcagataccgcagacgcattgccactgctttcttcaccactatgcttcctatggtacacttctatatccaacataagatccaccgcgttcccggagcatacactgcttattcaattttcgagtggtctttgattctgtacgatgttgcatttgacgccgtcacagttctggattttcaagactgcgaaattgtagtcagaagtcacaatagctggcacagagagcaaaacggtccaacgacgtcgatagtcatacaggaaaaggaaccgaagcatgctatagctgaattggactctggaccattggccttttcggatatcatcgatgtggctgcaggtgtatatcagggattctgcttctggtctatgctgacgagtttgggtattgtgatttggtattttcctctttggcatatgggtatctctggatacgagatatttgtgatgtcgacaatctcgccactccttctgagcatccgctcttttcgatatgccgtcatgagaaatctgcgtctttgtcactttctttctctttcgggactcattgcttggaacgtcgtcgacccagcctataggctgttcactgtcagctttggcgtcttcatggcttgcctttcatgggccgcgactttctcactcgaatctgttcacgatctgcggctcgggtatagaatcatggcctgggcagttggattgatattgtcctctacgataaagttcgcatggcgaacaaacaacccaatttggcccatcctgaatggtcaaaacggcggacataatgcgctcggcctcatattggcactattttccacttggtggttcactcgaaatatccttgtgacgagcaggagggccattcgaatcaatagaatctccaacaggtcgtcgttctttgccgcactgggactgggcggtcttttcttcggcatgcactctctactttctgacacgagcaccatgatcctttgggtatgggacggacacccagtccgtggccccctgtctgtccctcacgggtggttcaccgtagtggccatgacatttggccttcttgccggcatatatcgacccagttcagtgagaaaatggggcaggtatggatctgcgtgtcttggagctgtagtactcatgttgaggaaacgctggagagcctattttggggctctgggcctcgcattctatctcatggcaatgtgtgtgccttttctaacggtcgcatcacgcggaaacccgagcattacgtttggaattgggttcttgatctacaatctcatggtccttttccatgtctgggtcgtggcttatgcctttgttcctggtgggccgctggtcagagagcacacagactggatcatgatcgtcatgatgctcctgattgggtttggcgttttcaatctgacatcaagaaaagcatctgtggcgcggctgccgcaaatcacaggaccagcaccagcacgctatggcaaatgttacaagtttgcactggtcggtattaacatcgtcttcttgatctcggcctatatgcgctttccattgaatgattttaagccctatcacgaagaagcaagagtcatgacagcgggcatctggactgtccacttctcgcttgacaatgatatgtggtcttcggagaatcgcatagccgagttgatgagagaactggaaatcgacgttatgggtctgcttgagtcagacttacaacgcatcatcatgggtaaccgagatacgacgcaagtaattgccgaggagcttgggatgtatgttgactatggtcccggtccgaacaagcacacgtggggtgcagcgctattatcgaaatttccgattctgaactcgactcatcatctccttccatcgcctacaggtgaacttgcgccggcaatccatgcgactctcgacgcctacggacaacttgtcgatgtctttgtattccactccggacaggaagaagatcctgaggatcgtcgacttcaatctgaatacctatccaaactcatgggttcctccgatcgtccgacgatactgctgtcctatctcgtcaccgatcctctcaaaggcaactacaacacttacgtgtcaaggacgtcaggaatgctcgatgtggaccctactgattgggatagatggtgcgagtacattctgtataaaaatttgaagagggttggatatgcccgagtctcgcgagggactgtgaccgacacagagctccaggttgcaaaatttgtcgttcccacgacggaggacgagaaggcacaggtgtcagccttagccggtgactctgatgcaagaaatgatagagttgaggaaattgaagtccctgacgagtggaagttccccgtcgagttcaaggggaagggaaggcgcggccactattaccacgtctttgatgagccacggtattacgcgaacaagcccaaccaaacttcatctgatgacgaggaggcaaatatggactag

SEQ ID NO: 3458 - protein, 992 aa, Muscodor strobelii
  misc_feature: SGI Peptide ID NO. 560812
  misc_feature (2)..(975): NCBI GI: 164425387 Blast Desc: NCU05895 [Neurospora crassa OR74A] gi|157070908|gb|EAA30650.2| NCU05895 [Neurospora crassa OR74A]
  misc_feature (2)..(975): NCBI GI: 256733021 Blast Desc: [Nectria haematococca mpVI 77-13-4]
  misc_feature (3)..(976): NCBI GI: 116206108 Blast Desc: CHGG_02347 [Chaetomium globosum CBS 148.51] gi|88182944|gb|EAQ90412.1| CHGG_02347 [Chaetomium globosum CBS 148.51]
  misc_feature (2)..(973): NCBI GI: 46123383 Blast Desc: FG06069.1 [Gibberella zeae PH-1]
  misc_feature (2)..(977): NCBI GI: 261354900 Blast Desc: calcofluor white hypersensitive protein [Verticillium albo-atrum VaMs.102]
  misc_feature (3)..(975): NCBI GI: 225560680 Blast Desc: calcofluor white hypersensitive protein [Ajellomyces capsulatus G186AR]
  misc_feature (47)..(975): NCBI GI: 145608108 Blast Desc: MGG_03376 [Magnaporthe grisea 70-15] gi|145015609|gb|EDK00099.1| MGG_03376 [Magnaporthe grisea 70-15]
  misc_feature (3)..(976): NCBI GI: 261206132 Blast Desc: calcofluor white hypersensitive protein [Ajellomyces dermatitidis SLH14081] gi|239592862|gb|EEQ75443.1| calcofluor white hypersensitive protein [Ajellomyces dermatitidis SLH14081]
  misc_feature (3)..(975): NCBI GI: 169767490 Blast Desc: [Aspergillus oryzae RIB40] gi|83766071|dbj|BAE56214.1| protein product [Aspergillus oryzae]
  misc_feature (3)..(976): NCBI GI: 156039475 Blast Desc: SS1G_11874 [Sclerotinia sclerotiorum 1980] gi|154697611|gb|EDN97349.1| SS1G_11874 [Sclerotinia sclerotiorum 1980]
  misc_feature: Useful for introducing or modulating the production of volatile compounds
MSKYKDKESGVTLFMFNAKWISWSHTVLAYTAFLGALAMGMYLHFHKIVHNQYYGYPQEWFPSVSATIGDWYPERSFFMLFIALTSDLLVDSMMTGPRFALVTLWYLLTAKSGKRLPKFIAGVGIFRTLTCGGWTYITSTDDHDWHDIFMISYLVATIPWTIGCLILSSPNAKAIRYRRRIATAFFTTMLPMVHFYIQHKIHRVPGAYTAYSIFEWSLILYDVAFDAVTVLDFQDCEIVVRSHNSWHREQNGPTTSIVIQEKEPKHAIAELDSGPLAFSDIIDVAAGVYQGFCFWSMLTSLGIVIWYFPLWHMGISGYEIFVMSTISPLLLSIRSFRYAVMRNLRLCHFLSLSGLIAWNVVDPAYRLFTVSFGVFMACLSWAATFSLESVHDLRLGYRIMAWAVGLILSSTIKFAWRTNNPIWPILNGQNGGHNALGLILALFSTWWFTRNILVTSRRAIRINRISNRSSFFAALGLGGLFFGMHSLLSDTSTMILWVWDGHPVRGPLSVPHGWFTVVAMTFGLLAGIYRPSSVRKWGRYGSACLGAVVLMLRKRWRAYFGALGLAFYLMAMCVPFLTVASRGNPSITFGIGFLIYNLMVLFHVWVVAYAFVPGGPLVREHTDWIMIVMMLLIGFGVFNLTSRKASVARLPQITGPAPARYGKCYKFALVGINIVFLISAYMRFPLNDFKPYHEEARVMTAGIWTVHFSLDNDMWSSENRIAELMRELEIDVMGLLESDLQRIIMGNRDTTQVIAEELGMYVDYGPGPNKHTWGAALLSKFPILNSTHHLLPSPTGELAPAIHATLDAYGQLVDVFVFHSGQEEDPEDRRLQSEYLSKLMGSSDRPTILLSYLVTDPLKGNYNTYVSRTSGMLDVDPTDWDRWCEYILYKNLKRVGYARVSRGTVTDTELQVAKFVVPTTEDEKAQVSALAGDSDARNDRVEEIEVPDEWKFPVEFKGKGRRGHYYHVFDEPRYYANKPNQTSSDDEEANMD

SEQ ID NO: 3459 - DNA, 1287 bp, Muscodor strobelii
  misc_feature: SGI EST ID NO. CUFF.8665.0
  misc_feature: Variant of the nucleotide sequence at SEQ ID NO 3457
ggaaggcgtaagcgagcagggtagctgccgtcatggatggtgcatgctgcaggagctacgggcagcaagtgcatggtcgtcccgagcatgcctacggaatagagtattagagatagagccatacttgtagtaatggcacacaagcattccgtgagtaaaggtgacgtgtggtggggaagcacacgcaactctgtgacgggaatctccaacaggctcacccgaacatgacaacagatgccggccgttcctgttgcagttctcattcaattttgtccttgccctatgctctccacgctggccgcgactcttgcactgctgaaacttaagttgccttggtgttggcaccattttttcaacgagtttgaacctgcatcacttttgacaacaccatcctcggctccacatgctaccgcatgatccgacaacatgtccaaatacaaggacaaggagagtggcgtgactctcttcatgttcaacgccaaatggatttcatggtcccataccgtccttgcatacagtcagtcctgttccttccgttgacagaaacttcatgttttgctctgcagttacaaggagtgcgaacattaacattgtcgccattggcatctagctgcgttcctaggtgccctggccatgggcatgtacttgcattttcacaagatcgtccataatcagtactatggctatcctcaagagtggtttccctccgtttcagctaccattggcgattggtatcccgagagatctttcttcatgcttttcatagctttgacgtcaggtaagttttcaagaacgcgaacaagagtcaatccgactagtcaacccaaaaacgacaatcttccacaaggacttaatcagcttcaactagatctccttgttgacagtatgatgacaggtcctcggtttgcgcttgtgactctatggtatctactgactgctaaatccggcaagcgccttccgaaattcatcgccggagtgggtattttcagaacactcacctgcggaggttggacatatataacatcaaccgacgatcacgactggcatgacatcttcatgatctcatacctcgtggcaacaattccttggactataggatgcctgatcttgagctcacctaatgcaaaggcaatcagataccgcagacgcattgccactgctttcttcaccactatgcttcctatggtacacttctatatccaacataagatccaccgcgttcccggagcatacactgcttattcaattttcgagtggtctttgattctgtacgatgttgcatttgac

SEQ ID NO: 3460 - DNA, 1191 bp, Muscodor strobelii
  misc_feature: SGI cDNA ID NO. 560813
  misc_feature: Reduced expression when VOC is produced
  misc_feature: Encodes the peptide sequence at SEQ ID NO 3461
atggcgggtgtcgcagaaaaggcgcgcttctacctggaacaagccgtcccccagctccgcgaattcgagaccaaaggcatcttcagccctgacgagatccgttccctcgtgaagaagcgaaccgactacgaacacctcgtcatagcccctggtaacaaacctcaagactggctgaactatgtcgcatgggaacgctccctcgagactcttcgcgccaagagatgtcgacgcttagagatcaagtcgtcgactagccacgccgggcagggaagagtgtttggtatccttgagagggccgtcaacagacatccagggaacatggagttgtggaaggcatatttgtcatacgcaaaggacataaaggcaaccaagagatatcgcaaggtcatgaccagggcactcaggatgcatccctcgaaggcagagctgtgggtgatggccggcaagcgatcagccaagaatggagatatgcaggcttcgaggggcttcttcatgcgcggtgctcgtttctgtgcgagggatgccacagtatggctcgagtacgcgcggtgcgaattggaatggcttgagaaaatggatgagcgcaagggcaagaagggaggcgccgagaaggccatcgcggaacaagccgagtacgaagaaggccaaatcaatatgtcagatgacgagagcgacgacgacgacggcaacggccgcacgattatacctaacaccgatatcctcgtactcaagaagactgtgaacgagacggccgcgaacgaaaagagcaatcctgcattagatggcgcaataccgctagccatttacgatatttgcaaaaagcaatcgttcttttcttcgtcgaccgcagagcaattcttcgatatatttgcagacttcagtcagatttccgcccaggccaagcttatacaacacgttctcgacagcatgaatgagctctaccctaatgacgctacatcgtgctattgttacatccgacaacccgtagtcggcctcgacactaatagcccagagtaccctaaagccctcagggagacccttggtcgcctaaaatccactcttccaaggactacaaaccagacactcctcgtcaaaaagataagaatatggctggagacaatactagcgcctgaagatcttgataccggtattcgtacagtactagaacatacacttcgcactctcccatag

SEQ ID NO: 3461 - protein, 396 aa, Muscodor strobelii
  misc_feature: SGI Peptide ID NO. 560813
  misc_feature (12)..(92): Pfam Id: PF08640 Pfam Desc: U3 small nucleolar RNA-associated protein 6
  misc_feature (1)..(395): NCBI GI: 46123385 Blast Desc: FG06070.1 [Gibberella zeae PH-1]
  misc_feature (1)..(395): NCBI GI: 256732577 Blast Desc: [Nectria haematococca mpVI 77-13-4]
  misc_feature (1)..(395): NCBI GI: 171678303 Blast Desc: protein product [Podospora anserina] gi|170937221|emb|CAP61878.1| protein product [Podospora anserina]
  misc_feature (1)..(395): NCBI GI: 85094411 Blast Desc: NCU05894 [Neurospora crassa OR74A] gi|28921341|gb|EAA30649.1| conserved [Neurospora crassa OR74A]
  misc_feature (1)..(395): NCBI GI: 154291469 Blast Desc: BC1G_15255 [Botryotinia fuckeliana B05.10] gi|150846753|gb|EDN21946.1| BC1G_15255 [Botryotinia fuckeliana B05.10]
  misc_feature (1)..(391): NCBI GI: 39942382 Blast Desc: MGG_03271 [Magnaporthe grisea 70-15] gi|145015728|gb|EDK00218.1| MGG_03271 [Magnaporthe grisea 70-15]
  misc_feature (27)..(395): NCBI GI: 116206110 Blast Desc: CHGG_02348 [Chaetomium globosum CBS 148.51] gi|88182945|gb|EAQ90413.1| CHGG_02348 [Chaetomium globosum CBS 148.51]
  misc_feature (1)..(312): NCBI GI: 156039473 Blast Desc: SS1G_11873 [Sclerotinia sclerotiorum 1980] gi|154697610|gb|EDN97348.1| SS1G_11873 [Sclerotinia sclerotiorum 1980]
  misc_feature (1)..(393): NCBI GI: 119195117 Blast Desc: CIMG_01933 [Coccidioides immitis RS]
  misc_feature (1)..(393): NCBI GI: 240105026 Blast Desc: CPC735_045890 [Coccidioides posadasii C735 delta SOWgp]
  misc_feature: Useful for introducing or modulating the production of volatile compounds
MAGVAEKARFYLEQAVPQLREFETKGIFSPDEIRSLVKKRTDYEHLVIAPGNKPQDWLNYVAWERSLETLRAKRCRRLEIKSSTSHAGQGRVFGILERAVNRHPGNMELWKAYLSYAKDIKATKRYRKVMTRALRMHPSKAELWVMAGKRSAKNGDMQASRGFFMRGARFCARDATVWLEYARCELEWLEKMDERKGKKGGAEKAIAEQAEYEEGQINMSDDESDDDDGNGRTIIPNTDILVLKKTVNETAANEKSNPALDGAIPLAIYDICKKQSFFSSSTAEQFFDIFADFSQISAQAKLIQHVLDSMNELYPNDATSCYCYIRQPVVGLDTNSPEYPKALRETLGRLKSTLPRTTNQTLLVKKIRIWLETILAPEDLDTGIRTVLEHTLRTLP

SEQ ID NO: 3462 - DNA, 819 bp, Muscodor strobelii
  misc_feature: SGI cDNA ID NO. 560814
  misc_feature: Encodes the peptide sequence at SEQ ID NO 3463
atgccgaaaagaaaagcacagctcgacccagagacagacaccccatcagagctccgacgatcgacgcgtcgcaaatccgaagctgtcgcgactgcgactgcgacaccgccaaaacccgaccctactccagcctcgaagccaaaacaaaagccaagagccaaaaaatctgataacaagatcgcatctagcccagtagacccaaaaccaaagccagagccagaggtagaagtgaagtctaagccagctcccaagagcaaaacaaatggcgctgcaaacatagcatcaagcgatggggaaacatggtactggctaatgaaagccgaacccgaaacgcgtctggagcgcggcatcgacgttcggttctctatcgatgatcttgcatcacggactgagcccgagccgtgggatggaatacgcaactacgtagcacgcaacaatctgcgtagtatgaagaaaggcgaactagcctttttctaccactccaactgcaaagaacccggcatcgtcggcacgatggaaatcgtgcagaaacattcgccagatctatctgcacatgatcccaacaccgcatactacgacccaaagtctaagcctgaggacccaaagtggagcgtagtgcatgtcaagttccgcagcaagttcgcgaactccattggtctccaggaattgaaggagttgggaaaaccgggacagccgctggagaatatgcagatgcttagacagagtcgtcttagcgttagtcgtgtgagtcccgctgagtgggagttcctcatggatctcgctcagaagcggggtggtgaggtatctgacgggtcttga

SEQ ID NO: 3463 - protein, 272 aa, Muscodor strobelii
  misc_feature: SGI Peptide ID NO. 560814
  misc_feature (101)..(260): Pfam Id: PF01878 Pfam Desc: Domain of function DUF55
  misc_feature (104)..(264): NCBI GI: 116206112 Blast Desc: CHGG_02349 [Chaetomium globosum CBS 148.51] gi|88182946|gb|EAQ90414.1| CHGG_02349 [Chaetomium globosum CBS 148.51]
  misc_feature (102)..(264): NCBI GI: 171678305 Blast Desc: protein product [Podospora anserina] gi|170937222|emb|CAP61879.1| protein product [Podospora anserina]
  misc_feature (79)..(261): NCBI GI: 240281730 Blast Desc: AT DNA binding protein [Ajellomyces capsulatus H143]
  misc_feature (3)..(261): NCBI GI: 261204097 Blast Desc: AT DNA binding protein [Ajellomyces dermatitidis SLH14081] gi|239587047|gb|EEQ69690.1| AT DNA binding protein [Ajellomyces dermatitidis SLH14081]
  misc_feature (97)..(265): NCBI GI: 46119295 Blast Desc: FG04762.1 [Gibberella zeae PH-1]
  misc_feature (6)..(261): NCBI GI: 255942699 Blast Desc: Pc18g02770 [Penicillium chrysogenum Wisconsin 54-1255] gi|211586851|emb|CAP94501.1| Pc18g02770 [Penicillium chrysogenum Wisconsin 54-1255]
  misc_feature (13)..(264): NCBI GI: 119180483 Blast Desc: CIMG_08870 [Coccidioides immitis RS]
  misc_feature (83)..(261): NCBI GI: 239608722 Blast Desc: AT DNA binding protein [Ajellomyces dermatitidis ER-3]
  misc_feature (19)..(264): NCBI GI: 240110352 Blast Desc: CPC735_063840 [Coccidioides posadasii C735 delta SOWgp]
  misc_feature (32)..(262): NCBI GI: 238491480 Blast Desc: AT DNA binding protein (Thy28), [Aspergillus flavus NRRL3357] gi|220697390|gb|EED53731.1| AT DNA binding protein (Thy28), [Aspergillus flavus NRRL3357]
MPKRKAQLDPETDTPSELRRSTRRKSEAVATATATPPKPDPTPASKPKQKPRAKKSDNKIASSPVDPKPKPEPEVEVKSKPAPKSKTNGAANIASSDGETWYWLMKAEPETRLERGIDVRFSIDDLASRTEPEPWDGIRNYVARNNLRSMKKGELAFFYHSNCKEPGIVGTMEIVQKHSPDLSAHDPNTAYYDPKSKPEDPKWSVVHVKFRSKFANSIGLQELKELGKPGQPLENMQMLRQSRLSVSRVSPAEWEFLMDLAQKRGGEVSDGS

SEQ ID NO: 3464 - DNA, 2557 bp, Muscodor strobelii
  misc_feature: SGI EST ID NO. CUFF.8877.0
  misc_feature: Variant of the nucleotide sequence at SEQ ID NO 3462
gggaggccccgcaagccacacctgcagataggtatcgatccccagcgtctcgggattgctggagctagctaaagtggtgctcccggcttcgactcacaccaataacatgagcagtcaatccatgatcacagttgtatttcgaatctctaatcacaaccaagaggagccaatacctcaagcttcacgattcgattcaacctctaagctatcaataaacgatcgcagacaaataagcaacaatgccgaaaagaaaagcacagctcgacccagagacagacaccccatcagagctccgacgatcgacgcgtcgcaaatccgaagctgtcgcgactgcgactgcgacaccgccaaaacccgaccctactccagcctcgaagccaaaacaaaagccaagagccaaaaaatctgataacaagatcgcatctagcccagtagacccaaaaccaaagccagagccagaggtagaagtgaagtctaagccagctcccaagagcaaaacaaatggcgctgcaaacatagcatcaagcgatggggaaacatggtactggctaatgaaagccgaacccgaaacgcgtctggagcgcggcatcgacgttcggttctctatcgatgatcttgcatcacggactgagcccgagccgtgggatggtatgtcattattctcctctcattccactattaacactgccgccttctgcgacctgatcttatgcttatatacatttccccataggaatacgcaactacgtagcacgcaacaatctgcgtagtatgaagaaaggcgaactagcctttttctaccactccaactgcaaagaacccggcatcgtcggcacgatggaaatcgtgcagaaacattcgccagatcgtaagctggtctcttcccccataccacctctcatctactaatcactcgtagtatctgcacatgatcccaacaccgcatactacgacccaaagtctaagcctgaggacccaaagtggagcgtagtgcatgtcaagttccgcagcaagttcgcgaactccattggtctccaggaattgaaggagttgggaaaaccgggacagccgctggagaatatgcagatgcttagacagagtcgtcttagcgttagtcgtgtgagtcccgctgagtgggagttcctcatggatctcgctcagaagcggggtggtgaggtatctgacgggtcttgatgatcctcgttctctttgtgggggtttgtatcatgatgatgggtatcgatatctgactatgggagagtgcgaagtgtatgttctagtactgtacgaataccggtatcaagatcttcaggcgctagtattgtctccagccatattcttatctttttgacgaggagtgtctggtttgtagtccttggaagagtggattttaggcgaccaagggtctccctgagggctttagggtactctgggctattagtgtcgaggccgactacgggttgtcggatgtaacaatagcacgatgtagcgtcattagggtagagctcattcatgctgtcgagaacgtgttgtataagcttggcctgggcggaaatctgactgaagtctgcaaatatatcgaagaattgctctgcggtcgacgaagaaaagaacgattgctttttgcaaatatcgtaaatggctagcggtattgcgccatctaatgcaggattgctcttttcgttcgcggccgtctcgttcacagtcttcttgagtacgaggatatcggtgttaggtataatcgtgcggccgttgccgtcgtcgtcgtcgctctcgtcatctgacatattgatttggccttcttcgtactcggcttgttccgcgatggccttctcggcgcctcccttcttgcccttgcgctcatccattttctcaagccattccaattcgcaccgcgcgtactcgagccatactgtggcatccctcgcacagaaacgagcaccgcgcatgaagaagcccctcgaagcctgcatatctccattcttggctgatcgcttgccggccatcacccacagctctgccttcgagggatgcatcctgagtgccctggtcatgaccttgcgatatctcttggttgcctttatgtcctttgcgtatgacaaatatgccttccacaactccatgttccctggatgtctgttgacggccctctcaaggataccaaacactcttccctgcccggcgtggctagtcgacgacttgatctctaagcgtcgacatctcttggcgcgaagagtctcgagggagcgttcccatgcgacatagttcagccagtcttgaggtttgttaccaggggctatgacgaggtgttcgtagtcggttcgcttcttcacgagggaacggatctcgtcagggctgaagatgcctttggtctcgaattcgcggagctgggggacggcttgttccaggtagaagcgcgccttttctgcgacacccgccatggttggtgcttagaggggtgcgcccctgggagtgtgatgttatttgctaggtgcagtgatgttctgaagagcaattggacatagctccagtgtcgcgtttctcatatacaagactg

SEQ ID NO: 3465 - DNA, 882 bp, Muscodor strobelii
  misc_feature: SGI cDNA ID NO. 560815
  misc_feature: Encodes the peptide sequence at SEQ ID NO 3466
atgatccggcaaattctactcttttcgctatggctctctgtctctgccgcggccgttgtcagccatattactcgtgataccacgcccctctttgttaccgccttcgattatcccgggccgggtggtccatgcaaaaacgagtttgcctacacgaacttccactatttcgacaagccattccaccggatgcaggtagactcgcttcacgaggcgttctgcaagggcttcggaccactcgtaggctacggctacgaggcgatcgagacctcggatcgcaccctgttttcgcggtactttactgatgacgaagacgacaggaccgatgtggcgggggcgttcagtgtgctaatcgacgtgaaggacggttacgggccttcgaaagttacctggggaatgataatagacaagaatgactttatgaagaagtgccaaaatcgaatcgcgggttataacgacgtggatcccgtgactaagttcgaaaagatacacatctgcgatgtctcctttgagcaacccactcttccctcagatattgagtgcaaagatctgaacgataagccggacatagagatggataatctcgctcgcataattctgcatgagatgttgcataatagccaagtgcaaactcacggacctggacatcgggtcatcgatgcaaagaacaacgacaaggaggtggcatactaccctcagcgcgcacatgcgcttgtaagagagaaccctgggctttgcgctataaacgctgatagctatgcttggcttgcgaacaatgcatatttcaaattcgcgtgcaccaacgctgggcagactcctccgaataacggcaacttctatgatccagacaactacactccgggaattgaggaaacgagtggataa

SEQ ID NO: 3466 - protein, 293 aa, Muscodor strobelii
  misc_feature: SGI Peptide ID NO. 560815
  misc_feature (2)..(272): NCBI GI: 46112791 Blast Desc: FG02897.1 [Gibberella zeae PH-1]
MIRQILLFSLWLSVSAAAVVSHITRDTTPLFVTAFDYPGPGGPCKNEFAYTNFHYFDKPFHRMQVDSLHEAFCKGFGPLVGYGYEAIETSDRTLFSRYFTDDEDDRTDVAGAFSVLIDVKDGYGPSKVTWGMIIDKNDFMKKCQNRIAGYNDVDPVTKFEKIHICDVSFEQPTLPSDIECKDLNDKPDIEMDNLARIILHEMLHNSQVQTHGPGHRVIDAKNNDKEVAYYPQRAHALVRENPGLCAINADSYAWLANNAYFKFACTNAGQTPPNNGNFYDPDNYTPGIEETSG

SEQ ID NO: 3467 - DNA, 1994 bp, Muscodor strobelii
  misc_feature: SGI EST ID NO. CUFF.8902.1
  misc_feature: Variant of the nucleotide sequence at SEQ ID NO 3465
gctcctcacactgctctactcttcctcatggcacttgcgcaaagaacttcgtgggtggggcatacggaataggtggatccactatatgcctaggcgacgatacgagtagcgtccctgaatgtcccatcgcgatgaccattccaggaacatggcgcacgccaccaagtgatacgatcctcgcccagaaaccactggcattttcttatgtctatactctcaacctcgctgtgtacttcgaatcgagacgcttgggagatgataataatgtaccatcatcacaccccttgacgggaattggccacgtaagaaggcgacgtcgagctggagctacaaagtcgactgatgccttgatttgttacgcggcgttacacaacacggccaaatgcgatcggctcggatgacccttgtttggctccttaggtcatgatgagtcgagtgatactgagaaaaatgtcaacttccggcattctgcatcaatcgatcatcgttctctgcttatttctgctatcgctgacagaccgaaggcaacgaggaaaaattccaaagagacaagattgcgcttgaacgatcttcgtcattaataacgcagtgttcatcactcacaacttccacaatcataagagtgtgagttagtcactcatgcctattatcttatttcgctttcccttccacttcactgatcgaggataaggcggatcaagatggcacccagctattgttctattcaatttctatgggatgtttggatggcactatattgcgataccattcacgaagaatttgttatcgctgatatactttctacattaaccgtagagatgtgagcccgcttgaaaattcattaaagccaatcccctgatatgaagccgaagagttagtagaacatgctgatatcgttcgactctgagcgcaccaccgagatcgctagaaaaagaaccagttacgtcattcgcgatttctcagacttcatacttggtctactgaaatgatccggcaaattctactcttttcgctatggctctctgtctctgccgcggccgttgtcagccatattactcgtgataccacgcccctctttgttaccgccttcgattatcccgggccgggtggtccatgcaaaaacgagtttgcctacacgaacttccactatttcgacaagccattccaccggatgcaggtagactcgcttcacgaggcgttctgcaagggcttcggaccactcgtaggctacggctacgaggcgatcgagacctcggatcgcaccctgttttcgcggtactttactgatgacgaagacgacaggaccgatgtggcgggggcgttcagtgtgctaatcgacgtgaaggacggttacgggccttcgaaagttacctggggaatgataatagacaagaatgactttatgaagaagtgccaaaatcgaatcgcgggttataacgacgtggatcccgtgactaagttcgaaaagatacacatctgcgatgtctcctttgagcaacccactcttccctcagatattgagtgcaaagatctgaacgataagccggacatagagatggataatctcgctcgcataattctgcatgagatgttgcataatagccaagtgcaaactcacggacctggacatcgggtcatcgatgcaaagaacaacgacaaggaggtggcatactaccctcagcgcgcacatgcgcttgtaagagagaaccctgggctttgcgctataaacgctgatagctatgcttggcttgcgaacaatgcatatttcaaattcgcgtgcaccaacgctgggcagactcctccgaataacggcaacttctatgatccagacaactacactccgggaattgaggaaacgagtggataatgaggttggccttgtcccgtggacgggagttctggtatggagaatagggccgatagcttaagatctcgacaataggtcatgctttaagagcgtcaataattcgtaattatgatgcattaccaaaagg

SEQ ID NO: 3468 - DNA, 3180 bp, Muscodor strobelii
  misc_feature: SGI cDNA ID NO. 560816
  misc_feature: Encodes the peptide sequence at SEQ ID NO 3469
atgagctcctggatgaacaacccagccgtcgccaaccatgccggcaatggcttcccgcatatgggagaccctaatggcatggcaggcggcggcatgatggacccctctgccttcatgggcaacccagcccagttcgacccgaacaacggtggtcaacagtacgcgaacccgcagcagatggccgccatgcagaacggccagatgcgcaatccctctccctccttctcgaatcctgtatatcagaccaactctgtcatcccatcaaaacgcccgcgcccgagggaagacagcatcggcgcatcgccgcgacagaaccccggcatgctgcccgcgtcgcgtgctgacacgccccagcagtcgcaattccctggcttccaacccaacatgcagcctcagaatccaggacaacctcagcattactcccatctacagcccaacggctctgcaacagcatcgccatcgccagtcatggcgggcaaccaactgcgtcctgggagcgtgccaacgcgggttaataccgcatcgccacatcccttctctccagcgtcgcaacagttcggacagcaaaactcgcctgttccctctgaacacagcagcacgccgcaacccggcatgtatatgaacaaccagggatttccacaaggctacaaccccaactatggtgcttccccctccccagcccggcctccctctgctcagaatccaatgacaccacaaatgatgccacagatgatggggcagatgcctccgcaaatgcatccgcaaatgtataatcagcagatgcaacagatgcagcaacagatggccatgcagggtcgcggtgggatggatcccaagatgatgtatcagatgcagatgcagcagcgttatggacaaggcaatatgcccatggcggcacaaatgcaggctcagaacatggctcagggtcgcggaatgatgcctaaacagggcatgcctgtgcagaatggccaaatgcctcccaataacatgcgacctcagcaaccggcacaagtaccgcgtggcaaccccgatgtgttcctaaagaacttgactgcgttcatgaatctcaagcagatgccgttggacctgcaaccagtggtggaaggtcggccgatgaatctctttcagctctttcagatcgttacgaagttcaacggctttcgaaacgtgtgtagccaaaacctatggcaacaagttgctggctctgtgggcttcccgccacaacagattccctcggccgcgatgcagctaaaggttgtctatgaacggaatcttgccaaatttgaagaggcatgggcacagtcgcaacggcaacacatgaagcaacaaagcacaggcaacgcgcagatgcctcagcatcagggccaaggaaccccccaaggcccaagaatgggtcaaatgtccccagttcatcacatgccctctgcgcaaccccaaccgcaacctcccagtacgccaaacaccaccaagcccatgacgccgggaatgccacaaggaggcatgaatggcgtcgcaacccctcaacaccagatgtcccagcagccaaacgcaggtcaagggcctctgaggaatagcatgccacgaagtgttgatgcgacgcctgtcagtgcagagtttccaatgcagtcgccaggcccaatgaccaaggcaggtagtctcagcgtccaccagcctcaaccagttgatgctactagaatcaacggcaccactgcccaaccgcttccggggcccttggctgtcgacaacgacatttactcgcctctgtcgcgtgcgatcgtctccgatactggcggtacctatggtggtctagaaatagatgctatcgagcacttgggccatgaactcagccgtgtcagaccagacatgccagggccgatggatcttggcaatatcgacatacatgctctgacaagaagccttcagagcggtatacacggagaggtcagactggcactcgatgtattggccgccgtgactcgctatgccgatgggtttcagggtctcgtcattgatctacggcattgtgacgatttggtagagtctttgctggactgtgcagaggatcaggtcgatattctagtcgatcaagctattcccaactcggatgaaatcgacttgacaccatatgaagatgtattaagggtcgcacgagccgaacaatttcaccttcgaaaagtacctattttcggcgattcaaactacgagctcgagagagcagcggatagactccttgccgtgacaaccatattgcgcaatctctctttcccagaacacaaccaccctgtgcttgcggacgaggtcgtcatcaagtcactgtgcacgcttatccggtctctcggtacccatgacaacctcatggtgaccgctcaaaatacccttgatctgatgaaagatctcatcgtactcctttctaacattgccgccgccactgagatacctggtcgagaacaagcattcagcctacttcagttcattctgtccttcgcgccatccagccccaattgtacaacatctgacagacttgtgatcacgccattcgatccttctactcacaaatacctccctcatgcactggatgctcttgccaaactcctcgcacgcgacgagcctaaccgtacccattataaaacgatcgtcgccgccgatgccctcgcttctactccttacgaactcctcactcggactttcgctttcgccgtatctcctattccaaaccagacccacgatagtcgtcccgggaatctacctccgctcatagaggctcgtaagccattgcttatgcagggcctgctcgccgccgacatcgtcgcacaactcgcaccgggttttgaatcgggagttacacgcgcctggctttcctcgggcgagggatttgctcaaaatcttctcaagctggtgaatcgactctgtcagcatgcggagcagccaatgcctcgtcccggcggcaatgcgagagctcagcatcgcgaagaccccgatgtcctatacattgtgtcttgtgctatttccaccctgcggcggctgacagagaaggctcgtgacccaaacgatccgtcgagtatacccccgaatgcaataccctcacgggcaagtctattagagagtttaaccaacctcaaaaacccaaagtgggctctactcttgaaccagatgagtgcctatgttggtcttgaaaattaa

SEQ ID NO: 3469 - protein, 1059 aa, Muscodor strobelii
  misc_feature: SGI Peptide ID NO. 560816
  misc_feature (339)..(448): Pfam Id: PF01388 Pfam Desc: ARID/BRIGHT DNA binding domain
  misc_feature (346)..(430): Pfam Id: PF01388 Pfam Desc: ARID/BRIGHT DNA binding domain
  misc_feature (1)..(1057): NCBI GI: 46123387 Blast Desc: FG06071.1 [Gibberella zeae PH-1]
  misc_feature (1)..(1057): NCBI GI: 156039443 Blast Desc: SS1G_11858 [Sclerotinia sclerotiorum 1980] gi|154697595|gb|EDN97333.1| SS1G_11858 [Sclerotinia sclerotiorum 1980]
  misc_feature (1)..(957): NCBI GI: 154294363 Blast Desc: BC1G_13954 [Botryotinia fuckeliana B05.10] gi|150844793|gb|EDN19986.1| BC1G_13954 [Botryotinia fuckeliana B05.10]
  misc_feature (340)..(1012): NCBI GI: 85094399 Blast Desc: NCU05891 [Neurospora crassa OR74A] gi|28921338|gb|EAA30646.1| conserved [Neurospora crassa OR74A]
  misc_feature (304)..(1057): NCBI GI: 171678307 Blast Desc: protein product [Podospora anserina] gi|170937223|emb|CAP61880.1| protein product [Podospora anserina]
  misc_feature (490)..(1057): NCBI GI: 256732578 Blast Desc: NECHADRAFT_60026 [Nectria haematococca mpVI 77-13-4]
  misc_feature (1)..(1057): NCBI GI: 212526762 Blast Desc: ARID/BRIGHT domain protein (SWI1), [Penicillium marneffei ATCC 18224] gi|210072936|gb|EEA27023.1| ARID/BRIGHT domain protein (SWI1), [Penicillium marneffei ATCC 18224]
  misc_feature (1)..(1057): NCBI GI: 240108247 Blast Desc: ARID/BRIGHT DNA binding domain containing protein [Coccidioides posadasii C735 delta SOWgp]
  misc_feature (25)..(1036): NCBI GI: 115396424 Blast Desc: conserved [Aspergillus terreus NIH2624] gi|114193420|gb|EAU35120.1| conserved [Aspergillus terreus NIH2624]
  misc_feature (1)..(1036): NCBI GI: 259486158 Blast Desc: TPA: ARID/BRIGHT domain protein (SWI1), (AFU_orthologue; AFUA_3G11380) [Aspergillus nidulans FGSC A4]
MSSWMNNPAVANHAGNGFPHMGDPNGMAGGGMMDPSAFMGNPAQFDPNNGGQQYANPQQMAAMQNGQMRNPSPSFSNPVYQTNSVIPSKRPRPREDSIGASPRQNPGMLPASRADTPQQSQFPGFQPNMQPQNPGQPQHYSHLQPNGSATASPSPVMAGNQLRPGSVPTRVNTASPHPFSPASQQFGQQNSPVPSEHSSTPQPGMYMNNQGFPQGYNPNYGASPSPARPPSAQNPMTPQMMPQMMGQMPPQMHPQMYNQQMQQMQQQMAMQGRGGMDPKMMYQMQMQQRYGQGNMPMAAQMQAQNMAQGRGMMPKQGMPVQNGQMPPNNMRPQQPAQVPRGNPDVFLKNLTAFMNLKQMPLDLQPVVEGRPMNLFQLFQIVTKFNGFRNVCSQNLWQQVAGSVGFPPQQIPSAAMQLKVVYERNLAKFEEAWAQSQRQHMKQQSTGNAQMPQHQGQGTPQGPRMGQMSPVHHMPSAQPQPQPPSTPNTTKPMTPGMPQGGMNGVATPQHQMSQQPNAGQGPLRNSMPRSVDATPVSAEFPMQSPGPMTKAGSLSVHQPQPVDATRINGTTAQPLPGPLAVDNDIYSPLSRAIVSDTGGTYGGLEIDAIEHLGHELSRVRPDMPGPMDLGNIDIHALTRSLQSGIHGEVRLALDVLAAVTRYADGFQGLVIDLRHCDDLVESLLDCAEDQVDILVDQAIPNSDEIDLTPYEDVLRVARAEQFHLRKVPIFGDSNYELERAADRLLAVTTILRNLSFPEHNHPVLADEVVIKSLCTLIRSLGTHDNLMVTAQNTLDLMKDLIVLLSNIAAATEIPGREQAFSLLQFILSFAPSSPNCTTSDRLVITPFDPSTHKYLPHALDALAKLLARDEPNRTHYKTIVAADALASTPYELLTRTFAFAVSPIPNQTHDSRPGNLPPLIEARKPLLMQGLLAADIVAQLAPGFESGVTRAWLSSGEGFAQNLLKLVNRLCQHAEQPMPRPGGNARAQHREDPDVLYIVSCAISTLRRLTEKARDPNDPSSIPPNAIPSRASLLESLTNLKNPKWALLLNQMSAYVGLEN

SEQ ID NO: 3470 - DNA, 7565 bp, Muscodor strobelii
  misc_feature: SGI EST ID NO. CUFF.9332.0
  misc_feature: Variant of the nucleotide sequence at SEQ ID NO 3468
tgttcgcgaaatgattaaggcgagatacgtatgagcgaatcaagatgcgataaagggtggagggatgaaacgacgtttgagtgacttggttacctcttctctcgtgccactgagacttcagttttgactccttctggaaccagttacctgcatgtccaggacgcagagcaatcatctcggctcagcaaaatataaatgaagtgactgcagtacttggtatcatgtgagcattcagctatgctttcaatctcgattactcggccatttcgtggctggcgactggctaggtagttagcaggcgagcgcgaggattaagtcagtcctacagggggtgggtggataagatttggagcgagaaggggaagtaaactctgtgcgatcgtagccgtgggagataggtgagaagggcataaattcgccaacagaatgaaatggacaattcttggacgaaagcagaatctgaaaactgccattccagttgggcaatcaggtttgggaatggaaagcccccctccatccacccgtcactgtgcccaagcgtttagagcgaaacagccatatccacttgacggaacggcagcacgagatgacttcagatcgacgaaggagcagatgccaccacgcaacccaaatctcctggactagctctggcagttctgcttcaccgctaacgatctcgcatgtctggtcatcacgcaggatacgtcaaatgagcttttgtattgtctgggatgccggtactacggcactaaaacataggcgagaaaccctgcgagtggccatgatgattaaaaacgtcttcggaatgttctgtgcgtatccttgtattcccaacattgtggacgagccagccatgcgccttctccctctacaacgtctcaaaatcagcgggcttgttcgggagcctggcaatgcatttgcacatcgatccaggcaagcaaagtacgggagaacgaaagacatgacagattagctcttaggcggcagggtgggagcaaggtagtaggtaataataagaatggcgtggcatctaccgattttccgcctcttacacttcgctcaatattccctctctttccccctcctgtcaatcgtctttcgccggcctaataatacggcctgctgcttgtacctctccattcttgataccttatttactgccgacatatctaacccaccatcccccccttgtaatcgtgctttacttccctccatcctccgtttgaaatatttgttcttgccctcccacttcccattttcactctggcccgtcatttccttttccatctccttctttattggtggtggtgctcaaatgatactgtttatctttggaatctctatcccacgtcgacctcccattttggctcccatgcagtattccaaaagcatcattcgtccccaccaggcacttttacctgaggaaatcgaaacctcggctcaattcgaaatgtggtatgatgttgaatgacggaacacgttttcaacttgaaaactcttcaaatcatcaaagagttcgattgaactggcaaatgaggagacgattgaaacacagcacgtgttgacaagcggccaacgtcacgcatggaggtaccaagcagacaaatgattctccaactaggatgccagagaagagaatgcaagggtcggcccaccgccgccgccgtggtccccgacacatccctgatctctcgagtatcgcgcgaatgtcatttaccatgaaatcagcgcaatcgccaatctggatgttctctcgagcaaatcgctgggaaaatcgacatagccctaacatttagattttatccaggacgaagtctattttgcaatcatattggctaccgaattgtctgaaccttctcgccttagcggaaagttccttgattggcgagaagacggtgctttgcctggactcacggcacgactcgcctcccgcgggccagaatcaatgttccaagatgacgagattatttgctctatcttgtgacacgataacttgagggtactgtacctcgacgagttgaatctttgccgacatcagaatacacagtctttgaatagcagaagattcaccagctcgtcaaagtcgccaaaacttgacggaggatggccagatatggcaagtacttggttgtgcgcttgctatccatcgtgaacacaggaattgtcaccaattcgcttggtgactgcaacagggacaatagcgtccgcagtcgtggatcatccgccgcgatcccattggctgaatctgtggatgacacaacatgagcctctcgattgcactcgtcagatgcccttcctaccaacagtactatgtcagcatcgacacgtcggcaatcagcatttgatctatcaccttgctcttttgggcactgcggtagctgaaattgaactgattgctgacaagtgtgtctgcctttgtaccgggaacacgagagtatcgggtcctgtcagatgacagagatgcattgtcttgctgttcggcgagattcattctgtagagattgcaacattggacgaacccggcgtattacaattcatcctccaaaccaatcaaagactatggattaattctgtcatcaatctcgatgaattttggtatgcaccaaaattaccaatattcctgcacttggctaggagctagttagagaccactagtgcatcaccgtcagatgaggtctctccaagatccctaatgacgcctcatatacacatggtcctgacgatcgatctgtgatggatgaggcgggtggttgccttcagagctcacgttcatttgaatcttgagctattcaatcggacgttgtcgaaccagctttctcaggaaaaacacgttcgatttaggatcctaatgcgatggtcattcactgccgtcggacagaagcgaggcgcaaagagatagagggacatccatttccctacttccttgcaagtggacgaatcccagaccgcctgaagagtgttctcctagagcaaatattggaagcataacacttgctaccccttcttcaccgatatcacatgctcataaacctgccaatgtcggcaattatacgacgagattaattctctatgagtatcgacctttatgagacgaatcgggcgttcataaaattacctatatgaggaaagaagaggtatgttcgttgctctccgtgcattctcttttgccattggacgggactgtaattcagatcgtaagtgcagtgtcgcaatgacgctaccaagtttctctttctctggctttccatctaaggccacatcggatctccaatacctggtgtgactggtctcttatcgtcacttgaattcgtgcagcccagtcattttgaaggtatttcaggcgctggcactgctgccacctgccaaagaattagagtctgcaccagccacgtctcaggtctgatgagtggtgtccctcgattgatccactcgttatctaaggtggggcttatgcagccattctgtccaatcgatcacgtctcgtttcacaaggtttagaaggtttgcgttctggctttctcggaccgttcttgccctgctttcctccaatcaatcgttgttaccagtccgatcaaggattggtctccattcgcgtgaatcaaggtggcgcccctttttccgtccttttccgcctctaacatctcctgctacgctggaaactggtcgcaacccgttggcagtacaagcccacctgccaagccactcaaagctccaatcagtcaaagcccagaggccagcagaaaatcttgtctggtctcgcatcccaggcagtcaggagagcagtttgctcgcatttgcccaccttccgttccccttctctgcttagccggacagccaaccaagcagtcccaacccaagcacaagccagcagccagccagccagcacctgggcaggcacgcacaccgtgtttccgtgttccgtgacttctggccagaagagggaagctcagagaagcgggcaagagagtttcccacgcgcctgatcgcttgctttgctcctcctgcctaccgtccacgacctaccaccaccattcccacctgcaacccgacggcaaacaactcaaacgcgcatgttagatgggttcccgttcgccagtccgcccgtcatgagctcctggatgaacaacccagccgtcgccaaccatgccggcaatggcttcccgcatatgggagaccctaatggcatggcaggcggcggcatgatggacccctctgccttcatgggcaacccagcccagttcgacccgaacaacggtggtcaacagtacgcgaacccgcagcagatggccgccatgcagaacggccagatgcgcaatccctctccctccttctcgaatcctgtatatcagaccaactctgtcatcccatcaaaacgcccgcgcccgagggaagacagcatcggcgcatcgccgcgacagaaccccggcatgctgcccgcgtcgcgtgctgacacgccccagcagtcgcaattccctggcttccaacccaacatgcagcctcagaatccaggacaacctcagcattactcccatctacagcccaacggctctgcaacagcatcgccatcgccagtcatggcgggcaaccaactgcgtcctgggagcgtgccaacgcgggttaataccgcatcgccacatcccttctctccagcgtcgcaacagttcggacagcaaaactcgcctgttccctctgaacacagcagcacgccgcaacccggcatgtatatgaacaaccagggatttccacaaggctacaaccccaactatggtgcttccccctccccagcccggcctccctctgctcagaatccaatgacaccacaaatgatgccacagatgatggggcagatgcctccgcaaatgcatccgcaaatgtataatcagcagatgcaacagatgcagcaacagatggccatgcagggtcgcggtgggatggatcccaagatgatgtatcagatgcagatgcagcagcgttatggacaaggcaatatgcccatggcggcacaaatgcaggctcagaacatggctcagggtcgcggaatgatgcctaaacagggcatgcctgtgcagaatggccaaatgcctcccaataacatgcgacctcagcaaccggcacaagtaccgcgtggcaaccccgatgtgttcctaaagaacttgactgcgttcatgaatctcaagcagatgccgttggacctgcaaccagtggtggaaggtcggccgatgaatctctttcagctctttcagatcgttacgaagttcaacggctttcgaaacgtgtgtagccaaaacctatggcaacaagttgctggctctgtgggcttcccgccacaacagattccctcggccgcgatgcagctaaaggttgtctatgaacggaatcttgccaaatttgaagaggcatgggcacagtcgcaacggcaacacatgaagcaacaaagcacaggcaacgcgcagatgcctcagcatcagggccaaggaaccccccaaggcccaagaatgggtcaaatgtccccagttcatcacatgccctctgcgcaaccccaaccgcaacctcccagtacgccaaacaccaccaagcccatgacgccgggaatgccacaaggaggcatgaatggcgtcgcaacccctcaacaccagatgtcccagcagccaaacgcaggtcaagggcctctgaggaatagcatgccacgaagtgttgatgcgacgcctgtcagtgcagagtttccaatgcagtcgccaggcccaatgaccaaggcaggtagtctcagcgtccaccagcctcaaccagttgatgctactagaatcaacggcaccactgcccaaccgcttccggggcccttggctgtcgacaacgacatttactcgcctctgtcgcgtgcgatcgtctccgatactggcggtacctatggtggtctagaaatagatgctatcgagcacttgggccatgaactcagccgtgtcagaccagacatgccagggccgatggatcttggcaatatcgacatacatgctctgacaagaagccttcagagcggtatacacggagaggtcagactggcactcgatgtattggccgccgtgactcgctatgccgatgggtttcagggtctcgtcattgatctacggcattgtgacgatttggtagagtctttgctggactgtgcagaggatcaggtcgatattctagtcgatcaagctattcccaactcggatgaaatcgacttgacaccatatgaagatgtattaagggtcgcacgagccgaacaatttcaccttcgaaaagtacctattttcggcgattcaaactacgagctcgagagagcagcggatagactccttgccgtgacaaccatattgcgcaatctctctttcccagaacacaaccaccctgtgcttgcggacgaggtcgtcatcaagtcactgtgcacgcttatccggtctctcggtacccatgacaacctcatggtgaccgctcaaaatacccttgatctgatgaaagatctcatcgtactcctttctaacattgccgccgccactgagatacctggtcgagaacaagcattcagcctacttcagttcattctgtccttcgcgccatccagccccaattgtacaacatctgacagacttgtgatcacgccattcgatccttctactcacaaatacctccctcatgcactggatgctcttgccaaactcctcgcacgcgacgagcctaaccgtacccattataaaacgatcgtcgccgccgatgccctcgcttctactccttacgaactcctcactcggactttcgctttcgccgtatctcctattccaaaccagacccacgatagtcgtcccgggaatctacctccgctcatagaggctcgtaagccattgcttatgcagggcctgctcgccgccgacatcgtcgcacaactcgcaccgggttttgaatcgggagttacacgcgcctggctttcctcgggcgagggatttgctcaaaatcttctcaagctggtgaatcgactctgtcagcatgcggagcagccaatgcctcgtcccggcggcaatgcgagagctcagcatcgcgaagaccccgatgtcctatacattgtgtcttgtgctatttccaccctgcggcggctgacagagaaggctcgtgacccaaacgatccgtcgagtatacccccgaatgcaataccctcacgggcaagtctattagagagtttaaccaacctcaaaaacccaaagtgggctctactcttgaaccagatgagtgcctatgttggtcttgaaaattaacgagcacacgcgtgtcacaaatcaagtcggaagcgaggcgtttgggtatcactatgtctaaattttgatttttatcgtagaaggcggccatgtatcgcaccagtgtacaaaggatcccacatactatgcatagctttgcattggaaatgtagattatgaatgaggaacccaagaagcagcgcatatcaacttgattagttatcatggttaatatgaatccatcttattcctaatactaggaattagcatatatttacagacgagtttacaatgcttgat

SEQ ID NO: 3471 - DNA, 1326 bp, Muscodor strobelii
  misc_feature: SGI cDNA ID NO. 560817
  misc_feature: Elevated expression when VOC is produced
  misc_feature: Encodes the peptide sequence at SEQ ID NO 3472
atggattttgaagagcttccgttccagcaaatacgtgtcgaccctgtcaagcaatgggcggatacctcgatcatcgtgctcattgccataatatgcgttctcctgttttatgttgcaggaaccatcgtttatcgcgtattctttcatcctctgtctaaatttcccggaccgaagcttctggctataacggacatcactagtgattggcgaagctacgttcggggcacatggatccacgaggttcaagatttgcaccggaaatacgggccagtcgttcggatcggtgcgaaccatctcgcgcttgatggtagcgttggctggccggctctcacgcatcgtacggggaaaccggagttcgggaaacagcctggcttctacttcggcctaccggatctgagtatactcggcgcggagaatgatatgcatcgacgacagcgtcgccagctgtcgcatgcgttcagcgattcagctctgaacgagcagggcgatcttatactgaagtatgtcgacttactcgtacagcagctgggaatcagggcacagaggagcgagatggtgaatatcacggattggatgaatttcacgacgtttgacatcatcggggatctcgctgttagcaccccctttaagtgtttggaagctggtgattatcacccttgggtgacgaactttttcgctagtatagagggtgtcacggtgtctaggttcgtgcgatactatcctttccttagacccctcgttgctcttgtcaagagtcgcggggatccgggaatggatcttagacagatacagatgaccatgggcataacgcgggggagaatggcgctgggtgtacagaaagaaggaaagaaggacttcatgacgtacatgctgaagtcgaaccgtgatggagaggatggtatgccggatatggagatcttgactaatgcgccggtgttgatggcggcggggagtgagactactgctacggcgcttgcgggattcttctactttcttgggactacgcctagggcttattggaggcttgttgatgagatccgatctgcgtttcggagcgagggggagatcacgttgagagagattgcgaagttggaatacctgcaagcatgtcttgaggagagcctaagactctacccacctgtagccgagacaccgcctcgcatctcaccgggcgctgaggtagacggaaaatgggtaccgcaagggacaataatctcaatccatcaatatgcaatattgaacacggtacgagaaccgatgttaactcattgtggcggtgtggcggtcctgccccgctttttagccgtcgggcttccgttttactaa

SEQ ID NO: 3472 - protein, 441 aa, Muscodor strobelii
  misc_feature: SGI Peptide ID NO. 560817
  misc_feature (50)..(438): Pfam Id: PF00067 Pfam Desc: Cytochrome P450
  misc_feature (139)..(414): Pfam Id: PF00067 Pfam Desc: Cytochrome P450
  misc_feature (21)..(415): NCBI GI: 46109716 Blast Desc: FG01740.1 [Gibberella zeae PH-1]
  misc_feature (31)..(415): NCBI GI: 189211941 Blast Desc: cytochrome P450 3A17 [Pyrenophora tritici-repentis Pt-1C-BFP] gi|187979497|gb|EDU46123.1| cytochrome P450 3A17 [Pyrenophora tritici-repentis Pt-1C-BFP]
  misc_feature (39)..(411): NCBI GI: 39975105 Blast Desc: MGG_00301 [Magnaporthe grisea 70-15] gi|145018819|gb|EDK03098.1| MGG_00301 [Magnaporthe grisea 70-15]
  misc_feature (30)..(411): NCBI GI: 39943628 Blast Desc: MGG_03825 [Magnaporthe grisea 70-15] gi|145014513|gb|EDJ99081.1| MGG_03825 [Magnaporthe grisea 70-15]
  misc_feature (34)..(411): NCBI GI: 39968473 Blast Desc: MGG_02329 [Magnaporthe grisea 70-15] gi|145014094|gb|EDJ98735.1| MGG_02329 [Magnaporthe grisea 70-15]
  misc_feature (24)..(419): NCBI GI: 145614919 Blast Desc: conserved [Magnaporthe grisea 70-15] gi|149209141|ref|XP_001521945.1| MGCH7_ch7g63 [Magnaporthe grisea 70-15] gi|86196018|gb|EAQ70656.1| MGCH7_ch7g63 [Magnaporthe
  misc_feature (13)..(415): NCBI GI: 121707561 Blast Desc: toxin biosynthesis cytochrome P450 monooxygenase, [Aspergillus clavatus NRRL 1] gi|119400022|gb|EAW10448.1| toxin biosynthesis cytochrome P450 monooxygenase, [Aspergillus clavatus
  misc_feature (32)..(415): NCBI GI: 70993962 Blast Desc: cytochrome P450 monooxygenase [Aspergillus fumigatus Af293] gi|66849462|gb|EAL89790.1| cytochrome P450 monooxygenase, [Aspergillus fumigatus Af293] gi|159125254|gb|EDP50371.1| toxin
  misc_feature (26)..(412): NCBI GI: 255933153 Blast Desc: Pc12g12330 [Penicillium chrysogenum Wisconsin 54-1255] gi|211582666|emb|CAP80860.1| Pc12g12330 [Penicillium chrysogenum Wisconsin 54-1255]
  misc_feature (37)..(415): NCBI GI: 119500518 Blast Desc: toxin biosynthesis cytochrome P450 monooxygenase, [Neosartorya fischeri NRRL 181] gi|119415181|gb|EAW25119.1| toxin biosynthesis cytochrome P450 monooxygenase, [Neosartorya fischeri
  misc_feature (38)..(412): SWISSPROT Homolog: EC 1.14.14.1 Unspecific monooxygenase
  misc_feature: Useful for introducing or modulating the production of volatile compounds
MDFEELPFQQIRVDPVKQWADTSIIVLIAIICVLLFYVAGTIVYRVFFHPLSKFPGPKLLAITDITSDWRSYVRGTWIHEVQDLHRKYGPVVRIGANHLALDGSVGWPALTHRTGKPEFGKQPGFYFGLPDLSILGAENDMHRRQRRQLSHAFSDSALNEQGDLILKYVDLLVQQLGIRAQRSEMVNITDWMNFTTFDIIGDLAVSTPFKCLEAGDYHPWVTNFFASIEGVTVSRFVRYYPFLRPLVALVKSRGDPGMDLRQIQMTMGITRGRMALGVQKEGKKDFMTYMLKSNRDGEDGMPDMEILTNAPVLMAAGSETTATALAGFFYFLGTTPRAYWRLVDEIRSAFRSEGEITLREIAKLEYLQACLEESLRLYPPVAETPPRISPGAEVDGKWVPQGTIISIHQYAILNTVREPMLTHCGGVAVLPRFLAVGLPFY

SEQ ID NO: 3473 - DNA, 2359 bp, Muscodor strobelii
  misc_feature: SGI EST ID NO. CUFF.8673.0
  misc_feature: Variant of the nucleotide sequence at SEQ ID NO 3471
cgggatctcatgcatgcccacggagatcgctccgttgcgtttattgggtatctgttcatgattgacccccgtttccaatagatttctgcggacagtatcctggaatcatagtttctgcaatagaggtgaaattcttgaggggctaattaatccaaatatccgacgaactactccgcattacctgccgtctaagtgacaagtgcctagaacgacgtgacagagctctacagtatcaatttagatgcacttaccacattcggcccctgagttctgcccccacttccgttgcagaatacacgccaacgcggaaggtcatcatcgcaggggctacgtgtctcgactaacgaaaattgcgaaatatattgaagtcgcatctgaacaaccaacatcgtaatgtgtgaatcgatatctgaaagtctcaagggtccaacgatctaaccccccaaagagctgaccacccttgcgaggcaatcctggcaagccatgtgagcgatctcagccagcggaaagcaaggagcgaaacccgccgcaaggcgcgccgcgcctcatgcacaaggccagctagtgcgaatatgagcgtatagccgttggatccgcagtttccgctttcgagatgagggtacgcctatcgtctgcgggcttgacgcggattggatgcatgggtgagacagatggatcactccgagcacgtgaattggatattggatgccactacggagggtgagatgtgcacgacatataaccaactgcattgttggtacggcgttgcggtgtagtgttgtcttgtttgttggaggtggctttgagtgtttggaaagttgggggttataatattcggtgagacgggctgggtcgtcagatcgtttgtttgtttgtcctttttcttcctttttctttcaataattgtgctgtgtactgaattgggttgccacgatatcaagttactgccatggattttgaagagcttccgttccagcaaatacgtgtcgaccctgtcaagcaatgggcggatacctcgatcatcgtgctcattgccataatatgcgttctcctgttttatgttgcaggaaccatcgtttatcgcgtattctttcatcctctgtctaaatttcccggaccgaagcttctggctataacggacatcactagtgattggcgaagctacgttcggggcacatggatccacgaggttcaagatttgcaccggaaatacgggccagtcgttcggatcggtgcgaaccatctcgcgcttgatggtagcgttggctggccggctctcacgcatcgtacggggaaaccggagttcgggaaacagcctggcttctacttcggcctaccggatctgagtatactcggcgcggagaatgatatgcatcgacgacagcgtcgccagctgtcgcatgcgttcagcgattcagctctgaacgagcagggcgatcttatactgaagtatgtcgacttactcgtacagcagctgggaatcagggcacagaggagcgagatggtgaatatcacggattggatgaatttcacgacgtttgacatcatcggggatctcgctgttagcaccccctttaagtgtttggaagctggtgattatcacccttgggtgacgaactttttcgctagtatagagggtgtcacggtgtctaggttcgtgcgatactatcctttccttagacccctcgttgctcttgtcaagagtcgcggggatccgggaatggatcttagacagatacagatgaccatgggcataacgcgggggagaatggcgctgggtgtacagaaagaaggaaagaaggacttcatgacgtacatgctgaagtcgaaccgtgatggagaggatggtatgccggatatggagatcttgactaatgcgccggtgttgatggcggcggggagtgagactactgctacggcgcttgcgggattcttctactttcttgggactacgcctagggcttattggaggcttgttgatgagatccgatctgcgtttcggagcgagggggagatcacgttgagagagattgcgaagttggaatacctgcaagcatgtcttgaggagagcctaagactctacccacctgtagccgagacaccgcctcgcatctcaccgggcgctgaggtagacggaaaatgggtaccgcaagggacaataatctcaatccatcaatatgcaatattgaacacggtacgagaaccgatgttaactcattgtggcggtgtggcggtcctgccccgctttttagccgtcgggcttccgttttactaacggcgtgttagctctattagcgtaccgttttaataaaaacgaatccgtttaatgtttaaaatatgttgtttttttattttaaat

SEQ ID NO: 3474 - DNA, 336 bp, Muscodor strobelii
  misc_feature: SGI cDNA ID NO. 560818
  misc_feature: Reduced expression when VOC is produced
  misc_feature: Encodes the peptide sequence at SEQ ID NO 3475
atgccggacaatcgcgtcgtgttgcgtcgccgcaacccgtacaacaccaagagcaaccgaactcgtttaatccgcaccccgggcggtgagcttcgagctcttcacatcaagaagaaggccagccgcgtcaagtgcggagactgtggcagcgctttgtcaggaatcccgtctcttcgccctcgcgaatacgctaccctctccaagcctaagaaaacggtctcgcgggcttacggaggctcccgctgcagcaattgcgtccgagatcgcatcgtccgagcgtttctagtagaggagcagaagatcgtgaagaaggtccttaaagagcagggcaaatag

SEQ ID NO: 3475 - protein, 111 aa, Muscodor strobelii
  misc_feature: SGI Peptide ID NO. 560818
  misc_feature (6)..(102): Pfam Id: PF01199 Pfam Desc: Ribosomal protein L34e
  misc_feature (1)..(109): NCBI GI: 39939888 Blast Desc: ribosomal protein L34-like protein [Magnaporthe grisea 70-15] gi|59802867|gb|AAX07647.1| 60S ribosomal protein L34-B-like protein [Magnaporthe grisea] ribosomal protein protein
  misc_feature (1)..(109): NCBI GI: 171687116 Blast Desc: protein product [Podospora anserina] gi|170943519|emb|CAP69172.1| protein product [Podospora anserina]
  misc_feature (1)..(108): NCBI GI: 169595424 Blast Desc: SNOG_00451 [Phaeosphaeria nodorum SN15] gi|111070826|gb|EAT91946.1| SNOG_00451 [Phaeosphaeria nodorum SN15]
  misc_feature (1)..(111): NCBI GI: 85109849 Blast Desc: 60S ribosomal protein L34 [Neurospora crassa OR74A] gi|28924770|gb|EAA33882.1| 60S ribosomal protein L34 [Neurospora crassa OR74A]
  misc_feature (1)..(109): NCBI GI: 14269399 Blast Desc: ribosomal protein L34-like protein [Ophiostoma novo-ulmi]
  misc_feature (1)..(111): NCBI GI: 261358072 Blast Desc: 60S ribosomal protein L34 [Verticillium albo-atrum VaMs.102]
  misc_feature (1)..(109): NCBI GI: 256725750 Blast Desc: [Nectria haematococca mpVI 77-13-4]
  misc_feature (1)..(108): NCBI GI: 119498221 Blast Desc: ribosomal protein L34 protein, [Neosartorya fischeri NRRL 181] gi|119414032|gb|EAW23971.1| ribosomal protein L34 protein, [Neosartorya fischeri NRRL 181]
  misc_feature (1)..(108): NCBI GI: 154310564 Blast Desc: 60S ribosomal protein L34 [Botryotinia fuckeliana B05.10] gi|156058396|ref|XP_001595121.1| 60S ribosomal protein L34 [Sclerotinia sclerotiorum 1980] gi|150851296|gb|EDN26489.1|
  misc_feature (1)..(108): NCBI GI: 189208636 Blast Desc: 60S ribosomal protein L34-B [Pyrenophora tritici-repentis Pt-1C-BFP] gi|187976744|gb|EDU43370.1| 60S ribosomal protein L34-B [Pyrenophora tritici-repentis Pt-1C-BFP]
  misc_feature: Useful for introducing or modulating the production of volatile compounds
MPDNRVVLRRRNPYNTKSNRTRLIRTPGGELRALHIKKKASRVKCGDCGSALSGIPSLRPREYATLSKPKKTVSRAYGGSRCSNCVRDRIVRAFLVEEQKIVKKVLKEQGK

SEQ ID NO: 3476 - DNA, 739 bp, Muscodor strobelii
  misc_feature: SGI EST ID NO. CUFF.8809.1
  misc_feature: Variant of the nucleotide sequence at SEQ ID NO 3474
tgcccacctaaggccaaatccacagcgaaatccaaaagcgcagcgtcagtacttacgaacgcatcaacagaacacatcacgacctcccgcatccgcatcgtcaacagtagacagtgccgccatgccggacaatcgcgtcgtgttgcgtcgccgcaacccgtacaacaccaagagcaaccgaactcgtttaatccgcaccccgggcggtgagcttcgagctcttcacatcaagaagaaggccagccgcgtcaagtgcggagactgtggcagcgctttgtcaggaatcccgtctcttcgccctcgcgaatacgctaccctctccaagcctaagaaaacggtctcgcgggcttacggaggctcccgctgcagcaattgcgtccgagatcgcatcgtccgagcgtttctagtagaggagcagaagatcgtgaagaaggtccttaaagagcagggcaaatagtgcttgggtactgatggctccgagggagtcactgtgaaagagcaagatatggcaaagagagccctcccaaagagggggtgacgatcttgacgggatgaacaatcaacgcttctacgcatttccagtactcaacagtagttggtagcagtgaaatatcgcgtctccctcgaggctctagctaaaaaaaagaaaagaaaaaatatcctgtcatccgctagctgccattgcaatatcatagttttgtgacaaaatgcctagattctcctaggccgtaaaggtgtc

SEQ ID NO: 3477 - DNA, 2043 bp, Muscodor strobelii
  misc_feature: SGI cDNA ID NO. 560819
  misc_feature: Reduced expression when VOC is produced
  misc_feature: Encodes the peptide sequence at SEQ ID NO 3478
atgtccttggcacggaacctgtctcccatacgagatcaggcgttgccgtcgacctttaccatcgtcaagtcccaatctagctcacacgaaccgttcgtatacagcgacttacggccaggcgagatacgtctgctctactgtaccattctagccgacgaggacatatggtcgttaaagacgatacagctgagccaatgcgaatccaaagaaccgatcgcgttcgatgccctgtcttatacgtggggcaatacagatgatatcttcacattcatgtgtgatggcaaagaacttcgtatacacgaaaatttgtacaatgccctgccgtatctagctcggagaaactcgcccctgccgatctggatcgatgctgtgtgtatcaatcagactgacaacggggagaagttcgcgcagatccgtcagatgcacactctgtacagtcaggcgactcaagtatgggtatggcttggccgtggtagttcttatactaaggaagctatcacatttttaccgctgattgcggaggtttatgaagaactatctagtaatagaactcatatattcggagaaaaactagttacgcccgagtcaagacagcttccctgcgttacgtcacctttgtgggaggcaatattcgagttgatcgacaatgaatggttcactcgattgtgggtcgtccaggaatccgcattggctaagcaaattaaggttctttgtggcagtgaggaagtcgaatggaaagtactcgaagaagctgtggacacaggagtcatgcttggtcatcatcttgaaggcggtgaacaccttcgaagagacttcactgagaatcaggccgtattcctgactcggaaaattatgcacgatccagagtgtataacgtcggactgggagtggcgtctcataaaagtcctcttgctgacaagtagcaataaaaagtgctctaagccagaagatcgtatatttgctatccttggtttcatcaccgaagcacacatcgagcagatcggaattcgagacgacaccaccattgtcgacctctacctgataacgacacggtatcttctgagtcatgtgagccaaaatagcaagcgctggtgggatctcttcacattgagcatgagtttgaacaagatccctgagcttccgagctggtgtccagactatcataggctcaagaagcataataatctcgaacgtgctatttcaagccacacagctacttataagtacaatgcaagtagggcaaccaactctgcgcaacaaggagatgatattcgcaagtggaacattaatggcacaatttttgacattgtagatcagacctttcctcagatccctaccatcgaaagccatcctggtggaggtatacgaagcaacgttgaatacttccgcgacatatgcgactggatgaatcaaattgcagccgctgttgtggatatacctgctaaagactgcaagaagggtttggactgcagtatgcacacgcatataagtttggagcagtactggcgcacgttgatcggtaatgttacaacgcgggacggtcgtatcataacttgtaagacatttcagcagtttcaagtcaataccgccaaagtaatggctcggatgaatatttggaacataatagatctggagaacatgcttctcatgagcgaatgcgcatttgcagttaccgcggcagatgagaaatattggcgtgaggtggcaactggaatcaaagattttgatgagactcaacagcaatggaataaggctggaatggagggtctagagtttgtagtggctgtaaacgatttcctcgccggtaggagattgtttaggtctttaaatggccggcttggattcggaccagtcgagactcggcccgccgatctgatctgcatactgaacaatgcacgcacggcacatatcctgcggcgaggcgaggaaggcgatgaaattcaagagagtttccggattataggggaagcctatgttcatggcatgatggacggtgaggtcgaattgcttggccttgacgaaaaactcattgtacttgtgtaa

SEQ ID NO: 3478 - protein, 680 aa, Muscodor strobelii
  misc_feature: SGI Peptide ID NO. 560819
  misc_feature (74)..(227): Pfam Id: PF06985 Pfam Desc: Heterokaryon incompatibility protein (HET)
  misc_feature (110)..(172): Pfam Id: PF06985 Pfam Desc: Heterokaryon incompatibility protein (HET)
  misc_feature (31)..(680): NCBI GI: 169599709 Blast Desc: SNOG_02678 [Phaeosphaeria nodorum SN15] gi|111068289|gb|EAT89409.1| SNOG_02678 [Phaeosphaeria nodorum SN15]
  misc_feature (23)..(400): NCBI GI: 46127485 Blast Desc: FG08120.1 [Gibberella zeae PH-1]
  misc_feature (74)..(663): NCBI GI: 256724488 Blast Desc: [Nectria haematococca mpVI 77-13-4]
  misc_feature (22)..(437): NCBI GI: 256721216 Blast Desc: NECHADRAFT_101059 [Nectria haematococca mpVI 77-13-4]
  misc_feature (25)..(667): NCBI GI: 115401102 Blast Desc: [Aspergillus terreus NIH2624] gi|114190080|gb|EAU31780.1| [Aspergillus terreus NIH2624]
  misc_feature (32)..(675): NCBI GI: 256728445 Blast Desc: NECHADRAFT_54320 [Nectria haematococca mpVI 77-13-4]
  misc_feature (36)..(680): NCBI GI: 39976177 Blast Desc: MGG_05985 [Magnaporthe grisea 70-15] gi|145011741|gb|EDJ96397.1| MGG_05985 [Magnaporthe grisea 70-15]
  misc_feature (4)..(667): NCBI GI: 256721874 Blast Desc: NECHADRAFT_88090 [Nectria haematococca mpVI 77-13-4]
  misc_feature (33)..(665): NCBI GI: 256722564 Blast Desc: NECHADRAFT_49740 [Nectria haematococca mpVI 77-13-4]
  misc_feature (28)..(667): NCBI GI: 154313282 Blast Desc: BC1G_05338 [Botryotinia fuckeliana B05.10] gi|150849407|gb|EDN24600.1| BC1G_05338 [Botryotinia fuckeliana B05.10]
  misc_feature: Useful for introducing or modulating the production of volatile compounds
MSLARNLSPIRDQALPSTFTIVKSQSSSHEPFVYSDLRPGEIRLLYCTILADEDIWSLKTIQLSQCESKEPIAFDALSYTWGNTDDIFTFMCDGKELRIHENLYNALPYLARRNSPLPIWIDAVCINQTDNGEKFAQIRQMHTLYSQATQVWVWLGRGSSYTKEAITFLPLIAEVYEELSSNRTHIFGEKLVTPESRQLPCVTSPLWEAIFELIDNEWFTRLWVVQESALAKQIKVLCGSEEVEWKVLEEAVDTGVMLGHHLEGGEHLRRDFTENQAVFLTRKIMHDPECITSDWEWRLIKVLLLTSSNKKCSKPEDRIFAILGFITEAHIEQIGIRDDTTIVDLYLITTRYLLSHVSQNSKRWWDLFTLSMSLNKIPELPSWCPDYHRLKKHNNLERAISSHTATYKYNASRATNSAQQGDDIRKWNINGTIFDIVDQTFPQIPTIESHPGGGIRSNVEYFRDICDWMNQIAAAVVDIPAKDCKKGLDCSMHTHISLEQYWRTLIGNVTTRDGRIITCKTFQQFQVNTAKVMARMNIWNIIDLENMLLMSECAFAVTAADEKYWREVATGIKDFDETQQQWNKAGMEGLEFVVAVNDFLAGRRLFRSLNGRLGFGPVETRPADLICILNNARTAHILRRGEEGDEIQESFRIIGEAYVHGMMDGEVELLGLDEKLIVLV

SEQ ID NO: 3479 - DNA, 2905 bp, Muscodor strobelii
  misc_feature: SGI EST ID NO. CUFF.8679.0
  misc_feature: Variant of the nucleotide sequence at SEQ ID NO 3477
tatcagcatagaaatagtctacggccgctttcagtgacattgaatatcattcccatcgtttatcagcatgtttattgaaacgcatagaacggaacgatcgtttatggtacctagttatgtttcttcactagatatagagggaaaaagatgcatctctgcttcaccctaagtcggtattacctgcacggaatactagataccaagcagtcctctgcaatggatcatggaaattaacaatacactattgaacgatagaagttaccaagtacaactatgcccgctcgaaccttgaacaacacggccgagagtgacgagctttgagtgaccttataaggatatatcagcttgttatgaaatcgggtacgatgtctatgctataattatcattcgattagaactgatatctaatgctctactattataaccatagccgagatgaacgcttcggggattgcgatgagagcctcaagcagagccttgaatgaaagggaggcagtaccagtagcatgctgacccgagcgatgtcccaatcgcagcttccagaaatgacactaccacacagccacgatgaggggaaggcgccctcctcagagaccggacatataaagtaggtatgcgcgggtttccaattttcatcatggtttccttaacagcattatgaatcatttacgtatggacaacccattagattctcatccatatctcatccttctacgtttgtgagtgtgctaccaggcaatagcacgtgcaaactgtagcgcccgtttctgacaccttgagcaatgtccttggcacggaacctgtctcccatacgagatcaggcgttgccgtcgacctttaccatcgtcaagtcccaatctagctcacacgaaccgttcgtatacagcgacttacggccaggcgagatacgtctgctctactgtaccattctagccgacgaggacatatggtcgttaaagacgatacagctgagccaatgcgaatccaaagaaccgatcgcgttcgatgccctgtcttatacgtggggcaatacagatgatatcttcacattcatgtgtgatggcaaagaacttcgtatacacgaaaatttgtacaatgccctgccgtatctagctcggagaaactcgcccctgccgatctggatcgatgctgtgtgtatcaatcagactgacaacggggagaagttcgcgcagatccgtcagatgcacactctgtacagtcaggcgactcaagtatgggtatggcttggccgtggtagttcttatactaaggaagctatcacatttttaccgctgattgcggaggtttatgaagaactatctagtaatagaactcatatattcggagaaaaactagttacgcccgagtcaagacagcttccctgcgttacgtcacctttgtgggaggcaatattcgagttgatcgacaatgaatggttcactcgattgtgggtcgtccaggaatccgcattggctaagcaaattaaggttctttgtggcagtgaggaagtcgaatggaaagtactcgaagaagctgtggacacaggagtcatgcttggtcatcatcttgaaggcggtgaacaccttcgaagagacttcactgagaatcaggccgtattcctgactcggaaaattatgcacgatccagagtgtataacgtcggactgggagtggcgtctcataaaagtcctcttgctgacaagtagcaataaaaagtgctctaagccagaagatcgtatatttgctatccttggtttcatcaccgaagcacacatcgagcagatcggaattcgagacgacaccaccattgtcgacctctacctgataacgacacggtatcttctgagtcatgtgagccaaaatagcaagcgctggtgggatctcttcacattgagcatgagtttgaacaagatccctgagcttccgagctggtgtccagactatcataggctcaagaagcataataatctcgaacgtgctatttcaagccacacagctacttataagtacaatgcaagtagggcaaccaactctgcgcaacaaggagatgatattcgcaagtggaacattaatggcacaatttttgacattgtagatcagacctttcctcagatccctaccatcgaaagccatcctggtggaggtatacgaagcaacgttgaatacttccgcgacatatgcgactggatgaatcaaattgcagccgctgttgtggatatacctgctaaagactgcaagaagggtttggactgcagtatgcacacgcatataagtttggagcagtactggcgcacgttgatcggtaatgttacaacgcgggacggtcgtatcataacttgtaagacatttcagcagtttcaagtcaataccgccaaagtaatggctcggatgaatatttggaacataatagatctggagaacatgcttctcatgagcgaatgcgcatttgcagttaccgcggcagatgagaaatattggcgtgaggtggcaactggaatcaaagattttgatgagactcaacagcaatggaataaggctggaatggagggtctagagtttgtagtggctgtaaacgatttcctcgccggtaggagattgtttaggtctttaaatggccggcttggattcggaccagtcgagactcggcccgccgatctgatctgcatactgaacaatgcacgcacggcacatatcctgcggcgaggcgaggaaggcgatgaaattcaagagagtttccggattataggggaagcctatgttcatggcatgatggacggtgaggtcgaattgcttggccttgacgaaaaactcattgtacttgtgtaaaattgaagaacactgttattataaaggcttatttgtctgcgcactgcctgctaaagtagttttgtttaactttactatcc

SEQ ID NO: 3480 - DNA, 3282 bp, Muscodor strobelii
  misc_feature: SGI cDNA ID NO. 560820
  misc_feature: Encodes the peptide sequence at SEQ ID NO 3481
atggacgacgaaccagatcttaaacaaggcgtacgctgggaagaggaccccgaagtaggctcacgtcctgtccataatcttcgccggcatgactcaaccggatcactctcgattcgtagtatgcgttcgcgccgtgaggtcgagccatctgtcctcctgcctatccaatatcgaactctttcgtataatatcagcgagtcaaaacaggtccaggatttcaagaccgcagaaaagactaaggatgcggcaacaaaaggtccgccacagttctcttctcttgagtggcacaccatcacgactgacgaggctgttcgccgccttaccacctcagtccaagaaggcttgtcggaagcccaggttgcacgtagggtcaaagaattcgggcgaaatgctccttctcctcccaaatcacgtgtactacaaacgtggttcggctattttttcaaaggcttcggtcctatcctgttagttggtggcattctagtgtttgtatcgtggaaaccccttggcagccctccttctctagcgaacttggctttggcaatcgtattactggctgtttttttgatccaagctgctttcaatgccttgcaggattggagctcttctcgcgtcatgagttccataaaaggcatgctgcctgaagattgcattgtaattcgaaacagcgctcaagtctcgctctctgcgtctgaacttgtgcccggcgacattgtgtcgatcaaggctggcaacaaactccctgcagatgtgcgttttttacaagtctcaagcgatgctaaaatggacagatctatcttgactggagagtctgttcctcttgctgcttcggtagattcgaccgacgaaaattatcttgagactcgttgcattggtatgcaaggaactcattgtgtttctggttcatgcattggtttagtagtggcgacaggtgatcaaacagtgttcggtcgcatcgccaaactgacacaagatccgaaggtgaagatgacgacattggagaaggaaatattgttcttcgtgatcatcatatgttccattatgcttaccgctattacgatcgtattgtttgtctggggcttctacttgcataaagttcatcccgactacatcagcgttcccaccttaatcgtggacatcgttagcgtcgcgatcgctttcattccagaaggcctacccattgcgctaactgcgggtttgacaatcacggcgaatttaatgcgaaacaacaagattctgtgcaagtctttgaaaacagtcgagactttgggcgctgtctcggtcatttgttctgacaaaactggcacattgacagcgaaccgcatgacagtcacacattgcacaatagggacacacacaataacagccaacggagccgaagacgaactcagcgatagcgaaacagctagtattgctggtatcaagacaacaggagttggtcagatacgggccatctcagcgctctgcaacgccgcagaattcgatgctgccacttcagatctacctctagatgacaggcgtgttttcggtgatgctaccgatcaggcagtactcagattctcagagagtctaggatccgtgcatcatatgcgtcaatgctggaacaagacgtatgagcttgctttcaacagtaaaaacaagttcatgattagaaccttttcgttgttcaaatcagactgtttagctgaagctctgtccgaacgtgaggcggaaaatttcaagtccacagatacgctgttgacaatcaagggagcacctgatgtcctcatcaacagatgttcttcattcgttaccaattctggtgatgtacatgtgttggatgatgatgtgaaggtagagttcgaaaaagtgaagaatctctacagtagtcaagggaagcgatgcattctgctagcacgccgagtgcttcatgaatcagatctcagccatggtccgaactcaagcggatttgaagatgaagtgctagaactatccaaaggaggtctaaccttagttggactggtggcgattgttgaccctttgcgacctgagatccaggatgttgtgagaacgctacgcggcgctggcattcgcattttcatggttactggtgatttcgctctcacagctcttgctattgctcaagatgccggtatcatcagccgcccatcgcccctcgtcgacgatatatcctcgctcccgagagagaaacctgccgaaggcgactacaacgttcctcgatcttcgatcgtcataagtggccctgagttgatgagtcttaatgagcaccaatggcgcctcctgaccgagtacgaggaaattgtcttcgcgcgcacgactccagagcagaagcttagaattgtcagagaattccaaaaagatggcgttgtggcgatgaccggcgatggtgtcaatgatgcaccgtcccttaaagcagcagacgttggcattgctctcggttcaggatctgacatcgcaatcgaagctgcagacatggttctccttgagtccttctcctctgtcgttgaagcagttcagtatggccgtacagtattcgacaacttgaagaaggtcatttgctacttgctgcctgcgggaagtttcgccgagttttggcccgtcatcacaaacgtcatattcggcctcccccaaattctctcctccttccttatgatcattatttgttgcttcactgattgtgctgccgccactgtcatgtcctacgagaaacccgaagccgacgtcctcctacgcaagcctcgaaatgtcaagaaagaccgtctcgtcaattggcagcttgttgtgcacgcatacggagtcatcggcatcattgataccctcgcatcgttcttcgtcgcatactggtacctgcagcggaatggaatccctttcaacaagctttggtttggttatggcaagatcccggatggcatagatccagacttctacgccgagaaactgaacatcgcttcatctatctactttgtgaacttggttgtcatgcaatggttcaacctcctcgcggtccgtacgcgacggtggagcatctttcagcatcctcctgcctttaacaaaagaactcaaaatctgtacatcttcccagccatcttgttcgctttgtcaatggctatcctgtggctctacattcctcagctacactccattctcggcactgtgcctgtacctgttgagtactggttcttgccgttcgcctttggctccttcattttgttgtttgatgagaccaggaagttcttcgttcggaaataccctaagagttttattgccaagatggcttggtag

SEQ ID NO: 3481 - protein, 1093 aa, Muscodor strobelii
  misc_feature: SGI Peptide ID NO. 560820
  misc_feature (426)..(816): Pfam Id: PF00702 Pfam Desc: haloacid dehalogenase-like hydrolase
  misc_feature (911)..(1083): Pfam Id: PF00689 Pfam Desc: Cation transporting ATPase, C-terminus
  misc_feature (84)..(166): Pfam Id: PF00690 Pfam Desc: Cation transporter/ATPase, N-terminus
  misc_feature (183)..(422): Pfam Id: PF00122 Pfam Desc: E1-E2 ATPase
  misc_feature (84)..(131): Pfam Id: PF00690 Pfam Desc: Cation transporter/ATPase, N-terminus
  misc_feature (765)..(816): Pfam Id: PF00702 Pfam Desc: haloacid dehalogenase-like hydrolase
  misc_feature (426)..(721): Pfam Id: PF00702 Pfam Desc: haloacid dehalogenase-like hydrolase
  misc_feature (16)..(1093): NCBI GI: 154315657 Blast Desc: BC1G_04401 [Botryotinia fuckeliana B05.10] gi|150847341|gb|EDN22534.1| BC1G_04401 [Botryotinia fuckeliana B05.10]
  misc_feature (11)..(1093): NCBI GI: 242815133 Blast Desc: H /K ATPase alpha subunit, [Talaromyces stipitatus ATCC 10500] gi|218714849|gb|EED14272.1| H /K ATPase alpha subunit, [Talaromyces stipitatus ATCC 10500]
  misc_feature (11)..(1093): NCBI GI: 238501050 Blast Desc: H /K ATPase alpha subunit, [Aspergillus flavus NRRL3357] gi|220691996|gb|EED48343.1| H /K ATPase alpha subunit, [Aspergillus flavus NRRL3357]
  misc_feature (3)..(1093): NCBI GI: 212545254 Blast Desc: H /K ATPase alpha subunit, [Penicillium marneffei ATCC 18224] gi|210065750|gb|EEA19844.1| H /K ATPase alpha subunit, [Penicillium marneffei ATCC 18224]
  misc_feature (44)..(1093): NCBI GI: 119499409 Blast Desc: H /K ATPase alpha subunit, [Neosartorya fischeri NRRL 181] gi|119414626|gb|EAW24565.1| H /K ATPase alpha subunit, [Neosartorya fischeri NRRL 181]
  misc_feature (4)..(1093): NCBI GI: 171692585 Blast Desc: protein product [Podospora anserina] gi|170946241|emb|CAP73042.1| protein product [Podospora anserina]
  misc_feature (66)..(1093): NCBI GI: 169781206 Blast Desc: [Aspergillus oryzae RIB40] gi|83773808|dbj|BAE63933.1| protein product [Aspergillus oryzae]
  misc_feature (44)..(1093): NCBI GI: 121719538 Blast Desc: H /K ATPase alpha subunit, [Aspergillus clavatus NRRL 1] gi|119404666|gb|EAW15042.1| H /K ATPase alpha subunit, [Aspergillus clavatus NRRL 1]
  misc_feature (4)..(1093): NCBI GI: 156065235 Blast Desc: SS1G_00628 [Sclerotinia sclerotiorum 1980] gi|154691487|gb|EDN91225.1| SS1G_00628 [Sclerotinia sclerotiorum 1980]
  misc_feature (81)..(1093): NCBI GI: 256733921 Blast Desc: NECHADRAFT_103674 [Nectria haematococca mpVI 77-13-4]
  misc_feature (92)..(1093): SWISSPROT Homolog: EC 3.6.3.9 Sodium/potassium-exchanging ATPase
MDDEPDLKQGVRWEEDPEVGSRPVHNLRRHDSTGSLSIRSMRSRREVEPSVLLPIQYRTLSYNISESKQVQDFKTAEKTKDAATKGPPQFSSLEWHTITTDEAVRRLTTSVQEGLSEAQVARRVKEFGRNAPSPPKSRVLQTWFGYFFKGFGPILLVGGILVFVSWKPLGSPPSLANLALAIVLLAVFLIQAAFNALQDWSSSRVMSSIKGMLPEDCIVIRNSAQVSLSASELVPGDIVSIKAGNKLPADVRFLQVSSDAKMDRSILTGESVPLAASVDSTDENYLETRCIGMQGTHCVSGSCIGLVVATGDQTVFGRIAKLTQDPKVKMTTLEKEILFFVIIICSIMLTAITIVLFVWGFYLHKVHPDYISVPTLIVDIVSVAIAFIPEGLPIALTAGLTITANLMRNNKILCKSLKTVETLGAVSVICSDKTGTLTANRMTVTHCTIGTHTITANGAEDELSDSETASIAGIKTTGVGQIRAISALCNAAEFDAATSDLPLDDRRVFGDATDQAVLRFSESLGSVHHMRQCWNKTYELAFNSKNKFMIRTFSLFKSDCLAEALSEREAENFKSTDTLLTIKGAPDVLINRCSSFVTNSGDVHVLDDDVKVEFEKVKNLYSSQGKRCILLARRVLHESDLSHGPNSSGFEDEVLELSKGGLTLVGLVAIVDPLRPEIQDVVRTLRGAGIRIFMVTGDFALTALAIAQDAGIISRPSPLVDDISSLPREKPAEGDYNVPRSSIVISGPELMSLNEHQWRLLTEYEEIVFARTTPEQKLRIVREFQKDGVVAMTGDGVNDAPSLKAADVGIALGSGSDIAIEAADMVLLESFSSVVEAVQYGRTVFDNLKKVICYLLPAGSFAEFWPVITNVIFGLPQILSSFLMIIICCFTDCAAATVMSYEKPEADVLLRKPRNVKKDRLVNWQLVVHAYGVIGIIDTLASFFVAYWYLQRNGIPFNKLWFGYGKIPDGIDPDFYAEKLNIASSIYFVNLVVMQWFNLLAVRTRRWSIFQHPPAFNKRTQNLYIFPAILFALSMAILWLYIPQLHSILGTVPVPVEYWFLPFAFGSFILLFDETRKFFVRKYPKSFIAKMAW

SEQ ID NO: 3482 - DNA, 4466 bp, Muscodor strobelii
  misc_feature: SGI EST ID NO. CUFF.8683.0
  misc_feature: Variant of the nucleotide sequence at SEQ ID NO 3480
aaaaactcaagttaggggggccatcgtatgcgtactattgcatcttgcgtcgctctcgcagagttcagctgtaccacgtcgtccgaaaaccggtttcatcagtctattctgcattcttgctaatgcaagtaacatgccaacgtgggcttatccagccagtgggtaatccatatacgaaaagataaatgcaagcatgggaggccgcctgggtccgctaggaatgccaacctggaagttcccctcagatttgcgcggggtccactgtggtaatcaatatagtcgccggtattgctctaacggccgtgatgtatataactgccgtaccctccgcatctgtcgacttccttctgatgccgcatcacctcctccgatatcacatccccaattttctatcgcccaccaccgccgctatgaactaacctggcgccgagcgttgccagaaacggtgcgcgaattctacgacttggcagtcaagaaaataagattcgcggaatcatttgttctccatttgctgcgcctggtggtttgcacgcgaacagctggaaagaggtggctctttggtttgcctgacactacgctcatgtgattctccccgttcagcggcgggcgtttcgagtatgaattgcgaagcgacactgtagttgatgacaggccaaaccttacaatgacagtgcggcatccctttgtcaatcctgtttccttcgtatctcttgcattccacgagagctagtgatatgctttcaacccatcgtagcaaagagaagtagaattaaaataaatataatagataccacccctcaatcttctatgcttgcctcagcgcattccttttcacttctccttttctgcagacctagctgtgaagttgcatccaaatttcttcgcgtgacttcagactcacgttcctgaaagcaattcaagatggacgacgaaccagatcttaaacaaggcgtacgctgggaagaggaccccgaagtaggctcacgtcctgtccataatcttcgccggcatgactcaaccggatcactctcgattcgtagtatgcgttcgcgccgtgaggtcgagccatctgtcctcctgcctatccaatatcgaactctttcgtataatatcagcgagtcaaaacaggtccaggatttcaagaccgcagaaaagactaaggatgcggcaacaaaagagttctcttctcttgagtggcacaccatcacgactgacgaggctgttcgccgccttaccacctcagtccaagaaggcttgtcggaagcccaggttgcacgtagggtcaaagaattcgggcgaaatgctccttctcctcccaaatcacgtgtactacaaacgtggttcggctattttttcaaaggcttcggtcctatcctgttagttggtggcattctagtgtttgtatcgtggaaaccccttggcagccctccttctctagcgaacttggtaagactatgacaacgttacgcaaagtatcaagcaaaagtcctgacgcgatcccataggctttggcaatcgtattactggctgtttttttgatccaagctgctttcaatgccttgcaggattggagctcttctcgcgtcatgagttccataaaaggcatgctgcctgaagattgcattgtaattcgaaacagcgctcaagtctcgctctctgcgtctgaacttgtgcccggcgacattgtgtcgatcaaggctggcaacaaactccctgcagatgtgcgttttttacaagtctcaagcgatgctaaaatggacagatctatcttgactggagagtctgttcctcttgctgcttcggtagattcgaccgacgaaaattatcttgagactcgttgcattggtatgcaaggaactcattgtgtttctggttcatgcattggtttagtagtggcgacaggtgatcaaacagtgttcggtcgcatcgccaaactgacacaagatccgaaggtgaagatgacgacattggagaaggaaatattgttcttcgtgatcatcatatgttccattatgcttaccgctattacgatcgtattgtttgtctggggcttctacttgcataaagttcatcccgactacatcagcgttcccaccttaatcgtggacatcgttagcgtcgcgatcgctttcattccagaaggcctacccattgcgctaactgcgggtttgacaatcacggcgaatttaatgcgaaacaacaagattctgtgcaagtctttgaaaacagtcgagactttgggcgctgtctcggtcatttgttctgacaaaactggcacattgacagcgaaccgcatgacagtcacacattgcacaatagggacacacacaataacagccaacggagccgaagacgaactcagcgatagcgaaacagctagtattgctggtatcaagacaacaggagttggtcagatacgggccatctcagcgctctgcaacgccgcagaattcgatgctgccacttcagatctacctctagatgacaggcgtgttttcggtgatgctaccgatcaggcagtactcagattctcagagagtctaggatccgtgcatcatatgcgtcaatgctggaacaagacgtatgagcttgctttcaacagtaaaaacaagttcatgattagaaccttttcgttgttcaaatcagactgtttagctgaagctctgtccgaacgtgaggcggaaaatttcaagtccacagatacgctgttgacaatcaagggagcacctgatgtcctcatcaacagatgttcttcattcgttaccaattctggtgatgtacatgtgttggatgatgatgtgaaggtagagttcgaaaaagtgaagaatctctacagtagtcaagggaagcgatgcattctgctagcacgccgagtgcttcatgaatcagatctcagccatggtccgaactcaagcggatttgaagatgaagtgctagaactatccaaaggaggtctaaccttagttggactggtggcgattgttgaccctttgcgacctgagatccaggatgttgtgagaacgctacgcggcgctggcattcgcattttcatggttactggtgatttcgctctcacagctcttgctattgctcaagatgccggtatcatcagccgcccatcgcccctcgtcgacgatatatcctcgctcccgagagagaaacctgccgaaggcgactacaacgttcctcgatcttcgatcgtcataagtggccctgagttgatgagtcttaatgagcaccaatggcgcctcctgaccgagtacgaggaaattgtcttcgcgcgcacgactccagagcagaagcttagaattgtcagagaattccaaaaagatggcgttgtggcgatgaccggcgatggtgtcaatgatgcaccgtcccttaaagcagcagacgttggcattgctctcggttcaggatctgacatcgcaatcgaagctgcagacatggttctccttgagtccttctcctctgtcgttgaagcagttcagtatggccgtacagtattcgacaacttgaagaaggtcatttgctacttgctgcctgcgggaagtttcgccgagttttggcccgtcatcacaaacgtcatattcggcctcccccaaattctctcctccttccttatgatcattatttgttgcttcactgattgtgctgccgccactgtcatgtcctacgagaaacccgaagccgacgtcctcctacgcaagcctcgaaatgtcaagaaagaccgtctcgtcaattggcagcttgttgtgcacgcatacggagtcatcggcatcattgataccctcgcatcgttcttcgtcgcatactggtacctgcagcggaatggaatccctttcaacaagctttggtttggttatggcaagatcccggatggcatagatccagacttctacgccgagaaactgaacatcgcttcatctatctactttgtgaacttggttgtcatgcaatggttcaacctcctcgcggtccgtacgcgacggtggagcatctttcagcatcctcctgcctttaacaaaagaactcaaaatctgtacatcttcccagccatcttgttcgctttgtcaatggctatcctgtggctctacattcctcagctacactccattctcggcactgtgcctgtacctgttgagtactggttcttgccgttcgcctttggctccttcattttgttgtttgatgagaccaggaagttcttcgttcggaaataccctaagagttttattgccaagatggcttggtagggaggctggagagaattggatgggacgatgagatgtcatatcatgggactgtagctgtgatgatggagtcaagaggctatctgcatgccgattgagttacccatagttcgatgcttgtctcgactatcaataaatggaaatctctgtgtacctttatacaatcatagttagattgatagcgaattaacaatcagagtagaagtctctataaag

SEQ ID NO: 3483 - DNA, 3327 bp, Muscodor strobelii
  misc_feature: SGI cDNA ID NO. 560821
  misc_feature: Encodes the peptide sequence at SEQ ID NO 3484
atggctgacaagaagactaatggcacgaatggtgcctatgagaatggagctggttctcacactaccagcaactcttccgctggtaaaggctcttcacagacctttggagtaggacctgcgttcaaggagacgcctgagccaacaccaaaggctaaccgtgaaggaattacacgagctttcgcgcagctgggccaatgggcccatgcctctgaacgaccatatcctactcagaacggcaatggcacgttttcacttagcaagaggccaagcctaaagaaggatctagcgactctaagcaagaaggatatcaagaccgtcataacgatcctgaagagcaagttgaaaggacagcagctcatcgacgacaagacgatgatcatggaacaaactatccagctagtagcaggactaccgaatggttcacgcctccgagacgaattgactaataactttatcaatgaactatggagcacattggatcatcctcctctactatacatgggtgacaagcaccaatatcgccaagctgacggatcatggaacaatcctatgaaccctatgcttggtgctgctggctcgacgtacgccagaacgtgccgacctagcattcaagttggagctatgccagatccagagctcatctacgaatccgtcatgaagcgaacgacatacaagaagcatcctaacaacgtgtcgtccattttatggtactgggcagacattgttattcacgatctcttctggaccgacctccaagacatcactaagactaagacatcgtctttcttggatctatcgcctctctatggtagtaatcaggagatgcaagattcaatcagaactttcaaagacgggttgatgaaacctgacacgttcgccgacaaacgacttctgggccaaccaccgggagttagtgtcattctcatcatgttcaaccgcttccacaattatactgccaagaacttggctgctatcaacgaaggtggtcgattcacgccccctccacctagccttcccgaagagaaagctgcagctgcgtggaagaagtatgataacgaccttttccagacggcacgactcatcacttctggattgtacatcaacatcactctcgttgattatgtcaggaacattgtcaacttgaaccggagcaacacaacgtggactcttgacccgcgtgtggatgctggtccagaggctggtactttccgtggcgccgagcgaggcactggaagtatggtctctgctgagtttaatctctgctacagatggcactcttgcatttcggacaaggatgacaagtggatccaggacttttacaagagtatctttaaaggcaaagaccccctggatctcacgattcaggatatggcaatgggattcgttatgttcgacaggagcatccctgttgatcccgccgagcgtgaattcggcggctttaagcgtggcgctgatggcaaatttagcgatgatgatttagtgaactgtattgccgacgcgattgaagattgtgccggctcattcggtgatcgaaacgtgccccaatccatgaagcctgttgagatcttgggtatccttcaaggcagaaaatggaatgttgcaggcttgaacgaatttcgaaagcactttggtctcaagccgtatgagacatttgaggatatcaattcggaccctgatgtctcgggcgctctacaacacctttatggccatcccgactttgttgagctttaccctggcttagttgctgaggaagccaaggcacctatggctcctggtgtcggtattgcacctacttacactatctctcgtgtcattctttcggatgccgtatgcttgactcgtggtgatcggttctacacgactgactacaacccacgttcgttgacttcatggggatataacgaggtcgcatatgatctcaacattaaccagggttgcgtcttctacaagttattcatccgagcattcccaaaccacttcaagcgtgattccgcttatgctcattatcccatgtgtgtgcccggtgagaccaagaagattctcaccaacctaggtcgagtccaggatttcagcttcgaccgccctcagtacacaccaccacgggctaacgtcgcaacgtatggcggtgctcagtatgtcatgaagagcgaagataagtacaaggtgaactggaacgagagcatttcaagtttgatgggtaccaaatcgtcttctaacgattcagcatttcacgcggctaaagaaggctgtctgcatgatcagctctacagaggtgactggaacacacagcttaagtcattttatgctcaaactacagacagacttatccaagagaagtcattcaagcttgccgggaagacattcgttgacatcatccgcgacgtcggcaacatcgtcccggtgcaattcgctgcccgcacctatggactgccattgaagaccaaggagaacccgaagggcgtctacaacgaacaggaactttacagcattcttgccttactgtttgtctgcattttcttcgacattgaccctgtcaagtcgttcccgatgcggttcgcagccaagaccatggtatctcaactcggcgaactcctcgaggcgcatgtcaagtccgtcaaaggcatgttcgcgtcgaagcccaagaagggtgatcttgcggcatttggcgcagacctagtcaagggactctctaaggcaggcaagagcaaccacgacattgcctggaatgaattgcttccagctgctggtgcccttgttccgaacatttcacaaatattcgcacaagctgttgactattacctgacgcccaatggtgccacacacatcccggaactgcatcgcattgccaacctcccagcgtctgaggagacagactctatgcttctcggatactgcatggagggtattcgtttggctggtacctttggtgcgtaccgtgaagtcgccgccgacgacgtcattcgagaggatgacggcagcgagacacccgtgaaggctggtcaccgcgtctttgttagctttgctggtgcttcatccgatgacaagaacttccccgagcctcaggaggtcaatccccgccgcccgctcgcatcctacatcaccttcgtacttggcccacacacatgccttgcacgcaacgccagcgagaacgcgctcacagagatgttccgctctgtcttcaagctcaagaacttgcgtcgtgctcctggtccgcaaggtgagttgaagagagtcaaagaccaggatggtttcgacgtgtatatgagagaggatcgcggggcttactacccattcccttgcacgatgcaaatcgcctatgatccataa

SEQ ID NO: 3484 - protein, 1108 aa, Muscodor strobelii
  misc_feature: SGI Peptide ID NO. 560821
  misc_feature (171)..(651): Pfam Id: PF03098 Pfam Desc: Animal haem peroxidase
  misc_feature (537)..(584): Pfam Id: PF03098 Pfam Desc: Animal haem peroxidase
  misc_feature (260)..(288): Pfam Id: PF03098 Pfam Desc: Animal haem peroxidase
  misc_feature (171)..(197): Pfam Id: PF03098 Pfam Desc: Animal haem peroxidase
  misc_feature (14)..(1107): NCBI GI: 145615780 Blast Desc: MGG_10859 [Magnaporthe grisea 70-15] gi|145022926|gb|EDK06621.1| MGG_10859 [Magnaporthe grisea 70-15]
  misc_feature (43)..(1107): NCBI GI: 46138891 Blast Desc: FG10960.1 [Gibberella zeae PH-1]
  misc_feature (12)..(1107): NCBI GI: 85094267 Blast Desc: NCU05858 [Neurospora crassa OR74A] gi|28921305|gb|EAA30613.1| NCU05858 [Neurospora crassa OR74A]
  misc_feature (40)..(1107): NCBI GI: 171678523 Blast Desc: protein product [Podospora anserina] gi|170937331|emb|CAP61989.1| protein product [Podospora anserina]
  misc_feature (60)..(944): NCBI GI: 261354800 Blast Desc: linoleate diol synthase [Verticillium albo-atrum VaMs.102]
  misc_feature (9)..(1107): NCBI GI: 240106509 Blast Desc: fatty acid oxygenase, [Coccidioides posadasii C735 delta SOWgp]
  misc_feature (1)..(1101): NCBI GI: 238846179 Blast Desc: linoleate diol synthase [Microsporum canis CBS 113480]
  misc_feature (9)..(1107): NCBI GI: 119191330 Blast Desc: CIMG_00042 [Coccidioides immitis RS]
  misc_feature (42)..(1107): NCBI GI: 116204367 Blast Desc: CHGG_10067 [Chaetomium globosum CBS 148.51] gi|88176195|gb|EAQ83663.1| CHGG_10067 [Chaetomium globosum CBS 148.51]
  misc_feature (5)..(1107): NCBI GI: 242779190 Blast Desc: fatty acid oxygenase PpoC, [Talaromyces stipitatus ATCC 10500] gi|218723012|gb|EED22430.1| fatty acid oxygenase PpoC, [Talaromyces stipitatus ATCC 10500]
  misc_feature (74)..(1107): SWISSPROT Homolog: EC 1.13.11.44 Linoleate diol synthase
MADKKTNGTNGAYENGAGSHTTSNSSAGKGSSQTFGVGPAFKETPEPTPKANREGITRAFAQLGQWAHASERPYPTQNGNGTFSLSKRPSLKKDLATLSKKDIKTVITILKSKLKGQQLIDDKTMIMEQTIQLVAGLPNGSRLRDELTNNFINELWSTLDHPPLLYMGDKHQYRQADGSWNNPMNPMLGAAGSTYARTCRPSIQVGAMPDPELIYESVMKRTTYKKHPNNVSSILWYWADIVIHDLFWTDLQDITKTKTSSFLDLSPLYGSNQEMQDSIRTFKDGLMKPDTFADKRLLGQPPGVSVILIMFNRFHNYTAKNLAAINEGGRFTPPPPSLPEEKAAAAWKKYDNDLFQTARLITSGLYINITLVDYVRNIVNLNRSNTTWTLDPRVDAGPEAGTFRGAERGTGSMVSAEFNLCYRWHSCISDKDDKWIQDFYKSIFKGKDPLDLTIQDMAMGFVMFDRSIPVDPAEREFGGFKRGADGKFSDDDLVNCIADAIEDCAGSFGDRNVPQSMKPVEILGILQGRKWNVAGLNEFRKHFGLKPYETFEDINSDPDVSGALQHLYGHPDFVELYPGLVAEEAKAPMAPGVGIAPTYTISRVILSDAVCLTRGDRFYTTDYNPRSLTSWGYNEVAYDLNINQGCVFYKLFIRAFPNHFKRDSAYAHYPMCVPGETKKILTNLGRVQDFSFDRPQYTPPRANVATYGGAQYVMKSEDKYKVNWNESISSLMGTKSSSNDSAFHAAKEGCLHDQLYRGDWNTQLKSFYAQTTDRLIQEKSFKLAGKTFVDIIRDVGNIVPVQFAARTYGLPLKTKENPKGVYNEQELYSILALLFVCIFFDIDPVKSFPMRFAAKTMVSQLGELLEAHVKSVKGMFASKPKKGDLAAFGADLVKGLSKAGKSNHDIAWNELLPAAGALVPNISQIFAQAVDYYLTPNGATHIPELHRIANLPASEETDSMLLGYCMEGIRLAGTFGAYREVAADDVIREDDGSETPVKAGHRVFVSFAGASSDDKNFPEPQEVNPRRPLASYITFVLGPHTCLARNASENALTEMFRSVFKLKNLRRAPGPQGELKRVKDQDGFDVYMREDRGAYYPFPCTMQIAYDP

SEQ ID NO: 3485 - DNA, 958 bp, Muscodor strobelii
  misc_feature: SGI EST ID NO. CUFF.8695.0
  misc_feature: Variant of the nucleotide sequence at SEQ ID NO 3483
gtcattctttcggatgccgtatgcttgactcgtggtgatcggttctacacgactgactacaacccacgttcgttgacttcatggggatataacgaggtcgcatatgatctcaacattaaccagggttgcgtcttctacaagttattcatccgagcattcccaaaccacttcaagcgtgattccgcttatgctcattatcccatgtgtgtgcccggtgagaccaagaagattctcaccaacctaggtcgagtccaggatttcagcttcgaccgccctcagtacacaccaccacgggctaacgtcgcaacgtatggcggtgctcagtatgtcatgaagagcgaagataagtacaaggtgaactggaacgagagcatttcaagtttgatgggtaccaaatcgtcttctaacgattcagcatttcacgcggctaaagaaggctgtctgcatgatcagctctacagaggtgactggaacacacagcttaagtcattttatgctcaaactacagacagacttatccaagagaagtcattcaagcttgccgggaagacattcgttgacatcatccgcgacgtcggcaacatcgtcccggtgcaattcgctgcccgcacctatggactgccattgaagaccaaggagaacccgaagggcgtctacaacgaacaggaactttacagcattcttgccttactgtttgtctgcattttcttcgacattgaccctgtcaagtcgttcccgatgcggttcgcagccaagaccatggtatctcaactcggcgaactcctcgaggcgcatgtcaagtccgtcaaaggcatgttcgcgtcgaagcccaagaagggtgatcttgcggcatttggcgcagacctagtcaagggactctctaaggcaggcaagagcaaccacgacattgcctggaatgaattgcttccagctgctggtgcccttgttccgaacattt

SEQ ID NO: 3486 - DNA, 1923 bp, Muscodor strobelii
  misc_feature: SGI cDNA ID NO. 560822
  misc_feature: Encodes the peptide sequence at SEQ ID NO 3487
atggatcggtcacacttaatacccgaaccacccaggggacgaaaggggagttcagacctacgaggaagcacagtcgcttcacatgattttgcagagaccgttcaccaacctacagattccgcagcaatgaacccagcttttagtccttatcgtggtcctcgcaagctggtcttgtgcttcgatggaactggaaataaatttcgaggtgacgatagcgacagcaacatcctcaaaatattcagatgtctagatcgcgaggccggagatcagtatcactattatcaacctggaatagggacatacatcatctcgagctctttgtcccatacgagcgctactgctcgtctcaaatcttggtacctcaaggcgaaagactcggcagttggctcatcctttgatcaacatgtcgttggaggctacaagtttctcatgcgattttacaatccgggtgatgagatttacttctttggtttctctcgaggcgcgtatgtcgctcgatttttggcagaaatgctcgattatgtcggtcttctctctcacggaaatgaagaaatgattttctttgcttggaaagccttctctcaatggcaatcgcgccatcaagatgagtcaccagagggtcatgagaagcgacatgagatgtaccaatttctgaaaggattccgtgaaactttcagtcgaccagtcaagcggattcgtttccttgggctcttcgatactgtgaactcagtgccacgattcgagaccgcttggatgcagcgatcaaagttcccatacacggcccgaagtagcgccaaggtcattcgccattgcgtttcaattgacgagcggcgcgcaaagttccgacaagatctaatgtaccagaagaagccagaaaagggccaccatcatcatcacgtgccggtattttcagatattcatcaaaagtaccgagctcgtcgtccggcagtctcggttcctaaagatgaggacgggaagactcgcgagcgacgccagacacttgcgccacccgaggagcatgcattcagaccgcactcccgctcaaggtctagagcgacaaggacctcttttgagggtcgacctcatacccccgaagccccttctgaggtgtcgcacacgtatgaggatgactctgatgatgatgaacaggacgttgatgaactttggtttgccggaggtcatgctgatgttggtggcggatgggagttcgttccaggtgtcaaatcagcaagtcacatacccctagtgtacttgatcaaagaagctgagaaagctggtctcaccttcgatccagagaagctggttgagatgggcgtatcagaagcattgatggattcggagcgaaacggtcttgagcaaggtcacggccacgcacaagttcctgacattcacattgatgtgtcaagctcatctcccatggaagtaccggctgattttaatggcgataaggagctccgagatcctttcaagcggacctctcacgagaaggcatctcacaagccgaggccattccatgagatgcttcacaaagcccacgtatcacgcatccacgactctctcgaattttcttcggggcttggtaaaggtcaggtcatgagttggaagatcatggagtatatgccctttcgtagaatggatttgcgatccgacgggtcgtggaagcccattcgctggcctctgccaggcggcgaaacacgtgatatccctcatactgctcgtattcacggttcagtcattcgcagaatgaaacaagatccttcctatcgccctggcaatttgatcatcggcggcggagggcgaggtgtacgggtcgctcctgaacagtacggaattggtgaatgggaatgtgttgagggtcatggtgacccgatcggtgaggtatgggttcgaaaggaaggtgcgcctgactccttgcatgcttga

SEQ ID NO: 3487 - protein, 640 aa, Muscodor strobelii
  misc_feature: SGI Peptide ID NO. 560822
  misc_feature (37)..(633): NCBI GI: 116204369 Blast Desc: CHGG_10068 [Chaetomium globosum CBS 148.51] gi|88176196|gb|EAQ83664.1| CHGG_10068 [Chaetomium globosum CBS 148.51]
  misc_feature (1)..(639): NCBI GI: 256731166 Blast Desc: [Nectria haematococca mpVI 77-13-4]
  misc_feature (1)..(631): NCBI GI: 171678521 Blast Desc: protein product [Podospora anserina] gi|170937330|emb|CAP61988.1| protein product [Podospora anserina]
  misc_feature (26)..(639): NCBI GI: 46122987 Blast Desc: FG05871.1 [Gibberella zeae PH-1]
  misc_feature (54)..(628): NCBI GI: 261354799 Blast Desc: conserved [Verticillium albo-atrum VaMs.102]
  misc_feature (15)..(631): NCBI GI: 189193885 Blast Desc: conserved [Pyrenophora tritici-repentis Pt-1C-BFP] gi|187978845|gb|EDU45471.1| conserved [Pyrenophora tritici-repentis Pt-1C-BFP]
  misc_feature (1)..(631): NCBI GI: 145615784 Blast Desc: MGG_14308 [Magnaporthe grisea 70-15] gi|145022928|gb|EDK06623.1| MGG_14308 [Magnaporthe grisea 70-15]
  misc_feature (53)..(630): NCBI GI: 226286497 Blast Desc: conserved [Paracoccidioides brasiliensis Pb01]
  misc_feature (43)..(634): NCBI GI: 242779195 Blast Desc: conserved [Talaromyces stipitatus ATCC 10500] gi|218723013|gb|EED22431.1| conserved [Talaromyces stipitatus ATCC 10500]
  misc_feature (43)..(634): NCBI GI: 212533947 Blast Desc: conserved [Penicillium marneffei ATCC 18224] gi|210072494|gb|EEA26583.1| conserved [Penicillium marneffei ATCC 18224]
MDRSHLIPEPPRGRKGSSDLRGSTVASHDFAETVHQPTDSAAMNPAFSPYRGPRKLVLCFDGTGNKFRGDDSDSNILKIFRCLDREAGDQYHYYQPGIGTYIISSSLSHTSATARLKSWYLKAKDSAVGSSFDQHVVGGYKFLMRFYNPGDEIYFFGFSRGAYVARFLAEMLDYVGLLSHGNEEMIFFAWKAFSQWQSRHQDESPEGHEKRHEMYQFLKGFRETFSRPVKRIRFLGLFDTVNSVPRFETAWMQRSKFPYTARSSAKVIRHCVSIDERRAKFRQDLMYQKKPEKGHHHHHVPVFSDIHQKYRARRPAVSVPKDEDGKTRERRQTLAPPEEHAFRPHSRSRSRATRTSFEGRPHTPEAPSEVSHTYEDDSDDDEQDVDELWFAGGHADVGGGWEFVPGVKSASHIPLVYLIKEAEKAGLTFDPEKLVEMGVSEALMDSERNGLEQGHGHAQVPDIHIDVSSSSPMEVPADFNGDKELRDPFKRTSHEKASHKPRPFHEMLHKAHVSRIHDSLEFSSGLGKGQVMSWKIMEYMPFRRMDLRSDGSWKPIRWPLPGGETRDIPHTARIHGSVIRRMKQDPSYRPGNLIIGGGGRGVRVAPEQYGIGEWECVEGHGDPIGEVWVRKEGAPDSLHA

SEQ ID NO: 3488 - DNA, 3501 bp, Muscodor strobelii
  misc_feature: SGI EST ID NO. CUFF.8727.0
  misc_feature: Variant of the nucleotide sequence at SEQ ID NO 3486
agagggtcatgagaagcgacatgagatgtaccaatttctgaaaggattccgtgaaactttcagtcgaccagtcaagcggattcgtttccttgggctcttcgatactgtgaactcagtgccacgattcgagaccgcttggatgcagcgatcaaagttcccatacacggcccgaagtagcgccaaggtcattcgccattgcgtttcaattgacgagcggcgcgcaaagttccgacaagatctaatgtaccagaagaagccagaaaagggccaccatcatcatcacgtgccggtattttcagatattcatcaaaagtaccgagctcgtcgtccggcagtctcggttcctaaagatgaggacgggaagactcgcgagcgacgccagacacttgcgccacccgaggagcatgcattcagaccgcactcccgctcaaggtctagagcgacaaggacctcttttgagggtcgacctcatacccccgaagccccttctgaggtgtcgcacacgtatgaggatgactctgatgatgatgaacaggacgttgatgaactttggtttgccggaggtcatgctgatgttggtggcggatgggagttcgttccaggtgtcaaatcagcaagtcacatacccctagtgtacttgatcaaagaagctgagaaagctggtctcaccttcgatccagagaagctggttgagatgggcgtatcagaagcattgatggattcggagcgaaacggtcttgagcaaggtcacggccacgcacaagttcctgacattcacattgatgtgtcaagctcatctcccatggaagtaccggctgattttaatggcgataaggagctccgagatcctttcaagcggacctctcacgagaaggcatctcacaagccgaggccattccatgagatgcttcacaaagcccacgtatcacgcatccacgactctctcgaattttcttcggggcttggtaaaggtcaggtcatgagttggaagatcatggagtatatgccctttcgtagaatggatttgcgatccgacgggtcgtggaagcccattcgctggcctctgccaggcggcgaaacacgtgatatccctcatactgctcgtattcacggttcagtcattcgcagaatgaaacaagatccttcctatcgccctggcaatttgatcatcggcggcggagggcgaggtgtacgggtcgctcctgaacagtacggaattggtgaatgggaatgtgttgagggtcatggtgacccgatcggtgaggtatgggttcgaaaggaaggtgcgcctgactccttgcatgcttgaacctcaccggtatcgtaaaacccgacctcgtttacttttccttcgtaaaaactagcctctcttagattagttgtaggttgcgggtgtaatcattactggagcgaatccttgcgtgcagatcgagagtaattcgaatggctcaatactgtagcatcagcatcattaaatcataaggacattcttatgctagaatatgattcgaaacttttggactccaacatcattgcaatttgtcttccgcgtcgaaacttcaccatcagtgaaaacagccggatctcgactatgacacccggagccagcatatcctatgccgctctttgcattcatcaatcgaatttcgtgtctcgtgaggatcatacactgtctgtctacttaatgaactgccatcacatcgtacttatctcagctacagtggtcaaaagaatcaagttcccggacgatgctgatcatgggaacgaaagaaagtcgccagttctcgtcccacgtaacttatcaaggctcgtgcccagttgcttgcccgtcatcgcctttgtgactcaacgacacatataagctaccgcgtcgagagctttcgtgtcatgataaagtatgggccttttcgagatgatcgtgcccacgtgaaaattggtatggtagtcagcgtcctataatgattgtgatgattcatccttcggtgggattttcataggcctcgaatgcacacgttcccactcattggtccgtgttttaatatatgccaccatgctgaagacgccttgaccaatggcttttaagtctaaagtatagaagcgatctccgccaaggtcaagtatcgctggaaagagatcggtctctcttttgcgatcatcagcagctgggccccttggctctcctgggctatcgaggtcgtaatacaatctgtctgcagggactgacttaacctctacctctggactattccctgcttcgcgttgcaccaaatcatgatattgcagctcacatctatcaagttcaacaacctcgaaaacgaagggacggtcagaagaataggatttgactaccacacaaatatgccaatggagttttcggtcttcgaaagagaatatcaaagcaaaaagagccctattgaattgttgccaaggaatctctagccacctagtgaccggttcatactttgtcggtggacaagtaatgatagatcgaagattcagtctcgagctcaaactgattactgtgttgtctatctcaatactgttcaaatcgggccgcgatggctcgacaagccttcggatttcaatagtcctgacaagtgctctcagcggttcatcataaggaggtagaggcaaggcaaaagcgtcaaatgttggccagtgatacttcacccttgtatacaagttgttggccatttcgtaaaaaagtatgccaagagtgtgaaacaaataaggcctcggattgcgagacgattttttcaaacggatgccaaaaaagaccacataaatccgttctgggatgagattttgttcccaaaacgttggatgcacactgcttggtggggcaattcggcgcatgaagtcattcagtgtgataatcggtactgtcactcggagccgtcccggctgaacaatgggaagcacttcggggagatctggccagtccggaaatggatgcggctctatatcatgtgcattgttgaaagaatggacgctatttgccaaggaagaagaatacaactggcgatggggaaggatacctccatttggatcaagtggcaaccagccgacagcttctcgtctgatgttaaatccgaagatggtgttatcattgtgtattttccctagtatttccaattgaagtcgttggaacgcgttgaagctgccttctccgtagagcaaaggcatgtttatgccgaaaataccaaggaggcagtatgcttcatcttctggtcgggtcgtcgatcgcctagctgcccagcacatcttttcggcagtacacgcttttgacagaggagcagtcatagcgatgaactcgacattaattccggtcaaatctgagaggataggagccagttcgcgtttagtgccaaggaaggtccacgcagcatcgtagaaaacaacgttgctgggggccagtagctcctgtaacgtccaaccacgtcctacccatcggcaatcccccaaaagcgacgccaatgacggatgcaacgaaccccttgt

SEQ ID NO: 3489 - DNA, 774 bp, Muscodor strobelii
  misc_feature: SGI cDNA ID NO. 560823
  misc_feature: Encodes the peptide sequence at SEQ ID NO 3490
atgtggctcatcaatgctcagacccttcagttgaaggagttcatgggcgagaagcttccttatgcaatattgtcccatacctgggatggcgatgaactaacatttaaagagatgtctaaaggcaggggccgtgataagagaggttttcaaaaggtccggcttctatgcgaccaggccaccaaggatcagattgactgggtttggattgatacttgttgcattgacaagcgcagcagcgctgagctttcagaggccatcaactccatgttcgactggtacaagaagtctgaagtctgctatacttatatctctgatatgacaaggggacgtggttggacgttacaggagctactggcccccagcaacgttgttttctacgatgctgcgtggaccttccttggcactaaacgcgaactggctcctatcctctcagatttgaccggaattaatgtcgagttcatcgctatgactgctcctctgtcaaaagcgtgtactgccgaaaagatgtgctgggcagctaggcgatcgacgacccgaccagaagatgaagcatactgcctccttggtattttcggcataaacatgcctttgctctacggagaaggcagcttcaacgcgttccaacgacttcaattggaaatactagggaaaatacacaatgataacaccatcttcggatttaacatcagacgagaagctagccgcatccatttccggactggccagatctccccgaagtgcttcccattgttcagccgggacggctccgagtga

SEQ ID NO: 3490 - protein, 257 aa, Muscodor strobelii
  misc_feature: SGI Peptide ID NO. 560823
  misc_feature (21)..(116): Pfam Id: PF06985 Pfam Desc: Heterokaryon incompatibility protein (HET)
  misc_feature (21)..(107): Pfam Id: PF06985 Pfam Desc: Heterokaryon incompatibility protein (HET)
  misc_feature (1)..(224): NCBI GI: 46139697 Blast Desc: FG11363.1 [Gibberella zeae PH-1]
  misc_feature (3)..(220): NCBI GI: 46139005 Blast Desc: FG11017.1 [Gibberella zeae PH-1]
  misc_feature (9)..(231): NCBI GI: 256734168 Blast Desc: NECHADRAFT_78015 [Nectria haematococca mpVI 77-13-4]
  misc_feature (1)..(228): NCBI GI: 171688186 Blast Desc: protein product [Podospora anserina] gi|170944055|emb|CAP70165.1| protein product [Podospora anserina]
  misc_feature (1)..(220): NCBI GI: 145605569 Blast Desc: MGG_09177 [Magnaporthe grisea 70-15] gi|145013388|gb|EDJ98029.1| MGG_09177 [Magnaporthe grisea 70-15]
  misc_feature (11)..(248): NCBI GI: 238485594 Blast Desc: ankyrin repeat-containing protein, [Aspergillus flavus NRRL3357] gi|220698914|gb|EED55253.1| ankyrin repeat-containing protein, [Aspergillus flavus NRRL3357]
  misc_feature (1)..(252): NCBI GI: 256732223 Blast Desc: NECHADRAFT_93752 [Nectria haematococca mpVI 77-13-4]
  misc_feature (1)..(224): NCBI GI: 261354085 Blast Desc: HET domain-containing protein [Verticillium albo-atrum VaMs.102]
  misc_feature (1)..(225): NCBI GI: 156035539 Blast Desc: SS1G_12973 [Sclerotinia sclerotiorum 1980] gi|154698378|gb|EDN98116.1| SS1G_12973 [Sclerotinia sclerotiorum 1980]
  misc_feature (1)..(232): NCBI GI: 169770123 Blast Desc: [Aspergillus oryzae RIB40] gi|83767390|dbj|BAE57529.1| protein product [Aspergillus oryzae]
MWLINAQTLQLKEFMGEKLPYAILSHTWDGDELTFKEMSKGRGRDKRGFQKVRLLCDQATKDQIDWVWIDTCCIDKRSSAELSEAINSMFDWYKKSEVCYTYISDMTRGRGWTLQELLAPSNVVFYDAAWTFLGTKRELAPILSDLTGINVEFIAMTAPLSKACTAEKMCWAARRSTTRPEDEAYCLLGIFGINMPLLYGEGSFNAFQRLQLEILGKIHNDNTIFGFNIRREASRIHFRTGQISPKCFPLFSRDGSE

SEQ ID NO: 3491 - DNA, 3456 bp, Muscodor strobelii
  misc_feature: SGI EST ID NO. CUFF.8728.1
  misc_feature: Variant of the nucleotide sequence at SEQ ID NO 3489
cttggcttgtctcattcacataaactgtaggcgtcgccttcacaggcatacgggcaagcaggatgtggctcatcaatgctcagacccttcagttgaaggagttcatgggcgagaagcttccttatgcaatattgtcccatacctgggatggcgatgaactaacatttaaagagatgtctaaaggcaggggccgtgataagagaggttttcaaaaggtccggcttctatgcgaccaggccaccaaggatcagattgactgggtttggattgatacttgttgcattgacaagcgcagcagcgctgagctttcagaggccatcaactccatgttcgactggtacaagaagtctgaagtctgctatacttatatctctgatatgacaaggggttcgttgcatccgtcattggcgtcgcttttgggggattgccgatgggtaggacgtggttggacgttacaggagctactggcccccagcaacgttgttttctacgatgctgcgtggaccttccttggcactaaacgcgaactggctcctatcctctcagatttgaccggaattaatgtcgagttcatcgctatgactgctcctctgtcaaaagcgtgtactgccgaaaagatgtgctgggcagctaggcgatcgacgacccgaccagaagatgaagcatactgcctccttggtattttcggcataaacatgcctttgctctacggagaaggcagcttcaacgcgttccaacgacttcaattggaaatactagggaaaatacacaatgataacaccatcttcggatttaacatcagacgagaagctgtcggctggttgccacttgatccaaatggaggtatccttccccatcgccagttgtattcttcttccttggcaaatagcgtccattctttcaacaatgcacatgatatagagccgcatccatttccggactggccagatctccccgaagtgcttcccattgttcagccgggacggctccgagtgacagtaccgattatcacactgaatgacttcatgcgccgaattgccccaccaagcagtgtgcatccaacgttttgggaacaaaatctcatcccagaacggatttatgtggtcttttttggcatccgtttgaaaaaatcgtctcgcaatccgaggccttatttgtttcacactcttggcatacttttttacgaaatggccaacaacttgtatacaagggtgaagtatcactggccaacatttgacgcttttgccttgcctctacctccttatgatgaaccgctgagagcacttgtcaggactattgaaatccgaaggcttgtcgagccatcgcggcccgatttgaacagtattgagatagacaacacagtaatcagtttgagctcgagactgaatcttcgatctatcattacttgtccaccgacaaagtatgaaccggtcactaggtggctagagattccttggcaacaattcaatagggctctttttgctttgatattctctttcgaagaccgaaaactccattggcatatttgtgtggtagtcaaatcctattcttctgaccgtcccttcgttttcgaggttgttgaacttgatagatgtgagctgcaatatcatgatttggtgcaacgcgaagcagggaatagtccagaggtagaggttaagtcagtccctgcagacagattgtattacgacctcgatagcccaggagagccaaggggcccagctgctgatgatcgcaaaagagagaccgatctctttccagcgatacttgaccttggcggagatcgcttctatactttagacttaaaagccattggtcaaggcgtcttcagcatggtggcatatattaaaacacggaccaatgagtgggaacgtgtgcattcgaggcctatgaaaatcccaccgaaggatgaatcatcacaatcattataggacgctgactaccataccaattttcacgtgggcacgatcatctcgaaaaggcccatactttatcatgacacgaaagctctcgacgcggtagcttatatgtgtcgttgagtcacaaaggcgatgacgggcaagcaactgggcacgagccttgataagttacgtgggacgagaactggcgactttctttcgttcccatgatcagcatcgtccgggaacttgattcttttgaccactgtagctgagataagtacgatgtgatggcagttcattaagtagacagacagtgtatgatcctcacgagacacgaaattcgattgatgaatgcaaagagcggcataggatatgctggctccgggtgtcatagtcgagatccggctgttttcactgatggtgaagtttcgacgcggaagacaaattgcaatgatgttggagtccaaaagtttcgaatcatattctagcataagaatgtccttatgatttaatgatgctgatgctacagtattgagccattcgaattactctcgatctgcacgcaaggattcgctccagtaatgattacacccgcaacctacaactaatctaagagaggctagtttttacgaaggaaaagtaaacgaggtcgggttttacgataccggtgaggttcaagcatgcaaggagtcaggcgcaccttcctttcgaacccatacctcaccgatcgggtcaccatgaccctcaacacattcccattcaccaattccgtactgttcaggagcgacccgtacacctcgccctccgccgccgatgatcaaattgccagggcgataggaaggatcttgtttcattctgcgaatgactgaaccgtgaatacgagcagtatgagggatatcacgtgtttcgccgcctggcagaggccagcgaatgggcttccacgacccgtcggatcgcaaatccattctacgaaagggcatatactccatgatcttccaactcatgacctgacctttaccaagccccgaagaaaattcgagagagtcgtggatgcgtgatacgtgggctttgtgaagcatctcatggaatggcctcggcttgtgagatgccttctcgtgagaggtccgcttgaaaggatctcggagctccttatcgccattaaaatcagccggtacttccatgggagatgagcttgacacatcaatgtgaatgtcaggaacttgtgcgtggccgtgaccttgctcaagaccgtttcgctccgaatccatcaatgcttctgatacgcccatctcaaccagcttctctggatcgaaggtgagaccagctttctcagcttctttgatcaagtacactaggggtatgtgacttgctgatttgacacctgaataattttgtgtcagctctctgcggattaatctacgcgtttcacgatctcttacctggaacgaactcccatccgccaccaacatcagcatgacctccggcaaacctgaacaaggaaagtcaataggactgagcagttattttgtgaccataaccagttactcaccaaagttca

SEQ ID NO: 3492 - DNA, 3786 bp, Muscodor strobelii
  misc_feature: SGI cDNA ID NO. 560824
  misc_feature: Encodes the peptide sequence at SEQ ID NO 3493
atggccgactacgagtgggaaggcgatggcgagggctacaccgagtacatcgacagcatcacgtcggaggactgttggaccgtcatcaacgcctacttcctgaccaagggcctcgtcgcccagcagatcgactcgttcaacgacttccaggccaccaccatccaggagctgctcgacgagtactcccacctcagcatcgaccagaacaacccggcctctgatgacggccgcgagatcatctgccgccgctacgagctcaagttcggcaacgtcaccatctcccgccccgtcgtctccgagagcgagggcacctcctcgccgctcctcccctacgagtgccgcgatcgcaacctgacctacgcctcccccatctacgccaaggtcgacagcaacgtctccgtctgcaccgaggagcccgtcggcctcgccgacatgaccgacgagcaggagcgcacctacaaggacaccggcatccgccccaccaagctcgtctggcaggacgaggagaacgtcctcaagtacaagcccaacggcgacgccgtcgaggcccccgacaacctcttcatcggcaagctgcccgtcatggtcaagagcgaggcctgccacctgtccaaggagaccgacgaggagctgttcatgctcaacgagtgcccctacgaccagggcggctacttcatcatcaacggctccgagaaggtcctcattgcccaggagcgctccgccgccaacatcgtccaggtcttcaagaaggcccagccctctcccttctcctacaccgccgagatccgcagcgccctcgagaagggctcccgcctcatctcctccctcatgctcaagctctacaccaagggcgacaccaccaagggcggctacggccagaccatccacacctcgctgccctacgtcaagtcggacgtccccatcgccatcgtcttccgcgccctcggcaccgtcagcgacgaggagatcctcaaccacatctgctacgaccgcaacgacagccagatgctcgagatgctgcggccctgcatcgaggaggccttctgcatccaggaccgcgaggtcgccctcgactacatcggcaagcgtggcaaccagaccatgggcatgacgcgcgaccgtcgtatccgcgccgccaaggacatcctgcagaaggagatgctccctcacatctcgcaggaggagggctgcgagaccagaaaggccttctttctggggtacatggtgcacaagctgctcctgtgcgcgctgggccggcgcgacacggatgatcgcgaccactttggcaagaagaggctggatctggccggtcctctgctggccaagctcttccgcaacattgtccgacgcatgacgcaagaagtcctgtctcacttgaagcgaagcatcgaacagggcaagcagttcaacatcgccctggccgttaagtctaacatcattaccgccgggctcaagtactccctcgccaccggcaactggggcgaccagaagaaagccatgtcctcgaccgcaggtgtctcccaggtgctgaacagatacacttttgcgtccacactctcgcatctgcggagaaccaacactccggtcggccgagatggcaagcttgcgaagccccgccagcttcacaacacgcactggggcctggtctgtcccgctgagacgcccgagggccaggcctgtggtctggtcaagaacttgtccctcatgtgctccgtcagtgtcggtacttcgacagagcccatcatcgagtacatggcctcgcgaaacatggagattctggaagagtacgagccccagcgctatcctaacgccaccaagatcttcctcaacggctcgtggatcggtgtacatcacgaccccaagtctctggtgagagatgtccagcagctgcgccgaagcaatcagatccctgcagaggtatctttggttcgtgacattcgtgatcgtgagttcaagatcttttcggatgcgggccgagtcatgcgccccctgtacgttgtggaacaagaggatacgggaactgccgtcaagggacaactggccctgaccagagagatgatcaaagaactcaaagatgacggagagcctgaaaaggtattaaagagaggatactactacggctggcagggcttggtccacgccggtgcgatcgagtatttagacgccgaggaagaagagacggccatgatttgcatgacgcccgaagaccttgaaaactaccgacttaacaaacttggtgagggcggcggcgacgagaaccctgctgacgcgcctaacaagcgtctgaagaccaagatcaaccctactacccacctgtacactcattgtgagattcatccgagcatgctgttgggcatctgcgcaagtataatacccttcccagatcacaatcagtctcctcgtaatacatatcaatccgctatgggtaagcaagctatgggtttcttcctcacgaattactcccgacgcatggacaccatggcaaacatcctctactacccccagaagcccctgggcacgacgcactctatggaattcctgaagttccgagagttaccagcgggccagaatgccatcgtcgctattgcttgctattccggttacaatcaggaagactctgtcatcatgaaccagagcagcatcgatcgaggtctcttccgcagtctgttcttccgttcgtactccgactctgagaaacgagtgggtatcaacacggtggagcagttcgagaagcccttccgccaggataccctgcgtctgaagcagggcacatatgacaagctggacgacgacggcatcattgctcccggtattcgcgtgtcgggagaggatatcatcattggcaaaacagcgccgattagtccggataacgaggagatggggcagcggctcaaggtgcacgtgaaacgagacgcctctactcctctccgcagtaccgagagcggaatcgtcgaccaagccatcctaaccactaatgctgacgggctgcgctattgcaaagtacgagttcggactaccaagatcccccagattggcgacaagtttgcttctcgccacggtcaaaagggcacgatcggattgacgtgccgcacagaggacatgcccttcactcgcgaaggcttgacccctgatatcatcatcaacccccatgcgattccgtcacgtatgacgatcgcccatttgattgaatgtctgttgagtaaagtcgccacgcttaaggggatggagggcgacgcaacgccgttcacggatgttacggtagactcggtctcgagtctactgagagatcatggataccagtcgcgtggtttcgagatcatgtaccacggacacaccggacgcaaattgcgggctcaggtcttctttgggcccacctactaccagcgccttcgacacatggtggatgacaagatccacgctcgtgctcgtggtccggtgcagatcatgacgcgtcagcccgtcgaaggtcgtgcgcgtgatggtggtctccgtttcggagaaatggaacgtgattgcatgattgcccacggggccgcggccttcctcaaggaacgcctgttcgaggtttcggacgcgttcagagtccacatctgcgagatttgtgggctcatgacgcctgtagctcaacttggacagcagaacttcgagtgccgtccctgcaagaacaagaccaagattgctcagatccacattccctacgctgccaagcttctgttccaggagttgcaagccatgaacattgcctctcgcatgttcactgatcgatccggcgtgtcgattcgctag

SEQ ID NO: 3493 - protein, 1261 aa, Muscodor strobelii
  misc_feature: SGI Peptide ID NO. 560824
  misc_feature (708)..(780): Pfam Id: PF04567 Pfam Desc: RNA polymerase Rpb2, domain 5
  misc_feature (37)..(491): Pfam Id: PF04563 Pfam Desc: RNA polymerase beta subunit
  misc_feature (241)..(434): Pfam Id: PF04561 Pfam Desc: RNA polymerase Rpb2, domain 2
  misc_feature (508)..(573): Pfam Id: PF04565 Pfam Desc: RNA polymerase Rpb2, domain 3
  misc_feature (607)..(669): Pfam Id: PF04566 Pfam Desc: RNA polymerase Rpb2, domain 4
  misc_feature (785)..(1159): Pfam Id: PF00562 Pfam Desc: RNA polymerase Rpb2, domain 6
  misc_feature (1161)..(1254): Pfam Id: PF04560 Pfam Desc: RNA polymerase Rpb2, domain 7
  misc_feature (2)..(1261): NCBI GI: 261355778 Blast Desc: DNA-directed RNA polymerase II subunit RPB2 [Verticillium albo-atrum VaMs.102]
  misc_feature (1)..(1261): NCBI GI: 229662009 Blast Desc: DNA-dependent RNA polymerase II beta subunit [Epichloe festucae]
  misc_feature (1)..(1261): NCBI GI: 256726245 Blast Desc: NECHADRAFT_70495 [Nectria haematococca mpVI 77-13-4]
  misc_feature (18)..(1261): NCBI GI: 28881404 Blast Desc: DNA-dependent RNA polymerase II RPB140 (RPB2) [Neurospora crassa]
  misc_feature (3)..(1261): NCBI GI: 171677674 Blast Desc: protein product [Podospora anserina] gi|170936905|emb|CAP61564.1| protein product [Podospora anserina]
  misc_feature (1)..(1261): NCBI GI: 156065749 Blast Desc: SS1G_00885 [Sclerotinia sclerotiorum 1980] gi|154691744|gb|EDN91482.1| SS1G_00885 [Sclerotinia sclerotiorum 1980]
  misc_feature (2)..(1261): NCBI GI: 39945464 Blast Desc: MGG_04714 [Magnaporthe grisea 70-15] gi|145011262|gb|EDJ95918.1| MGG_04714 [Magnaporthe grisea 70-15]
  misc_feature (1)..(1208): NCBI GI: 154304837 Blast Desc: BC1G_09004 [Botryotinia fuckeliana B05.10] gi|150853866|gb|EDN29058.1| BC1G_09004 [Botryotinia fuckeliana B05.10]
  misc_feature (1)..(1261): NCBI GI: 239609658 Blast Desc: DNA-directed RNA polymerase II polypeptide [Ajellomyces dermatitidis ER-3]
  misc_feature (12)..(1261): NCBI GI: 154279576 Blast Desc: DNA-directed RNA polymerase II 138 kDa polypeptide [Ajellomyces capsulatus NAm1] gi|150412544|gb|EDN07931.1| DNA-directed RNA polymerase II 138 kDa polypeptide [Ajellomyces
  misc_feature (13)..(1261): SWISSPROT Homolog: EC 2.7.7.6 DNA-directed RNA polymerase
MADYEWEGDGEGYTEYIDSITSEDCWTVINAYFLTKGLVAQQIDSFNDFQATTIQELLDEYSHLSIDQNNPASDDGREIICRRYELKFGNVTISRPVVSESEGTSSPLLPYECRDRNLTYASPIYAKVDSNVSVCTEEPVGLADMTDEQERTYKDTGIRPTKLVWQDEENVLKYKPNGDAVEAPDNLFIGKLPVMVKSEACHLSKETDEELFMLNECPYDQGGYFIINGSEKVLIAQERSAANIVQVFKKAQPSPFSYTAEIRSALEKGSRLISSLMLKLYTKGDTTKGGYGQTIHTSLPYVKSDVPIAIVFRALGTVSDEEILNHICYDRNDSQMLEMLRPCIEEAFCIQDREVALDYIGKRGNQTMGMTRDRRIRAAKDILQKEMLPHISQEEGCETRKAFFLGYMVHKLLLCALGRRDTDDRDHFGKKRLDLAGPLLAKLFRNIVRRMTQEVLSHLKRSIEQGKQFNIALAVKSNIITAGLKYSLATGNWGDQKKAMSSTAGVSQVLNRYTFASTLSHLRRTNTPVGRDGKLAKPRQLHNTHWGLVCPAETPEGQACGLVKNLSLMCSVSVGTSTEPIIEYMASRNMEILEEYEPQRYPNATKIFLNGSWIGVHHDPKSLVRDVQQLRRSNQIPAEVSLVRDIRDREFKIFSDAGRVMRPLYVVEQEDTGTAVKGQLALTREMIKELKDDGEPEKVLKRGYYYGWQGLVHAGAIEYLDAEEEETAMICMTPEDLENYRLNKLGEGGGDENPADAPNKRLKTKINPTTHLYTHCEIHPSMLLGICASIIPFPDHNQSPRNTYQSAMGKQAMGFFLTNYSRRMDTMANILYYPQKPLGTTHSMEFLKFRELPAGQNAIVAIACYSGYNQEDSVIMNQSSIDRGLFRSLFFRSYSDSEKRVGINTVEQFEKPFRQDTLRLKQGTYDKLDDDGIIAPGIRVSGEDIIIGKTAPISPDNEEMGQRLKVHVKRDASTPLRSTESGIVDQAILTTNADGLRYCKVRVRTTKIPQIGDKFASRHGQKGTIGLTCRTEDMPFTREGLTPDIIINPHAIPSRMTIAHLIECLLSKVATLKGMEGDATPFTDVTVDSVSSLLRDHGYQSRGFEIMYHGHTGRKLRAQVFFGPTYYQRLRHMVDDKIHARARGPVQIMTRQPVEGRARDGGLRFGEMERDCMIAHGAAAFLKERLFEVSDAFRVHICEICGLMTPVAQLGQQNFECRPCKNKTKIAQIHIPYAAKLLFQELQAMNIASRMFTDRSGVSIR

SEQ ID NO: 3494 - DNA, 4620 bp, Muscodor strobelii
  misc_feature: SGI EST ID NO. CUFF.8936.1
  misc_feature: Variant of the nucleotide sequence at SEQ ID NO 3492
gctgcctttgcctcgtcttttgccctttgcaaagccatcttcagcagcttcaccagcttcccctccacgcccgcgtcacggcaacacattttggggacactcgaagcaacgcgctcttgattcttgatcgcgacatccaccacaggagactgcgctcgagttcactcgggtcgtgtggtcgtgcgcgcgttgcgtgggtgctgtggcccatcgtaatcaatcaatcatcatctgatcctctccttctcttctagccttgccatctttcctgcctgctgtcgccctgggctccgacaacaccatctcgcccttccctcaccccgcgcctactgcttttctctgatgaccatcgacatcgacatcaacatcaacaaccaccagcagcaccacccgattcagacgcccgcccgcccgtcttagtcatctctctctcaaccatcacaaattcatcgcgccaagtcattgctatagcatatataagccagcatggccgactacgagtgggaaggcgatggcgagggctacaccgagtacatcgacagcatcacgtcggaggactgttggaccgtcatcaacgcctacttcctgaccaagggcctcgtcgcccagcagatcgactcgttcaacgacttccaggccaccaccatccaggagctgctcgacgagtactcccacctcagcatcgaccagaacaacccggcctctgatgacggccgcgagatcatctgccgccgctacgagctcaagttcggcaacgtcaccatctcccgccccgtcgtctccgagagcgagggcacctcctcgccgctcctcccctacgagtgccgcgatcgcaacctgacctacgcctcccccatctacgccaaggtcgacagcaacgtctccgtctgcaccgaggagcccgtcggcctcgccgacatgaccgacgagcaggagcgcacctacaaggacaccggcatccgccccaccaagctcgtctggcaggacgaggagaacgtcctcaagtacaagcccaacggcgacgccgtcgaggcccccgacaacctcttcatcggcaagctgcccgtcatggtcaagagcgaggcctgccacctgtccaaggagaccgacgaggagctgttcatgctcaacgagtgcccctacgaccagggcggctacttcatcatcaacggctccgagaaggtcctcattgcccaggagcgctccgccgccaacatcgtccaggtcttcaagaaggcccagccctctcccttctcctacaccgccgagatccgcagcgccctcgagaagggctcccgcctcatctcctccctcatgctcaagctctacaccaagggcgacaccaccaagggcggctacggccagaccatccacacctcgctgccctacgtcaagtcggacgtccccatcgccatcgtcttccgcgccctcggcaccgtcagcgacgaggagatcctcaaccacatctgctacgaccgcaacgacagccagatgctcgagatgctgcggccctgcatcgaggaggccttctgcatccaggaccgcgaggtcgccctcgactacatcggcaagcgtggcaaccagaccatgggcatgacgcgcgaccgtcgtatccgcgccgccaaggacatcctgcagaaggagatgctccctcacatctcgcaggaggagggctgcgagaccagaaaggccttctttctggggtacatggtgcacaagctgctcctgtgcgcgctgggccggcgcgacacggatgatcgcgaccactttggcaagaagaggctggatctggccggtcctctgctggccaagctcttccgcaacattgtccgacgcatgacgcaagaagtcctgtctcacttgaagcgaagcatcgaacagggcaagcagttcaacatcgccctggccgttaagtctaacatcattaccgccgggctcaagtactccctcgccaccggcaactggggcgaccagaagaaagccatgtcctcgaccgcaggtgtctcccaggtgctgaacagatacacttttgcgtccacactctcgcatctgcggagaaccaacactccggtcggccgagatggcaagcttgcgaagccccgccagcttcacaacacgcactggggcctggtctgtcccgctgagacgcccgagggccaggcctgtggtctggtcaagaacttgtccctcatgtgctccgtcagtgtcggtacttcgacagagcccatcatcgagtacatggcctcgcgaaacatggagattctggaagagtacgagccccagcgctatcctaacgccaccaagatcttcctcaacggctcgtggatcggtgtacatcacgaccccaagtctctggtgagagatgtccagcagctgcgccgaagcaatcagatccctgcagaggtatctttggttcgtgacattcgtgatcgtgagttcaagatcttttcggatgcgggccgagtcatgcgccccctgtacgttgtggaacaagaggatacgggaactgccgtcaagggacaactggccctgaccagagagatgatcaaagaactcaaagatgacggagagcctgaaaaggtattaaagagaggatactactacggctggcagggcttggtccacgccggtgcgatcgagtatttagacgccgaggaagaagagacggccatgatttgcatgacgcccgaagaccttgaaaactaccgacttaacaaacttggtgagggcggcggcgacgagaaccctgctgacgcgcctaacaagcgtctgaagaccaagatcaaccctactacccacctgtacactcattgtgagattcatccgagcatgctgttgggcatctgcgcaagtataatacccttcccagatcacaatcagtctcctcgtaatacatatcaatccgctatgggtaagcaagctatgggtttcttcctcacgaattactcccgacgcatggacaccatggcaaacatcctctactacccccagaagcccctgggcacgacgcactctatggaattcctgaagttccgagagttaccagcgggccagaatgccatcgtcgctattgcttgctattccggttacaatcaggaagactctgtcatcatgaaccagagcagcatcgatcgaggtctcttccgcagtctgttcttccgttcgtactccgactctgagaaacgagtgggtatcaacacggtggagcagttcgagaagcccttccgccaggataccctgcgtctgaagcagggcacatatgacaagctggacgacgacggcatcattgctcccggtattcgcgtgtcgggagaggatatcatcattggcaaaacagcgccgattagtccggataacgaggagatggggcagcggctcaaggtgcacgtgaaacgagacgcctctactcctctccgcagtaccgagagcggaatcgtcgaccaagccatcctaaccactaatgctgacgggctgcgctattgcaaagtacgagttcggactaccaagatcccccagattggcgacaagtttgcttctcgccacggtcaaaagggcacgatcggattgacgtgccgcacagaggacatgcccttcactcgcgaaggcttgacccctgatatcatcatcaacccccatgcgattccgtcacgtatgacgatcgcccatttgattgaatgtctgttgagtaaagtcgccacgcttaaggggatggagggcgacgcaacgccgttcacggatgttacggtagactcggtctcgagtctactgagagatcatggataccagtcgcgtggtttcgagatcatgtaccacggacacaccggacgcaaattgcgggctcaggtcttctttgggcccacctactaccagcgccttcgacacatggtggatgacaagatccacgctcgtgctcgtggtccggtgcagatcatgacgcgtcagcccgtcgaaggtcgtgcgcgtgatggtggtctccgtttcggagaaatggaacgtgattgcatgattgcccacggggccgcggccttcctcaaggaacgcctgttcgaggtttcggacgcgttcagagtccacatctgcgagatttgtgggctcatgacgcctgtagctcaacttggacagcagaacttcgagtgccgtccctgcaagaacaagaccaagattgctcagatccacattccctacgctgccaagcttctgttccaggagttgcaagccatgaacattgcctctcgcatgttcactgatcgatccggcgtgtcgattcgctagttggtttaagttcgctggtgcctcatctgtcgctacggagaaagtgtcgggcacacatcgagagccacgcagcgtgtaggattggtttccacattttagtatttttattatcattgactgcatagggaaggcgttcttttaccgtgccgatactggcattccggcacgaagtactctatggaatcgcgaacgatgcaacaaaagaaaggtaaaatgcggggatgaagatgatactccgccatagcgtatgcgattccgagaggctagatataccactgaaattgaatgatgaataaataatattgtataatcaactaagatccaaaaccacggcgtgctttactcgag

SEQ ID NO: 3495 - DNA, 1119 bp, Muscodor strobelii
  misc_feature: SGI cDNA ID NO. 560825
  misc_feature: Encodes the peptide sequence at SEQ ID NO 3496
atggacacctcactttcaccctcatccttcgacccacaaacccaaacattcaccatcctcgccacaaacgggtcaagcatcccggtctccatgtccgccatcgagtcccaacgcatccgcctcttcgccatatccataaactatggagtccaactcggcctctgtctcctctcactcatattcacgcttctcctgctgccaacctacaaactacgccgtccattaaacatcgtccaaaccctcgcgctattcgtcgccgtcatcagattagtgcttctcgtgctgtatttccccgggccgttagcaagttattacgtagcttggacgcgagacacgacggttttggatgcgggtgggacgggagagaaagcttataatgaaatcataatcagtaattcatttggcgcactccaattcgctctgatcgaagttgcgttgatcctgcagagttgggcgttgatacggacctggggcacgcggtggcaggctcctgtcttgtgcgcggggattagtatcgcggttgcgactgtggtgttgaaagtgctctgggttgttcactattcgaaagctgttaggggcaatttgttaccgattcctttggatgctgtggggaaggccgcggtcgttctgggcgcgattagtatttttttcttcgaggcggttttcgtggctcatgttacgggacatctcgctgcgactaggggcgtgttgagacgcagtgagaagggacttagtagtcttgagattcttgcgttggggaacggggttttgatgttgcttcccacactcttcgcaggcctcgatatcgcggctgggcctggacatacgaaaatcctgcctttcgatgccggatcttgggttcaaaccctcgtcgcgtctggactaccactcataggtctcgtcgcattctaccgcggatccgaggctagatcaagagaccgccgcgtgagtttcttcgtcaatgggaacgggcctattttcgactctagacagcgagactcgacgacgttgagagatgggtcgttaatgcagagccccgagccagctggtggtagaattagtagtttagatgacaggactgtcgaggcgcagactaagcctggtactattacatggtga

SEQ ID NO: 3496 - protein, 372 aa, Muscodor strobelii
  misc_feature: SGI Peptide ID NO. 560825
  misc_feature (10)..(302): NCBI GI: 256725842 Blast Desc: NECHADRAFT_81958 [Nectria haematococca mpVI 77-13-4]
  misc_feature (5)..(302): NCBI GI: 46111547 Blast Desc: FG02655.1 [Gibberella zeae PH-1]
  misc_feature (13)..(302): NCBI GI: 283468491 Blast Desc: pheromone receptor 2 [Neurospora sp. FGSC 8818]
  misc_feature (13)..(302): NCBI GI: 283468475 Blast Desc: pheromone receptor 2 [Neurospora intermedia]
  misc_feature (13)..(302): NCBI GI: 283468455 Blast Desc: pheromone receptor 2 [Neurospora crassa]
  misc_feature (13)..(302): NCBI GI: 283468481 Blast Desc: pheromone receptor 2 [Neurospora sitophila]
  misc_feature (13)..(302): NCBI GI: 283468467 Blast Desc: pheromone receptor 2 [Neurospora crassa]
  misc_feature (13)..(302): NCBI GI: 283468489 Blast Desc: pheromone receptor 2 [Neurospora sp. FGSC 8817]
  misc_feature (13)..(302): NCBI GI: 283468485 Blast Desc: pheromone receptor 2 [Neurospora tetrasperma]
  misc_feature (13)..(302): NCBI GI: 283468483 Blast Desc: pheromone receptor 2 [Neurospora tetrasperma]
MDTSLSPSSFDPQTQTFTILATNGSSIPVSMSAIESQRIRLFAISINYGVQLGLCLLSLIFTLLLLPTYKLRRPLNIVQTLALFVAVIRLVLLVLYFPGPLASYYVAWTRDTTVLDAGGTGEKAYNEIIISNSFGALQFALIEVALILQSWALIRTWGTRWQAPVLCAGISIAVATVVLKVLWVVHYSKAVRGNLLPIPLDAVGKAAVVLGAISIFFFEAVFVAHVTGHLAATRGVLRRSEKGLSSLEILALGNGVLMLLPTLFAGLDIAAGPGHTKILPFDAGSWVQTLVASGLPLIGLVAFYRGSEARSRDRRVSFFVNGNGPIFDSRQRDSTTLRDGSLMQSPEPAGGRISSLDDRTVEAQTKPGTITW

SEQ ID NO: 3497 - DNA, 951 bp, Muscodor strobelii
  misc_feature: SGI cDNA ID NO. 560826
  misc_feature: Reduced expression when VOC is produced
  misc_feature: Encodes the peptide sequence at SEQ ID NO 3498
atggctgagcagctgattctcaagggcaccctcgagggccacaatggctgggtcaccagcttggccacctccatggagaaccccaacatgctcctgtccgccagccgtgacaagacgctcatcatctggaacctgacccgcgacgagtcgcaatacggctaccccaagcgcgccctcaaaggccactcccacatcgtctccgactgtgtcatctcctccgacggcgcctacgctctgtccgcctcgtgggacaagaccctacgcctgtgggagctcgccaccggcaacacgacgcgccgcttcgtcggccacaccaacgacgtcctctccgtctccttctccgccgacaacagacagatcgtctcgggctcccgcgaccgcaccatcaagctgtggaacaccctcggcgactgcaagttcaccatcactgacaagggccacaccgagtgggtctcgtgcgtccgcttcagccccaacccccagaaccccgtcatcgtctcttcgtcttgggacaagctcgtcaaggtttgggaactctcgacctgcaagctccagacggaccacatcggccacactggctacatcaacaccgtcaccatctcccccgacggctccctctgtgcctccggcggcaaggacggtaccacgatgctttgggaccttaacgagtcgaagcacctgtactctctgaatgccggcgacgagatccacgccctcgtcttctcccccaaccgctactggctctgcgccgccaccgccagcagcatcatcatcttcgacctcgagaagaagtccaaggtcgacgagctcaagcccgagttcacctcggtcggcaagaagagccgcgagcccgagtgcgtctcgctggcctggagcgccgacggccagaccctcttcgctggctacaccgacaacatcatccgtgcctggggcgtcatgtcgcgggcctaa

SEQ ID NO: 3498 - protein, 316 aa, Muscodor strobelii
  misc_feature: SGI Peptide ID NO. 560826
  misc_feature (95)..(133): Pfam Id: PF00400 Pfam Desc: WD domain, G-beta repeat
  misc_feature (138)..(178): Pfam Id: PF00400 Pfam Desc: WD domain, G-beta repeat
  misc_feature (182)..(220): Pfam Id: PF00400 Pfam Desc: WD domain, G-beta repeat
  misc_feature (53)..(91): Pfam Id: PF00400 Pfam Desc: WD domain, G-beta repeat
  misc_feature (5)..(44): Pfam Id: PF00400 Pfam Desc: WD domain, G-beta repeat
  misc_feature (1)..(316): NCBI GI: 116201077 Blast Desc: guanine nucleotide-binding protein beta subunit-like protein [Chaetomium globosum CBS 148.51] gi|88176941|gb|EAQ84409.1| guanine nucleotide-binding protein CBS
  misc_feature (1)..(316): NCBI GI: 46136709 Blast Desc: GBLP_NEUCR Guanine nucleotide-binding protein beta subunit-like protein (Cross-pathway control WD-repeat protein cpc-2) [Gibberella zeae PH-1]
  misc_feature (1)..(316): NCBI GI: 261358508 Blast Desc: G-protein beta subunit [Verticillium albo-atrum VaMs.102]
  misc_feature (1)..(316): NCBI GI: 52000514 Blast Desc: G-protein beta like WD repeat protein [Fusarium oxysporum]
  misc_feature (1)..(316): NCBI GI: 39945474 Blast Desc: MGG_04719 [Magnaporthe grisea 70-15] gi|145011257|gb|EDJ95913.1| MGG_04719 [Magnaporthe grisea 70-15]
  misc_feature (1)..(316): NCBI GI: 256732017 Blast Desc: [Nectria haematococca mpVI 77-13-4]
  misc_feature (1)..(316): NCBI GI: 88766385 Blast Desc: G-protein beta subunit [Metarhizium anisopliae]
  misc_feature (1)..(316): NCBI GI: 171677424 Blast Desc: protein product [Podospora anserina] gi|170936780|emb|CAP61438.1| protein product [Podospora anserina]
  misc_feature (1)..(316): NCBI GI: 3023852 Blast Desc: GBLP_NEUCR RecName: Full=Guanine nucleotide-binding protein subunit beta-like protein; AltName: Full=Cross-pathway control WD-repeat protein cpc-2 gi|971566|emb|CAA57460.1| CPC2
  misc_feature (1)..(316): NCBI GI: 154301805 Blast Desc: guanine nucleotide-binding protein beta subunit [Botryotinia fuckeliana B05.10] gi|156065779|ref|XP_001598811.1| SS1G_00900 [Sclerotinia sclerotiorum 1980] guanine protein beta
  misc_feature (10)..(257): SWISSPROT Homolog: EC 2.7.11.1 Non-specific serine/threonine protein kinase
  misc_feature: Useful for introducing or modulating the production of volatile compounds
MAEQLILKGTLEGHNGWVTSLATSMENPNMLLSASRDKTLIIWNLTRDESQYGYPKRALKGHSHIVSDCVISSDGAYALSASWDKTLRLWELATGNTTRRFVGHTNDVLSVSFSADNRQIVSGSRDRTIKLWNTLGDCKFTITDKGHTEWVSCVRFSPNPQNPVIVSSSWDKLVKVWELSTCKLQTDHIGHTGYINTVTISPDGSLCASGGKDGTTMLWDLNESKHLYSLNAGDEIHALVFSPNRYWLCAATASSIIIFDLEKKSKVDELKPEFTSVGKKSREPECVSLAWSADGQTLFAGYTDNIIRAWGVMSRA

SEQ ID NO: 3499 - DNA, 1359 bp, Muscodor strobelii
  misc_feature: SGI EST ID NO. CUFF.8765.0
  misc_feature: Variant of the nucleotide sequence at SEQ ID NO 3497
gattgagaccctaagattgcaggccagccccattctgcgagcccacacaatcgggcggacaattttcgaggtgctcgattatttcgcagagtctcaaaagatcgcggtcaccagcacgacacctcgcatcacaaccccagaggcctgccaaccgtccgacagcatcaccaccgcgcaaccatggctgagcagctgattctcaagggcaccctcgagggccacaatggctgggtcaccagcttggccacctccatggagaaccccaacatgctcctgtccgccagccgtgacaagacgctcatcatctggaacctgacccgcgacgagtcgcaatacggctaccccaagcgcgccctcaaaggccactcccacatcgtctccgactgtgtcatctcctccgacggcgcctacgctctgtccgcctcgtgggacaagaccctacgcctgtgggagctcgccaccggcaacacgacgcgccgcttcgtcggccacaccaacgacgtcctctccgtctccttctccgccgacaacagacagatcgtctcgggctcccgcgaccgcaccatcaagctgtggaacaccctcggcgactgcaagttcaccatcactgacaagggccacaccgagtgggtctcgtgcgtccgcttcagccccaacccccagaaccccgtcatcgtctcttcgtcttgggacaagctcgtcaaggtttgggaactctcgacctgcaagctccagacggaccacatcggccacactggctacatcaacaccgtcaccatctcccccgacggctccctctgtgcctccggcggcaaggacggtaccacgatgctttgggaccttaacgagtcgaagcacctgtactctctgaatgccggcgacgagatccacgccctcgtcttctcccccaaccgctactggctctgcgccgccaccgccagcagcatcatcatcttcgacctcgagaagaagtccaaggtcgacgagctcaagcccgagttcacctcggtcggcaagaagagccgcgagcccgagtgcgtctcgctggcctggagcgccgacggccagaccctcttcgctggctacaccgacaacatcatccgtgcctggggcgtcatgtcgcgggcctaagtgcatcatctgtcattgactgggcgtatggacggggctatcatttgaggtctttcacacggaagtgggcaaaacaaacagcactagcacttctgtcacaggcagtcgacatagagagtgaactgctttttgccattacgacttggatgccgccacgaggtgtcgcactccaaacaaaatgagttaaacgaaatgaaagtcaataatcttcaaaaaactaaacccggt

SEQ ID NO: 3500 - DNA, 768 bp, Muscodor strobelii
  misc_feature: SGI cDNA ID NO. 560827
  misc_feature: Encodes the peptide sequence at SEQ ID NO 3501
atggaggagactctgggcagagatgggttgcgcagatcgatcgggctggcgctggaacacgtcggcttcgacgcggttcacacagacgccttggagagcttcaccgaactggtagagacgtatacgactaccttcatcgatgacatcaagcgagtagccaacggctcccgtcgactgaaccccaccgccgcagactttgacacggcgctgcgtaactacaacatccccatatcatccctcaagccgcacctcaagaaccccgtccgcaaggacaagctcgagcccaccttctacgaccccatcaccgaggacacaagctacctcgcccttgccccgatcgtgctgggcgacgaactggatggcaggcacgagaaggaggagaggacctggatccccgcccacttccccagcttccccagcaagcacgcctaccgctggacgcccgccccgccccaggagctgtactcgtccgagaagagggccgaggcgcaagccgacgctcgcaagggcgagatggcgctgcgacgcatcgaccgcgccgccaagatcacgcggcagaaggagctcaaggagctggcgcagcgcaaccgtctgagcaagcagcgccacgacgcctgggagaagctcatgacgagtctgctgcccaagaacggcgggagcaacggggcgctggagatcgccgatcatagtacgattgtcgatgccggtgccaagtacgcacgcaaggagatgccgcgatcccaccggcgtatcgacgctgctaactag

SEQ ID NO: 3501 - protein, 255 aa, Muscodor strobelii
  misc_feature: SGI Peptide ID NO. 560827
  misc_feature (3)..(79): Pfam Id: PF07524 Pfam Desc: Bromodomain associated
  misc_feature (10)..(250): NCBI GI: 261358509 Blast Desc: bromodomain associated domain-containing protein [Verticillium albo-atrum VaMs.102]
  misc_feature (6)..(250): NCBI GI: 256732018 Blast Desc: [Nectria haematococca mpVI 77-13-4]
  misc_feature (6)..(253): NCBI GI: 46136711 Blast Desc: FG09871.1 [Gibberella zeae PH-1]
  misc_feature (3)..(250): NCBI GI: 171677422 Blast Desc: protein product [Podospora anserina] gi|170936779|emb|CAP61437.1| protein product [Podospora anserina]
  misc_feature (1)..(250): NCBI GI: 145602899 Blast Desc: MGG_04720 [Magnaporthe grisea 70-15] gi|145011256|gb|EDJ95912.1| MGG_04720 [Magnaporthe grisea 70-15]
  misc_feature (10)..(249): NCBI GI: 154301801 Blast Desc: BC1G_10052 [Botryotinia fuckeliana B05.10] gi|150855714|gb|EDN30906.1| BC1G_10052 [Botryotinia fuckeliana B05.10]
  misc_feature (7)..(245): NCBI GI: 156065781 Blast Desc: SS1G_00901 [Sclerotinia sclerotiorum 1980] gi|154691760|gb|EDN91498.1| SS1G_00901 [Sclerotinia sclerotiorum 1980]
  misc_feature (9)..(254): NCBI GI: 116201079 Blast Desc: CHGG_08424 [Chaetomium globosum CBS 148.51] gi|88176942|gb|EAQ84410.1| CHGG_08424 [Chaetomium globosum CBS 148.51]
  misc_feature (5)..(148): NCBI GI: 85095358 Blast Desc: NCU05809 [Neurospora crassa OR74A] gi|28921528|gb|EAA30833.1| [Neurospora crassa OR74A]
  misc_feature (10)..(244): NCBI GI: 145242136 Blast Desc: An09g03980 [Aspergillus niger] gi|134078259|emb|CAK96840.1| protein product [Aspergillus niger]
MEETLGRDGLRRSIGLALEHVGFDAVHTDALESFTELVETYTTTFIDDIKRVANGSRRLNPTAADFDTALRNYNIPISSLKPHLKNPVRKDKLEPTFYDPITEDTSYLALAPIVLGDELDGRHEKEERTWIPAHFPSFPSKHAYRWTPAPPQELYSSEKRAEAQADARKGEMALRRIDRAAKITRQKELKELAQRNRLSKQRHDAWEKLMTSLLPKNGGSNGALEIADHSTIVDAGAKYARKEMPRSHRRIDAAN

SEQ ID NO: 3502 - DNA, 1416 bp, Muscodor strobelii
  misc_feature: SGI EST ID NO. CUFF.8732.0
  misc_feature: Variant of the nucleotide sequence at SEQ ID NO 3500
gtttgacccagatctgcatcagaacctcattctttctgcgcctccgacttgcgcattcgatctgcgcctacgcgatcgccgttctctgactcttcaacggcgcagccagcacacaacacgctcttcagcatcggcgcgcgcatctgaagccatggaggagactctgggcagagatgggttgcgcagatcgatcgggctggcgctggaacacgtcggcttcgacgcggttcacacagacgccttggagagcttcaccgaactggtagagacgtatacgactaccttcatcgatgacatcaagcgagtagccaacggctcccgtcgactgaaccccaccgccgcagactttgacacggcgctgcgtaactacaacatccccatatcatccctcaagccgcacctcaagaaccccgtccgcaaggacaagctcgagcccaccttctacgaccccatcaccgaggacacaagctacctcgcccttgccccgatcgtgctgggcgacgaactggatggcaggcacgagaaggaggagaggacctggatccccgcccacttccccagcttccccagcaagcacgcctaccgctggacgcccgccccgccccaggagctgtactcgtccgagaagagggccgaggcgcaagccgacgctcgcaagggcgagatggcgctgcgacgcatcgaccgcgccgccaagatcacgcggcagaaggagctcaaggagctggcgcagcgcaaccgtctgagcaagcagcgccacgacgcctgggagaagctcatgacgagtctgctgcccaagaacggcgggagcaacggggcgctggagatcgccgatcatagtacgattgtcgatgccggtgccaagtacgcacgcaaggagatgccgcgatcccaccggcgtatcgacgctgctaactaggctcggtgctctgcgcatgatccaggagcagctatgaagtttcatgaggatggcacatatgcgacagatcctggaaacccagacgagaagggcaaagacgcctatgatgataattgccctgtcgcctcagcacactttgctttgctttttaccatgctccaacaggtatgggggagttcgcatggccgcagtcatttccagccatctcgatgacagactgaaatggggtctctacctaatgtatcaatacttactatttgtgtgttcagggcatggcaaggcgtttgagggctacatcgttgcttagcgacaaaattctgataccgcatggcaaatgatcaggaggacctggtcagggagcggatgcaacggcggcgtcatgatttgttagagatacccttatagcttttgtctttgcatcgatcaattcagattgtttctactacatgggttccttgtccctttccactgcttcacatattgaaaagtacttgttg

SEQ ID NO: 3503 - DNA, 1482 bp, Muscodor strobelii
  misc_feature: SGI cDNA ID NO. 560828
  misc_feature: Reduced expression when VOC is produced
  misc_feature: Encodes the peptide sequence at SEQ ID NO 3504
atgcacgttctacccatagtcaacaaggctcgaaagccaaaattcgagctacatctctggatatacgacctgaacaatgtgccgctagtatccggcacatccttcgtgaaatggcatctcccgagcagcatacaccacgagcaccgtggccgaacgtcgaaatgctccatcgacaaggtcaaccaccgagtcacctacaactacagcaaaaccatccctctccgcatatccatcgacaaaacgaataatctctccgagtgtccaatcgaattcgaagtcctccaggaatttcccatggcatccggaggtcgcgacgagaagatatccctgggcaacgtcaagctgaaccttagcgaatacgtggaggagagcgagagcttcccgcgccgtagcatggcgtcgcgaatcgccgggagtctggagaatgcgcgcgacaaagtcaccgagaaagtaccgccgcggaagagcagctttggacgacctactagttctgggggtccagtgcagagcccgcctgcgatcatacagactgttgcaacgaattcgtctgcacaccctgaggaacaagacactgtagacgaggaggccgaggagggcatcgtgcgccggtatctgatgcaagatagcaagatcaacagtacgctaaagatcggtattctgatggtgcaggtggacggagaacgcaactatagcgcgccggccctcaaatccgcgaccatgttcaacagcggcatctcgggtctgatatcaggcggaaacgaacagatggatcccgaccaagttgcccaagccggcggctctcttcccaatgtctacaagccccgcgacgcctccgaagcacaggacatgtatcggcgcgtcttagcagcaagctgggattgtcaacccggcgaacttccggccaatgaatgtatcgaggatatctttgccggtggcagcggttgggtggatggtacaggcagcaaatcccgctcgacaagcggtggttctccgcacatgggcagaacaagcagcagtggaagcataagcacaagcagcgatgatgccatggacggcacccttcgaccgaacgacttgcgacgcatccaagcacatatgcgctctcacagtaacttgagcgatagatccaatgcgacaatcaccggtcgaaacggtggagaatatggccgcacgtcgccacccgcacaacatccgtatcataagcgcagaggctctggacatagcgggcacagtggacatggtgggcgacacacgctccgtaacaaggacagtgccgtctcgctattcgacgacgggccctcgttggggcttcatcaccggaatgagagtctgacgagcatggcccctacgctaggaagcgtggggacaaatagtgaaagaggaggaacgaaggatcacctcccgtttaggaggaaagagatcgatgaatatgagatcagagatgatctcgtggcttggaacttaccgggtactactacataa

SEQ ID NO: 3504 - protein, 493 aa, Muscodor strobelii
  misc_feature: SGI Peptide ID NO. 560828
  misc_feature (1)..(489): NCBI GI: 261352162 Blast Desc: conserved [Verticillium albo-atrum VaMs.102]
  misc_feature (1)..(489): NCBI GI: 171684821 Blast Desc: protein product [Podospora anserina] gi|170942371|emb|CAP68023.1| protein product [Podospora anserina]
  misc_feature (1)..(493): NCBI GI: 145609970 Blast Desc: MGG_02837 [Magnaporthe grisea 70-15] gi|145017348|gb|EDK01711.1| MGG_02837 [Magnaporthe grisea 70-15]
  misc_feature (1)..(490): NCBI GI: 149210229 Blast Desc: MGCH7_ch7g592 [Magnaporthe grisea 70-15] gi|86196547|gb|EAQ71185.1| MGCH7_ch7g592 [Magnaporthe grisea 70-15]
  misc_feature (5)..(490): NCBI GI: 46128531 Blast Desc: FG08643.1 [Gibberella zeae PH-1]
  misc_feature (5)..(490): NCBI GI: 256734142 Blast Desc: NECHADRAFT_35440 [Nectria haematococca mpVI 77-13-4]
  misc_feature (6)..(315): NCBI GI: 85074923 Blast Desc: NCU00689 [Neurospora crassa OR74A] gi|28927642|gb|EAA36593.1| [Neurospora crassa OR74A]
  misc_feature (6)..(125): NCBI GI: 242784944 Blast Desc: conserved [Talaromyces stipitatus ATCC 10500] gi|218720640|gb|EED20059.1| conserved [Talaromyces stipitatus ATCC 10500]
  misc_feature (174)..(360): NCBI GI: 189188600 Blast Desc: conserved [Pyrenophora tritici-repentis Pt-1C-BFP] gi|187972245|gb|EDU39744.1| conserved [Pyrenophora tritici-repentis Pt-1C-BFP]
  misc_feature (6)..(125): NCBI GI: 212527880 Blast Desc: conserved [Penicillium marneffei ATCC 18224] gi|210073495|gb|EEA27582.1| conserved [Penicillium marneffei ATCC 18224]
  misc_feature: Useful for introducing or modulating the production of volatile compounds
MHVLPIVNKARKPKFELHLWIYDLNNVPLVSGTSFVKWHLPSSIHHEHRGRTSKCSIDKVNHRVTYNYSKTIPLRISIDKTNNLSECPIEFEVLQEFPMASGGRDEKISLGNVKLNLSEYVEESESFPRRSMASRIAGSLENARDKVTEKVPPRKSSFGRPTSSGGPVQSPPAIIQTVATNSSAHPEEQDTVDEEAEEGIVRRYLMQDSKINSTLKIGILMVQVDGERNYSAPALKSATMFNSGISGLISGGNEQMDPDQVAQAGGSLPNVYKPRDASEAQDMYRRVLAASWDCQPGELPANECIEDIFAGGSGWVDGTGSKSRSTSGGSPHMGRTSSSGSISTSSDDAMDGTLRPNDLRRIQAHMRSHSNLSDRSNATITGRNGGEYGRTSPPAQHPYHKRRGSGHSGHSGHGGRHTLRNKDSAVSLFDDGPSLGLHHRNESLTSMAPTLGSVGTNSERGGTKDHLPFRRKEIDEYEIRDDLVAWNLPGTTT

SEQ ID NO: 3505 - DNA, 3408 bp, Muscodor strobelii
  misc_feature: SGI EST ID NO. CUFF.8767.0
  misc_feature: Variant of the nucleotide sequence at SEQ ID NO 3503
gaaataacaggccgatgacgtcttagtcccatgaaccctgccaaggctagaacgagagcagcgtcagggtcttgacaatttgattacataggtatttttagtcaggctatgccgtttagtatgtttctttacggtcgcaatctttgcgatgggctcattttggacacaggggcctttcttgaacagacctcgagtcattcgtctttttcgctgcatgcaagagatgctcgtatcgatgaatgatatcgtagtctagaacctggatatccgagtccaaaaagccaagcctctgttcagccctccagggctcctcggccccgtttgactgccatttctccaaattcttgtctccaatcgcgtcgtgttgggtcatcacattgtctttgtatgcgacatacgtgtactattactcctcatcttattatctcattgtccatcgccctctcacgtcgctgtttatttcccacgttgccttatcggtcagtgcctacttgacgattgcagatcacaaccttccattccatcgattgcctacatgctgcctgcttcgcctgctttctgctactcccctttctgaattgcctgaattcccacctaccgaattgaagattgatagcaatcgcgataggaatccttcgctgcagttcggtcaactagtcaccagtctaatctagtcggtctgttcggttctgcattccatccgcgcattccggacaaactacaccactgatacctgatacctgatacctgaccactcttcggccccccttcgtcatcataccttacctcgctccgtggctcttcctcccgcagccggttccttaccatgactgcatactcgtactctcttatctccctctgcattcgctagctgcagctcctgctgcgactggcatgtctcgttgccaactgcggccatctaccactggggtgaaagcggctattatagcagtcctctaagtcctgtctaggcttatcccgtactaccatggcgtctctaagtatgtcagctccgtctgttctcacccccatgcctgcgcccattccctgactcgtatcacccctcttttccctcgtggtgaaagcttgtatatatgaatcccgttgctacggaatcccaccggcgccgcgggcttgctgcttgcttacagagccgcatttctgcattcctcccgtctttttcgtatacccgagtgccccttacgctttgacgtcgtcctgatatactccgtttcatccggcgttgtcttgactgcgattgcgcattgtcagaactttgtttgcacattgtcactgtcctttgttgactgtccattgttcctcccttgcgtcctgtgtcactacaccaccatataatgtcctcaactccgcgcactccgaatcgcacgctgtctcggtcgcaaccataagctaacatgcacgttctacccatagtcaacaaggctcgaaagccaaaattcgagctacatctctggatatacgacctgaacaatgtgccgctagtatccggcacatccttcgtgaaatggcatctcccgagcagcatacaccacgagcaccgtggccgaacgtcgaaatgctccatcgacaaggtcaaccaccgagtcacctacaactacagcaaaaccatccctctccgcatatccatcgacaaaacgaataatctctccgagtgtccaatcgaattcgaagtcctccaggaatttcccatggcatccggaggtcgcgacgagaagatatccctgggcaacgtcaagctgaaccttagcgaatacgtggaggagagcgagagcttcccgcgccgtagcatggcgtcgcgaatcgccgggagtctggagaatgcgcgcgacaaagtcaccgagaaagtaccgccgcggaagagcagctttggacgacctactagttctgggggtccagtgcagagcccgcctgcgatcatacagactgttgcaacgaattcgtctgcacaccctgaggaacaagacactgtagacgaggaggccgaggagggcatcgtgcgccggtatctgatgcaagatagcaagatcaacagtacgctaaagatcggtattctgatggtgcaggtggacggagaacgcaactatagcgcgccggccctcaaatccgcgaccatgttcaacagcggcatctcgggtctgatatcaggcggaaacgaacagatggatcccgaccaagttgcccaagccggcggctctcttcccaatgtctacaagccccgcgacgcctccgaagcacaggacatgtatcggcgcgtcttagcagcaagctgggattgtcaacccggcgaacttccggccaatgaatgtatcgaggatatctttgccggtggcagcggttgggtggatggtacaggcagcaaatcccgctcgacaagcggtggttctccgcacatgggcagaacaagcagcagtggaagcataagcacaagcagcgatgatgccatggacggcacccttcgaccgaacgacttgcgacgcatccaagcacatatgcgctctcacagtaacttgagcgatagatccaatgcgacaatcaccggtcgaaacggtggagaatatggccgcacgtcgccacccgcacaacatccgtatcataagcgcagaggctctggacatagcgggcacagtggacatggtgggcgacacacgctccgtaacaaggacagtgccgtctcgctattcgacgacgggccctcgttggggcttcatcaccggaatgagagtctgacgagcatggcccctacgctaggaagcgtggggacaaatagtgaaagaggaggaacgaaggatcacctcccgtttaggaggaaagagatcgatgaatatgagatcagagatgatctcgtggcttggaacttaccgggtactactacataattgcctgcccactctaacatcaatttgcgcttgatatatatacgtaccaccagggtatacattattggccaccggatagcacagcgtggcgtacattgcggaaaaaggaatggagttgagatggggctgacttcagagttatggcgtttttgggagtgtattgttctgattgtatatataggtgtcttgctagatgtgaggagacagatgccatcgacttgatggttgggtaaatattacaacttgattgtacatcccaacatgtcatatcaacaatttccctcagcccattatgccaataagactcatgcacctcacaactacgcgatatcaccagcgcagaaaaccgcaacagcgtggtagtgctatccatcacggcattcgtaaacactaccaagccgagcctgacacatacttcgggccgggaataggattgttatccatctccggggcggacgatgcatcgagtagaaggagataacgcgtgagtgatccgagccttcagcgtctc

SEQ ID NO: 3506 - DNA, 1698 bp, Muscodor strobelii
  misc_feature: SGI cDNA ID NO. 560829
  misc_feature: Reduced expression when VOC is produced
  misc_feature: Encodes the peptide sequence at SEQ ID NO 3507
atggctgctaaaggggcggttgcgcccgaggagcgctgcgccatcggcatcgcgtttggcaactcgtacagctctatcgcctgcaccatcgacgacagccctgtggtcattgccaacgaggatggagatcgtcagattcccacaatattgtcatacatagaaggcgaggagtacacaggcaaccaggccaaggcccttctcatccgaaactccaagaacaccgtcacttccttcaaggacttcctcggccaggacttcaagtccatcgaccctacccactgccacgccgccgcccacccgcaagactccaacggcaccgtcaccttcaccgtccaggacaaggccgagggcgatgcttccactctctccgtctccgaagtctccacccgatatctgcgccgcctgatacagtccgcctccgattacatcggcaagaaggtcacctctgccgttgtcgccgtccccacaaacttcggcgagaagcagcgcgaagccctcattaaggccgcccaggatgccgacctcgagattctccagctgatcaacgagcccatcgcctctctccttgcctacgatgcgagacccgaggctgagctggccgacaagatcatcgtcgtggccgagcttggtggcacccgctctgacgtcgccgtcgtcgcatccagaggtggactctacacgctgttggccaccgcccatgactacgagtttgccggtgtccaccttgaccaggtcctcatggaccattttgccaaggagttcatgaagaagaacaaggacgtcgacccccgcaccaatgcccgttctctggccaagctcaaggccgagtccgaagccgccaagaaggctctctccatcggcaccaacgctaacttctctgtcgagagcttggccgagggtatcgatttccagatgaccatcaacaggctacgctacgagaccatcgcccgcaaggtcttcgagggcttcaacagattggtcgagggtgccatcaagaaggctggactcgacgtcctcgacatcgacgaggtcatcctgtctggcggcactgcccacacccccagaattgccaacaacttccgcaacatcttccccgccaccaccaccatcctcgctccctccacataccccacggctctcaatccctccgagctgcaggctcgaggtgccgctctccaggcctctctgatccaggagtacgaagccgaggacatcgagcagtccacgcacgccgccgtcaccaccgtcaagcacatcaccaacgccatcggtgtcatctccatatccgaatccggcgaggagaccttcatccccatcatcgcccccgagactgccgtccctgcccgccgcacagccaatgttagcgtaccgaaggagggtggctccgtcttggtcagggttgtcgagggtggcacacacattaaggtcaccaagcccgagcccaagcccaaggagaacggaagcaaagacgaggacgaggacgacagtgatttcgatgattccgacgaggaagaggaggagcacagagaaaaggtctggaagatcggcaccactctcgccgaggcagctatcaagaacgtgaagaagggcggtcaggtcgaggtcaccgtcactgtggccaatgatttgagcgtcaccgtcgtaacgagggaagttggtggaaaaggtggcgtcaggggtaacatcaaggctccttga

SEQ ID NO: 3507 - protein, 565 aa, Muscodor strobelii
  misc_feature: SGI Peptide ID NO. 560829
  misc_feature (14)..(558): Pfam Id: PF00012 Pfam Desc: Hsp70 protein
  misc_feature (14)..(350): Pfam Id: PF00012 Pfam Desc: Hsp70 protein
  misc_feature (11)..(565): NCBI GI: 156046008 Blast Desc: SS1G_09280 [Sclerotinia sclerotiorum 1980] gi|154693676|gb|EDN93414.1| SS1G_09280 [Sclerotinia sclerotiorum 1980]
  misc_feature (4)..(562): NCBI GI: 145609960 Blast Desc: MGG_02842 [Magnaporthe grisea 70-15] gi|145017342|gb|EDK01705.1| MGG_02842 [Magnaporthe grisea 70-15]
  misc_feature (5)..(551): NCBI GI: 46128533 Blast Desc: FG08644.1 [Gibberella zeae PH-1]
  misc_feature (3)..(563): NCBI GI: 256733647 Blast Desc: [Nectria haematococca mpVI 77-13-4]
  misc_feature (1)..(564): NCBI GI: 171684819 Blast Desc: protein product [Podospora anserina] gi|170942370|emb|CAP68022.1| protein product [Podospora anserina]
  misc_feature (8)..(565): NCBI GI: 261352163 Blast Desc: chaperone protein dnaK [Verticillium albo-atrum VaMs.102]
  misc_feature (3)..(564): NCBI GI: 85074929 Blast Desc: NCU00692 [Neurospora crassa OR74A] gi|28927645|gb|EAA36596.1| NCU00692 [Neurospora crassa OR74A]
  misc_feature (11)..(565): NCBI GI: 154321642 Blast Desc: BC1G_00968 [Botryotinia fuckeliana B05.10] gi|150850215|gb|EDN25408.1| BC1G_00968 [Botryotinia fuckeliana B05.10]
  misc_feature (4)..(562): NCBI GI: 149210243 Blast Desc: MGCH7_ch7g599 [Magnaporthe grisea 70-15] gi|86196554|gb|EAQ71192.1| MGCH7_ch7g599 [Magnaporthe grisea 70-15]
  misc_feature (3)..(562): NCBI GI: 116193293 Blast Desc: CHGG_06364 [Chaetomium globosum CBS 148.51] gi|88182277|gb|EAQ89745.1| CHGG_06364 [Chaetomium globosum CBS 148.51]
  misc_feature (56)..(356): SWISSPROT Homolog: EC 3.6.1.3 Adenosinetriphosphatase
  misc_feature: Useful for introducing or modulating the production of volatile compounds
MAAKGAVAPEERCAIGIAFGNSYSSIACTIDDSPVVIANEDGDRQIPTILSYIEGEEYTGNQAKALLIRNSKNTVTSFKDFLGQDFKSIDPTHCHAAAHPQDSNGTVTFTVQDKAEGDASTLSVSEVSTRYLRRLIQSASDYIGKKVTSAVVAVPTNFGEKQREALIKAAQDADLEILQLINEPIASLLAYDARPEAELADKIIVVAELGGTRSDVAVVASRGGLYTLLATAHDYEFAGVHLDQVLMDHFAKEFMKKNKDVDPRTNARSLAKLKAESEAAKKALSIGTNANFSVESLAEGIDFQMTINRLRYETIARKVFEGFNRLVEGAIKKAGLDVLDIDEVILSGGTAHTPRIANNFRNIFPATTTILAPSTYPTALNPSELQARGAALQASLIQEYEAEDIEQSTHAAVTTVKHITNAIGVISISESGEETFIPIIAPETAVPARRTANVSVPKEGGSVLVRVVEGGTHIKVTKPEPKPKENGSKDEDEDDSDFDDSDEEEEEHREKVWKIGTTLAEAAIKNVKKGGQVEVTVTVANDLSVTVVTREVGGKGGVRGNIKAP

SEQ ID NO: 3508 - DNA, 2243 bp, Muscodor strobelii
  misc_feature: SGI EST ID NO. CUFF.9225.1
  misc_feature: Variant of the nucleotide sequence at SEQ ID NO 3506
tttttctgacggccaaaaatcgagaaaccgggaccaaacaccaagcccaatctctctcaacattcgtcccattattcgtaattctccaagcaggcttctcgctcaacctccaacgaaccattctgctctcgataaatcacaaaatccttcgaaatggctgctaaaggggcggttgcgcccgaggagcgctgcgccatcggcatcgcgtttggcaactcgtacagctctatcgcctgcaccatcgacgacagccctgtggtcattgccaacgaggatggagatcgtcagattcccacaatattgtcatacatagaaggcgaggagtacacaggcaaccaggccaaggcccttctcatccgaaactccaagaacaccgtcacttccttcaaggacttcctcggccaggacttcaagtccatcgaccctacccactgccacgccgccgcccacccgcaagactccaacggcaccgtcaccttcaccgtccaggacaaggccgagggcgatgcttccactctctccgtctccgaagtctccacccgatatctgcgccgcctgatacagtccgcctccgattacatcggcaagaaggtcacctctgccgttgtcgccgtccccacaaacttcggcgagaagcagcgcgaagccctcattaaggccgcccaggatgccgacctcgagattctccagctgatcaacgagcccatcgcctctctccttgcctacgatgcgagacccgaggctgagctggccgacaagatcatcgtcgtggccgagcttggtggcacccgctctgacgtcgccgtcgtcgcatccagaggtggactctacacgctgttggccaccgcccatgactacgagtttgccggtgtccaccttgaccaggtcctcatggaccattttgccaaggagttcatgaagaagaacaaggacgtcgacccccgcaccaatgcccgttctctggccaagctcaaggccgagtccgaagccgccaagaaggctctctccatcggcaccaacgctaacttctctgtcgagagcttggccgagggtatcgatttccagatgaccatcaacaggctacgctacgagaccatcgcccgcaaggtcttcgagggcttcaacagattggtcgagggtgccatcaagaaggctggactcgacgtcctcgacatcgacgaggtcatcctgtctggcggcactgcccacacccccagaattgccaacaacttccgcaacatcttccccgccaccaccaccatcctcgctccctccacataccccacggctctcaatccctccgagctgcaggctcgaggtgccgctctccaggcctctctgatccaggagtacgaagccgaggacatcgagcagtccacgcacgccgccgtcaccaccgtcaagcacatcaccaacgccatcggtgtcatctccatatccgaatccggcgaggagaccttcatccccatcatcgcccccgagactgccgtccctgcccgccgcacagccaatgttagcgtaccgaaggagggtggctccgtcttggtcagggttgtcgagggtggcacacacattaaggtcaccaagcccgagcccaagcccaaggagaacggaagcaaagacgaggacgaggacgacagtgatttcgatgattccgacgaggaagaggaggagcacagagaaaaggtctggaagatcggcaccactctcgccgaggcagctatcaagaacgtgaagaagggcggtcaggtcgaggtcaccgtcactgtggccaatgatttgagcgtcaccgtcgtaacgagggaagttggtggaaaaggtggcgtcaggggtaacatcaaggctccttgagcaatagatcggaaaggggaagacaaaagttagggaattgggaatacatatatgatatgaagtcttgcagcgggttggttccggttcaggcgctggcttctacttctagatatacggcatgcatactgagatgagagcatgagaacatgcttgggctacgcgctgcgtgactgcgcagactgggtaggtcaggatggaataggatcatagaattagacgatgtggtaaaagaatgacattacagcattgtttctgcagtatggccttcacggtctgacatctgagttggtgagtggtgtgggatgaggtgacatcacgcgacatgattctattctacatgtatcttctacgctcggtctattcatcgtctaactctatactaagatactaag

SEQ ID NO: 3509 - DNA, 744 bp, Muscodor strobelii
  misc_feature: SGI cDNA ID NO. 560830
  misc_feature: Encodes the peptide sequence at SEQ ID NO 3510
atggcggctaagggcgaggctgtgtatgtcatgccaggcgataagattcctgccgacctcattcccactcatcccaagaagccattgaagctcggccctggtctccgccatgtcccgcccagtgacttgattcccaccatcgcgggccagctcgtcgctgatttccgcaagaactccatttggatcgagtacaacggtggccgatatgtgcctgctgttggtgatttggtcatctgcatggtccagcgctctggcccggactactactttgtcagcatcactgactatgcttctaatgctatcttgccccaattggcatttgagatggccaccaagaagtcaagacctcagctcaaccacggaaatctggtctacgccagagtctgtctggcgaatcgccatatggatcccgagttggagtgtgtctcccccacgacggggaaagcggacggtctaggtcctctgaatggcggaatgctctacgacatatctctcggtatggctagacggcttttgatgagaaaggcagcggaggaagggaaagtcatcgtgcttgaggaacttggttcggctgggctggcttttgagacggcagttggcaggaacggcaagctctgggtaaacagcgagagcgtcgccaccgttctgatcgtcgggcgagctgtcaaagacacagacgaaaacaacctcaatatcgaccagcagaagaaactcgtacgcaaactcatcaaggagatgagttga

SEQ ID NO: 3510 - protein, 247 aa, Muscodor strobelii
  misc_feature: SGI Peptide ID NO. 560830
  misc_feature (10)..(246): NCBI GI: 85074931 Blast Desc: NCU00693 [Neurospora crassa OR74A] gi|28927646|gb|EAA36597.1| conserved [Neurospora crassa OR74A]
  misc_feature (1)..(247): NCBI GI: 261352164 Blast Desc: exosome complex exonuclease RRP40 [Verticillium albo-atrum VaMs.102]
  misc_feature (8)..(245): NCBI GI: 154321644 Blast Desc: BC1G_00969 [Botryotinia fuckeliana B05.10] gi|150850216|gb|EDN25409.1| BC1G_00969 [Botryotinia fuckeliana B05.10]
  misc_feature (6)..(246): NCBI GI: 171684817 Blast Desc: protein product [Podospora anserina] gi|170942369|emb|CAP68021.1| protein product [Podospora anserina]
  misc_feature (1)..(247): NCBI GI: 39970753 Blast Desc: MGG_02843 [Magnaporthe grisea 70-15] gi|149210245|ref|XP_001522497.1| MGCH7_ch7g600 [Magnaporthe grisea 70-15] gi|86196555|gb|EAQ71193.1| MGCH7_ch7g600 grisea
  misc_feature (6)..(247): NCBI GI: 256734141 Blast Desc: [Nectria haematococca mpVI 77-13-4]
  misc_feature (6)..(239): NCBI GI: 46128535 Blast Desc: FG08645.1 [Gibberella zeae PH-1]
  misc_feature (8)..(208): NCBI GI: 156046006 Blast Desc: SS1G_09279 [Sclerotinia sclerotiorum 1980] gi|154693675|gb|EDN93413.1| SS1G_09279 [Sclerotinia sclerotiorum 1980]
  misc_feature (7)..(246): NCBI GI: 169595240 Blast Desc: SNOG_00354 [Phaeosphaeria nodorum SN15] gi|111070729|gb|EAT91849.1| SNOG_00354 [Phaeosphaeria nodorum SN15]
  misc_feature (8)..(246): NCBI GI: 255934802 Blast Desc: Pc12g16300 [Penicillium chrysogenum Wisconsin 54-1255] gi|211583047|emb|CAP81257.1| Pc12g16300 [Penicillium chrysogenum Wisconsin 54-1255]
MAAKGEAVYVMPGDKIPADLIPTHPKKPLKLGPGLRHVPPSDLIPTIAGQLVADFRKNSIWIEYNGGRYVPAVGDLVICMVQRSGPDYYFVSITDYASNAILPQLAFEMATKKSRPQLNHGNLVYARVCLANRHMDPELECVSPTTGKADGLGPLNGGMLYDISLGMARRLLMRKAAEEGKVIVLEELGSAGLAFETAVGRNGKLWVNSESVATVLIVGRAVKDTDENNLNIDQQKKLVRKLIKEMS

SEQ ID NO: 3511 - DNA, 2446 bp, Muscodor strobelii
  misc_feature: SGI EST ID NO. CUFF.8773.0
  misc_feature: Variant of the nucleotide sequence at SEQ ID NO 3509
gtttacacccatgacgatattgcgctcagctcagtctcaaacgccaacctcggtcataaaacactcgcttgtcatcgcagagagtagcgaaaatggcggctaagggcgaggctgtgtatgtcatgccaggcgataagattcctgccgacctcattcccactcatcccaagaagccattgaagctcggccctggtctccgccatgtcccgcccagtgacttgattcccaccatcgcgggccagctcgtcgctgatttccgcaagaactccatttggatcgagtacaacggtggccgatatgtgcctgctgttggtgatttggtcatctgcatggtccagcgctctggcccggactactactttgtcagcatcactgactatgcttctaatgctatcttgccccaattggcatttgagatggccaccaagaagtcaagacctcagctcaaccacggaaatctggtctacgccagagtctgtctggcgaatcgccatatggatcccgagttggagtgtgtctcccccacgacggggaaagcggacggtctaggtcctctgaatggcggaatgctctacgacatatctctcggtatggctagacggcttttgatgagaaaggcagcggaggaagggaaagtcatcgtgcttgaggaacttggttcggctgggctggcttttgagacggcagttggcaggaacggcaagctctgggtaaacagcgagagcgtcgccaccgttctgatcgtcgggcgagctgtcaaagacacagacgaaaacaacctcaatatcgaccagcagaagaaactcgtacgcaaactcatcaaggagatgagttgagtcgggagatcgacatgccgcgttcccttcgggcaattctttcaccatctcgcaacctcgttgctgatccacagctaatcagcttccacgctgccacactctcttatttcgccgtcgcccttgtcgcccatgcgtcattccgtctccggtagggcagcatagtcccgttgtctgacttgctggccacgcgctcaatcgcgccccttcgtccaatctacacgggctctggtctgccattgtcgaatcgcaatcccccccgactcgtggaattgcacaccgtatgtgcatctccatccccgaaccaccactttgctctccactgcatgggggtcgctgcaggtatgtcgggtgggttctccgaaaaagaattccaaatacttttctgcgccgtctccaactttccatcgtcctggaccctatatactacctcgactaaccaatggactataaataggacatcgaactctatacacacttcttcaacgcacgcacgtgtatagtagttcattagattgagccgcacacgaccgttggtgcccgcaccgcacaaattgcgtacctgatcgccaagcgtcaacggaggagccccgactcgagccctccgtcttaacaccgacctggctaaagtcgcacagcgggtggcgtccgggtagaatatcgggaggttacagaaccattgttgcaccggtcctacagtgaggtctgacatctatggactcaatcaggctaaaatatactcaatttggccaaggtcgccctcactttacccacctgttgaaatttctcctacgtgcatgcatgcatgcagccttatctctgtcttttctatctggtatacgtgtattcggtgtttcgcttcgatgctcaaaacgcacaacatagcaattcgagacccgattttcaaagtgctggagactggaagagccaatagagtggccatgattaccaacatcagtcaatgtttacataggcaatgtttgtcttgaggtcggaagggtagacgcatgtctcgtatagtctattctagatcatcaagggatcgtcggcattgagattgagtcgaagatagaatatgtagttgagctcaatatcgtggtacggcatttaaagcaagggagtttgtcgtggcagtcgtgatgtggttctaaatgcaggcacacggaagttcgtcttcaccttacttgtagtaggctcgtctcatatttgaatgatccaaaatcctccgacttgagtcttgacaaatatcatccttgaacaaatacacctccttggaaaatagtgttacaatctgcacatcaactccacgatgcagctcctgactatccttgctctggcatcagcttgcgtggcaacgcccattgtctcggcgccagcagccctcaagccatgggtcaaacctaagagcacagactctcgctccccgtgtccattgctcaacacgttggcaaaccatggatatctgtatgaattcttactgttccacacccttttctataccattccgaacctcacacacccacctttgtccctatcaagacatatgaccgacgtctagctaacgtgtactagccctcatgacggaaagggaatcaccacccaaatgataggcg

SEQ ID NO: 3512 - DNA, 729 bp, Muscodor strobelii
  misc_feature: SGI cDNA ID NO. 560831
  misc_feature: Encodes the peptide sequence at SEQ ID NO 3513
atgcagctcctgactatccttgctctggcatcagcttgcgtggcaacgcccattgtctcggcgccagcagccctcaagccatgggtcaaacctaagagcacagactctcgctccccgtgtccattgctcaacacgttggcaaaccatggatatctccctcatgacggaaagggaatcaccacccaaatgataggcgacgccatcctcgcctccacaaactggagcacagacttcggcaccgtagccggcgccgcagcactgggtcgtctgaacgcaacgtccatctccctaagccagttaaacagcacagcagggggcgaacacccagcttctctaacacgcaacgacgcctcatcgggtgactccaacaccatagttctcagtcgcgtcaacagctttctcgcagattccacaacgaactatataaccatctccagcatggcgaagacaaggaaccgcatagaagccgcggagaacccaaagattagcgccggagaccaaggcgtgagtcaggcggaggcggcgctgcttatgttgctgatgagggatacatatagcgagattgatgatttggataagatgagagcgccgaaggatagggttagggagtggcttgttgatgagaagtttcctacggcgcaggggtggaaacctgctgaggttaaggtggaacagagtgctcttggtcccgttattgctgctattgctggggcgcaggctaaagcatag

SEQ ID NO: 3513 - protein, 242 aa, Muscodor strobelii
  misc_feature: SGI Peptide ID NO. 560831
  misc_feature (27)..(60): Pfam Id: PF01328 Pfam Desc: Peroxidase, family 2
  misc_feature (7)..(235): NCBI GI: 154318477 Blast Desc: BC1G_03406 [Botryotinia fuckeliana B05.10] gi|150842929|gb|EDN18122.1| BC1G_03406 [Botryotinia fuckeliana B05.10]
  misc_feature (26)..(217): NCBI GI: 115390388 Blast Desc: conserved [Aspergillus terreus NIH2624] gi|114195095|gb|EAU36795.1| conserved [Aspergillus terreus NIH2624]
  misc_feature (1)..(238): NCBI GI: 145236505 Blast Desc: An06g00720 [Aspergillus niger] gi|134075355|emb|CAK39169.1| protein product [Aspergillus niger]
  misc_feature (4)..(217): NCBI GI: 115437934 Blast Desc: conserved [Aspergillus terreus NIH2624] gi|114188752|gb|EAU30452.1| conserved [Aspergillus terreus NIH2624]
  misc_feature (3)..(228): NCBI GI: 116201155 Blast Desc: CHGG_08462 [Chaetomium globosum CBS 148.51] gi|88176980|gb|EAQ84448.1| CHGG_08462 [Chaetomium globosum CBS 148.51]
  misc_feature (7)..(241): NCBI GI: 156037790 Blast Desc: SS1G_12609 [Sclerotinia sclerotiorum 1980] gi|154698017|gb|EDN97755.1| SS1G_12609 [Sclerotinia sclerotiorum 1980]
  misc_feature (28)..(239): NCBI GI: 261202256 Blast Desc: conserved [Ajellomyces dermatitidis SLH14081] gi|239590439|gb|EEQ73020.1| conserved [Ajellomyces dermatitidis SLH14081] gi|239612150|gb|EEQ89137.1| conserved [Ajellomyces
  misc_feature (10)..(226): NCBI GI: 67540574 Blast Desc: AN6457.2 [Aspergillus nidulans FGSC A4] gi|40739289|gb|EAA58479.1| AN6457.2 [Aspergillus nidulans FGSC A4] gi|259479314|tpe|CBF69434.1| TPA: conserved [Aspergillus FGSC
  misc_feature (28)..(238): NCBI GI: 259488014 Blast Desc: TPA: conserved [Aspergillus nidulans FGSC A4]
  misc_feature (1)..(226): NCBI GI: 169604372 Blast Desc: SNOG_05198 [Phaeosphaeria nodorum SN15] gi|160706551|gb|EAT87589.2| SNOG_05198 [Phaeosphaeria nodorum SN15]
  misc_feature (27)..(218): SWISSPROT Homolog: EC 1.11.1.10 Chloride peroxidase
MQLLTILALASACVATPIVSAPAALKPWVKPKSTDSRSPCPLLNTLANHGYLPHDGKGITTQMIGDAILASTNWSTDFGTVAGAAALGRLNATSISLSQLNSTAGGEHPASLTRNDASSGDSNTIVLSRVNSFLADSTTNYITISSMAKTRNRIEAAENPKISAGDQGVSQAEAALLMLLMRDTYSEIDDLDKMRAPKDRVREWLVDEKFPTAQGWKPAEVKVEQSALGPVIAAIAGAQAKA

SEQ ID NO: 3514 - DNA, 648 bp, Muscodor strobelii
  misc_feature: SGI cDNA ID NO. 560832
  misc_feature: Encodes the peptide sequence at SEQ ID NO 3515
atggccaccaacaacatgaatgttgccaatgaccccgccaccatggccgccaacaccaccaccacctccaccgccgccgatgacggcaagatcatcaccaagaccaccggtgtcaccgctggtactgtccaggaagaggacgccgcccagcttgtccagcgttctgtcgttgagggacttcgccctctttctcacaccccgccttccccatcatcatctttttcttccctccccgaatccgccttcaactccgactatcatgccggctatggctcggaaacagatccggatctcactgatgacgacgattcgggctctgactccgacttcgattccgaccttgatggcgactctgtttcgggtggcgacgagcaccagatggcgcccgccactgtgaccagcgagagtgctacccccggccccagcacccccctcgagcgtgagaccctcgggcgggcctacgagctgattcaggatagaactctgatcagctctgacggcctgctcgtggtgtcgatcgctgcgagcgagaagagcgacgacaaagtcctcgaggagatcgaggcaatcaagaccgtctacaatcagcgtcgcctcgccttgcgacgcaggaagggaggcaagggcaagagcaaggaaaagaagtag

SEQ ID NO: 3515 - protein, 215 aa, Muscodor strobelii
  misc_feature: SGI Peptide ID NO. 560832
MATNNMNVANDPATMAANTTTTSTAADDGKIITKTTGVTAGTVQEEDAAQLVQRSVVEGLRPLSHTPPSPSSSFSSLPESAFNSDYHAGYGSETDPDLTDDDDSGSDSDFDSDLDGDSVSGGDEHQMAPATVTSESATPGPSTPLERETLGRAYELIQDRTLISSDGLLVVSIAASEKSDDKVLEEIEAIKTVYNQRRLALRRRKGGKGKSKEKK

SEQ ID NO: 3516 - DNA, 1287 bp, Muscodor strobelii
  misc_feature: SGI cDNA ID NO. 560833
  misc_feature: Reduced expression when VOC is produced
  misc_feature: Encodes the peptide sequence at SEQ ID NO 3517
atggcctgcgaagacagaaacctggacatcgccatcatcggcggtggcatcacaggcataacgttggccatcgcgctcatggaaagcggcttccgcatccaagtctacgagcaaggacatgcattctcagaaattggggcaggtgtcagtttcggacccaactcggtcgcggcaatgaaagcatgcaatccggctgtctacactgcatttcaaagtgtcgcgacacataaccagtgggaatccaagtcaaattgctttttcgattacatagatggaagtccatcatcaggcgagactaagttcggcctcaagagtactataggcgcgaactcgacacatcgcggagacttcatggaggcgatggcagagctcattccgtcgggcatggctcatttccgcaagcgtctcgaggccatagacgaggatcccaagacgggaagactccacctgaagtttcatgacggctctagggctgaggctgacggggtaattggctgtgacggtgtcaagtcacggaccagagctatcatacttggtgagaaccatcctgctgcgcatgcatcatattcgcatatgttttgctatcgggctgttatgcccatggagagggcagtgagctcggttggtgaggagagggcgatgaatgcttgcatgtggcttggcgacagcaggcatatcttaacattcccaatcgacaagggtaaaacatggaacttggtagcaatggtcaaagatcatggcgagtggccggatgctgaacacctgacactcccagcacacaaggatgaggcgctcaaagatttcgcaaacatgtgctacggggtccgcaaacaactcgaattagtgaatgatgacgtcgacagatgggctctgtttgacactgccgataaccccttaccaactttccacaaaggccgcattatggtcgctggtgatgccgcgcacgcgacaactccgcaccatggcgcaggcgcgggcttcggcatagaagacagcgccgtcctatcacacctacttctcgacccgcgggtcaagtcacccgccgaccttgcccacgtattcgcagctttcgatgcaagtcgtcgcgagcgaggccaatggctagtagctgatagtcgagcgactggtgatcaatatcagtggaatagtccggacattaagaaaggcgattgggaaacacttgaggctacattgaaggaaagctatggcaaaatttgggattatgatcttgacgctgcgttgaaagaggcacgagaggacctaggaaagagacttgggaaggattga

SEQ ID NO: 3517 - protein, 428 aa, Muscodor strobelii
  misc_feature: SGI Peptide ID NO. 560833
  misc_feature (7)..(372): Pfam Id: PF01494 Pfam Desc: FAD binding domain
  misc_feature (6)..(425): NCBI GI: 115399110 Blast Desc: conserved [Aspergillus terreus NIH2624] gi|114192027|gb|EAU33727.1| conserved [Aspergillus terreus NIH2624]
  misc_feature (2)..(421): NCBI GI: 46115630 Blast Desc: FG03657.1 [Gibberella zeae PH-1]
  misc_feature (1)..(425): NCBI GI: 169770145 Blast Desc: [Aspergillus oryzae RIB40] gi|83767401|dbj|BAE57540.1| protein product [Aspergillus oryzae]
  misc_feature (1)..(425): NCBI GI: 238487480 Blast Desc: salicylate hydroxylase, [Aspergillus flavus NRRL3357] gi|220699857|gb|EED56196.1| salicylate hydroxylase, [Aspergillus flavus NRRL3357]
  misc_feature (6)..(426): NCBI GI: 67523315 Blast Desc: AN2114.2 [Aspergillus nidulans FGSC A4] gi|40745790|gb|EAA64946.1| AN2114.2 [Aspergillus nidulans FGSC A4] gi|259487488|tpe|CBF86206.1| TPA: salicylate hydroxylase, A4]
  misc_feature (6)..(427): NCBI GI: 119480247 Blast Desc: salicylate hydroxylase, [Neosartorya fischeri NRRL 181] gi|119408306|gb|EAW18255.1| salicylate hydroxylase, [Neosartorya fischeri NRRL 181]
  misc_feature (6)..(427): NCBI GI: 70989613 Blast Desc: salicylate hydroxylase [Aspergillus fumigatus Af293] gi|66847287|gb|EAL87618.1| salicylate hydroxylase, [Aspergillus fumigatus Af293] gi|159129063|gb|EDP54177.1| salicylate fumigatus
  misc_feature (1)..(427): NCBI GI: 145243986 Blast Desc: An11g05130 [Aspergillus niger] gi|134079190|emb|CAK48412.1| protein product [Aspergillus niger]
  misc_feature (6)..(425): NCBI GI: 242777258 Blast Desc: salicylate hydroxylase, [Talaromyces stipitatus ATCC 10500] gi|218722616|gb|EED22034.1| salicylate hydroxylase, [Talaromyces stipitatus ATCC 10500]
  misc_feature (6)..(417): NCBI GI: 121710110 Blast Desc: salicylate hydroxylase, [Aspergillus clavatus NRRL 1] gi|119400821|gb|EAW11245.1| salicylate hydroxylase, [Aspergillus clavatus NRRL 1]
  misc_feature (29)..(422): SWISSPROT Homolog: EC 1.14.13.1 Salicylate 1-monooxygenase
  misc_feature: Useful for introducing or modulating the production of volatile compounds
MACEDRNLDIAIIGGGITGITLAIALMESGFRIQVYEQGHAFSEIGAGVSFGPNSVAAMKACNPAVYTAFQSVATHNQWESKSNCFFDYIDGSPSSGETKFGLKSTIGANSTHRGDFMEAMAELIPSGMAHFRKRLEAIDEDPKTGRLHLKFHDGSRAEADGVIGCDGVKSRTRAIILGENHPAAHASYSHMFCYRAVMPMERAVSSVGEERAMNACMWLGDSRHILTFPIDKGKTWNLVAMVKDHGEWPDAEHLTLPAHKDEALKDFANMCYGVRKQLELVNDDVDRWALFDTADNPLPTFHKGRIMVAGDAAHATTPHHGAGAGFGIEDSAVLSHLLLDPRVKSPADLAHVFAAFDASRRERGQWLVADSRATGDQYQWNSPDIKKGDWETLEATLKESYGKIWDYDLDAALKEAREDLGKRLGKD

SEQ ID NO: 3518 - DNA, 3207 bp, Muscodor strobelii
  misc_feature: SGI EST ID NO. CUFF.8819.1
  misc_feature: Variant of the nucleotide sequence at SEQ ID NO 3516
tgggaagtccatgcagttattcgtcaggggacagtaccaaaaatagaaataattagtgcggatgatctgatttcctctaagtgatagagatattgaaaatatgggacctgggcatgatctcaagagtagacttgttctgtgatatgccgactcccatggattttcatggtattaatctgaacagagactcgcatgagccttttagaatgccacattcttgcagattctcattcgaatccttacttagttcactatgagagtctcgtgcttccacgcttccgcgcctaaatgctcaaggcttataccaacgcgtgctagtcgcggatgagaaccatgcacggcaggttacatcgttgtataggatcgggtccggcatgagctcttagcgcaaaactaaacccacgcagactgcattaatagcgccagtaactggaattgatcatgactttcagagctaggggagcaacggtattcacaattccgtatttcaatcccgtctgagacactccatacactcgcgaatgaacatacaaacagcgagatcatgtacgacccagtatcatgatgtgataacaataaacagtttctggagtccagtacccaaaactctgctggacgtgattggtcgtatcttgagcagtgttccattggccatcggtaacttgatgttcttaagcggcattcggatgctgagtatcctggtgtacttcgagacctaccttaatcccagttcatattagtgcatacctatcaaagtcaataagaagttgaaatgcgaagcaacctggtcaaagcgaaccaatgacagtattcgacgccatatggcatcagagctcggtttagaagattgttgggcatctatctcagacaattagagtggcatgagatagactctaattattgccaggagtcctgaggaggcacgatgctgcgcgctagatggtatgtttctaactctcaggtatcagctggtatggtcgaaggccgggatgctaaaggcaatattgagaagatttgtgaacattgcaaatcatttataaggcaattgtcgtacaacagcagagctgcttttctcatcctgcatccttcagaccctacgttaccttttgtagttgtcaatgatagtggaacctatatgcaacctcatgcgtcgcccatcggatcttggcaaaaagccgagcggaaggcccgccacggcactcgcggcccaccagcaccgttgggtggccaattagtgccactgccccgaatagcgaaataaatgacggaggaatggattcagggatcggaagacgaccgttggggcgtcttccgacgtcaaaaacgaaacgctgatccataatagagtcgaagacgtaattggtgaggggcttgacggctagaactcaaaatccaaaatataaactcgacatttcacagacaaaatgtcagtttcatatagcacaataccatcacatttcctttcatatcatttgataatcccaattacatagagagaacgcgaaatcatcatggcctgcgaagacagaaacctggacatcgccatcatcggcggtggcatcacaggcataacgttggccatcgcgctcatggaaagcggcttccgcatccaagtctacgagcaaggacatgcattctcagaaattggggcaggtgtcagtttcggacccaactcggtcgcggcaatgaaagcatgcaatccggctgtctacactgcatttcaaagtgtcgcgacacataaccagtgggaatccaagtcaaattgctttttcgattacatagatggaagtccatcatcaggcgagactaagttcggcctcaagagtactataggcgcgaactcgacacatcgcggagacttcatggaggcgatggcagagctcattccgtcgggcatggctcatttccgcaagcgtctcgaggccatagacgaggatcccaagacgggaagactccacctgaagtttcatgacggctctagggctgaggctgacggggtaattggctgtgacggtgtcaagtcacggaccagagctatcatacttggtgagaaccatcctgctgcgcatgcatcatattcgcatatgttttgctatcgggctgttatgcccatggagagggcagtgagctcggttggtgaggagagggcgatgaatgcttgcatgtggcttggcgacagcaggcatatcttaacattcccaatcgacaagggtaaaacatggaactgtgagtgtattctttgctgctcgatgtcattctcactttgtcaaggccatgtctcgtgtcgtcggtggtcgatctctccatcacacgcgtccggctgacatattcttcaaaagtggtagcaatggtcaaagatcatggcgagtggccggatgctgaacacctgacactcccagcacacaaggatgaggcgctcaaagatttcgcaaacatgtgctacggggtccgcaaacaactcgaattagtgaatgatgacgtcgacagatgggctctgtttgacactgccgataaccccttaccaactttccacaaaggccgcattatggtcgctggtgatgccgcgcacgcgacaactccgcaccatggcgcaggcgcgggcttcggcatagaagacagcgccgtcctatcacacctacttctcgacccgcgggtcaagtcacccgccgaccttgcccacgtattcgcagctttcgatgcaagtcgtcgcgagcgaggccaatggctagtagctgatagtcgagcgactggtgatcaatatcagtggaatagtccggacattaagaaaggcgattgggaaacacttgaggctacattgaaggaaagctatggcaaaatttgggattatgatcttgacgctgcgttgaaagaggcacgagaggacctaggaaagagacttgggaaggattgatgagtgattgagtggcaccgcgtgatgcgctttgcgtctcgataagaatcaaaaaggatattgcgaatgccaaaacagaccgtgtaagtgtcctagacaaattggtgtatctctcgaatgtgaattcggatcttcaccagatgatcgataacgcagcctacacctctgctcatccggcaaattactcggaaatgccttgatcctgaggaaaacctgtatttctgaactgccaatgccttgacgctgctgtaatgctatgctatgggcccattgcgctacctatgcaaccggggccc

SEQ ID NO: 3519 - DNA, 1434 bp, Muscodor strobelii
  misc_feature: SGI cDNA ID NO. 560834
  misc_feature: Encodes the peptide sequence at SEQ ID NO 3520
atgtccgcggagggcttcgatcgcgatgccatccagcgctggattcactcagttgagtcaaatggatctgccgagttagacgccaatggctacagcatttatacttacctggatccccaacaagttgatgccatccggtactggatcgactcgattcacccaactgaggctatcgatacagacgcccgcgatgacaatgcgaccagtgtggctgatgacgttctcggcgatgaacgcctacccattaatgacaacggcgatgtcggcgatccgagcagcgacgctgggtctgttgacaacaatactcgcagaattcctttagatctatttaaggtcaaagagaagacgagagacgacttacggtggttggaccgaccgcccatctttcgacctctcgagggctcggaccccttcatgccaaaagatgtgcaacaccttcatagggagatacatgctgcagccaccaatatggagcagatcattcctttcaaggtccgagacgcggtagaggagcgagaaggaaagttaccagagcactatatatgccactccgccactaatggcgaaccattcggagagctctgggacttgcacttgcatggtgccaactggcatactctgcggtcaattcttgatcattttattgatgaccaatatcgtatcactaataacaccgatggcagaagtacggacttgggaacggtttacttcgtaatcgactcagatgactcaccatggtaccgatcgaaagtggataaggcatctagttgctatcacgatggctcttctatccgctcagcacctgtgcacggtcgacgaataattgttaccccgaagatcgattgtatcttatggctcaacccacggtacgaaagccctcttgaaagagctttcatctcttccgtggccagggataaaaagcgatgccaaccctggctcaagtactcccctgaggattactggattcaccccgtcgttgtccccattgcatcaaagtttcgttttaccacagtagagcctttgacgcgattggtgatctgggttgctacttggcacaaatacatgcgacgccaacgcttcgaactaagtctatcaaagctgcccgttgggttgccgacttgcccgacgaaaaccgaagacaacaacatttcttcaggagatattacaagctcccataccgaactcgtgacagtccccttggtcacaataaatgagcataagtgggaaatatactatgctcgcgacgagggtagcacaattggtatatacggacccgcggatctgggctctacggagacgctcgtgggcttctacgccttggtgaagtcgctgaatgctttgggtaagtggattgcgaatgacttctatcaccggatggaggaatggtatatgtgtggtgagcacgagtgggataaatactctacatccgtgtag

SEQ ID NO: 3520 - protein, 477 aa, Muscodor strobelii
  misc_feature: SGI Peptide ID NO. 560834
  misc_feature (280)..(455): NCBI GI: 116194328 Blast Desc: CHGG_03762 [Chaetomium globosum CBS 148.51] gi|88179675|gb|EAQ87143.1| CHGG_03762 [Chaetomium globosum CBS 148.51]
  misc_feature (299)..(455): NCBI GI: 39963832 Blast Desc: [Magnaporthe grisea 70-15] gi|145015428|gb|EDJ99964.1| [Magnaporthe grisea 70-15]
  misc_feature (324)..(470): NCBI GI: 116194203 Blast Desc: CHGG_06819 [Chaetomium globosum CBS 148.51] gi|88182732|gb|EAQ90200.1| CHGG_06819 [Chaetomium globosum CBS 148.51]
  misc_feature (315)..(455): NCBI GI: 256719922 Blast Desc: NECHADRAFT_4538 [Nectria haematococca mpVI 77-13-4]
  misc_feature (292)..(463): NCBI GI: 149209015 Blast Desc: MGCH7_ch7g3 [Magnaporthe grisea 70-15] gi|86195958|gb|EAQ70596.1| MGCH7_ch7g3 [Magnaporthe grisea 70-15]
  misc_feature (324)..(441): NCBI GI: 116197324 Blast Desc: CHGG_05260 [Chaetomium globosum CBS 148.51] gi|88181173|gb|EAQ88641.1| CHGG_05260 [Chaetomium globosum CBS 148.51]
MSAEGFDRDAIQRWIHSVESNGSAELDANGYSIYTYLDPQQVDAIRYWIDSIHPTEAIDTDARDDNATSVADDVLGDERLPINDNGDVGDPSSDAGSVDNNTRRIPLDLFKVKEKTRDDLRWLDRPPIFRPLEGSDPFMPKDVQHLHREIHAAATNMEQIIPFKVRDAVEEREGKLPEHYICHSATNGEPFGELWDLHLHGANWHTLRSILDHFIDDQYRITNNTDGRSTDLGTVYFVIDSDDSPWYRSKVDKASSCYHDGSSIRSAPVHGRRIIVTPKIDCILWLNPRYESPLERAFISSVARDKKRCQPWLKYSPEDYWIHPVVVPIASKFRFTTVEPLTRLVIWVATWHKYMRRQRFELSLSKLPVGLPTCPTKTEDNNISSGDITSSHTELVTVPLVTINEHKWEIYYARDEGSTIGIYGPADLGSTETLVGFYALVKSLNALGKWIANDFYHRMEEWYMCGEHEWDKYSTSV

SEQ ID NO: 3521 - DNA, 1302 bp, Muscodor strobelii
  misc_feature: SGI cDNA ID NO. 560835
  misc_feature: Encodes the peptide sequence at SEQ ID NO 3522
atgaacagtgtccagaccatcagcagataccacattgccaaggtctaccggcgcgaccagcccgccattgccagagggagaatgcgagagttttaccaatgcgatttcgatattgccggcgagtttggtgccatgatacccgatgctagaattctaagaataatggtacacatcttactcctccctctcaaccccctggagttttccagtttcataggaaccaaagctaacttccttctagtaagagcccaatgcctatgcccatgccattctcgacagccccgccatactgcccagcgtaatatgctaacgcgccaaagaaacgaagtcttcaccgagctcgacctcgccaaggacgtcaccgtcaagatcaaccaccgcaagatcctcgacggcctcttcgctgtcgccggtgtgcccgatgacaagatccgcgccatcagctcagccgtcgacaagttggacaaggagacacgggagacggtcaagaaggagatgacggagcagaagggcctcgacggagctgtcgccgatgagatcctcgagtggaccaagcacagcggaagcatcgactccatagtggatctgatcaggaaagacgagaagatgatggccaacgacaagatcaaggagggtatcgaccagatggaacgcctcaacagattcctcaaggcctccaaaatagaaaataccgtctctttcgacatggccctcgctcgtggtctcgactactacacaggtctcatctacgaagccgtctacatacccaccgacaagagcgccgagacgcgcgttggcagcatagcggccggaggtcggtacgataacctcgtcggcatgtatggacgcaaacagattccctgcgtcggtatctcgttcggtgtcgaccgtatatacactatcatgatggcacgttacaagaagcagaaacaaacgatccggggcagcgacgtatatgtcatggcgctcggtggcgatggtctattggacgaccgtatcagaatcgcatctctgttatgggacgctggcatcaacgcagatttctcgatgaaggataagcccaagctgcctcagcaattcaaggccgccgagactgctggcgtgccgtacgctgtcatcatcggtgaggatgagttgaaggctggaaaggtcaaggttaaggtcatggggttgcctgagggccaccccgagaaggatggtaagcttatcgaggagacagagcttgtttctgagatccagagactgctgaaagaggagaatgaggagacaaatggtgttagtgctgagataccggtgaggtaa

SEQ ID NO: 3522 - protein, 433 aa, Muscodor strobelii
  misc_feature: SGI Peptide ID NO. 560835
  misc_feature (317)..(415): Pfam Id: PF03129 Pfam Desc: Anticodon binding domain
  misc_feature (2)..(418): NCBI GI: 67515529 Blast Desc: AN0046.2 [Aspergillus nidulans FGSC A4] gi|40746209|gb|EAA65365.1| AN0046.2 [Aspergillus nidulans FGSC A4]
  misc_feature (2)..(418): NCBI GI: 259489767 Blast Desc: TPA: histidyl-tRNA synthetase, mitochondrial precursor (AFU_orthologue; AFUA_4G12920) [Aspergillus nidulans FGSC A4]
  misc_feature (4)..(425): NCBI GI: 240106070 Blast Desc: Histidyl-tRNA synthetase, [Coccidioides posadasii C735 delta SOWgp]
  misc_feature (1)..(416): NCBI GI: 85092169 Blast Desc: histidyl-tRNA synthetase, mitochondrial precursor [Neurospora crassa OR74A] gi|28920664|gb|EAA30025.1| histidyl-tRNA synthetase, mitochondrial precursor [Neurospora
  misc_feature (1)..(416): NCBI GI: 189202682 Blast Desc: histidyl-tRNA synthetase [Pyrenophora tritici-repentis Pt-1C-BFP] gi|187984776|gb|EDU50264.1| histidyl-tRNA synthetase [Pyrenophora tritici-repentis Pt-1C-BFP]
  misc_feature (4)..(416): NCBI GI: 169595260 Blast Desc: SNOG_00367 [Phaeosphaeria nodorum SN15] gi|160701055|gb|EAT91862.2| SNOG_00367 [Phaeosphaeria nodorum SN15]
  misc_feature (1)..(425): NCBI GI: 258573857 Blast Desc: histidyl-tRNA synthetase [Uncinocarpus reesii 1704] gi|237901376|gb|EEP75777.1| histidyl-tRNA synthetase [Uncinocarpus reesii 1704]
  misc_feature (1)..(417): NCBI GI: 225559000 Blast Desc: histidyl-tRNA synthetase [Ajellomyces capsulatus G186AR]
  misc_feature (1)..(417): NCBI GI: 240281922 Blast Desc: histidyl-tRNA synthetase [Ajellomyces capsulatus H143]
  misc_feature (2)..(416): NCBI GI: 261353333 Blast Desc: histidyl-tRNA synthetase [Verticillium albo-atrum VaMs.102]
  misc_feature (1)..(422): SWISSPROT Homolog: EC 6.1.1.21 Histidine--tRNA ligase
MNSVQTISRYHIAKVYRRDQPAIARGRMREFYQCDFDIAGEFGAMIPDARILRIMVHILLLPLNPLEFSSFIGTKANFLLVRAQCLCPCHSRQPRHTAQRNMLTRQRNEVFTELDLAKDVTVKINHRKILDGLFAVAGVPDDKIRAISSAVDKLDKETRETVKKEMTEQKGLDGAVADEILEWTKHSGSIDSIVDLIRKDEKMMANDKIKEGIDQMERLNRFLKASKIENTVSFDMALARGLDYYTGLIYEAVYIPTDKSAETRVGSIAAGGRYDNLVGMYGRKQIPCVGISFGVDRIYTIMMARYKKQKQTIRGSDVYVMALGGDGLLDDRIRIASLLWDAGINADFSMKDKPKLPQQFKAAETAGVPYAVIIGEDELKAGKVKVKVMGLPEGHPEKDGKLIEETELVSEIQRLLKEENEETNGVSAEIPVR

SEQ ID NO: 3523 - DNA, 2010 bp, Muscodor strobelii
  misc_feature: SGI EST ID NO. CUFF.8916.2
  misc_feature: Variant of the nucleotide sequence at SEQ ID NO 3521
gccgtgagtcacgttagatccgatgcgcctgcccatcccacttctggtgcgagcaactgccccgcgccggagggtgtcaaaagttgcgacgcaaggtgcaaccacatctgttgccccaagatcgcgactccaaccctcgtatttctcttttgcctccaattcaccaccacctcgtcgccccctccacaacgctgcacctctacgctctacgaactctacaatactcagcaatagtacaggagacgaccccgtcgacgacgacatggccgagaagccagagaaggctgaaaaggcagccaaggccgacaaggcgggcgtcaaggtgcccaagggtacgcgtgactgggttggccccgacgtcaaggtccgcgacaaagtcttcaaggctgccgaggacgccttcgtccgccacggcggtgtcgctttagatacccccgtcttcgaactgaagtcagtcctgtctggcaaatacggcgaggactcaaaactcatctacgaacttgccgaccaaggcggggaggaactagccctccgatatgacctgacagtgccctttgcccgctggctcgccatgaacagtgtccagaccatcagcagataccacattgccaaggtctaccggcgcgaccagcccgccattgccagagggagaatgcgagagttttaccaatgcgatttcgatattgccggcgagtttggtgccatgatacccgatgctagaattctaagaataatgtaagagcccaatgcctatgcccatgccattctcgacagccccgccatactgcccagcgtaatatgctaacgcgccaaagaaacgaagtcttcaccgagctcgacctcgccaaggacgtcaccgtcaagatcaaccaccgcaagatcctcgacggcctcttcgctgtcgccggtgtgcccgatgacaagatccgcgccatcagctcagccgtcgacaagttggacaaggagacacgggagacggtcaagaaggagatgacggagcagaagggcctcgacggagctgtcgccgatgagatcctcgagtggaccaagcacagcggaagcatcgactccatagtggatctgatcaggaaagacgagaagatgatggccaacgacaagatcaaggagggtatcgaccagatggaacgcctcaacagattcctcaaggcctccaaaatagaaaataccgtctctttcgacatggccctcgctcgtggtctcgactactacacaggtctcatctacgaagccgtctacatacccaccgacaagagcgccgagacgcgcgttggcagcatagcggccggaggtcggtacgataacctcgtcggcatgtatggacgcaaacagattccctgcgtcggtatctcgttcggtgtcgaccgtatatacactatcatgatggcacgttacaagaagcagaaacaaacgatccggggcagcgacgtatatgtcatggcgctcggtggcgatggtctattggacgaccgtatcagaatcgcatctctgttatgggacgctggcatcaacgcagatttctcgatgaaggataagcccaagctgcctcagcaattcaaggccgccgagactgctggcgtgccgtacgctgtcatcatcggtgaggatgagttgaaggctggaaaggtcaaggttaaggtcatggggttgcctgagggccaccccgagaaggatggtaagcttatcgaggagacagagcttgtttctgagatccagagactgctgaaagaggagaatgaggagacaaatggtgttagtgctgagataccggtgaggtaatcttagtgaataaaagagaaaatcaccactttatgtctcaagtgcaaaataagacccaataccgtcttgggctgcgacgatgattttatcagagctactgctgagcatcaagtaaacttagtgagactaaaaggatgcttgtactggcactggacatatcaggagaagcgtctagtgatcaatccactcaactcggaacaacttggaacgtag

SEQ ID NO: 3524 - DNA, 519 bp, Muscodor strobelii
  misc_feature: SGI cDNA ID NO. 560836
  misc_feature: Encodes the peptide sequence at SEQ ID NO 3525
atggctccctctcctgagagcacttccactgtccctgatcactacgatggtggctcaccactcgacggaggagccaatccctcgtcacttggcagtaacggaacccctttcaagcccagtgcattggagattggtctcattgtcggagttgtaacgctcattgctatcagtgtgatctggctgttcttctggagagcacgtaggaaccgagcgactaaggatacgggttccggggaagcaaatggagcttacgaacaggagctcgccgacgttgatcacgcagcggcacatctcgccggttccaaggatgaccaggccagcacatgcgacaacgatgaaatgtcaggtcccgttcttgtggatcgttcgtctcattctgtctcgccaggtcgattcagtcccatccctccaggccccgagcctgttcacagtgctcaaagccgctctcggtggaatacgtggatgcagtcctcttcccctactaaagtggaggtaaccgaaattcctggccgcgtctga

SEQ ID NO: 3525 - protein, 172 aa, Muscodor strobelii
  misc_feature: SGI Peptide ID NO. 560836
MAPSPESTSTVPDHYDGGSPLDGGANPSSLGSNGTPFKPSALEIGLIVGVVTLIAISVIWLFFWRARRNRATKDTGSGEANGAYEQELADVDHAAAHLAGSKDDQASTCDNDEMSGPVLVDRSSHSVSPGRFSPIPPGPEPVHSAQSRSRWNTWMQSSSPTKVEVTEIPGRV

SEQ ID NO: 3526 - DNA, 1837 bp, Muscodor strobelii
  misc_feature: SGI EST ID NO. CUFF.8859.0
  misc_feature: Variant of the nucleotide sequence at SEQ ID NO 3524
atccacttaggtgtggttcatgcgacttgcttgtatcagagacgggccacaaggagattgaatgcccacagaatggtagcctgggaaacacagaccaaagcacaacactgtgtatttcatgatcttcattgaacgcggcagcacgtttccaagctgagttcagtccctacctggcgatgcatgcatacctactactaatccgcctgagttctctgtgtacacatgttggatgcgactaccatgaatgggtctccttatatcggtgaatcgaaagtgcgatcgagaattaaacagagaaaatgggaagcggcatcgtcttatcctcagagtgagcactccgacgggcccaatcatcgacctccctttttcaagacaatatactttccgaccgtgtccccatcgcgcttgctccccatcaagtgcgtccctatacatactcgggccttccctgtcctcgtctcactaaagcacctcaacctcgttcttccccagtccaaactgcttggtgcagcaggagcgtgcacagacaaggcattttcgaggcagtctcaagaggtactactaccaccagtgacccctcgctcatttgcccctcacactctgtttgcctcgattctcgctctgcacaacgccatttcgtccccgttgccgtcgcatgctgaaacggctttgtcgcattcgagcacttctcaatctagcccccaatacatcatcgaggctcgtgtctgatacaatacactcagtcgcagcagctgaccgtgcaacacttcgtcttgttctttagccgcagcatgaagcacactgcctctactgatctagttgctccacgtctgctcacgtccagttcatgattgcttcattcccgcagcaatctgtacaacctaactcagcttggcgttttcagcgacactacggacaagcacaactgtcgactatggctccctctcctgagagcacttccactgtccctgatcactacgatggtggctcaccactcgacggaggagccaatccctcgtcacttggcagtaacggaacccctttcaagcccagtgcattggagattggtctcattgtcggagttgtaacgctcattgctatcagtgtgatctggctgttcttctggagagcacgtaggaaccgagcgactaaggatacgggttccggggaagcaaatggagcttacgaacaggagctcgccgacgttgatcacgcagcggcacatctcgccggttccaaggatgaccaggccagcacatgcgacaacgatgaaatgtcaggtcccgttcttgtggatcgttcgtctcattctgtctcgccaggtcgattcagtcccatccctccaggccccgagcctgttcacagtgctcaaagccgctctcggtggaatacgtggatgcagtcctcttcccctactaaagtggaggtaaccgaaattcctggccgcgtctgaaaagcgactggtgaagattgaggactagtgacgactcaaattcttatgagcgtcatggacgtgacgacgatttgcatcatggtcgagataccaatacgaaaggatgttaggtaatgatgaaagagatgatgaatgaagattgtgttgagctgcagacgattcatggttcttgctgttgtagcactatgcatcttgccacgacacatttgtcagttgttcggaactctggtaacagttgctcacaccacattgctgtcatattggccccgtctatgcgatgtagggcatgttgagcattctttcgattgcgagtcagtgtcagaatcctcatacagtttctatatagttgttagtagttacgaaatgaacagactttcaatgaag

SEQ ID NO: 3527 - DNA, 1287 bp, Muscodor strobelii
  misc_feature: SGI cDNA ID NO. 560837
  misc_feature: Encodes the peptide sequence at SEQ ID NO 3528
atggcagataattccgtggcagccgacccagccacaacgaccccatcccgagatggggagatattgaaagatcatcctcagcatcacgggactgagaaacctacatcagcccatctggagacaacgatgtttgggcgtaatagcgagtttgataggagcccagttcgggaacatcaggttcacgcagaccacgagaaggtgtccccaatctcatcccatacataccgaggagatacaagagccttgcctgcctgtcacacaagttttagcacagtgaaagccagatttgactccagcctcatccaccgccttcgatactctcttggagtgtccgggattgcaactattgtgatcggcgatatcggcatcctaggcgtctactctttcctagtgtttctgtggttcgggtatgaccctaccacggaagccgcaaatgccccgtgggcctggcgtcaaattgctcttcgaggcttgacggaccaggccattaccctggccgccgccgttctcagagcacttgtgacgctgcaaaccgtagcttgcacctctatgatcgctgcttccatcatcgagggtcgtggagtgcgaaaatcccaggtaccatggttctcagtcatgagaggagttaacgctgggccctggaagctcttcaagatgatgttggcatccccaattatgaccatcgtccgacaccttgatttctggttggcattctcgatgatcatcgtggctctagctgtccatttcacctctacgattctcttgtcggatctccatgaatttgtcatggtcggcaacgcgaacgagacgatggtgccagggctcgtctcttacgacaagtcaacattcgacattccactcacagggggtgaatatcaatatgcagctccgcagttctttacgttcggcgaagtcgcgtccgaggctgattcgtacccgaatagctttgggttgagtgacacgggtttgatccaaaggggcttcatacccctctctgatgctgtcgaaagagccgcgacgcgccaatatagcggtaacgccgttgtattgagtacgagagcagcttgtatgaggcctaatatcatcgacggtgttcctcagtatgtggatccggctgattctggcaactttgctggtagtggctatctggaagggattcttgagtatgcatcgagtttcaagaaagcccagatcgagtccagtacactgccacattgtagcacgccttacacttatagtattcggctcttacccttaccgccgattctttttagtaaggaattttag

SEQ ID NO: 3528 - protein, 428 aa, Muscodor strobelii
  misc_feature: SGI Peptide ID NO. 560837
  misc_feature (102)..(396): NCBI GI: 145605162 Blast Desc: MGG_02132 [Magnaporthe grisea 70-15] gi|145013020|gb|EDJ97661.1| MGG_02132 [Magnaporthe grisea 70-15]
  misc_feature (61)..(356): NCBI GI: 46127455 Blast Desc: FG08105.1 [Gibberella zeae PH-1]
  misc_feature (105)..(369): NCBI GI: 46139113 Blast Desc: FG11071.1 [Gibberella zeae PH-1]
  misc_feature (108)..(379): NCBI GI: 256722986 Blast Desc: NECHADRAFT_52602 [Nectria haematococca mpVI 77-13-4]
  misc_feature (108)..(416): NCBI GI: 256733978 Blast Desc: NECHADRAFT_77642 [Nectria haematococca mpVI 77-13-4]
  misc_feature (94)..(363): NCBI GI: 119474385 Blast Desc: NFIA_005330 [Neosartorya fischeri NRRL 181] gi|119407221|gb|EAW17171.1| conserved [Neosartorya fischeri NRRL 181]
  misc_feature (107)..(356): NCBI GI: 256726575 Blast Desc: NECHADRAFT_79667 [Nectria haematococca mpVI 77-13-4]
  misc_feature (95)..(356): NCBI GI: 119482479 Blast Desc: NFIA_093340 [Neosartorya fischeri NRRL 181] gi|119409422|gb|EAW19371.1| [Neosartorya fischeri NRRL 181]
MADNSVAADPATTTPSRDGEILKDHPQHHGTEKPTSAHLETTMFGRNSEFDRSPVREHQVHADHEKVSPISSHTYRGDTRALPACHTSFSTVKARFDSSLIHRLRYSLGVSGIATIVIGDIGILGVYSFLVFLWFGYDPTTEAANAPWAWRQIALRGLTDQAITLAAAVLRALVTLQTVACTSMIAASIIEGRGVRKSQVPWFSVMRGVNAGPWKLFKMMLASPIMTIVRHLDFWLAFSMIIVALAVHFTSTILLSDLHEFVMVGNANETMVPGLVSYDKSTFDIPLTGGEYQYAAPQFFTFGEVASEADSYPNSFGLSDTGLIQRGFIPLSDAVERAATRQYSGNAVVLSTRAACMRPNIIDGVPQYVDPADSGNFAGSGYLEGILEYASSFKKAQIESSTLPHCSTPYTYSIRLLPLPPILFSKEF

SEQ ID NO: 3529 - DNA, 787 bp, Muscodor strobelii
  misc_feature: SGI EST ID NO. CUFF.8871.0
  misc_feature: Variant of the nucleotide sequence at SEQ ID NO 3527
cttgacatcctttgcaattctagtgtagtttataataggcaagactggcgagctaagcctcttcatatagcacgatggcgaccctgattcttgatctcccgtctcatttccctttgaggttcaactccaaacagcccatttagatccaaaatctgctcttattgttacataatccatattcgattgacgacatggcagataattccgtggcagccgacccagccacaacgaccccatcccgagatggggagatattgaaagatcatcctcagcatcacgggactgagaaacctacatcagcccatctggagacaacgatgtttgggcgtaatagcgagtttgataggagcccagttcgggaacatcaggttcacgcagaccacgagaaggtgtccccaatctcatcccatacataccgaggagatacaagagccttgcctgcctgtcacacaagttttagcacagtgaaagccagatttgactccagcctcatccaccgccttcgatactctcttggagtgtccgggattgcaactattgtgatcggcgatatcggcatcctaggcgtctactctttcctagtgtttctgtggttcgggtatgaccctaccacggaagccgcaaatgccccgtgggcctggcgtcaaattgctcttcgaggcttgacggaccaggccattaccctggccgccgccgttctcagagcacttgtgacgctgcaaaccgtagcttgcacctctatgatcgctgcttccatcatcgagggtcgtggagtgcgaaaatccca

SEQ ID NO: 3530 - DNA, 1605 bp, Muscodor strobelii
  misc_feature: SGI cDNA ID NO. 560838
  misc_feature: Encodes the peptide sequence at SEQ ID NO 3531
atggatcccttgacaccagtcataatcggagtaggcgaggttaaaaacaaacatgtggatgtcacgcacgcgtacgaaccggcccagttgattgtcgacgccctccaaaaagcgatattagacacaaatctgcccgaaccccgagcaaggattctcacgcaaagcattgacagtatttctactgtccgtccgtggacatggccctatcccgatctgccgggcctgattgcatctcgaatcctcgccggtggtaccgataatctgaaacataaagaatacacagaccatggcggtaatcaaccggtcagactactggacgaagcatcgcgtcgggtcgccgggggggaagtcaaggtagctgtggtggcgggcggagaagcattggcttctctggcagcgtgttccaaagcaggcaagatgccaccgcccggatggtctccgccagacaaaggtggcgagtcgttcattgttccttcactttcaaacggaacacgtaaagcgaaacaaattcaagagaatctggggtttagacatggcattgggctgccaattcatatttatccattatacgaaaacggttatcgcgcccgtcggaaacaagggcttagagagaaccacgaggagagtgctcacatgtacggcgagtttgcaaaggttgcaagcaacaacgaatacgcttggaactacgggaagtcaaggaaaacaaatgaagagatcgcgacagtgggcaaaggagggaatagaatgatctgtttcccgtatccactacttatgaatgcattcaacgcggtaaacttggcagcctgttgcgtcatcacatcagtaggatacgctaaagaactgggcgtgccacaggacagatggatatacccgttgggaggcgccggaactagcgagagtgcgaacttctgggagaggaagaacttcagcgaaagtccggcaattgcgatgagtatcgatgcgaccttggagctgagtggactgaaagcacgagacgtgaatattttcgatttctactcgtgttttcctatcgtaccaaagttggcgtgtgagcatctaggtttagatactctgcgaccggaaaagcccatcacgctgctaggtggactgacatcttttggaggcgccgggaacaactactctcttcatgctgtggcggcgatgaccagagagctgcgacgcgggaatgcgaagaacggactagtccttgccaatggagggagtctcacatatcagcatgcaatatgtctctcttcacagccgcaatcagctagccatcacactccatatcctgagaaatatgctcttcctgatgtaataccgggcctggataactcaatgatagctattcaggctgcgggcgaagctgttatcgaaacgtatactgtcgagtttaatagagatgggaaaccagaaacaggccacgtagtgggcaggttgaagagcaatgggcatcgcttcatcgcgaatcatgcagacgagaggactctaatggagcttgctaattcaaccgaggagcaaatcggtaaaagcggaagagtgtacaccgatatagaaacccagaaaaacatgttcacttttcagacagatagcttcaagctgtag

SEQ ID NO: 3531 - protein, 534 aa, Muscodor strobelii
  misc_feature: SGI Peptide ID NO. 560838
  misc_feature (6)..(528): NCBI GI: 240105465 Blast Desc: conserved [Coccidioides posadasii C735 delta SOWgp]
  misc_feature (4)..(529): NCBI GI: 238840679 Blast Desc: thiolase [Microsporum canis CBS 113480]
  misc_feature (5)..(529): NCBI GI: 115384060 Blast Desc: conserved [Aspergillus terreus NIH2624] gi|114196269|gb|EAU37969.1| conserved [Aspergillus terreus NIH2624]
  misc_feature (5)..(527): NCBI GI: 212528846 Blast Desc: conserved [Penicillium marneffei ATCC 18224] gi|210073978|gb|EEA28065.1| conserved [Penicillium marneffei ATCC 18224]
  misc_feature (6)..(527): NCBI GI: 169602599 Blast Desc: SNOG_04303 [Phaeosphaeria nodorum SN15] gi|111066943|gb|EAT88063.1| SNOG_04303 [Phaeosphaeria nodorum SN15]
  misc_feature (4)..(525): NCBI GI: 238482907 Blast Desc: conserved [Aspergillus flavus NRRL3357] gi|220700742|gb|EED57080.1| conserved [Aspergillus flavus NRRL3357]
  misc_feature (4)..(500): NCBI GI: 46139307 Blast Desc: FG11168.1 [Gibberella zeae PH-1]
  misc_feature (5)..(528): NCBI GI: 242765341 Blast Desc: conserved [Talaromyces stipitatus ATCC 10500] gi|242765346|ref|XP_002340957.1| conserved [Talaromyces stipitatus ATCC 10500] gi|218724152|gb|EED23569.1| conserved ATCC
  misc_feature (6)..(512): NCBI GI: 258575253 Blast Desc: conserved [Uncinocarpus reesii 1704] gi|237902074|gb|EEP76475.1| conserved [Uncinocarpus reesii 1704]
  misc_feature (15)..(512): NCBI GI: 189203661 Blast Desc: acetyl-CoA acetyltransferase [Pyrenophora tritici-repentis Pt-1C-BFP] gi|187985265|gb|EDU50753.1| acetyl-CoA acetyltransferase [Pyrenophora tritici-repentis
MDPLTPVIIGVGEVKNKHVDVTHAYEPAQLIVDALQKAILDTNLPEPRARILTQSIDSISTVRPWTWPYPDLPGLIASRILAGGTDNLKHKEYTDHGGNQPVRLLDEASRRVAGGEVKVAVVAGGEALASLAACSKAGKMPPPGWSPPDKGGESFIVPSLSNGTRKAKQIQENLGFRHGIGLPIHIYPLYENGYRARRKQGLRENHEESAHMYGEFAKVASNNEYAWNYGKSRKTNEEIATVGKGGNRMICFPYPLLMNAFNAVNLAACCVITSVGYAKELGVPQDRWIYPLGGAGTSESANFWERKNFSESPAIAMSIDATLELSGLKARDVNIFDFYSCFPIVPKLACEHLGLDTLRPEKPITLLGGLTSFGGAGNNYSLHAVAAMTRELRRGNAKNGLVLANGGSLTYQHAICLSSQPQSASHHTPYPEKYALPDVIPGLDNSMIAIQAAGEAVIETYTVEFNRDGKPETGHVVGRLKSNGHRFIANHADERTLMELANSTEEQIGKSGRVYTDIETQKNMFTFQTDSFKL

SEQ ID NO: 3532 - DNA, 2181 bp, Muscodor strobelii
  misc_feature: SGI EST ID NO. CUFF.8880.0
  misc_feature: Variant of the nucleotide sequence at SEQ ID NO 3530
tcatgttgatagttgatagaggtaacaagcactggaagcattgtgcaaatagcgcttgcgccacgtggagagctgggtagacccacagcactgtcagcctctaacagtccagggagggtagtgagctacagggttcacaaattgcctcggcatcttttgtgcaattgaagtaagatgatgggagaagactcacgtccgccgatcgaatcatcaacgtcgcataagcttttcaaatgaacatgctctggatagaattgtgaccgatatctggttaatcgatgcatcaataaacgcatgctcgctataaaacccacgcacgagtcgaatcacttacgcaccgctgatggatcccttgacaccagtcataatcggagtaggcgaggttaaaaacaaacatgtggatgtcacgcacgcgtacgaaccggcccagttgattgtcgacgccctccaaaaagcgatattagacacaaatctgcccgaaccccgagcaaggattctcacgcaaagcattgacagtatttctactgtccgtccgtggacatggccctatcccgatctgccgggcctgattgcatctcgaatcctcgccggtggtaccgataatctgaaacataaagaatacacagaccatggcggtaatcaaccggtcagactactggacgaagcatcgcgtcgggtcgccgggggggaagtcaaggtagctgtggtggcgggcggagaagcattggcttctctggcagcgtgttccaaagcaggcaagatgccaccgcccggatggtctccgccagacaaaggtggcgagtcgttcattgttccttcactttcaaacggaacacgtaaagcgaaacaaattcaagagaatctggggtttagacatggcattgggctgccaattcatatttatccattatacgaaaacggttatcgcgcccgtcggaaacaagggcttagagagaaccacgaggagagtgctcacatgtacggcgagtttgcaaaggttgcaagcaacaacgaatacgcttggaactacgggaagtcaaggaaaacaaatgaagagatcgcgacagtgggcaaaggagggaatagaatgatctgtttcccgtatccactacttatgaatgcattcaacgcggtaaacttggcagcctgttgcgtcatcacatcagtaggatacgctaaagaactgggcgtgccacaggacagatggatatacccgttgggaggcgccggaactagcgagagtgcgaacttctgggagaggaagaacttcagcgaaagtccggcaattgcgatgagtatcgatgcgaccttggagctgagtggactgaaagcacgagacgtgaatattttcgatttctactcgtgttttcctatcgtaccaaagttggcgtgtgagcatctaggtttagatactctgcgaccggaaaagcccatcacgctgctaggtggactgacatcttttggaggcgccgggaacaactactctcttcatgctgtggcggcgatgaccagagagctgcgacgcgggaatgcgaagaacggactagtccttgccaatggagggagtctcacatatcagcatgcaatatgtctctcttcacagccgcaatcagctagccatcacactccatatcctgagaaatatgctcttcctgatgtaataccgggcctggataactcaatgatagctattcaggctgcgggcgaagctgttatcgaaacgtatactgtcgagtttaatagagatgggaaaccagaaacaggccacgtagtgggcaggttgaagagcaatgggcatcgcttcatcgcgaatcatgcagacgagaggactctaatggagcttgctaattcaaccgaggagcaaatcggtaaaagcggaagagtgtacaccgatatagaaacccagaaaaacatgttcacttttcagacagatagcttcaagctgtagagtagaaactgctactgtacctctaacctcttgagtcactggctattcttgcattgcctaggtgttccttttgttcctttccccgtgcgcttgtcacaggctgccactagtttattgcctggttgcttccgttggagtcactagatcacagtgtatcttgaaatctaagacacgtaaagggtcaacgagagacactgtggtgagggttacattgtcttaaatgatggttattg

SEQ ID NO: 3533 - DNA, 1257 bp, Muscodor strobelii
  misc_feature: SGI cDNA ID NO. 560839
  misc_feature: Encodes the peptide sequence at SEQ ID NO 3534
atgaacgatcacaataaccgcaacaagcctgagaagatcgggaatgaaatcctaacaagcatctcctccatgactctacgacgggcaattcgcctgtttgcgcccatgttagtgctcgtcttcataaccgcactggctacgtattatctgccatggggcgatattgatcgtagagcccccaacatcttcgcccatctgtacaaattctggttgtggtcggtccaggtcatggatccgtactattgggaggttaggaagccacttccgccacattttcaacaggcctggacactgagcgttgaataccgcctttcactcgccctctttctcatactggctacaacagcaactctgtcaactgtggcccggaagacagcagcaattctggtggcattctgggctgtctatgccagccgtcgctgggagattgttgcagcaatgggcggcatggtgctggcggaactgcggttcgcacccttcgtagacgaccttgctcggctcttcaaccgccctccaggccacctgagaccaaaagagtggttagcgactgcgcctgcagtggttggtctgatccttggtctgatcttagtcagttggcccgagtccatgccggcgggcgcgcagccttatcactacctatgggagttcacgcctgatacctggcgacccaactcccatcacgggtcgaaagagttgacgggtgggtgggtatggtggtggggtactattggcgccgtactggtcatttggggactcgaacagttgccggctttacagcgcatactctctatcgacctgtttaaatatcttggagagattagctactcgtactatctgctccagcgcctgtcccgtatgtatgtgggtgaaccgttgttcacttaccttcacgagaaacagggatggtctacaaacatggcctggattgtctactacatagccgctcagtatgctgtggtgctaatggctgactatttctggcgcattgtcgacgagccatgtgtccgacttgcgcgtttcgttgtggtaagctggttgggagtgggtaagaaatcaggctgtgacttaagggatggatcgtcttcagtctccgcaactcattatgcccctctatttacgggcattcctagatctgatgatgaccgcgcggaaactgagcatacactgataggtgaagatgagattgagcttaaggatggacttcatgatgcgagcagcagcgcatcacatattcacacacgggtatcacgaagctag

SEQ ID NO: 3534 - protein, 418 aa, Muscodor strobelii
  misc_feature: SGI Peptide ID NO. 560839
  misc_feature (21)..(341): NCBI GI: 119196091 Blast Desc: CIMG_02420 [Coccidioides immitis RS]
  misc_feature (21)..(341): NCBI GI: 240110625 Blast Desc: Acyltransferase family protein [Coccidioides posadasii C735 delta SOWgp]
  misc_feature (21)..(352): NCBI GI: 225555417 Blast Desc: conserved [Ajellomyces capsulatus G186AR]
  misc_feature (16)..(341): NCBI GI: 119500826 Blast Desc: acyltransferase, [Neosartorya fischeri NRRL 181] gi|119415335|gb|EAW25273.1| acyltransferase, [Neosartorya fischeri NRRL 181]
  misc_feature (16)..(339): NCBI GI: 145241818 Blast Desc: An09g02410 [Aspergillus niger] gi|134078096|emb|CAK40178.1| protein product [Aspergillus niger]
  misc_feature (21)..(352): NCBI GI: 239613628 Blast Desc: acyltransferase [Ajellomyces dermatitidis ER-3]
  misc_feature (15)..(351): NCBI GI: 115397867 Blast Desc: conserved [Aspergillus terreus NIH2624] gi|114192716|gb|EAU34416.1| conserved [Aspergillus terreus NIH2624]
  misc_feature (16)..(341): NCBI GI: 70994264 Blast Desc: acyltransferase [Aspergillus fumigatus Af293] gi|66849608|gb|EAL89936.1| acyltransferase, [Aspergillus fumigatus Af293] gi|159125113|gb|EDP50230.1| acyltransferase,
  misc_feature (21)..(352): NCBI GI: 261193008 Blast Desc: acyltransferase [Ajellomyces dermatitidis SLH14081] gi|239589045|gb|EEQ71688.1| acyltransferase [Ajellomyces dermatitidis SLH14081]
  misc_feature (16)..(353): NCBI GI: 169773507 Blast Desc: [Aspergillus oryzae RIB40] gi|83769083|dbj|BAE59220.1| protein product [Aspergillus oryzae]
MNDHNNRNKPEKIGNEILTSISSMTLRRAIRLFAPMLVLVFITALATYYLPWGDIDRRAPNIFAHLYKFWLWSVQVMDPYYWEVRKPLPPHFQQAWTLSVEYRLSLALFLILATTATLSTVARKTAAILVAFWAVYASRRWEIVAAMGGMVLAELRFAPFVDDLARLFNRPPGHLRPKEWLATAPAVVGLILGLILVSWPESMPAGAQPYHYLWEFTPDTWRPNSHHGSKELTGGWVWWWGTIGAVLVIWGLEQLPALQRILSIDLFKYLGEISYSYYLLQRLSRMYVGEPLFTYLHEKQGWSTNMAWIVYYIAAQYAVVLMADYFWRIVDEPCVRLARFVVVSWLGVGKKSGCDLRDGSSSVSATHYAPLFTGIPRSDDDRAETEHTLIGEDEIELKDGLHDASSSASHIHTRVSRS

SEQ ID NO: 3535 - DNA, 1515 bp, Muscodor strobelii
  misc_feature: SGI EST ID NO. CUFF.8894.1
  misc_feature: Variant of the nucleotide sequence at SEQ ID NO 3533
tggcatgctggggagctaaagccccagggctgtttgattgcaaaccacaatgccagcccctctggacaccgcccaagctgggatctggtgtccgctctaattatatcatcacgcgatatccaccgttgaaactgcccatgcattgatgttcctcgacataaagggaatcaggaaggttgggcgcacaaaacaccatggagatgatgtcagaattccgttcctcggtgatccttatatctgacaactttggatgaaggttccacctcttctcttatttgagaaaacgaaacagaagtgaaagctgtgttgtgttacctctattgagggcgattgctcagatggcacatctgtcaacccttctcgcgccttgagcggccttcggtccgtcgttcaatcattcgtttctctcgctactacctgtcagataatatcgccgccatggatcaaatatcgcgatgggtcaaaaggctcaccagtcgtgaagaccgccaatacaacgagaccctgcctctcaccacgacagacgaaccttacaatgaagatggcggaataacatatcaacgcaaagcgcggaaccgtgaacgtttggcactgcgatggcttccactattactgcctttctgcatcgctcgaccacttggtttcaccgaccggcgactgcccaaaacgacgtcgacgacctatctgaacgggttaaggggcgtggcgtgttggattgtgttcaatgatcatttgacgatggacaagtatcgcgagttcatattcaaaccatacggagcggtgcgtgatggccaaacatttaatcatatcatccaactgcccgtagtgcgtgcattagttgctggaaaggggatggtatgcgtgttttttgtgttgtccggcttcgttctatcttactcgtctgttcgcaagatgaacgatcacaataaccgcaacaagcctgagaagatcgggaatgaaatcctaacaagcatctcctccatgactctacgacgggcaattcgcctgtttgcgcccatgttagtgctcgtcttcataaccgcactggctacgtattatctgccatggggcgatattgatcgtagagcccccaacatcttcgcccatctgtacaaattctggttgtggtcggtccaggtcatggatccgtactattgggaggttaggaagccacttccgccacattttcaacaggcctggacactgagcgttgaataccgcctttcactcgccctctttctcatactggctacaacagcaactctgtcaactgtggcccggaagacagcagcaattctggtggcattctgggctgtctatgccagccgtcgctgggagattgttgcagcaatgggcggcatggtgctggcggaactgcggttcgcacccttcgtagacgaccttgctcggctcttcaaccgccctccaggccacctgagaccaaaagagtggttagcgactgcgcctgcagtggttggtctgatccttggtctgatcttagtcagttggcccgag

SEQ ID NO: 3536 - DNA, 1260 bp, Muscodor strobelii
  misc_feature: SGI cDNA ID NO. 560840
  misc_feature: Elevated expression when VOC is produced
  misc_feature: Encodes the peptide sequence at SEQ ID NO 3537
atgaacattcttctactccttactgcagtcgttttatgtgcagccagtccggtcgcacgaacaaataggcttacttatgacggctacaaggtatatagggtagcgagcaacgcgcgcctggtggatctcgaggcagctttgaaagagctgcctgtgatagagcttcagcgtcatagtgaccccaacggtcgatggagcgtcgatgttgtcatcgcaccagaagacatcagcgctctcgaagagacatcgctggcaaccactctactgagtcatgatctaggcgcagatctcgcgacagaaatctcgggcaagacattgcacgacactgacgcgctccctggtctagaatggtttgactcctatcatccatacgctgaccatgtgcaatattgggccgagctgcaggaaacattttcagacaattctgagctcatctcaattggaagctcatttgagggtcgttccattcagggaatccacctctggggaagcggtggaaagggagcgaagcctgcaatcttcttcaatgggaacgtccacgcgcgcgaatggataacgtctatggtcgtcgagtacattctataccagcttgttactggatatcccagtgatccacttgtacaaaacgtactagataactacgacttctatgtcctaccaatagtcaatccagacggctttgtctacactcagacgacagaccgcctatggcgcaagaataggcaagtccgcagtaatacaactgagatcgggacagatatcaaccggaattggcttgttggctggggtggcgacgggtcctctccagacccaagttctgagacatttagcggcttcgcgccgcacgatacgcctgagacggcagcgctcgctaactacacgctctcattacgagacctgaacggcatcaagctctatatcgactggcatagctatgcccaagtcatcttgttgtcgtatggctacacgtgtaccgagtttccagaaaatcttgacgaacaaatggcgctcgcggagggaatttctgaggcaattgcaaagccgtacaacaccacatttgattacggtcccggatgtttggtgttgtaccaatccagtggcaatgggagagactatctgacagatgtcggaaaggcgcaatttggatgggggatcgagctgagggatacgcagtacgggttcgtgctcccacccgaccagatactgccaagcggaattgaggtgtgggaagggctgaaatatgcctgggcacagttctga

SEQ ID NO: 3537 - protein, 419 aa, Muscodor strobelii
  misc_feature: SGI Peptide ID NO. 560840
  misc_feature (127)..(411): Pfam Id: PF00246 Pfam Desc: Zinc carboxypeptidase
  misc_feature (22)..(418): NCBI GI: 171680620 Blast Desc: protein product [Podospora anserina] gi|170939937|emb|CAP65163.1| protein product [Podospora anserina]
  misc_feature (23)..(419): NCBI GI: 256725475 Blast Desc: NECHADRAFT_45775 [Nectria haematococca mpVI 77-13-4]
  misc_feature (5)..(413): NCBI GI: 46115662 Blast Desc: FG03673.1 [Gibberella zeae PH-1]
  misc_feature (1)..(419): NCBI GI: 85091739 Blast Desc: NCU07536 [Neurospora crassa OR74A] gi|28920446|gb|EAA29813.1| NCU07536 [Neurospora crassa OR74A]
  misc_feature (15)..(413): NCBI GI: 39948750 Blast Desc: MGG_08711 [Magnaporthe grisea 70-15] gi|145009256|gb|EDJ93967.1| MGG_08711 [Magnaporthe grisea 70-15]
  misc_feature (15)..(414): NCBI GI: 261358037 Blast Desc: zinc carboxypeptidase A [Verticillium albo-atrum VaMs.102]
  misc_feature (23)..(413): NCBI GI: 119184440 Blast Desc: CIMG_07026 [Coccidioides immitis RS]
  misc_feature (24)..(413): NCBI GI: 240109875 Blast Desc: carboxypeptidase A1 precursor, [Coccidioides posadasii C735 delta SOWgp]
  misc_feature (20)..(419): NCBI GI: 261354126 Blast Desc: carboxypeptidase B [Verticillium albo-atrum VaMs.102]
  misc_feature (4)..(414): NCBI GI: 145607451 Blast Desc: MGG_04253 [Magnaporthe grisea 70-15] gi|145015002|gb|EDJ99570.1| MGG_04253 [Magnaporthe grisea 70-15]
  misc_feature (118)..(413): SWISSPROT Homolog: EC 3.4.17.15 Carboxypeptidase A2
  misc_feature: Useful for introducing or modulating the production of volatile compounds
MNILLLLTAVVLCAASPVARTNRLTYDGYKVYRVASNARLVDLEAALKELPVIELQRHSDPNGRWSVDVVIAPEDISALEETSLATTLLSHDLGADLATEISGKTLHDTDALPGLEWFDSYHPYADHVQYWAELQETFSDNSELISIGSSFEGRSIQGIHLWGSGGKGAKPAIFFNGNVHAREWITSMVVEYILYQLVTGYPSDPLVQNVLDNYDFYVLPIVNPDGFVYTQTTDRLWRKNRQVRSNTTEIGTDINRNWLVGWGGDGSSPDPSSETFSGFAPHDTPETAALANYTLSLRDLNGIKLYIDWHSYAQVILLSYGYTCTEFPENLDEQMALAEGISEAIAKPYNTTFDYGPGCLVLYQSSGNGRDYLTDVGKAQFGWGIELRDTQYGFVLPPDQILPSGIEVWEGLKYAWAQF

SEQ ID NO: 3538 - DNA, 4308 bp, Muscodor strobelii
  misc_feature: SGI EST ID NO. CUFF.8905.0
  misc_feature: Variant of the nucleotide sequence at SEQ ID NO 3536
ttttgcagtcttttcaactacacgcagtccaatggagcctgattagcgcgccgagtaaatattgctcgacgctggcaagccaaattatcctacgatagcaaaacagcgctcggccgggcacaagacattttgctagagagcagcaaatggttcatctagcgacaacgactactatactgctataagtctatatctcataaagtttggacgtatctaaagcgcatatttacatctttcaatagaaccgctagtaaatgcaacagttcatgacatataactagatctcctcgatgtcgatattttgctctttcatcacctcatgcgagccaagacatcagtatcgcagtttgaggaaggaggaacacagattctgtcatcacacactgcattgggttacattctgattccaccatagcatgcaattgtgccgggagtctccaattacgtgcgtgggggagcgctagcattgacatgatataagtacgagtagatgattcgacttctcaaagaaagaaaaaagaagtatcaactgctgtccagatcaacctcaattctgcatcatgaacattcttctactccttactgcagtcgttttatgtgcagccagtccggtcgcacgaacaaataggcttacttatgacggctacaaggtatatagggtagcgagcaacgcgcgcctggtggatctcgaggcagctttgaaagagctgcctgtgatagagcttcagcgtcatagtgaccccaacggtcgatggagcgtcgatgttgtcatcgcaccagaagacatcagcgctctcgaagagacatcgctggcaaccactctactgagtcatgatctaggcgcagatctcgcgacagaaatctcgggcaagacattgcacgacactgacgcgctccctggtctagaatggtttgactcctatcatccatacgctgaccatgtgcaatattgggccgagctgcaggaaacattttcagacaattctgagctcatctcaattggaagctcatttgagggtcgttccattcagggaatccacctctggggaagcggtggaaagggagcgaagcctgcaatcttcttcaatgggaacgtccacgcgcgcgaatggataacgtctatggtcgtcgagtacattctataccagcttgttactggatatcccagtgatccacttgtacaaaacgtactagataactacgacttctatgtcctaccaatagtcaatccagacggctttgtctacactcagacgacagaccgcctatggcgcaagaataggcaagtccgcagtaatacaactgagatcgggacagatatcaaccggaattggcttgttggctggggtggcgacgggtcctctccagacccaagttctgagacatttagcggcttcgcgccgcacgatacgcctgagacggcagcgctcgctaactacacgctctcattacgagacctgaacggcatcaagctctatatcgactggcatagctatgcccaagtcatcttgttgtcgtatggctacacgtgtaccgagtttccagaaaatcttgacgaacaaatggcgctcgcggagggaatttctgaggcaattgcaaagccgtacaacaccacatttgattacggtcccggatgtttggtgttgtaccaatccagtggcaatgggagagactatctgacagatgtcggaaaggcgcaatttggatgggggatcgagctgagggatacgcagtacgggttcgtgctcccacccgaccagatactgccaagcggaattgaggtgtgggaagggctgaaatatgcctgggcacagttctgagatgactgtgtgggagggttgaatgagtgccgtaatctagtccgagatatgtaatcagccacaacaattatagccatcaaattgctagaccaaaggggtctcttcttgtctcgtggccggggcttcttaaagagacgagcgagtccagactgtcccgattcttcctaccctggatacttctggcgatgctcctcgtctcaaacccattcgttggtgcacgatatagtgagaacacttcgctctcttgttctctcctgaaagtcctctcgtgataatggtccacaaaaccaccaggctgaagaaccccgacacgatcaacctcggttcgagatcgaatgtaaggatcgagtttccaatagttagaccgcagatcgtcagccagcatagcacgcagctgctcttgcgttgctgcttcgtgttgatttccgtctgtcgcatgtgccagccaggcttgcgtggccgtaaggtactgatccgcaatgctaagtcgctcctccatgatcctctcacgtacgtcagcccgagcaatggcggcatcttcgcctggtcttggttcgtgataccggtaatgccacatttcagggccgccgaggctagctatgatgttctctctcctgtattcgatccgacatcagtcaacacttcaaataatgtactgtgactttacagtggcgtgtatgtctcatagcacggggacgttgtattcatcaacccacaaagaaagcagaccaaggacagaagaactcacgcaatatacttctccagatcctcgatactccaggtaaacctcaccttagacgcgagactaaatccgattaagccccggataattttccatattcctatgatatgttagagccgggacattccgacaaaacccagtagacgacataccggcaaatatcttcggtgcgttgtgaatgatcagctgtcccaaagtctcaggatagatatcctcgaagcaccggatgatgtaccgtacaggatgccatgcctagtatctgattatcagccccgctggccttccacgtctcaccctcatgcacaatgggtgtagactcacgaagttggccagagaaaagccagtcaaatcaaacacgacaacaaaggtctccaagggcgccgtaagcatgcatcgtcccgtctcgatcgtatgcacaatgagcttctcaattgtctctggagattggtctccaggcttgtgtagcgcgacgtggacatagccgatcggccgtccgagacggtcgacgccgtggaaatacaccttgccgagtcggagctgtcgcaggaactcctctgcctctttcttcttctccccgtcgtcacagtccctctccatggctgcggcccatgattcacctttgagtgccatttcttgatctacatgtgcctctcggcagcgccatgcaagggaggtggtcagagtagagagagcctgcttcacatcccatctacgcgcatgcagaaagcggagaaggagcgagtcggggcactcgtgcttcagcatgctcagccatgagcctctaagttcgttggaagagagagatttgcggcctttccgggtcatggtacgttggcccatctccatttcgtgatgcgccgacgtcggtcttttcttccgcccctcatcaacttgcgctggattctcctcaagagctgaatcatgttcggagtcctggaactcgaacgccttcaagatgagtgcccagagctgctgaagtttcaggtcctgatccggcgtcaaacaacctaagggacctatgctcgagggaacgctgatgttgtggtccggaaccatgctgcagtccgagtccatggcagcaagaacatccgggctgttgtcgtttgtgcaagggcagcgatagaaggagtgcggcctggcataacgcatgcaattggagtcaagatgtgaaaaggaagaaggcttgggaattcaattaagatgagcgtgagactcatccaactcgtgggcaccttgtcagcattccttgcgcgtactgcacacgccctgatgaaagtttcgaggaaatgagctacacaagcatgcttcttctcacgatattgatgatccttttcctacaatgggagtagcgactggggccattcgccagcaagcgccactattagttaatgccgggcagtttaaaaatgtgctctgacagtcactgttgatgatcaccgtgggggcgtatgcgtcaagtttcgaggtaagccctgattcgatcctcaagatctggctcgacgggcgagcggcaatttgggactagcatatttccaagttatcgacgtgaaagacgcgtcgtgttggatgttggatcttgcgaccaggtttgggggctcgtgtactgtatgtaggggttcttttgtgatgtcagcaatggctgccctcgcgagctcggttgtcggtgtctgattgatccgctaattgcgtacctgggtcaggtcccaagatatcggtacaagggagctagctgatggagccgaggat

SEQ ID NO: 3539 - DNA, 1467 bp, Muscodor strobelii
  misc_feature: SGI cDNA ID NO. 560841
  misc_feature: Encodes the peptide sequence at SEQ ID NO 3540
atggttccggaccacaacatcagcgttccctcgagcataggtcccttaggttgtttgacgccggatcaggacctgaaacttcagcagctctgggcactcatcttgaaggcgttcgagttccaggactccgaacatgattcagctcttgaggagaatccagcgcaagttgatgaggggcggaagaaaagaccgacgtcggcgcatcacgaaatggagatgggccaacgtaccatgacccggaaaggccgcaaatctctctcttccaacgaacttagaggctcatggctgagcatgctgaagcacgagtgccccgactcgctccttctccgctttctgcatgcgcgtagatgggatgtgaagcaggctctctctactctgaccacctcccttgcatggcgctgccgagaggcacatgtagatcaagaaatggcactcaaaggtgaatcatgggccgcagccatggagagggactgtgacgacggggagaagaagaaagaggcagaggagttcctgcgacagctccgactcggcaaggtgtatttccacggcgtcgaccgtctcggacggccgatcggctatgtccacgtcgcgctacacaagcctggagaccaatctccagagacaattgagaagctcattgtgcatacgatcgagacgggacgatgcatgcttacggcgcccttggagacctttgttgtcgtgtttgatttgactggcttttctctggccaacttcgcatggcatcctgtacggtacatcatccggtgcttcgaggatatctatcctgagactttgggacagctgatcattcacaacgcaccgaagatatttgccggaatatggaaaattatccggggcttaatcggatttagtctcgcgtctaaggtgaggtttacctggagtatcgaggatctggagaagtatattgcgagagagaacatcatagctagcctcggcggccctgaaatgtggcattaccggtatcacgaaccaagaccaggcgaagatgccgccattgctcgggctgacgtacgtgagaggatcatggaggagcgacttagcattgcggatcagtaccttacggccacgcaagcctggctggcacatgcgacagacggaaatcaacacgaagcagcaacgcaagagcagctgcgtgctatgctggctgacgatctgcggtctaactattggaaactcgatccttacattcgatctcgaaccgaggttgatcgtgtcggggttcttcagcctggtggttttgtggaccattatcacgagaggactttcaggagagaacaagagagcgaagtgttctcactatatcgtgcaccaacgaatgggtttgagacgaggagcatcgccagaagtatccagggtaggaagaatcgggacagtctggactcgctcgtctctttaagaagccccggccacgagacaagaagagacccctttggtctagcaatttga

SEQ ID NO: 3540 - protein, 488 aa, Muscodor strobelii
  misc_feature: SGI Peptide ID NO. 560841
  misc_feature (178)..(341): Pfam Id: PF00650 Pfam Desc: CRAL/TRIO domain
  misc_feature (62)..(139): Pfam Id: PF03765 Pfam Desc: CRAL/TRIO, N-terminus
  misc_feature (178)..(328): Pfam Id: PF00650 Pfam Desc: CRAL/TRIO domain
  misc_feature (104)..(139): Pfam Id: PF03765 Pfam Desc: CRAL/TRIO, N-terminus
  misc_feature (14)..(424): NCBI GI: 119499798 Blast Desc: CRAL/TRIO domain protein [Neosartorya fischeri NRRL 181] gi|119414821|gb|EAW24759.1| CRAL/TRIO domain protein [Neosartorya fischeri NRRL 181]
  misc_feature (14)..(424): NCBI GI: 70993184 Blast Desc: CRAL/TRIO domain protein [Aspergillus fumigatus Af293] gi|66849073|gb|EAL89401.1| CRAL/TRIO domain protein [Aspergillus fumigatus Af293] gi|159125627|gb|EDP50744.1| CRAL/TRIO domain
  misc_feature (14)..(428): NCBI GI: 255957197 Blast Desc: Pc21g23870 [Penicillium chrysogenum Wisconsin 54-1255] gi|211591062|emb|CAP97284.1| Pc21g23870 [Penicillium chrysogenum Wisconsin 54-1255]
  misc_feature (10)..(445): NCBI GI: 121708764 Blast Desc: CRAL/TRIO domain protein [Aspergillus clavatus NRRL 1] gi|119400389|gb|EAW10815.1| CRAL/TRIO domain protein [Aspergillus clavatus NRRL 1]
  misc_feature (14)..(424): NCBI GI: 145231152 Blast Desc: An01g14510 [Aspergillus niger] gi|134055970|emb|CAK44149.1| protein product [Aspergillus niger]
  misc_feature (8)..(424): NCBI GI: 115437346 Blast Desc: conserved [Aspergillus terreus NIH2624] gi|114188602|gb|EAU30302.1| conserved [Aspergillus terreus NIH2624]
  misc_feature (7)..(454): NCBI GI: 238500556 Blast Desc: CRAL/TRIO domain protein [Aspergillus flavus NRRL3357] gi|220691749|gb|EED48096.1| CRAL/TRIO domain protein [Aspergillus flavus NRRL3357]
  misc_feature (14)..(431): NCBI GI: 70992597 Blast Desc: CRAL/TRIO domain protein [Aspergillus fumigatus Af293] gi|66848780|gb|EAL89109.1| CRAL/TRIO domain protein [Aspergillus fumigatus Af293] gi|159124718|gb|EDP49836.1| CRAL/TRIO domain
  misc_feature (7)..(437): NCBI GI: 115397061 Blast Desc: conserved [Aspergillus terreus NIH2624] gi|114192313|gb|EAU34013.1| conserved [Aspergillus terreus NIH2624]
  misc_feature (14)..(431): NCBI GI: 119472756 Blast Desc: CRAL/TRIO domain protein [Neosartorya fischeri NRRL 181] gi|119406563|gb|EAW16514.1| CRAL/TRIO domain protein [Neosartorya fischeri NRRL 181]
MVPDHNISVPSSIGPLGCLTPDQDLKLQQLWALILKAFEFQDSEHDSALEENPAQVDEGRKKRPTSAHHEMEMGQRTMTRKGRKSLSSNELRGSWLSMLKHECPDSLLLRFLHARRWDVKQALSTLTTSLAWRCREAHVDQEMALKGESWAAAMERDCDDGEKKKEAEEFLRQLRLGKVYFHGVDRLGRPIGYVHVALHKPGDQSPETIEKLIVHTIETGRCMLTAPLETFVVVFDLTGFSLANFAWHPVRYIIRCFEDIYPETLGQLIIHNAPKIFAGIWKIIRGLIGFSLASKVRFTWSIEDLEKYIARENIIASLGGPEMWHYRYHEPRPGEDAAIARADVRERIMEERLSIADQYLTATQAWLAHATDGNQHEAATQEQLRAMLADDLRSNYWKLDPYIRSRTEVDRVGVLQPGGFVDHYHERTFRREQESEVFSLYRAPTNGFETRSIARSIQGRKNRDSLDSLVSLRSPGHETRRDPFGLAI

SEQ ID NO: 3541 - DNA, 4201 bp, Muscodor strobelii
  misc_feature: SGI EST ID NO. CUFF.8906.1
  misc_feature: Variant of the nucleotide sequence at SEQ ID NO 3539
atcctcggctccatcagctagctcccttgtaccgatatcttgggacctgacccaggtacgcaattagcggatcaatcagacaccgacaaccgagctcgcgagggcagccattgctgacatcacaaaagaacccctacatacagtacacgagcccccaaacctggtcgcaagatccaacatccaacacgacgcgtctttcacgtcgataacttggaaatatgctagtcccaaattgccgctcgcccgtcgagccagatcttgaggatcgaatcagggcttacctcgaaacttgacgcatacgcccccacggtgatcatcaacagtgactgtcagagcacatttttaaactgcccggcattaactaatagtggcgcttgctggcgaatggccccagtcgctactcccattgtaggaaaaggatcatcaatatcgtgagaagaagcatgcttgtgtagctcatttcctcgaaactttcatcagggcgtgtgcagtacgcgcaaggaatgctgacaaggtgcccacgagttggatgagtctcacgctcatcttaattgaattcccaagccttcttccttttcacatcttgactccaattgcatgcgttatgccaggccgcactccttctatcgctgcccttgcacaaacgacaacagcccggatgttcttgctgccatggactcggactgcagcatggttccggaccacaacatcagcgttccctcgagcataggtcccttaggttgtttgacgccggatcaggacctgaaacttcagcagctctgggcactcatcttgaaggcgttcgagttccaggactccgaacatgattcagctcttgaggagaatccagcgcaagttgatgaggggcggaagaaaagaccgacgtcggcgcatcacgaaatggagatgggccaacgtaccatgacccggaaaggccgcaaatctctctcttccaacgaacttagaggctcatggctgagcatgctgaagcacgagtgccccgactcgctccttctccgctttctgcatgcgcgtagatgggatgtgaagcaggctctctctactctgaccacctcccttgcatggcgctgccgagaggcacatgtagatcaagaaatggcactcaaaggtgaatcatgggccgcagccatggagagggactgtgacgacggggagaagaagaaagaggcagaggagttcctgcgacagctccgactcggcaaggtgtatttccacggcgtcgaccgtctcggacggccgatcggctatgtccacgtcgcgctacacaagcctggagaccaatctccagagacaattgagaagctcattgtgcatacgatcgagacgggacgatgcatgcttacggcgcccttggagacctttgttgtcgtgtttgatttgactggcttttctctggccaacttcgcatggcatcctgtacggtacatcatccggtgcttcgaggatatctatcctgagactttgggacagctgatcattcacaacgcaccgaagatatttgccggaatatggaaaattatccggggcttaatcggatttagtctcgcgtctaaggtgaggtttacctggagtatcgaggatctggagaagtatattgcgagagagaacatcatagctagcctcggcggccctgaaatgtggcattaccggtatcacgaaccaagaccaggcgaagatgccgccattgctcgggctgacgtacgtgagaggatcatggaggagcgacttagcattgcggatcagtaccttacggccacgcaagcctggctggcacatgcgacagacggaaatcaacacgaagcagcaacgcaagagcagctgcgtgctatgctggctgacgatctgcggtctaactattggaaactcgatccttacattcgatctcgaaccgaggttgatcgtgtcggggttcttcagcctggtggttttgtggaccattatcacgagaggactttcaggagagaacaagagagcgaagtgttctcactatatcgtgcaccaacgaatgggtttgagacgaggagcatcgccagaagtatccagggtaggaagaatcgggacagtctggactcgctcgtctctttaagaagccccggccacgagacaagaagagacccctttggtctagcaatttgatggctataattgttgtggctgattacatatctcggactagattacggcactcattcaaccctcccacacagtcatctcagaactgtgcccaggcatatttcagcccttcccacacctcaattccgcttggcagtatctggtcgggtgggagcacgaacccgtactgcgtatccctcagctcgatcccccatccaaattgcgcctttccgacatctgtcagatagtctctcccattgccactggattggtacaacaccaaacatccgggaccgtaatcaaatgtggtgttgtacggctttgcaattgcctcagaaattccctccgcgagcgccatttgttcgtcaagattttctggaaactcggtacacgtgtagccatacgacaacaagatgacttgggcatagctatgccagtcgatatagagcttgatgccgttcaggtctcgtaatgagagcgtgtagttagcgagcgctgccgtctcaggcgtatcgtgcggcgcgaagccgctaaatgtctcagaacttgggtctggagaggacccgtcgccaccccagccaacaagccaattccggttgatatctgtcccgatctcagttgtattactgcggacttgcctattcttgcgccataggcggtctgtcgtctgagtgtagacaaagcctatcaaccaacacaatcggcagtcagaattcatatccagggcacagtgaagatctgtccttaccgtctggattgactattggtaggacatagaagtcgtagttatctagtacgttttgtacaagtggatcactgggatatccagtaacaagctggtatagaatgtactcgacgacctttatcgacccgacactattttagcaatgtctccgaaagaaatcataaatttcctcttgaaaattttcggggtttggactcaccatagacgttatccattcgcgcgcgtggacgttcccattgaagaagattgcaggcttcgctccctttccaccgcttccccagaggtggattccctgaatggaacgaccctcaaatgagcttccaattgagatgagctcagaattgtctgaaaatgtttcctgcagctcggcccaatattgcacatggtcagcgtatggatgataggagtcaaaccattctagaccagggagcgcgtcagtgtcgtgcaatgtcttgcccgagatttctgtcgcgagatctgcgcctagatcatgactcagtagagtggttgccagcgatgtctcttcgagagcgctgatgtcttctggtgcgatgacaacatcgacgctccatcgaccgttggggtcactatgacgctgaagctctatcacaggcagctctttcaaagctgcctcgagatccaccaggcgcgcgttgctcgctaccctatataccttgtagccgtcataagtaagcctatttgttcgtgcgaccggactggctgcacataaaacgactgcagtaaggagtagaagaatgttcatgatgcagaattgaggttgatctggacagcagttgatacttcttttttctttctttgagaagtcgaatcatctactcgtacttatatcatgtcaatgctagcgctcccccacgcacgtaattggagactcccggcacaattgcatgctatggtggaatcagaatgtaacccaatgcagtgtgtgatgacagaatctgtgttcctccttcctcaaactgcgatactgatgtcttggctcgcatgaggtgatgaaagagcaaaatatcgacatcgaggagatctagttatatgtcatgaactgttgcatttactagcggttctattgaaagatgtaaatatgcgctttagatacgtccaaactttatgagatatagacttatagcagtatagtagtcgttgtcgctagatgaaccatttgctgctctctagcaaaatgtcttgtgcccggccgagcgctgttttgctatcgtaggataatttggcttgccagcgtcgagcaatatttactcggcgcgctaatcaggctccattggactgcgtgtagttgaaaagactgcaaaa

SEQ ID NO: 3542 - DNA, 1800 bp, Muscodor strobelii
  misc_feature: SGI cDNA ID NO. 560842
  misc_feature: Reduced expression when VOC is produced
  misc_feature: Encodes the peptide sequence at SEQ ID NO 3543
atgcctgggagcatgccattcagaatgccccatggcatcccgcccgtgcctgcaaagccgcgcgatgccaatgcagagcccgaacgtcacgacgccgatccagcgcccgagcacattcccgatgacgatgcagacgacgctgcagacgacgggtccgacctcgatgacatctttgacgaagacgaagactacgacgaggctcaagccgacgtgtcgcgcaacttcaaccgccaacagcccgcgctcaacaccaacccgcagcggcccaaggccaacacgacgcacaacgtcgacgaccagatctcggccctctcccggcacgccgccaagatccgcctcgacgacgtcaaggacggccaggcccgcgacaaggacaaggccgaccgcgccaccgccgaccaggtcctcgaccagcgcacccgcatgatcctctaccagatgatcaaccgcggcgtgctggccgaggtccacggcgccgtgagcacgggcaaggaggccaacgtctacggcgccatcgctttcgtcgcttcccctcccgctgagggcagcagcgacaacaagaacaaccaggacggcagcaacagcaaaggagcagcaggtgaagaaggagcagaagcagaggcagaggcagatgaagtcgagatccagcgcgccgtcaaggtctacaagacggccatcctctccttcaaggaccgcgagcgctacatcaccggcgagcaccgcttcaaggccggcgccgacaagggcaacaaccgcaagatggtcaagctgtgggccgagaaggagttccgcaacctgcgccgcctgcaccaggccgccatcccctgccccgagcccatcgccctcaagctgcacgtcctcgtcatgcagttcctcggcgaccgcaagggctgggcctacccgcgcctgcgcgacgcccccggcatcgaccccgaccaatacgccgccctctacgtccagctgctggccatcatgcgccgcctctaccaggtctgccgcctcgtccacgccgacctcagcgagtacaacatcctctatcaccaacgccgcctctacatcatcgacgtctcccagagtgtcgagcacgaccacccccgctccctcgagttcctgcgcatggacatcaagaacaccggcgactacttccggcgccagggcgtcgacaccctctccgacagggccgtcttcgacttcatcacctcgccccaggggcccgtcgacgagccggacttgcacgaggccatcgacaagctatacatgacgcgggctgaaaccgtcgatgacgacaaggcacaggcggagcgagaagtagacaatgaggtcttcaggcagcagtacatcccgcaaactctcgagcaggtctacgacatcgagcaggacgccgagcgcatcggccacggcgagggcgacaagctcgtctaccgcaatctgctagcagaccaagttgtactccccaagactgcaggagacaaggaggcctccgacgaagacctgtcagacgagggcgttgctctcgatagtgacgaagacagcgacgagactggcgatgacgaaagcaagttttccaagggcccacccgtggcaaacgatttgaggataaggatgagaaaaaaggttgtacggaaatcaatgacattcgccccttcacgattacccacttaccaatttaccatctccctgtccctcggccccttcatgcttcattatacaaccgtccgtctgaccttcaacagcaaaggaaacaagccacgaaagaggcaaagagtgagaaacggaaagaaaagatgcctaaacatctga

SEQ ID NO: 3543 - protein, 599 aa, Muscodor strobelii
  misc_feature: SGI Peptide ID NO. 560842
  misc_feature (167)..(395): Pfam Id: PF01163 Pfam Desc: RIO1 family
  misc_feature (69)..(526): NCBI GI: 46124249 Blast Desc: FG06502.1 [Gibberella zeae PH-1]
  misc_feature (69)..(526): NCBI GI: 145609517 Blast Desc: MGG_13447 [Magnaporthe grisea 70-15] gi|145016883|gb|EDK01313.1| MGG_13447 [Magnaporthe grisea 70-15]
  misc_feature (69)..(526): NCBI GI: 256726566 Blast Desc: [Nectria haematococca mpVI 77-13-4]
  misc_feature (54)..(483): NCBI GI: 164425941 Blast Desc: serine/threonine-protein kinase RIO1 [Neurospora crassa OR74A] gi|28881215|emb|CAD70454.1| extragenic suppressor of the bimD6 mutation [Neurospora crassa] kinase RIO1 [Neurospora
  misc_feature (36)..(526): NCBI GI: 116208662 Blast Desc: CHGG_03624 [Chaetomium globosum CBS 148.51] gi|88184221|gb|EAQ91689.1| CHGG_03624 [Chaetomium globosum CBS 148.51]
  misc_feature (30)..(526): NCBI GI: 261353996 Blast Desc: serine/threonine-protein kinase RIO1 [Verticillium albo-atrum VaMs.102]
  misc_feature (35)..(504): NCBI GI: 154292855 Blast Desc: BC1G_14461 [Botryotinia fuckeliana B05.10] gi|150845738|gb|EDN20931.1| BC1G_14461 [Botryotinia fuckeliana B05.10]
  misc_feature (20)..(500): NCBI GI: 156052511 Blast Desc: SS1G_06421 [Sclerotinia sclerotiorum 1980] gi|154704201|gb|EDO03940.1| SS1G_06421 [Sclerotinia sclerotiorum 1980]
  misc_feature (33)..(526): NCBI GI: 240275918 Blast Desc: serine/threonine protein kinase RIO1 [Ajellomyces capsulatus H143]
  misc_feature (33)..(526): NCBI GI: 225563325 Blast Desc: serine/threonine-protein kinase RIO1 [Ajellomyces capsulatus G186AR]
  misc_feature (134)..(477): SWISSPROT Homolog: EC 2.7.11.1 Non-specific serine/threonine protein kinase
  misc_feature: Useful for introducing or modulating the production of volatile compounds
MPGSMPFRMPHGIPPVPAKPRDANAEPERHDADPAPEHIPDDDADDAADDGSDLDDIFDEDEDYDEAQADVSRNFNRQQPALNTNPQRPKANTTHNVDDQISALSRHAAKIRLDDVKDGQARDKDKADRATADQVLDQRTRMILYQMINRGVLAEVHGAVSTGKEANVYGAIAFVASPPAEGSSDNKNNQDGSNSKGAAGEEGAEAEAEADEVEIQRAVKVYKTAILSFKDRERYITGEHRFKAGADKGNNRKMVKLWAEKEFRNLRRLHQAAIPCPEPIALKLHVLVMQFLGDRKGWAYPRLRDAPGIDPDQYAALYVQLLAIMRRLYQVCRLVHADLSEYNILYHQRRLYIIDVSQSVEHDHPRSLEFLRMDIKNTGDYFRRQGVDTLSDRAVFDFITSPQGPVDEPDLHEAIDKLYMTRAETVDDDKAQAEREVDNEVFRQQYIPQTLEQVYDIEQDAERIGHGEGDKLVYRNLLADQVVLPKTAGDKEASDEDLSDEGVALDSDEDSDETGDDESKFSKGPPVANDLRIRMRKKVVRKSMTFAPSRLPTYQFTISLSLGPFMLHYTTVRLTFNSKGNKPRKRQRVRNGKKRCLNI

SEQ ID NO: 3544 - DNA, 2208 bp, Muscodor strobelii
  misc_feature: SGI cDNA ID NO. 560843
  misc_feature: Encodes the peptide sequence at SEQ ID NO 3545
atgaagtccatatatagatattggctatatatcattaatttcctcttaggggttgcgtcgacgcgactgtccacaatcccgactgtccctttcacagcatcttcaaacggaacatacgatgtctcttccgtcaaacggattgtctttcctgaaagattctctgacagccgagacagtagcggccagactctgatcccaccgaccttaagggaattcgtcaaaacgttcgccgatgattttcatcatgttctaggccagcagcccatcgtctcaacgaccgaagatgagttaacagatgtcatctatctgaccattgacgactcaattgaatttgttgatgtcagtggcagaccgacctctgaaggatatcacttgaacattttacctactggcgtaaacatatctggtgccagccctttgggattgtggtggggaactcgtacgctgctacaacttgcgatcctgacagacggcgcgctccctttaggaagcgccgtcgactctcctggatggtcaaccagaggaatgatgcttgacgctggtcgacattattatcccgcgaagtttctgatcgaactgtgctcttatatgagtttctataagcagaacacgctgcatttgcatcttagcgataatctctacaacaacgttgatttatactctagggaagactccctcggcttgtatgctagatttcgtctgtggtctacatcgacagaagtggccggtctaaacaagttcaagaacgaatcatacacgagagcacagtttgagaagatccagacagaatgcgtccagcgaggagttaccatcgttcccgaaatcgaagcgccaggtcatgcgctgcccatagtgcaatggaagcccgagatagggctcagcaccgacctctcccttctgaatatttcgcatcccgagaccattccgacaatgaagacgatctggggtgtctttctagactggtttcagtccaagacggttcatatcggagcggatgaatacactgccgacgtcaacgattacaatcgctttgtaaatgagatggcgactttcatatcagagacagcaggcaagcatactcgtatttggggaacattcccgccgaagcctacataccaaaacattagcactgaagtctccattcaacactgggaattcttcgaagataatcctctattcgactacattcggaacaattactcagttctcaactcggacgacacattctatgtagttaacaaatggtcggggagttatccgcaggcagtcccatttgagaagaccttcaccggcgatcctgcaactcatggacgctggcagcccaacattttcgacgcaaagaatagtaccaataatcccgccagggacaatccccgggtcctcgggtcaatcgttccgctctggaatgacttcggggcgaacgcaacggtgttcagcgaagcatactacgcatggcgtgaaggcatccctgcattagcggataagcaatggggaggtaatctttcatccgaggagtttgatctagtgtttcccgttctccatggcctcataccggctcaaaatctagatcggcacatcccatcaaactctacgacaatatttcagtatagcagcacaggaccatcaactgtcgcaccaaatagcaatacggacgtatcagcagctggaatgactgtcccagatcaatctcccaatgcttacaacgccttcacaaactgctccgtcacatccggcatacagacatttatgatcagcccaaattgctattttagaacccctttcacatccaagggccgcgactatacactgacattgaaactacgcattgacacggtagactctgatgcaagcctcatttccggtgcagactcaacgctcatgctaacaccgaacctcacgctcttcgcgtcggcgaactactatcgtcttaactcaactgtccctgtcggatcatgggttaatctgcgtctattagggcgaggcaatcagacgtttgcttccgtacagagtaccactttggaggcggaattaccaggcattgacgagcaggcggaaaatgaagaagaattcctggcggtgcttggtatcaacggccaaagcttggtatgggcgcctattgcgatcgaggcaccgattgcagaaattggtggtggtaatgctgggtggaccggacagcttgcggcgctcaggttgacttctaaagcttga

SEQ ID NO: 3545 - protein, 735 aa, Muscodor strobelii
  misc_feature: SGI Peptide ID NO. 560843
  misc_feature (171)..(500): Pfam Id: PF00728 Pfam Desc: Glycosyl hydrolase family 20, catalytic domain
  misc_feature (171)..(334): Pfam Id: PF00728 Pfam Desc: Glycosyl hydrolase family 20, catalytic domain
  misc_feature (22)..(726): NCBI GI: 145228643 Blast Desc: An01g01920 [Aspergillus niger] gi|134054722|emb|CAK43562.1| protein product [Aspergillus niger]
  misc_feature (101)..(721): NCBI GI: 238490400 Blast Desc: beta-hexosaminidase, [Aspergillus flavus NRRL3357] gi|220696850|gb|EED53191.1| beta-hexosaminidase, [Aspergillus flavus NRRL3357]
  misc_feature (57)..(731): NCBI GI: 145612163 Blast Desc: MGG_12291 [Magnaporthe grisea 70-15] gi|145019381|gb|EDK03609.1| MGG_12291 [Magnaporthe grisea 70-15]
  misc_feature (9)..(731): NCBI GI: 261354640 Blast Desc: glycosyl hydrolase [Verticillium albo-atrum VaMs.102]
  misc_feature (193)..(721): NCBI GI: 169772485 Blast Desc: [Aspergillus oryzae RIB40] gi|83768572|dbj|BAE58709.1| protein product [Aspergillus oryzae]
  misc_feature (177)..(735): NCBI GI: 256720647 Blast Desc: NECHADRAFT_50509 [Nectria haematococca mpVI 77-13-4]
  misc_feature (193)..(735): NCBI GI: 256719906 Blast Desc: NECHADRAFT_56740 [Nectria haematococca mpVI 77-13-4]
  misc_feature (8)..(718): NCBI GI: 238494552 Blast Desc: beta-N-hexosaminidase, [Aspergillus flavus NRRL3357] gi|220695162|gb|EED51505.1| beta-N-hexosaminidase, [Aspergillus flavus NRRL3357]
  misc_feature (12)..(732): NCBI GI: 242210473 Blast Desc: POSPLDRAFT_135046 [Postia placenta Mad-698-R] gi|220729869|gb|EED83736.1| POSPLDRAFT_135046 [Postia placenta Mad-698-R]
  misc_feature (27)..(530): NCBI GI: 169777421 Blast Desc: [Aspergillus oryzae RIB40] gi|83771913|dbj|BAE62043.1| protein product [Aspergillus oryzae]
MKSIYRYWLYIINFLLGVASTRLSTIPTVPFTASSNGTYDVSSVKRIVFPERFSDSRDSSGQTLIPPTLREFVKTFADDFHHVLGQQPIVSTTEDELTDVIYLTIDDSIEFVDVSGRPTSEGYHLNILPTGVNISGASPLGLWWGTRTLLQLAILTDGALPLGSAVDSPGWSTRGMMLDAGRHYYPAKFLIELCSYMSFYKQNTLHLHLSDNLYNNVDLYSREDSLGLYARFRLWSTSTEVAGLNKFKNESYTRAQFEKIQTECVQRGVTIVPEIEAPGHALPIVQWKPEIGLSTDLSLLNISHPETIPTMKTIWGVFLDWFQSKTVHIGADEYTADVNDYNRFVNEMATFISETAGKHTRIWGTFPPKPTYQNISTEVSIQHWEFFEDNPLFDYIRNNYSVLNSDDTFYVVNKWSGSYPQAVPFEKTFTGDPATHGRWQPNIFDAKNSTNNPARDNPRVLGSIVPLWNDFGANATVFSEAYYAWREGIPALADKQWGGNLSSEEFDLVFPVLHGLIPAQNLDRHIPSNSTTIFQYSSTGPSTVAPNSNTDVSAAGMTVPDQSPNAYNAFTNCSVTSGIQTFMISPNCYFRTPFTSKGRDYTLTLKLRIDTVDSDASLISGADSTLMLTPNLTLFASANYYRLNSTVPVGSWVNLRLLGRGNQTFASVQSTTLEAELPGIDEQAENEEEFLAVLGINGQSLVWAPIAIEAPIAEIGGGNAGWTGQLAALRLTSKA

SEQ ID NO: 3546 - DNA, 3686 bp, Muscodor strobelii
  misc_feature: SGI EST ID NO. CUFF.9020.0
  misc_feature: Variant of the nucleotide sequence at SEQ ID NO 3544
ggccgatataaagtcgcacttgaaagatgactgaagatgaccggggtcaatcagagtgatcgaatctctaattatgtactgatatgtgcattggttagtttgaagcttcggaggtacagtcataacggcgcggcagcgtcaaagctacctagtttcaaccacaacctcgtcttcgcctcagatcaatgagaccgtcgccctcttctctcaccagctacttcactttcggcactcaagcatctgactatacgctattttaggtagtcaaaatcaaaactgcttcaaacatgataacagtcgtctagcccctcgcaacccctcgtagcccattccccgctctttatatcgtagctgttcaatgtaacatagcggcatcacgacccgccatctccaactgcgtatctctttatctcgctaccgccatcgtctaggcctgcatcaatacgtcatgttgctcaaggtaggcgagcagccatgtttgtatgatacgcaggaatgcacgttgcatgtcgacgtggagcacgaatacatgtatctcctgaccacaacaccagcccttactcatgagtatcgctaggtccctcaatggttgacattttggatgagaagtctcgcgtcagtttttatccttacatcatgaagtccatatatagatattggctatatatcattaatttcctcttaggggttgcgtcgacgcgactgtccacaatcccgactgtccctttcacagcatcttcaaacggaacatacgatgtctcttccgtcaaacggattgtctttcctgaaagattctctgacagccgagacagtagcggccagactctgatcccaccgaccttaagggaattcgtcaaaacgttcgccgatgattttcatcatgttctaggccagcagcccatcgtctcaacgaccgaagatgagttaacagatgtcatctatctgaccattgacgactcaattgaatttgttgatgtcagtggcagaccgacctctgaaggatatcacttgaacattttacctactggcgtaaacatatctggtgccagccctttgggattgtggtggggaactcgtacgctgctacaacttgcgatcctgacagacggcgcgctccctttaggaagcgccgtcgactctcctggatggtcaaccagaggaatgatgcttgacgctggtcgacattattatcccgcgaagtttctgatcgaactgtgctcttatatgagtttctataagcagaacacgctgcatttgcatcttagcgataatctctacaacaacgttgatttatactctagggaagactccctcggcttgtatgctagatttcgtctgtggtctacatcgacagaagtggccggtctaaacaagttcaagaacgaatcatacacgagagcacagtttgagaagatccagacagaatgcgtccagcgaggagttaccatcgttcccgaaatcgaagcgccaggtcatgcgctgcccatagtgcaatggaagcccgagatagggctcagcaccgacctctcccttctgaatatttcgcatcccgagaccattccgacaatgaagacgatctggggtgtctttctagactggtttcagtccaagacggttcatatcggagcggatgaatacactgccgacgtcaacgattacaatcgctttgtaaatgagatggcgactttcatatcagagacagcaggcaagcatactcgtatttggggaacattcccgccgaagcctacataccaaaacattagcactgaagtctccattcaacactgggaattcttcgaagataatcctctattcgactacattcggaacaattactcagttctcaactcggacgacacattctatgtagttaacaaatggtcggggagttatccgcaggcagtcccatttgagaagaccttcaccggcgatcctgcaactcatggacgctggcagcccaacattttcgacgcaaagaatagtaccaataatcccgccagggacaatccccgggtcctcgggtcaatcgttccgctctggaatgacttcggggcgaacgcaacggtgttcagcgaagcatactacgcatggcgtgaaggcatccctgcattagcggataagcaatggggaggtaatctttcatccgaggagtttgatctagtgtttcccgttctccatggcctcataccggctcaaaatctagatcggcacatcccatcaaactctacgacaatatttcagtatagcagcacaggaccatcaactgtcgcaccaaatagcaatacggacgtatcagcagctggaatgactgtcccagatcaatctcccaatgcttacaacgccttcacaaactgctccgtcacatccggcatacagacatttatgatcagcccaaattgctattttagaacccctttcacatccaagggccgcgactatacactgacattgaaactacgcattgacacggtagactctgatgcaagcctcatttccggtgcagactcaacgctcatgctaacaccgaacctcacgctcttcgcgtcggcgaactactatcgtcttaactcaactgtccctgtcggatcatgggttaatctgcgtctattagggcgaggcaatcagacgtttgcttccgtacagagtaccactttggaggcggaattaccaggcattgacgagcaggcggaaaatgaagaagaattcctggcggtgcttggtatcaacggccaaagcttggtatgggcgcctattgcgatcgaggcaccgattgcagaaattggtggtggtaatgctgggtggaccggacagcttgcggcgctcaggttgacttctaaagcttgaaacaatcaacgcgcaggagcgacatacacttgaagcgatacaatgacttggattttttttaatggctgtctatagcctaagcctagtacatttatctggctcgttctagctcgggatctcacagcaaacctggaatctttcaagcgaggcgtagttcaagtgaatttctctggactaattgtaggctcatccaccaatctactgtgtcgatgtatgtctcgatgaccgtcatgctgtgggtcacgcatgtcctgatacggttttgggtcgatatagttcctctaaatatttctcttcttcatccgttagtgtcttgccgcgcgccgcgagagcttcgtcaatgcgcttgatgctagaaaatccgacgatggggctagtcacgcgtttgttcgtccacgcgagggtgacgtccgtcatggtccagccttttttctcggcaagctcttgcacgcgcttaatgatggtaagatccggctccaatccagggcccgtgttgtgaccaacaccactgttgtctttctcacctgcactgcgtgcagtactgccaaaatcttttggcggtcggacgaggtgtccacggcatagggggctccaaggaactagtccgacgcccgtttccttacaaaaacgattcatctcgcgttcttcttcgcgataaaggagattgtagtggttttgcactgaagaggagagtgtaagttaaaagcccataacatgtcgaagaagacaaggcaaggtcaggttggtcttccgatgacgaacccacgacgatccgaggcggatgcatttaaggattcagaccagggatctgacttcaacttacttgagacaaacttggtcca

SEQ ID NO: 3547 - DNA, 1092 bp, Muscodor strobelii
  misc_feature: SGI cDNA ID NO. 560844
  misc_feature: Encodes the peptide sequence at SEQ ID NO 3548
atggccgcagccattcctcctcaaatgcagaagtctttggacagcacgaaggtcgagtatcgcaggctcggcaaaagtggtctgcggatctcggtgccaatctttggcgctatgagtttgggtgacccgaagtctttgagctggtcattaaacgaggaagattcgcttccgctgctcaaatatgcttacgaacacggcatgaacacatgggacaccgcggacatgtattcaaatggcgcaagtgaatcggtcatcggcaaggctctcaagaagtacaacatcccgcgcagcaaagtcattatcatgaccaagtgctactggggcgtgggcgaggaaccagagtttgctggctggaagctgggcgccattcgagagaagtctaaggattgtgtcaatcattatggactctcgaggtctgcgatttttgatgctgtcgatgcgtctctcaagcgactcgatacagactatatcgatgtgctccagattcatcgtttcgaccgcgagactccagtcgaggagacgatggaagcgctccacgatctagtcaagttgggtaaagtgcggtatctcggggcgagcagcatgtggacataccagtttgcgcagatgcagttcgtggccgagaagaatggatggaccaagtttgtctcaatgcaaaaccactacaatctcctttatcgcgaagaagaacgcgagatgaatcgtttttgtaaggaaacgggcgtcggactagttccttggagccccctatgccgtggacacctcgtccgaccgccaaaagattttggcagtactgcacgcagtgcaggtgagaaagacaacagtggtgttggtcacaacacgggccctggattggagccggatcttaccatcattaagcgcgtgcaagagcttgccgagaaaaaaggctggaccatgacggacgtcaccctcgcgtggacgaacaaacgcgtgactagccccatcgtcggattttctagcatcaagcgcattgacgaagctctcgcggcgcgcggcaagacactaacggatgaagaagagaaatatttagaggaactatatcgacccaaaaccgtatcaggacatgcgtga

SEQ ID NO: 3548 - protein, 363 aa, Muscodor strobelii
  misc_feature: SGI Peptide ID NO. 560844
  misc_feature (24)..(355): Pfam Id: PF00248 Pfam Desc: Aldo/keto reductase family
  misc_feature (129)..(355): Pfam Id: PF00248 Pfam Desc: Aldo/keto reductase family
  misc_feature (24)..(104): Pfam Id: PF00248 Pfam Desc: Aldo/keto reductase family
  misc_feature (1)..(363): NCBI GI: 116201715 Blast Desc: conserved [Chaetomium globosum CBS 148.51] gi|88177260|gb|EAQ84728.1| conserved [Chaetomium globosum CBS 148.51]
  misc_feature (6)..(363): NCBI GI: 171678074 Blast Desc: protein product [Podospora anserina] gi|170937106|emb|CAP61764.1| protein product [Podospora anserina]
  misc_feature (5)..(362): NCBI GI: 85091264 Blast Desc: NCU06009 [Neurospora crassa OR74A] gi|28920203|gb|EAA29581.1| NCU06009 [Neurospora crassa OR74A]
  misc_feature (1)..(362): NCBI GI: 46127375 Blast Desc: FG08065.1 [Gibberella zeae PH-1]
  misc_feature (2)..(362): NCBI GI: 256722456 Blast Desc: NECHADRAFT_66997 [Nectria haematococca mpVI 77-13-4]
  misc_feature (3)..(362): NCBI GI: 255946584 Blast Desc: Pc22g00110 [Penicillium chrysogenum Wisconsin 54-1255] gi|211591076|emb|CAP97299.1| Pc22g00110 [Penicillium chrysogenum Wisconsin 54-1255]
  misc_feature (1)..(362): NCBI GI: 70987087 Blast Desc: aldo-keto reductase [Aspergillus fumigatus Af293] gi|66846655|gb|EAL86987.1| aldo-keto reductase, [Aspergillus fumigatus Af293]
  misc_feature (55)..(362): NCBI GI: 145606631 Blast Desc: MGG_12003 [Magnaporthe grisea 70-15] gi|145014315|gb|EDJ98883.1| MGG_12003 [Magnaporthe grisea 70-15]
  misc_feature (1)..(362): NCBI GI: 115389786 Blast Desc: ATEG_03220 [Aspergillus terreus NIH2624] gi|114194794|gb|EAU36494.1| ATEG_03220 [Aspergillus terreus NIH2624]
  misc_feature (1)..(362): NCBI GI: 159123205 Blast Desc: aldo-keto reductase, [Aspergillus fumigatus A1163]
  misc_feature (27)..(352): SWISSPROT Homolog: EC 1.1.1.91 Aryl-alcohol dehydrogenase (NADP(+))
MAAAIPPQMQKSLDSTKVEYRRLGKSGLRISVPIFGAMSLGDPKSLSWSLNEEDSLPLLKYAYEHGMNTWDTADMYSNGASESVIGKALKKYNIPRSKVIIMTKCYWGVGEEPEFAGWKLGAIREKSKDCVNHYGLSRSAIFDAVDASLKRLDTDYIDVLQIHRFDRETPVEETMEALHDLVKLGKVRYLGASSMWTYQFAQMQFVAEKNGWTKFVSMQNHYNLLYREEEREMNRFCKETGVGLVPWSPLCRGHLVRPPKDFGSTARSAGEKDNSGVGHNTGPGLEPDLTIIKRVQELAEKKGWTMTDVTLAWTNKRVTSPIVGFSSIKRIDEALAARGKTLTDEEEKYLEELYRPKTVSGHA

SEQ ID NO: 3549 - DNA, 5842 bp, Muscodor strobelii
  misc_feature: SGI EST ID NO. CUFF.9021.2
  misc_feature: Variant of the nucleotide sequence at SEQ ID NO 3547
ggaagatgtcaacctatctgcgcaccgcgaagtgacatcatctacgagaattaaagtaaatccccaacacatcgatcgcgcagtgggtagaagtctagatatcaacgcgcgcgagtcgcatggccgtactgccttgttggtcgcatgccaccgaccaaagactctgagcatgggacatactgttgcacccttattaaaccaccgcgcaactcctaggtcttcgacggtcgcaagtgacctgctctataatgtgctctatcccgacgacgaccgatgccacggaaataggaaatagagctcatggttctagaaaagaacctttaccttcaactactattgagccgcgccccatactctgtcgataccaaagcgatcgatgataacggctagttagccatgacggttcgtctaggatttattggtcgtactggacgatacgctgctgcgtgccgaagaatgaatgccattagccagatgatgaacgtgtccgggtcatgcttctgcgcaatgtagcgagacctacgaatgtggggagatcaggtccgtttgcgcgttgctcaccactccatattacattacctacagctctaacgacttactgcattctgaactttggtcgactattgtgccaacatgcacgtaaatgctatcaccgaagaccttcgactcgcgatagaagacgggaaatcgctcccagtacgataccagtcagcggattagcccaagcacaaggttgaatactattcatgttaagtatcgtggcgctcgccctgcaaatgatacgtcgtgatatgttgagagacatctgtgattcgctggtcacaacccgagcaatgatctgctgagggtttcacggcccgagtattgttcttcgagaagcggagaccgagatggccgtgggtttgggagatgacatttaagtaatgggcgggacgaggctatgaatttcgatgctggactgtgacaataccatcagtgcgtcacgagtataaagagaggaaaacgtggtcgaattgtgattgcggtaagaagccctcacttgtccgcgtgtttcagaatacgaactagatctcgaagatgttcaacgacagataactccagaaacattgctgctctaaaggccatgacagacctcgaaacagggccagagatatcacgatctcgacagacatgctgaactggcttcatgcaatgtgggcagaggtgtaggatcgcgttcaaaaacgatagctcgcggcatgtcggcagatggttggccacttttgattaatcctcataatagacgtcaccccctgattcacattacggccagggttgcggtgataagaggaccactaaagggcatgatcggcagacacgagggtctaacaacgcaatccatgccaattcgaacatagaaatcaccctcgattattcaacccgaccaccggacacaatcgccgcgagctgaaagaactttgcatttgtggcctagagtatgttgtccatgcacgctacttgttcatgccagcagccaatatgtagctagtattgaagagtggaaaagagctcactccaaatgcaatacgaggcgatgagacttgtaattcgatgctgggcagccgcctccaacaaataaagtcgtggagcatgttctcccctcgtaatagtgctgcgctgatcgcctgatcgccccttggcttgcgaggcccgcaataccaactcattcaatgcgacgtcattaccactacatgttcggttcatgcgttgtgaccaaggtccgatacacaatgtgcacacttaaagctggacaaagcgatagaataatgctgggaccaggacaattccaagtcgaataaataaaacacccggattcgacctccgtctcggagttacaagtcatctacgctgaatccgctacctacatctcgacattcgctcgttcacataattaatcgagatgtatcttttctcggtcgcgacgctgttcttgagtgctgtcatagcccagtcaacggtatactttacgtgtaattcaacgcaggcaaatgggttcagtcccaaatgctgcatcgacatcaacggacaagtgggtgtgaactgtctcattgcacaccaaatgggtgcgacggatcccctatggtcctgcaacttgtttgtgtataatatatcaggatgctgtcaaacaactggttggaggaatccagcgacaaacttcaccctcgacctgtgcgctactagccttaattaggcgaaagcaaagaggaagcttatgtgaggcatggaattgaagttgcaatgagcttcgaaaaacttgctaaactcgaaagtgctacaaaactcggcaaaaaagaggctgtcgagataggatcagaaattacaccggtacaaagggaaaatgcatgcccttattgcggaatcctcaccatgcgaccccctaagaacaaccccacggtgctctaatacataaccgccgatcgaaaatcgcctaacaggaaaaagcgaggcaagccaaagttctaattatgtacacgatttgacgaaggaacgaatgcattacaaagggaagatcaagatttgagcctcgaggcttttacaaattgtaaacgatagttaatgacctactatgtaaaagcgcatctcatttaccaccgagtgttgatgagggcttcaattgccgtgtcggcaacgtatacccgcccgtcgcaggagataagaatatggccacatggcatgctagccctaggactcaacattgaatgatgcccaggtacacactagtaccacatagcgccataacgtcttacctcatacagatgacctctacattttcaattcccgaaacgttcacgacagaactgcttaactattcgctgcttgatttgctgacctcttcgaacctggtttacccctcgaaatagtatcttctttcatcaaacacttgcttttcaagcgcgtaactccgggcatctagcaccgggagtaatagcaatttcctaggggaaccgtaacactatgtcgccagcacatatacgaggtacacgaggttgttgagagaccgtgagtcatcgtgaaatgcagcttccgcaacatgaagatggctagcttgcgaatttaggggagttaaagcttttatcgccggaacaggtgcaatatgttcatgtatctccagtatacaatcacgtaggtagtagctccactatcctcagacagatcagtctagaaggaggcaaggttagccggcactgtatgcggggcagcgcctggaggacggactatacaagtgcagaccgtcgaaccgaagcccataggaaatcatgacgttccagatcgacctcaataaggtagggcaatatcaggactacttctatcaagtccattctcaattcatcgctacaccttaactctacttgtgttattgcactccagaacacgaaaattaccttgcagtaaagccgactctaccttgatattaggcaagatggccgcagccattcctcctcaaatgcagaagtctttggacagcacgaaggtcgagtatcgcaggctcggcaaaagtggtctgcggatctcggtgccaatctttggcgctatgagtttgggtgacccgaagtctttgagctggtcattaaacgaggaagattcgcttccgctgctcaaatatgcttacgaacacggcatgaacacatgggacaccgcggacatgtattcaaatggcgcaagtgaatcggtcatcggcaaggctctcaagaagtacaacatcccgcgcagcaaagtcattatcatgaccaagtgctactggggcgtgggcgaggaaccagagtttgctggctggaagctgggcgccattcgagagaagtctaaggattgtgtcaatcattatggactctcgaggtctgcgatttttgatgctgtcgatgcgtctctcaagcgactcgatacagactatatcgatgtgctccagattcatcgtttcgaccgcgagactccagtcgaggagacgatggaagcgctccacgatctagtcaagttgggtaaagtgcggtatctcggggcgagcagcatgtggacataccagtttgcgcagatgcagttcgtggccgagaagaatggatggaccaagtttgtctcaatgcaaaaccactacaatctcctttatcgcgaagaagaacgcgagatgaatcgtttttgtaaggaaacgggcgtcggactagttccttggagccccctatgccgtggacacctcgtccgaccgccaaaagattttggcagtactgcacgcagtgcaggtgagaaagacaacagtggtgttggtcacaacacgggccctggattggagccggatcttaccatcattaagcgcgtgcaagagcttgccgagaaaaaaggctggaccatgacggacgtcaccctcgcgtggacgaacaaacgcgtgactagccccatcgtcggattttctagcatcaagcgcattgacgaagctctcgcggcgcgcggcaagacactaacggatgaagaagagaaatatttagaggaactatatcgacccaaaaccgtatcaggacatgcgtgacccacagcatgacggtcatcgagacatacatcgacacagtagattggtggatgagcctacaattagtccagagaaattcacttgaactacgcctcgcttgaaagattccaggtttgctgtgagatcccgagctagaacgagccagataaatgtactaggcttaggctatagacagccattaaaaaaaatccaagtcattgtatcgcttcaagtgtatgtcgctcctgcgcgttgattgtttcaagctttagaagtcaacctgagcgccgcaagctgtccggtccacccagcattaccaccaccaatttctgcaatcggtgcctcgatcgcaataggcgcccataccaagctttggccgttgataccaagcaccgccaggaattcttcttcattttccgcctgctcgtcaatgcctggtaattccgcctccaaagtggtactctgtacggaagcaaacgtctgattgcctcgccctaatagacgcagattaacccatgatccgacagggacagttgagttaagacgatagtagttcgccgacgcgaagagcgtgaggttcggtgttagcatgagcgttgagtctgcaccggaaatgaggcttgcatcagagtctaccgtgtcaatgcgtagtttcaatgtcagtgtatagtcgcggcccttggatgtgaaaggggttctaaaatagcaatttgggctgatcataaatgtctgtatgccggatgtgacggagcagtttgtgaaggcgttgtaagcattgggagattgatctgggacagtcattccagctgctgatacgtccgtattgctatttggtgcgacagttgatggtcctgtgctgctatactgaaatattgtcgtagagtttgatgggatgtgccgatctagattttgagccggtatgaggccatggagaacgggaaacactagatcaaactcctcggatgaaagattacctccccattgcttatccgctaatgcagggatgccttcacgccatgcgtagtatgcttcgctgaacaccgttgcgttcgccccgaagtcattccagagcggaacgattgacccgaggacccggggattgtccctggcgggattattggtactattctttgcgtcgaaaatgttgggctgccagcgtccatgagttgcaggatcgccggtgaaggtcttctcaaatgggactgcctgcggataactccccgaccatttgttaactacatagaatgtgtcgtccgagttgagaactgagtaattgttccgaatgtagtcgaatagaggattatcttcgaa

SEQ ID NO: 3550 - DNA, 291 bp, Muscodor strobelii
  misc_feature: SGI cDNA ID NO. 560845
  misc_feature: Reduced expression when VOC is produced
  misc_feature: Encodes the peptide sequence at SEQ ID NO 3551
atgtatcttttctcggtcgcgacgctgttcttgagtgctgtcatagcccagtcaacggtatactttacgtgtaattcaacgcaggcaaatgggttcagtcccaaatgctgcatcgacatcaacggacaagtgggtgtgaactgtctcattgcacaccaaatgggtgcgacggatcccctatggtcctgcaacttgtttgtgtataatatatcaggatgctgtcaaacaactggttggaggaatccagcgacaaacttcaccctcgacctgtgcgctactagccttaattag

SEQ ID NO: 3551 - protein, 96 aa, Muscodor strobelii
  misc_feature: SGI Peptide ID NO. 560845
  misc_feature (3)..(91): NCBI GI: 145609177 Blast Desc: MGG_07411 [Magnaporthe grisea 70-15] gi|145016586|gb|EDK01016.1| MGG_07411 [Magnaporthe grisea 70-15]
  misc_feature: Useful for introducing or modulating the production of volatile compounds
MYLFSVATLFLSAVIAQSTVYFTCNSTQANGFSPKCCIDINGQVGVNCLIAHQMGATDPLWSCNLFVYNISGCCQTTGWRNPATNFTLDLCATSLN

SEQ ID NO: 3552 - DNA, 5842 bp, Muscodor strobelii; identical to SEQ ID NO: 3549
  misc_feature: SGI EST ID NO. CUFF.9021.2
  misc_feature: Variant of the nucleotide sequence at SEQ ID NO 3550

SEQ ID NO: 3553 - DNA, 1428 bp, Muscodor strobelii
  misc_feature: SGI cDNA ID NO. 560846
  misc_feature: Reduced expression when VOC is produced
  misc_feature: Encodes the peptide sequence at SEQ ID NO 3554
atggcgacgtctccaccaccctcgtcgctcgacaccaaaactgccgaccctgaggctattggtgttggcgctgaggatccgtctacctcgaaacactctctcttccgctccgttcccttccaaattgccgtcgcatgtggcgtctccttcactgcccctggaatttgggatgcgctgaacaatttgggcgccggtggtgccgctgagccctacgcggtgtctgcagcaaatgctttggtgtatgggctattctccatcgtgtgtgtcgccgctggggccatcaacaatcgcatcggcttgcgctatggacttgctttgggggccattggctacccactctacggcgctggcctgtacaccaacaatcagagcgcgacaacgtggttcctgctcttcggcagcgccttgtgtggtatatcagctgggttcttttgggcagcagaggctgccatcattatcggctaccccagcccacgtgagcgagcattttacctggccatctggcagacggctaaggctgctggcccgatcgtgggaggggcaatcaatctgggcctcaatgctcagaagtcgacaacgggatccgtcggttctaccacatacattgtttttattgtcatcatggttcttggtctccccatcgcgctgcttctgagcccagcagagaaggtctggcgcaaggatggaacaaatgtcattatcaaaaaagaagctacatggagccaggagttcaaggcgatgttcgctctgtttgcatcacggcggatcctgctactgcttccagctttcttcatcagttatttctataacggcttcttaagcacctggctcacggtgtacttcaccgttcgggcgcgcgcgttctcgtccttctttaccaattttgccggcatttttagctcattcctcatcgccaccctcttggatcgacaatcaatcaacatcaagaccagagctaaaattgcattcatttccatcgtcaccatccttgttggtacgtggatctgggccacgatcctacaaaagcagttctatgatgcgcccgagtcccccgtcttcgattggttccgtggaggtttcgggaaatcgtatgctttagttttcttctggacttttgctgggcaagcgtttcaacagtttctctactggcttgtcggtcagtatgctaccgacctatcatctgtgtctcgtcacactggaattctgagaggcgtcgaggcgcttggacagacagttgcttgggccctacaatcggaagcaaatgtcaaccatttcgtcagcatcggtctcaactttggaatcactatcctatgtatcttgccaacttggatcgtgctctccgagcttacccatagtcacgagggtgaggttctgcaggacggagctgagagtgacgacagcaggcagagtgggaatgggacggaatga

SEQ ID NO: 3554 - protein, 475 aa, Muscodor strobelii
  misc_feature: SGI Peptide ID NO. 560846
  misc_feature (42)..(196): Pfam Id: PF05978 Pfam Desc: Eukaryotic protein of function (DUF895)
  misc_feature (37)..(418): Pfam Id: PF07690 Pfam Desc: Major Facilitator Superfamily
  misc_feature (37)..(337): Pfam Id: PF07690 Pfam Desc: Major Facilitator Superfamily
  misc_feature (33)..(472): NCBI GI: 259486451 Blast Desc: TPA: conserved [Aspergillus nidulans FGSC A4]
  misc_feature (16)..(468): NCBI GI: 255944977 Blast Desc: Pc20g07320 [Penicillium chrysogenum Wisconsin 54-1255] gi|211587991|emb|CAP86061.1| Pc20g07320 [Penicillium chrysogenum Wisconsin 54-1255]
  misc_feature (34)..(467): NCBI GI: 189197529 Blast Desc: PTRG_04769 [Pyrenophora tritici-repentis Pt-1C-BFP] gi|187981050|gb|EDU47676.1| PTRG_04769 [Pyrenophora tritici-repentis Pt-1C-BFP]
  misc_feature (31)..(470): NCBI GI: 46126807 Blast Desc: FG07781.1 [Gibberella zeae PH-1]
  misc_feature (1)..(473): NCBI GI: 58264814 Blast Desc: [Cryptococcus neoformans var. neoformans JEC21] gi|134109699|ref|XP_776399.1| CNBC4540 [Cryptococcus neoformans var. neoformans B-3501A] gi|50259075|gb|EAL21752.1| CNBC4540 var.
  misc_feature (30)..(468): NCBI GI: 169616338 Blast Desc: SNOG_11341 [Phaeosphaeria nodorum SN15] gi|160703158|gb|EAT81049.2| SNOG_11341 [Phaeosphaeria nodorum SN15]
  misc_feature (33)..(423): NCBI GI: 67524367 Blast Desc: AN2641.2 [Aspergillus nidulans FGSC A4] gi|40743859|gb|EAA63043.1| AN2641.2 [Aspergillus nidulans FGSC A4]
  misc_feature (23)..(465): NCBI GI: 256727895 Blast Desc: NECHADRAFT_46365 [Nectria haematococca mpVI 77-13-4]
  misc_feature (26)..(475): NCBI GI: 255949038 Blast Desc: Pc22g13600 [Penicillium chrysogenum Wisconsin 54-1255] gi|211592303|emb|CAP98648.1| Pc22g13600 [Penicillium chrysogenum Wisconsin 54-1255]
  misc_feature (15)..(456): NCBI GI: 145241912 Blast Desc: An09g02880 [Aspergillus niger] gi|134078144|emb|CAK40225.1| protein product [Aspergillus niger]
  misc_feature: Useful for introducing or modulating the production of volatile compounds
MATSPPPSSLDTKTADPEAIGVGAEDPSTSKHSLFRSVPFQIAVACGVSFTAPGIWDALNNLGAGGAAEPYAVSAANALVYGLFSIVCVAAGAINNRIGLRYGLALGAIGYPLYGAGLYTNNQSATTWFLLFGSALCGISAGFFWAAEAAIIIGYPSPRERAFYLAIWQTAKAAGPIVGGAINLGLNAQKSTTGSVGSTTYIVFIVIMVLGLPIALLLSPAEKVWRKDGTNVIIKKEATWSQEFKAMFALFASRRILLLLPAFFISYFYNGFLSTWLTVYFTVRARAFSSFFTNFAGIFSSFLIATLLDRQSINIKTRAKIAFISIVTILVGTWIWATILQKQFYDAPESPVFDWFRGGFGKSYALVFFWTFAGQAFQQFLYWLVGQYATDLSSVSRHTGILRGVEALGQTVAWALQSEANVNHFVSIGLNFGITILCILPTWIVLSELTHSHEGEVLQDGAESDDSRQSGNGTE

SEQ ID NO: 3555 - DNA, 1900 bp, Muscodor strobelii
  misc_feature: SGI EST ID NO. CUFF.8918.0
  misc_feature: Variant of the nucleotide sequence at SEQ ID NO 3553
tcgaaaagctcgatgtggactgggcgccgcgcaaaggtggatcgccattaccaaattgctaccacatagtacgatatatcatcaacgtcgtgcaaattggcatgatcacgcaattactcgttatcgcagaaattttcggtgtcggcgtgcaacatggagtacaaagatgacgccgtaagatctcttcccatcagctcaacgatgagcactgtttttgttgccctttttgaattgccatttccagtccgttgacttgtttgactcccgatggcgacgtctccaccaccctcgtcgctcgacaccaaaactgccgaccctgaggctattggtgttggcgctgaggatccgtctacctcgaaacactctctcttccgctccgttcccttccaaattgccgtcgcatgtggcgtctccttcactgcccctggaatttgggatgcgctgaacaatttgggcgccggtggtgccgctgagccctacgcggtgtctgcagcaaatgctttggtgtatgggctattctccatcgtgtgtgtcgccgctggggccatcaacaatcgcatcggcttgcgctatggacttgctttgggggccattggctacccactctacggcgctggcctgtacaccaacaatcagagcgcgacaacgtggttcctgctcttcggcagcgccttgtgtggtatatcagctgggttcttttgggcagcagaggctgccatcattatcggctaccccagcccacgtgagcgagcattttacctggccatctggcagacggctaaggctgctggcccgatcgtgggaggggcaatcaatctgggcctcaatgctcagaagtcgacaacgggatccgtcggttctaccacatacattgtttttattgtcatcatggttcttggtctccccatcgcgctgcttctgagcccagcagagaaggtctggcgcaaggatggaacaaatgtcattatcaaaaaagaagctacatggagccaggagttcaaggcgatgttcgctctgtttgcatcacggcggatcctgctactgcttccagctttcttcatcagttatttctataacggcttcttaagcacctggctcacggtgtacttcaccgttcgggcgcgcgcgttctcgtccttctttaccaattttgccggcatttttagctcattcctcatcgccaccctcttggatcgacaatcaatcaacatcaagaccagagctaaaattgcattcatttccatcgtcaccatccttgttggtacgtggatctgggccacgatcctacaaaagcagttctatgatgcgcccgagtcccccgtcttcgattggttccgtggaggtttcgggaaatcgtatgctttagttttcttctggacttttgctgggcaagcgtttcaacagtttctctactggcttgtcggtcagtatgctaccgacctatcatctgtgtctcgtcacactggaattctgagaggcgtcgaggcgcttggacagacagttgcttgggccctacaatcggaagcaaatgtcaaccatttcgtcagcatcggtctcaactttggaatcactatcctatgtatcttgccaacttggatcgtgctctccgagcttacccatagtcacgagggtgaggttctgcaggacggagctgagagtgacgacagcaggcagagtgggaatgggacggaatgaggaaacctcgactctaaaaatgtccgggggcttagatataaaatgcgggtattcataggccacggctatcataatgacacggaattctgagcatcaggaccctacacatctaaatagttttcgtattaatgatttagagcgacgagcgcagtccttccagacaaccttactaaattgatacttgatagatggggaaagatctgag

SEQ ID NO: 3556 - DNA, 684 bp, Muscodor strobelii
  misc_feature: SGI cDNA ID NO. 560847
  misc_feature: Encodes the peptide sequence at SEQ ID NO 3557
atgcctcaatttctgttcatcgagctcccaagcttccgcataaaagacagttcgaaccacgctgtctcgctctccaaaaagcatcttggacgcatgctctccttactgcaacaagtacgaggtggtttagccacaagcacatacgtggacttatcgacgtcgctcttgttcagcggcggggagaccgatctctggacatccgtccacacccctccaggcttacacgcagaggaaaacctgcttctcgcttattttcagtcgttcgactcacctggtgcatacccgctcgtcgacgccatggtcatctcctccaaaccatgcagcggctgtatggaatatttttccctttctggcaagcagcttaaagtcggggacggcactacgcctccgttccgcgccaagttcactgcacgaagcgataagagttatactcccgttttttacctagcacggtccttggacgcagcacaacgtagtgctctgtggatggagcttgggactatgttcactacgagtgtcacgcttgcgaactacccggactgcccactggggcagatgtaccatgtatttggagaaggatccccttggtttgctctaaactatcaggagaatatgactgatgccgaggtcgctgaagctatcgagcggcaggagggcaacctcacttactggattggtcgttag

SEQ ID NO: 3557 - protein, 227 aa, Muscodor strobelii
  misc_feature: SGI Peptide ID NO. 560847
MPQFLFIELPSFRIKDSSNHAVSLSKKHLGRMLSLLQQVRGGLATSTYVDLSTSLLFSGGETDLWTSVHTPPGLHAEENLLLAYFQSFDSPGAYPLVDAMVISSKPCSGCMEYFSLSGKQLKVGDGTTPPFRAKFTARSDKSYTPVFYLARSLDAAQRSALWMELGTMFTTSVTLANYPDCPLGQMYHVFGEGSPWFALNYQENMTDAEVAEAIERQEGNLTYWIGR

SEQ ID NO: 3558 - DNA, 152 bp, Muscodor strobelii
  misc_feature: SGI EST ID NO. CUFF.8924.0
  misc_feature: Variant of the nucleotide sequence at SEQ ID NO 3556
gcagaggaaaacctgcttctcgcttattttcagtcgttcgactcacctggtgcatacccgctcgtcgacgccatggtcatctcctccaaaccatgcagcggctgtatggaatatttttccctttctggcaagcagcttaaagtcggggacgg

SEQ ID NO: 3559 - DNA, 1767 bp, Muscodor strobelii
  misc_feature: SGI cDNA ID NO. 560848
  misc_feature: Reduced expression when VOC is produced
  misc_feature: Encodes the peptide sequence at SEQ ID NO 3560
atggctgtgattcctgtcctcttgtttctcgcattactatcctatgtgcttcacttgaagtcgaaagaacgtgaacgggcgaagcttccggctggctctcgcccgctgcctggtccaaaatgttatcccatcgtgggccgcgtgcacgacgtgccgccagaggcatcgtggctcaagttctatgagtggagtaaggagtatgggcccatctatcagatggaaatatttgggagcgtacacgtatggatttcatctgagcagattgcgcatgaactgctctcgaaacgatctcaaatctattcagatcgacctcagatacccaatttacccgacaatcgtacaaaaggcgattatttggcacttacgggacgaaatgatacatggcgccgtcaacgcagactcgcagcgcagctcatgtccatctccgccaacgcggcacttcatgactacccgcgcaaggaacgcgatcgcttcctgtatttactttccacagacgcttcgcaatatcgcgaatggatcgaacagttcacatctcggaccgtcgcccggctatcatggggtagcccacattccgctcagaccctccgagtcacgaccttcggcctcctcgagacgattagtccttcgggcgcattgcctaacgtcatctcctatctcatgcacgttccgacgtttctcagtccttggaagaaaaaggagaatgcgcgccacgccgcagaagccaaactgctcaagggtaacgtcaagtatgtgcatgatcgcatcaatgacggaagcgctgagccaagtttcgtgcggactttcatcgatggactgagttcttccggtgacaaggcaaaatggggcgaggaatcggaggcgacttatgtcgtaggacagatggccattgccggtgccctgaccataggttccccgatacagagcttcttgttggccatgttgcattacccagaatggcaaaagaaattacaggacgagatcgatcttgtctgtgagggtcgttgtccacagtgggaggacagagagaggttacacatgcttagagctgtggtcaaagaggtcattcgatggagacctcccgtaccgacgggtattccccacgctattgagaaagatgatgtgtggaatggatatttcatacccgctggagcgaccatacatgcgctagagtgggggatcacgcgcaatgaggacttgtatccagatgccgaaacattcaatcctgcaagatggctcgaaccggaatatcccacatataaggagccgctcactctgcacccgaatctcaacggctttagtcagttcggctttggacggaggacttgtcaaggcgtgccgatcgtcgagatggacctattcctcacaatgggcggtatggcgtgggcgtttgacattgtcaagaaaagaagagatgatggatctgaggtgcctgtgcactggaatgactatacaccgcttctcattgcaaaacccgcgccatttgaattcgatgccaacgtacgaagcgaagagaagggtcatttactgttgaaaatgtgggagagcggtatgggcgacgacgatcgcgaggaggaggcacggcggacgagcgagaaagagatgagacaataccaggagcaggtcgaggaagatgagaagaagagatatgagcacgagggccatagcgacgatacatcgagtgatcgtggatctgaaacgacgggcaccaactcaagtagtggctcggtcacgtccggagaagaagcagagattgatatttgggcgtag

SEQ ID NO: 3560 - protein, 588 aa, Muscodor strobelii
  misc_feature: SGI Peptide ID NO. 560848
  misc_feature (36)..(489): Pfam Id: PF00067 Pfam Desc: Cytochrome P450
  misc_feature (304)..(457): Pfam Id: PF00067 Pfam Desc: Cytochrome P450
  misc_feature (36)..(139): Pfam Id: PF00067 Pfam Desc: Cytochrome P450
  misc_feature (26)..(581): NCBI GI: 171685242 Blast Desc: protein product [Podospora anserina] gi|170942582|emb|CAP68234.1| protein product [Podospora anserina]
  misc_feature (1)..(528): NCBI GI: 39956353 Blast Desc: MGG_09081 [Magnaporthe grisea 70-15] gi|145016473|gb|EDK00903.1| MGG_09081 [Magnaporthe grisea 70-15]
  misc_feature (59)..(513): NCBI GI: 11359627 Blast Desc: MGG_09081 [Magnaporthe grisea 70-15] gi|145016473|gb|EDK00903.1| MGG_09081 [Magnaporthe grisea 70-15]
  misc_feature (26)..(562): NCBI GI: 261354196 Blast Desc: cytochrome P450 2C3 [Verticillium albo-atrum VaMs.102]
  misc_feature (75)..(513): NCBI GI: 164425842 Blast Desc: NCU08197 [Neurospora crassa OR74A] gi|157071087|gb|EAA30051.2| conserved [Neurospora crassa OR74A]
  misc_feature (25)..(541): NCBI GI: 116208752 Blast Desc: CHGG_03669 [Chaetomium globosum CBS 148.51] gi|88184266|gb|EAQ91734.1| CHGG_03669 [Chaetomium globosum CBS 148.51]
  misc_feature (15)..(471): NCBI GI: 189202814 Blast Desc: cytochrome P450 2E1 [Pyrenophora tritici-repentis Pt-1C-BFP] gi|187984842|gb|EDU50330.1| cytochrome P450 2E1 [Pyrenophora tritici-repentis Pt-1C-BFP]
  misc_feature (3)..(529): NCBI GI: 169619032 Blast Desc: SNOG_12709 [Phaeosphaeria nodorum SN15] gi|111058887|gb|EAT80007.1| SNOG_12709 [Phaeosphaeria nodorum SN15]
  misc_feature (6)..(519): NCBI GI: 171678771 Blast Desc: protein product [Podospora anserina] gi|170937455|emb|CAP62113.1| protein product [Podospora anserina]
  misc_feature (8)..(513): NCBI GI: 189210291 Blast Desc: cytochrome P450 2C30 [Pyrenophora tritici-repentis Pt-1C-BFP] gi|187977570|gb|EDU44196.1| cytochrome P450 2C30 [Pyrenophora tritici-repentis Pt-1C-BFP]
  misc_feature (24)..(501): SWISSPROT Homolog: EC 1.14.99.9 Steroid 17-alpha-monooxygenase
  misc_feature: Useful for introducing or modulating the production of volatile compounds
MAVIPVLLFLALLSYVLHLKSKERERAKLPAGSRPLPGPKCYPIVGRVHDVPPEASWLKFYEWSKEYGPIYQMEIFGSVHVWISSEQIAHELLSKRSQIYSDRPQIPNLPDNRTKGDYLALTGRNDTWRRQRRLAAQLMSISANAALHDYPRKERDRFLYLLSTDASQYREWIEQFTSRTVARLSWGSPHSAQTLRVTTFGLLETISPSGALPNVISYLMHVPTFLSPWKKKENARHAAEAKLLKGNVKYVHDRINDGSAEPSFVRTFIDGLSSSGDKAKWGEESEATYVVGQMAIAGALTIGSPIQSFLLAMLHYPEWQKKLQDEIDLVCEGRCPQWEDRERLHMLRAVVKEVIRWRPPVPTGIPHAIEKDDVWNGYFIPAGATIHALEWGITRNEDLYPDAETFNPARWLEPEYPTYKEPLTLHPNLNGFSQFGFGRRTCQGVPIVEMDLFLTMGGMAWAFDIVKKRRDDGSEVPVHWNDYTPLLIAKPAPFEFDANVRSEEKGHLLLKMWESGMGDDDREEEARRTSEKEMRQYQEQVEEDEKKRYEHEGHSDDTSSDRGSETTGTNSSSGSVTSGEEAEIDIWA

SEQ ID NO: 3561 - DNA, 1841 bp, Muscodor strobelii
  misc_feature: SGI EST ID NO. CUFF.8931.0
  misc_feature: Variant of the nucleotide sequence at SEQ ID NO 3559
agaacactaagctaaccgtcacaaggttatcccatcgtgggccgcgtgcacgacgtgccgccagaggcatcgtggctcaagttctatgagtggagtaaggagtatgggcccatctatcagatggaaatatttgggagcgtacacgtatggatttcatctgagcagattgcgcatgaactgctctcgaaacgatctcaaatctattcagatcgacctcagatacccaatttacccgacaatcgtacaaaaggcgattatttggcacttacgggacgaaatgatacatggcgccgtcaacgcagactcgcagcgcagctcatgtccatctccgccaacgcggcacttcatgactacccgcgcaaggaacgcgatcgcttcctgtatttactttccacagacgcttcgcaatatcgcgaatggatcgaacagttcacatctcggaccgtcgcccggctatcatggggtagcccacattccgctcagaccctccgagtcacgaccttcggcctcctcgagacgattagtccttcgggcgcattgcctaacgtcatctcctatctcatgcacgttccgacgtttctcagtccttggaagaaaaaggagaatgcgcgccacgccgcagaagccaaactgctcaagggtaacgtcaagtatgtgcatgatcgcatcaatgacggaagcgctgagccaagtttcgtgcggactttcatcgatggactgagttcttccggtgacaaggcaaaatggggcgaggaatcggaggcgacttatgtcgtaggacagatggccattgccggtgccctgaccataggttccccgatacagagcttcttgttggccatgttgcattacccagaatggcaaaagaaattacaggacgagatcgatcttgtctgtgagggtcgttgtccacagtgggaggacagagagaggttacacatgcttagagctgtggtcaaagaggtcattcgatggagacctcccgtaccgacgggtattccccacgctattgagaaagatgatgtgtggaatggatatttcatacccgctggagcgaccatacatgcgctagagtgggggatcacgcgcaatgaggacttgtatccagatgccgaaacattcaatcctgcaagatggctcgaaccggaatatcccacatataaggagccgctcactctgcacccgaatctcaacggctttagtcagttcggctttggacggaggacttgtcaaggcgtgccgatcgtcgagatggacctattcctcacaatgggcggtatggcgtgggcgtttgacattgtcaagaaaagaagagatgatggatctgaggtgcctgtgcactggaatgactatacaccgcttctcattgcaaaacccgcgccatttgaattcgatgccaacgtacgaagcgaagagaagggtcatttactgttgaaaatgtgggagagcggtatgggcgacgacgatcgcgaggaggaggcacggcggacgagcgagaaagagatgagacaataccaggagcaggtcgaggaagatgagaagaagagatatgagcacgagggccatagcgacgatacatcgagtgatcgtggatctgaaacgacgggcaccaactcaagtagtggctcggtcacgtccggagaagaagcagagattgatatttgggcgtagggataccacatcatcatacatcgttgcacctgtctggcgttggagttctccgcgatgagctgtattgtcacaactaatacaacaggaaggaacggcgatcatctttcaatttatcttggttatgtactcgggcgcttcatagcacattggtagcaattcagattcccgta

SEQ ID NO: 3562 - DNA, 1521 bp, Muscodor strobelii
  misc_feature: SGI cDNA ID NO. 560849
  misc_feature: Reduced expression when VOC is produced
  misc_feature: Encodes the peptide sequence at SEQ ID NO 3563
ctcagccgcgccttcggcaacaacagcgccaacggcctcaaggaccccgccgacccctccaagggcaagaagcgcatcctcatcgagttctccagccccaacatcgcaaagcccttccacgccggccacctgcgcagcaccatcatcggcggcttcctcgccaacctctacaccgccctcggctgggacgtcgtccgcatcaactacctcggcgactggggcaagcagtacggcatcctcgccgtcggctacgacaagtacggcagcgaggacaagctcaccagggaccccatcaaccacctcttcgagatctacgtccgcaccaacaaggacatcgccgacgagaaggacgccgccgacaagctcaaggccgacggcaagcccgacgacgcccaggccctgctcgacagcggcactgatgagaaggctcgccggtacttcaagctcatggtcgacggcgacaaggacgccgtggcgctgtggcagcgcatgcgcgacctcagcatcgagaagtacaagcagacctactcgcgcctcaacatccacttcgacgagttctcgggcgagagccaggtctccgaggacgccatggacgcggccgccaagaagatgctcgacatgggcatcgccgaggagtccgagggcgccctgatcgtcgacttctccaagcacgtcgcgggcaaggccggcaaggcgctcgagaagcccatcatccgccgcaaggacggcaccgcgctgtacctgacgcgcgacatcagcgagctgctaaatcgcgaggacaagtaccacttcgaccacctcacctacgtcatcgcgtcccagcaggacctgcacgtcaagcagttcttcaagatcgtcgagctgatgggctacacgaacatcgccgccaaggtccagcacattaacttcggcatggtccagggcatgagcacccgcaagggcaccgtcaagttcctcgacgacatcctgcgcgacgtcggcgactacatgcacgacgtcatgcgcaagaacgaggacaagtacaagcaggtcgagaaccccgatgccaccgccgacatcatgggcatcagtgccgtcatgtgccaggacatgacgggcaagaggatcaacaattatcacttcgacatggccatgatgacgtccttcgaaggcgacacgggcccctacctccaatattcccacgcgcgcctgtgctccatcacccgcaaggcgaacctgagcgaggaggagatcgcgtcggcagatctgtccttgctgacagagacacacgccatcaacctggtgcgtgtcctgtcgcaatggccagacacggtgcaatacgtctcccgcacgctcgagccgacgacgatattgacttacctgttcaaaatgacacacgtcttgaactcgagttatgatcatttgaacatcattcgatcggaacccgaaatcaagaaggcccgcatggccctttatgacacagctcgtctcgtgctcagcaatggcctgcgcatccttggcctcacccccgtagagaggtaa

SEQ ID NO: 3563 - protein, 506 aa, Muscodor strobelii
  misc_feature: SGI Peptide ID NO. 560849
  misc_feature (390)..(506): Pfam Id: PF05746 Pfam Desc: DALR anticodon binding domain
  misc_feature (1)..(376): Pfam Id: PF00750 Pfam Desc: tRNA synthetases class I (R)
  misc_feature (141)..(376): Pfam Id: PF00750 Pfam Desc: tRNA synthetases class I (R)
  misc_feature (20)..(115): Pfam Id: PF00750 Pfam Desc: tRNA synthetases class I (R)
  misc_feature (5)..(506): NCBI GI: 39956339 Blast Desc: MGG_09080 [Magnaporthe grisea 70-15] gi|145016471|gb|EDK00901.1| MGG_09080 [Magnaporthe grisea 70-15]
  misc_feature (5)..(506): NCBI GI: 156052483 Blast Desc: arginyl-tRNA synthetase [Sclerotinia sclerotiorum 1980] gi|154704187|gb|EDO03926.1| arginyl-tRNA synthetase [Sclerotinia sclerotiorum 1980]
  misc_feature (5)..(506): NCBI GI: 116208750 Blast Desc: arginyl-tRNA synthetase [Chaetomium globosum CBS 148.51] gi|88184265|gb|EAQ91733.1| arginyl-tRNA synthetase [Chaetomium globosum CBS 148.51]
  misc_feature (2)..(506): NCBI GI: 46124397 Blast Desc: FG06576.1 [Gibberella zeae PH-1]
  misc_feature (5)..(506): NCBI GI: 11271708 Blast Desc: FG06576.1 [Gibberella zeae PH-1]
  misc_feature (5)..(506): NCBI GI: 164425840 Blast Desc: arginyl-tRNA synthetase [Neurospora crassa OR74A] gi|157071086|gb|EAA30049.2| arginyl-tRNA synthetase [Neurospora crassa OR74A]
  misc_feature (3)..(506): NCBI GI: 171685240 Blast Desc: protein product [Podospora anserina] gi|170942581|emb|CAP68233.1| protein product [Podospora anserina]
  misc_feature (4)..(484): NCBI GI: 154296931 Blast Desc: BC1G_12554 [Botryotinia fuckeliana B05.10] gi|150843081|gb|EDN18274.1| BC1G_12554 [Botryotinia fuckeliana B05.10]
  misc_feature (4)..(506): NCBI GI: 146322998 Blast Desc: arginyl-tRNA synthetase [Aspergillus fumigatus Af293] gi|129558565|gb|EAL93698.2| arginyl-tRNA synthetase [Aspergillus fumigatus Af293]
  misc_feature (5)..(506): NCBI GI: 119481669 Blast Desc: arginyl-tRNA synthetase [Neosartorya fischeri NRRL 181] gi|119409017|gb|EAW18966.1| arginyl-tRNA synthetase [Neosartorya fischeri NRRL 181]
  misc_feature (24)..(506): SWISSPROT Homolog: EC 6.1.1.19 Arginine--tRNA ligase
  misc_feature: Useful for introducing or modulating the production of volatile compounds
LSRAFGNNSANGLKDPADPSKGKKRILIEFSSPNIAKPFHAGHLRSTIIGGFLANLYTALGWDVVRINYLGDWGKQYGILAVGYDKYGSEDKLTRDPINHLFEIYVRTNKDIADEKDAADKLKADGKPDDAQALLDSGTDEKARRYFKLMVDGDKDAVALWQRMRDLSIEKYKQTYSRLNIHFDEFSGESQVSEDAMDAAAKKMLDMGIAEESEGALIVDFSKHVAGKAGKALEKPIIRRKDGTALYLTRDISELLNREDKYHFDHLTYVIASQQDLHVKQFFKIVELMGYTNIAAKVQHINFGMVQGMSTRKGTVKFLDDILRDVGDYMHDVMRKNEDKYKQVENPDATADIMGISAVMCQDMTGKRINNYHFDMAMMTSFEGDTGPYLQYSHARLCSITRKANLSEEEIASADLSLLTETHAINLVRVLSQWPDTVQYVSRTLEPTTILTYLFKMTHVLNSSYDHLNIIRSEPEIKKARMALYDTARLVLSNGLRILGLTPVER

SEQ ID NO: 3564 - DNA, 3675 bp, Muscodor strobelii
  misc_feature: SGI EST ID NO. CUFF.8934.0
  misc_feature: Variant of the nucleotide sequence at SEQ ID NO 3562
ccgcgccttcggcaacaacagcgccaacggcctcaaggaccccgccgacccctccaagggcaagaagcgcatcctcatcgagttctccagccccaacatcgcaaagcccttccacgccggccacctgcgcagcaccatcatcggcggcttcctcgccaacctctacaccgccctcggctgggacgtcgtccgcatcaactacctcggcgactggggcaagcagtacggcatcctcgccgtcggctacgacaagtacggcagcgaggacaagctcaccagggaccccatcaaccacctcttcgagatctacgtccgcaccaacaaggacatcgccgacgagaaggacgccgccgacaagctcaaggccgacggcaagcccgacgacgcccaggccctgctcgacagcggcactgatgagaaggctcgccggtacttcaagctcatggtcgacggcgacaaggacgccgtggcgctgtggcagcgcatgcgcgacctcagcatcgagaagtacaagcagacctactcgcgcctcaacatccacttcgacgagttctcgggcgagagccaggtctccgaggacgccatggacgcggccgccaagaagatgctcgacatgggcatcgccgaggagtccgagggcgccctgatcgtcgacttctccaagcacgtcgcgggcaaggccggcaaggcgctcgagaagcccatcatccgccgcaaggacggcaccgcgctgtacctgacgcgcgacatcagcgagctgctaaatcgcgaggacaagtaccacttcgaccacctcacctacgtcatcgcgtcccagcaggacctgcacgtcaagcagttcttcaagatcgtcgagctgatgggctacacgaacatcgccgccaaggtccagcacattaacttcggcatggtccagggcatgagcacccgcaagggcaccgtcaagttcctcgacgacatcctgcgcgacgtcggcgactacatgcacgacgtcatgcgcaagaacgaggacaagtacaagcaggtcgagaaccccgatgccaccgccgacatcatgggcatcagtgccgtcatgtgccaggacatgacgggcaagaggatcaacaattatcacttcgacatggccatgatgacgtccttcgaaggcgacacgggcccctacctccaatattcccacgcgcgcctgtgctccatcacccgcaaggcgaacctgagcgaggaggagatcgcgtcggcagatctgtccttgctgacagagacacacgccatcaacctggtgcgtgtcctgtcgcaatggccagacacggtgcaatacgtctcccgcacgctcgagccgacgacgatattgacttacctgttcaaaatgacacacgtcttgaactcgagttatgatcatttgaacatcattcgatcggaacccgaaatcaagaaggcccgcatggccctttatgacacagctcgtctcgtgctcagcaatggcctgcgcatccttggcctcacccccgtagagagaatgtaaatcccttagaagtatgaacatctagatgaaaaacgcgatgagataagccatggccgcgatcgtctcccggcgcgatgcagggttgatgcaggctgatgcaggcacccgttgtgtaatcggcaccgtgttctccgatttcgtgcctcgccacgcgccgactggtggagatgcggtgtcatccaatatgccgagagcgcgagcgatcggtacgaggtggtactatggaatgttatgatgacaattggcattggcctaatagcttcgtagaactgggctggccatgacctgctgagcgaagtacgctagtacacctgaatagactagtcgtcagtctcccctccaacccgccgtgggggataatccagagaatcccgaccgacgacttgatcacacctttcacgctcgcccctttcggtatggttcattgtatgtatgtgtgactatcataacctgatgtcattattgtggtagtgcggtccccgacgccgtggttcgcatgcatcatccctcaccctctcgtatctaaagctttccgatatcatctttgcggatcaagttctattcatagcattttcaggcactttctgccctttttttctgtctcttgtacccgtctgcatcctgcgcttcaacggccatctcaaagtttccagggattctggacctgtctgagccacttgcgcgtggtcattgacagtcctctatgtgtagtgaagctcacgcttttagactttggccttccaatttatggtttcttcagccccgaaacgtgcagatcggctaagccaccgatcctcgccggtctcgttcttgtgtcctggccaggcttatctgtgcttcaggctggacgatagcgcaggcctctccgtcttgccgtcgccggagccatggtcccgtttgccgttgcttcttctgtgcacacttctgtgcatacacaactagtgacactacacgtgatccggcgaagctgactggctctctcaactcactattggtttcctatatcgcgtatactgctcagacatatcaggtgtgcactacatgtacttgatcggcacatgttcgccgtgccgaagatcatagctcacgtagcatgattagtgacggctcgagagcacacctgtgtaggcagacccttatggaaccagatgagagtagattctatcttctctaacggtattcgtttacattttccgatgattctttgatctggaccctggacaacgcagcagtgtgccatgctaccactgcattagctagcgcaaaggagacaaatcaaaactgaggagcacagattacctctgttcccagacgcactcaagctcacctctagtgaagtttccaccgtggcggtcccgacttttctttaccgtatgagcttgattgcggcgatccctgatccacgtcctgctcgaacggccgctcggaccttgaaataagcatgaccattgtagaatgtgtgagatgcgattcaagcttcacggagccctccaatgagttatcatcatccgatggctcccgaagtcaacctcgcaggaggcaaacggagaacccccatggcttagcgtcacagaagtagacttagacttccttcagaaataggacttgattttgtacgaccgccaataacctgtagccatgcgaggcttttggcaatatctgggatatcctggtttcgtgctgctctgaagaccttgctcgtcttcgcatcttgattatagaagcacaaaactccgtattctaacgtcgaaattacgatgcggtgcagaaacgcgcgctggcaccgttcagacggagtgacatcccggcgtacccttcactcttaccaagccatcatgaggcattcgggcagcttcgctcgtaaatgcgttgccccactatggctgtggccatatcatcgagagaatagactttcgtctatattctgactggattgctacggctactggttcgatgaatgtgccactcgccgtagaaggatgtatccctccgtcctggccttataaagacggccaaggaagttgtttcattaactttgacgtattcttgtcttgcgtcccgatattgaggatccaacatcgtcttgacttggcgagatttcttttgcctccaaatcgagccatttaaccatggctgtgattcctgtcctcttgttt

SEQ ID NO: 3565 - DNA, 13068 bp, Muscodor strobelii
  misc_feature: SGI cDNA ID NO. 560850
  misc_feature: Encodes the peptide sequence at SEQ ID NO 3566
atggaggccgtggcatcgcccctcaccccgcaagacacgggccccaacggcctctcgccgaccacgctgagcgccgtcgatcccgccgtcatcgtcgagcacctggcctcggtcatcaccattgccctcggagccacccgagaagagctcgagagccccgacagcctgctttcgagctcacactactccgataccattcacagatgcagccgcttcgccaccgatgcccaagtcgttctgtacatacaaaaggacatcgtccagctcaacggtgtcagcgacaatgacacccccgtcgtggacaacgcccctatgtcctacacctacaccatcgcatccgagatatccagctccccgacgaccattgcctacctcgcgctcctcaaacgacctcaagcgatcgacccctcgcttcccctgacctcgcagatccagatccagaccctgcccggcaccgcttccctcgccagcctcgtcgccgagcagggcccttctgcctcgcccttcgagatcctccactccatcctccacaatgcgctggcgccctacttcgatgccaataccaagtcttctcagaccgccaacggtgttaggaaccgtgcagacgtcgatgcgaagacgggcatccccgtcaccaagaagcgcatgaccgagctcgagctcagcctgctccatctccagcagaatgtcgagatccccgagctctccctctccttccaccccgtcatccagtccgccctggaagacgccgcgtctaggggcacccggccttccaccgacatgatcccctccaacctgctgggcgacagcacatttatgaacaatctgcagtccaccgtcaacggctggatcaagtccatccaggccatcaccaagctgaccagagatcccgtcacgaggacggcaacacaggagatcaacttctggctgtccatggagtccgctctcgagggcatcgaggtccagctgagaagcgagggcgtcatgctgaccttggagatcttgaagaatgccaagcgcttccaggccaccgtcagcttcagttcagatacgggcttaaaggaggctatggagatggtgcagaagtacaaccagcttatgcgcgactttccgctcgacgagctgctctccgcgacttcacttcccaagatccaggatgccgtggctcagatctttaaccacatgaacaagaagatgagattcagcaactaccccatcgcgcgaactctgcacctcgtcgaagccatctcggcagacttggaggaagtcatgcaccgtcttctacccggctcagagctggtcgatctcgaatatagcgacttcaagggccttatgaccaccgctgatgagatattcaaatcgtgggacactcagatcaaagaattcacaaacatcgcccgagagacgacccgtcgccgtcaagaaagattcattcccatcaaagttagccctaagcatagcgagctacaagctcgtttgaagtatattgacaacttccgagacaaccacgagcagcttcaaaggaccattctcaacgtgctggggcccaaagcagcagccgatgggacgaacgaaggcaccacccccaacggcgttgctttagtggaagaaatgggagatgtagacgctgttgaagaagtgagacaagcatgggatgccttgaagaatgttgatttgctcgatgtctcacccgaggggacgcaacgatgggtcaaagctgagaacacatataacgaacgtacctcgagggttgaaaactccatcattgctaggttgcgagatcgtcttgccactgcgaaaaacgccaatgagatgtttcgcgttttctcccagttcaacgccctcttcgtccgacccaagattcgaggcgctatcgctgaatatcaaaatcaactcatcgacaatgtgaagcaggcgatcgcggcactccatgagcgcttcaaacagcaatacggccactcggaggcgcatgctatggcccagctccatgatctgcccccggtctccggcgcaattatatgggcgcgtcagatcgaacgtcagctcgacggatatatgaagaaagtcgaagatattctaggctccgactgggcgctccacaccgaaggccagaagctccaaacggaaagcgagctgtttagaaagaaactgaatacgcaagcgatctataaggcgtggatcgaagatgttcagcgcaaacagatatcaatttccggcagactcttcaacatcaacaaaatcagggctgctaataatgcgttagaactgtctgtcaattttgacgctcagatcatcgcactcttcaaagaaacccgaaatcttggatggcagaatttcaatgtcccccatgctgtgaataacgtcgcgaaggaggctaagagagtctacccctacgctgtaagcttgatggagagtgtgagaacatttggacagacaactcgacagatttccgagatgaacgatgtgtctattcttttgagtggctatcagggcgatgtccacaggctcgttgcgaaggggatccctctcaaatgggaaacctttatcaatacttgggaatcgtatcagaagccaacattactccctaacggcaccattgagcacaatacaggtcgcggagctgagagtaaacacgtcctatttgttcgcgagttcgccacagctgcttccctgcttcagtccaaagctgtcactctcgccaacatcaacgtcagcgttcagaaggctttagttgaattagccacttgcccataccaagcatctgaatttgagtctcggttgcaggccattcaggccgctgtcgatcagttgaatctcgagcaatacgtcaatttagggttctgggtcgaaagaatgaacgagcgcatcaaacttacgcttcttgcccgcctgcagcgtgcggtctctagttggatcgaggcattccaggatgatactccaatcaaacagatcgaagccaaccgacgaaagcagcttgtttcatcagccgaaccaccaaagtccgatgacccactgatgaagcctgtgattcatgaaatcacgatgcgaaatcaggtcatctatcttgatcctcctctcgaatacgcccgagccagctggtttttgcagttgcacgaatgggttggtatcgtctgtaatctacctaaaattaaggcatccaggtaccaaatgagcctgacactgagcaccgttgttcacgatgaacctcggtttaatggactaccgaaggactgcacagatatactaggcagagtttacactgccattgaaaagaaactgcagggcatcagtgaatatgtggacaaatggttgcaattccagtctctttgggatctgcagtcggagcaagtctatgatctgctcggcgacgagctccccaagtggcttcagctattacaagagattcgtaaatctcgctcgacatttgatacgtccgaggtgagccgcacattcggccacctcactattgactatggccaagtccaagacaaagtcaatgcaaagtatgatcaatggcagcatgaaatcctcatgaaattcgccggccgtcttggaggtcgtatgagagaagtccatgccgaaattgaacaagctcgtcgtgacctggaaggtcagaggctggaggccagttccactgctcaagctgtccaattcatcacccttgtgcagaattgcaagctgaaagttaaagcttgggcacctgaagtcgaaactttccgccagggccagtcaactctcgttcgacaacgatacaatcttcctagtgattgggttgatgtacagcgagtagactctcagtgggaagctcttaatgaaatactgacgaagaaagccaagatcgtccaggatcaaaccgatgcactcaaggctaagatttccgctgaagatcaggtcgtgatgaagaagattgctgatattggcgttgaatggaacgaagagaaacccgtttcgggcacaatcgcacctgatgccgcttctacgactctttcgtcctttgagtctcgtatcaccaggttacaggaagaattcgacatggtggcaaaggcaaaggacgcgctggatctaccaccaagttctgagtccactcttgcgatgattctcgaggaagttcatgatttcaaatctgtctgggccggtctgtccaccatctggaagagcttgaacgaactcaaagagatactttggaacagtgtccaaccccgcaagattcgcacttccattgatggtctcatcaaaatgaccaaggacatgccgagcaggatgcgacagtatgccgctttcgagcacatccagaacattctccggaggtatttgaaagccaacagtcttctcggtgatctcaaatcagaggctatcagagaaagacattggactaaaatttggaaggatctcaaacctggccgtcgctactcgcctgtgtctatgactcttggggatgtttgggatctggatttggttgcctctgaagttgtgatcaaagacgtcatcattcaagcgcagggtgaaatggccctcgaagagttcctgaagcaggtcaaagagatctggaataactaccaactcgatctgattgcctatcagaacaaatgccgtctcatccgtggttgggacgacttgttcgcgaaatgtagtgagaatctaaattctttgcaagcgatgaagggctcaccttattacaaagaattcgaagaggaagcatcatcttgggaagataaactcaaccgtgtccatgtcttatttgatgtgtggatcgacgtgcaacgccaatgggtgtacctggaaggtgtattcactggcaacgcagatatcaagcatttgctacctatcgaatcggggagatttcaaaacatcaacagcgagttcatgacagtaatgaagaaggtctacaagcagccaatggtaatggacgttttgagcatcgccggcgttcagaaatcgctagagcgtctcgctgacctcctaaacaaaattcaaaaagccttgggtgaatatcttgagaaagagcgtgtttcgttccctcgtttctactttgttggtgacgaagatcttctggaaatgatcggtaacagcaacgatacgcttcgtatcgccaaacatttcaagaagatgttcgctggtctgacaggactcgtcatggatgatgagtctatcatttccggattcacgtccaaggagggagaggtcgtccgtcttaagaaagaaatctcccttgccaaagtgcccaagatcaacgactggctggcactcctagagaatggcatgaaggctactcttgcggagttattggccgaggccgtcgagtcctacacgccaatctttgagtctgaaagcattgatcgagcagcgattgacgagttcatgacagcctatcctagtcagattgtagtgttagctactcaagttgtgtggacaacggccgtcgagtcatcccttgcccaaggcggcaagactcttcaatccttgttcgatcgcgaagttcaaatcctgagattgctcgctgagacggttctcggcgatctcgaggtgattcaacgcaagaattgcgaagccctcatcaccgagtgcgtccaccaacgtgatgccattgaaaaacttgtcaagttcaacgctacatcgcctacgcattacttctggctattacaaatgcgatatgtttatgtgccagagggcgacttcctacaacgcctccatatcaagatggccaatgccaaactcaattacggcttcgagtaccttggtgttccggaccggcttgtcaggaccccccttactgaccgctgtttcggcactcttacacagggcctccaacagagacttggtggttctccgtacggcccagctggaacgggaaaaaccgagtccgttaaggctctcggtgtccaacttggtcgctttacactcgtattctgttgtgacgatactttcgatttccaagctatgggccgtatcttcttgggtatttgtcaagtaggtgcttggggctgtttcgacgagttcaatcggttggaagagagaatcctttctgccgtgtcgcaacaaatccagaatattcaacttggcctcaaacaaggcgccgaagacgagaaatcccagatcgagttgattggtcgccagcttcgagtgaatgcaaacactggcatttttatcaccatgaacccaggctatgcgggacgatcgaatcttccagacaatttgaagaagttgttccgtagcgtcgccatgtccaagcccgacaaggaactcatcgccgaagttatgctttactcccagggatttaatcaagccaagcagctatcgaaacaaactgttcctttcttcgatcaatgttccgcaaggctgtctaagcaagcgcattacgatttcggacttcgtgcattgaagagtgtgctcgtgagctcaggtggtctcaaacgtgcccgccttatcgaaaatagtggcagtatcggcaccgaagaagtcgtcgaacccgaaatcatagtacaaagtatcagggaaactatcgcgcccaaattgattcgcaaggatgttgaaataatgactgacatcgaagccgaatgtttccctggtatccagtatgtacctgccaatctggttcaacttgaggaagctatcagacgtcgtgcatcagaggagcacctcgtcgtcaatgatacttggatgaccaaagtcctccagctgtatcaaattcagaagatccaccatggtgttatgatggtaggcagctctgggactggcaagtctgctgcctggagactcttgcttcacgctttgcaagaagttgagggggtggaaggtgtatcacatgtcatcgattccaaggtcatgtcgaaagaggcgctttatggcaatcttgactccacaacaagagaatggaccgatggtctcttcacaagcatattgcgtaagatcgtcgataatcttcgcggagaagattctaagcgacactggattgtctttgacggtgacgtcgacccggaatgggtcgaaaatttaaatagcgtgctggacgacaacaagttgctaacgctgcccaacggcgaacgtctcaatctaccgtcgaatgtacgcattatgttcgaagtcgagacgttgaaatacgccactctggctactgtcagtcgatgcggtatggtctggtatagtgaagatactgtgacaccaaacatgcttgtcacccattacctggacactctacgctcgaaggcgctagaggacttagatgaagacgctgctgcagcaggccagagtccagttaaaacactgcaaatccaaggccaagtttccgacctacttaatacctatctcaccacagatgatttcatcaatacagttctcaacgaagccgaggctttcaaccatatcatggagttcactgttgcccgtgttctaacgactttattttctctactgaacaagtctgtgagagacatgattgaatacaatgcctctcacgttgacttcccacttgatcctgaacaagtggaggcatacgtatctaagaagctattgctcgcgctggtctgggcattgactggtgactgccccctcaacgaccgcaaagtatttggcgataaaatcggagcaattgcaagtttcggttctcctcccttggacggaagcagttctctcatcgacttcgacgttacgcttcctcaagcggaatggacaccctggacaaaccaagttcccacaatcgaagtcaacacacattccatcactcaaacggacgtggtcattccgaccttagataccgtgcgtcacgaagacgttctctactcatggcttgctgagcacaagcctctgctactatgcggtcctcctggatcaggtaaaactatgaccttgttcagtgctcttcgtaaattaccgaacatggaaactgttggtctcaacttctccagtgccactaccccagatctcttgatcaagaccctcgagcagtactgcgagtacaagaaaactctgaatggagtgatgctttcccccacacagattgggcgatggcttgttatcttttgtgatgaaatcaatcttcctgctccggataaatatggcacccagcgagctatctcattcctccgacagatggttgagcataatggcttctggcgcacatctgataaagcatgggtgacactggatcgtattcagttcgtcggtgcttgcaatcctccgactgatgctggacgtacgcctatgggcgcacgattcttgcgccatgctccgcttatcatggtggattatcctggtgaactgtctctcatgcaaatttatggtaccttcaattcggcagtgctgaagatcattcctactctaagaggacacgccgaggcgcttacacaagccatggttcgcttctaccttgagtcacagaaacgcttcacgccaaagatacaaccgcactatgtatacagtcctcgtgaattgacacgatgggtccgtggtgtgtatgaagctattcgtccgctggagactctgactgtcgaggggttggtccgaatctgggcacatgaggctcttcgactcttccaagatcgcttggtcgctgaagaggaacgacaatggacagatgaagctgttcgtagaattgctggggagtatttcccatccatggacgaatcgaaagctctgggtggtcccatcttgttctccaactggctttccaagaattacgtcccagttgatagagagcaactccgagactttgtgaaggctcgactgaagaccttctgtgaggaagaagttgatgttcctctcattctcttcaatgatgttctggaacatgtcttgcgtatcgatcgggtcttccggcaacctcaagggcatcttatcttgattggtgtgagcggaagtggaaagactacgctgtcacgatttgttgcctggatgaatggtctcagggttttccagataaaagttcatggcaagtactctgcggaagacttcgatgacgatcttcgtgaggttctgcgtcgctgtggttgtaaaggtgagaagatttgcttcatcatggatgaatccaatgttcttgactcgggtttcttggagcgcatgaacactcttttggcgaacgccgaagtcccaggtcttttcgaaggtgatgacttcgccgcgctcatgactgcttgtagagaaggcgcccagcgacaaggattgctgctggactcgcaagaagagctgtataagtggtttacgcaacagattgtcaagaaccttcatgttgttttcacaatgaaccccccagaagacggcctctcatccaaggctgcaaccagtcctgccttgttcaatcgttgcgtcttgaactggtttggtgactggtctgatcaagcgctgttccaagtagcgaatgagctcacgtattccgttgacttggacaagccaaacttcgtggcacccgacagtattcctgttgcctatcgtgcccttgcccttccaccctcgcacagagaaaccatcgtcaattctatggtatacatccattattctctacaacgcttcaacaccaaactccagaagcagcagggtaaagtcacattcctgacccctcgccacttcttggatttcgtcgctcaatatgtcaaactttacaacgaaaagcgagaagatctcgaagagcagcagcgccatctgaacgttggtctagacaaactcaaagacacagtcgagaaagtccgagatctgcgagttagcctagcagagaagaaaacacagctagagaccaagaatgccgaagccaacgaaaagcttcagcgcatgatagctgatcagcgcgaggccgaacagcgaaaggccacatccctcataatccaaacggagctggagaagcaggaggcagaggtagcaagtcgaaaagaggttgtcttgaacgaccttgcgagggcagaaccagctgtcgaagaggcaagagctagtgttagtaacattaagcgccaacatttgacagaagttcgatctatggcttcccctcctcaaggtgtcaagcttgctatggagtcggtctgcaccctgctgggccacaagattgccgattggaagggcgtgcaagctgttgtgcgacgagatgacttcattgctagtattgtcaatttcgacaacgagaagcaaatgaccaaagccatgagaaccaaaatgcgaaacacttacctaaacagccctgattttacttacgaaaaagtcaatcgtgctagtaaggcttgtggaccattagttcaatgggttgaagcacaagtcaactattccgagatcctcgatcgggttggaccgttgcgagaggaggttgatcagctcgaagaagcggcacttcagacaaaagccgaagccaaagcggttgaaaacaccatctcgagtctggaagaaagcattgctacgtacaagactgaatatgccgcgctcatcagcgaaactgagaaaatcaaggcagagatgtctcgcgtcgagttcaaggttaaccgaagtgttcgattgctagacagtctttcttccgaaaggacccgttgggaagagggcagtaaatccttcgaaacccagatcaacacgctggtgggtgatgtactagtcgcagccgcgttcctcgcttatagcgggttgtacgaccagaccttccgaaagtcgatgatggaagattggctacatcaacttcatctttccggcgtgagcttcaaaccacacaatcctgtgacggagtacttatccacggcagaccaaagattgtcttggcaagagaatacactgcctgtggatgatctctgcaccgagaatgcaattatccttcaacgcttcaaccggtatccactcatcatcgatccttcgggccgcgtgactgagttcttacagcgagaatgcaaagatcgtcgtctgactgttactagtttcttggacgattcatttaccaagcaacttgagagttctcttcggttcggtaatccaattctgattcaagatgctgagcatctagatcctatcctgaaccatgtgctcaacaaggagtaccagaagactggcggtcgtgttctcattcaacttggcaaacaacagattgacttctcgcctactttcaaaatctacctatccacacgtgatccttcggctactttcccaccagacatctgcagtcgaacaacattcgtcaacttcacagtgacgcagagcagtctccagactcagtcccttaatgatgttctgaagtctgagagacctgacgttgatgagagaagatctaatctcatcaaacttcaaggcgaattcaaggtccatcttcggcagcttgagaagcgacttctgcaggccctcaatgactcacgtggaaacattcttgatgatgacaatgtcattgagacccttgagactctgaaaacagaagccggcgagatcacagctaaaatgagcaataccgaaggtgtcatggctgaagtggatgagatcacacaacagtacggcatcatcgcacgatcgtgcagtgcggtcttcgccgttcttgaacaacttcattatctcaatcacttctaccaattctctttgcagtatttcctggacatcttccactccgttctccatggtaacaagaaactcgcaaacgagactaatcacaatgttcgaagagatgtcatcatcaaggatctattcgtgacaacgttcaagagaacggcccttgggttgattcaaaaagatcgaatcacgctcgccatgttgcttgcccaagcgtcaccatacaagatggacaaggggctcatcgatgttatcctggatgaccgaatcgagggcaaagacctttctaccgacatcgatgatagggaagagacccttgtccgcgcaaagagactcaattcgctcaagggcaaacttgagcaggtaccatccaatgcctgggataagttcttctcagaagagtttgcagagaattccattcctcaaatctgggaagcagacagcgagccgttcgatcaaggactactctcacttcttctcgtcaaaattttccgtcttgatcgctttgttcctatggcagagcgctttgtcgcttcggtcttcgggcccgaaatgttcgatattgtcgatgacttgcaaggcactgtgaagcaagtaccaccaacgcgacctatctcgcttgtatcgagtccgggttttgacgccagctacaaggtcgacaatttagttgagcgtatgcatacaaagtgtaccaacatagctatgggatccaacgagagtctcgccagtgctgacaaagccatcagcaacgcagcgcaggttggaaactgggtgcttatcaagaacgttcatcttgcacccacctggctgcagtctcttgagaagcgtatggagtctctcaaccctagctccgacttcagattgttcctatctatggagtccagtcctaagattccagtcaatcttctccgcgcttctcgcgtgctcatgtacgagcagcccgctggtgtgagagctaacatgaaggactcgatgtcgtcacttgtaacacgggctgcaaagagccctgttgagcgcacgaggatgtacctgcttctttcgttcttacacgccgtggtccaagagcgtcttcggtacgcaccaaacttgggatggaagggtttctgggagttcaacgacagcgattatgaatgctcagcctttatcatcgacacatgggttgacactgtggcccaaaacagatcaaacatcgcgccacaaaacataccctgggacatgatctgttaccttgtccgcgagacgtatggtggcaagatcgatgacgaaggggatttcgcacagcttacagagctagtgtatagaatcctaaccccgaaggcatatgacatcgggcataagctcgtcgaaggaattggcgaggatggagaggatggcgccttgctagtgccaactggtacgaatcatagccagttcatggattgggtcaataagctacctgaacgagagccgccgacgtatctggggcttcctgctaatgcggagaagttgctcctggtgggcttgggaaggagcttatgtggcaatttgaagaaggttgttgagcttcttgatgaaggggagtcacttgtcacggagtcttag

SEQ ID NO: 3566 - protein, 4355 aa, Muscodor strobelii
  misc_feature: SGI Peptide ID NO. 560850
  misc_feature (2235)..(2383): Pfam Id: PF07728 Pfam Desc: ATPase family associated with various cellular activities (AAA)
  misc_feature (2600)..(2749): Pfam Id: PF07728 Pfam Desc: ATPase family associated with various cellular activities (AAA)
  misc_feature (269)..(854): Pfam Id: PF08385 Pfam Desc: Dynein heavy chain, N-terminal region 1
  misc_feature (1361)..(1770): Pfam Id: PF08393 Pfam Desc: Dynein heavy chain, N-terminal region 2
  misc_feature (3914)..(4354): Pfam Id: PF03028 Pfam Desc: Dynein heavy chain
  misc_feature (3941)..(4327): Pfam Id: PF03028 Pfam Desc: Dynein heavy chain
  misc_feature (16)..(4355): NCBI GI: 85108662 Blast Desc: dynein heavy chain [Neurospora crassa OR74A] gi|1169441|sp|P45443.1|DYHC_NEUCR RecName: Full=Dynein heavy chain, cytoplasmic; AltName: Full=Dynein heavy chain, cytosolic;
  misc_feature (1)..(4352): NCBI GI: 171683379 Blast Desc: protein product [Podospora anserina] gi|170941649|emb|CAP67303.1| protein product [Podospora anserina]
  misc_feature (1)..(4354): NCBI GI: 256727033 Blast Desc: [Nectria haematococca mpVI 77-13-4]
  misc_feature (4)..(4354): NCBI GI: 46136183 Blast Desc: DYHC_FUSSO Dynein heavy chain, cytosolic (DYHC) [Gibberella zeae PH-1]
  misc_feature (1)..(4354): NCBI GI: 2494204 Blast Desc: DYHC_FUSSO RecName: Full=Dynein heavy chain, cytoplasmic; AltName: Full=Dynein heavy chain, cytosolic; Short=DYHC gi|1814018|gb|AAC33176.1| cytoplasmic dynein heavy
  misc_feature (30)..(4355): NCBI GI: 154303617 Blast Desc: BC1G_08693 [Botryotinia fuckeliana B05.10] gi|150854487|gb|EDN29679.1| BC1G_08693 [Botryotinia fuckeliana B05.10]
  misc_feature (171)..(4355): NCBI GI: 156049559 Blast Desc: SS1G_08486 [Sclerotinia sclerotiorum 1980] gi|154692885|gb|EDN92623.1| SS1G_08486 [Sclerotinia sclerotiorum 1980]
  misc_feature (1)..(4355): NCBI GI: 145613654 Blast Desc: MGG_11205 [Magnaporthe grisea 70-15] gi|145020704|gb|EDK04833.1| MGG_11205 [Magnaporthe grisea 70-15]
  misc_feature (4)..(4355): NCBI GI: 242763909 Blast Desc: dynein heavy chain [Talaromyces stipitatus ATCC 10500] gi|218723864|gb|EED23281.1| dynein heavy chain [Talaromyces stipitatus ATCC 10500]
  misc_feature (4)..(4355): NCBI GI: 212529274 Blast Desc: dynein heavy chain [Penicillium marneffei ATCC 18224] gi|210074192|gb|EEA28279.1| dynein heavy chain [Penicillium marneffei ATCC 18224]
MEAVASPLTPQDTGPNGLSPTTLSAVDPAVIVEHLASVITIALGATREELESPDSLLSSSHYSDTIHRCSRFATDAQVVLYIQKDIVQLNGVSDNDTPVVDNAPMSYTYTIASEISSSPTTIAYLALLKRPQAIDPSLPLTSQIQIQTLPGTASLASLVAEQGPSASPFEILHSILHNALAPYFDANTKSSQTANGVRNRADVDAKTGIPVTKKRMTELELSLLHLQQNVEIPELSLSFHPVIQSALEDAASRGTRPSTDMIPSNLLGDSTFMNNLQSTVNGWIKSIQAITKLTRDPVTRTATQEINFWLSMESALEGIEVQLRSEGVMLTLEILKNAKRFQATVSFSSDTGLKEAMEMVQKYNQLMRDFPLDELLSATSLPKIQDAVAQIFNHMNKKMRFSNYPIARTLHLVEAISADLEEVMHRLLPGSELVDLEYSDFKGLMTTADEIFKSWDTQIKEFTNIARETTRRRQERFIPIKVSPKHSELQARLKYIDNFRDNHEQLQRTILNVLGPKAAADGTNEGTTPNGVALVEEMGDVDAVEEVRQAWDALKNVDLLDVSPEGTQRWVKAENTYNERTSRVENSIIARLRDRLATAKNANEMFRVFSQFNALFVRPKIRGAIAEYQNQLIDNVKQAIAALHERFKQQYGHSEAHAMAQLHDLPPVSGAIIWARQIERQLDGYMKKVEDILGSDWALHTEGQKLQTESELFRKKLNTQAIYKAWIEDVQRKQISISGRLFNINKIRAANNALELSVNFDAQIIALFKETRNLGWQNFNVPHAVNNVAKEAKRVYPYAVSLMESVRTFGQTTRQISEMNDVSILLSGYQGDVHRLVAKGIPLKWETFINTWESYQKPTLLPNGTIEHNTGRGAESKHVLFVREFATAASLLQSKAVTLANINVSVQKALVELATCPYQASEFESRLQAIQAAVDQLNLEQYVNLGFWVERMNERIKLTLLARLQRAVSSWIEAFQDDTPIKQIEANRRKQLVSSAEPPKSDDPLMKPVIHEITMRNQVIYLDPPLEYARASWFLQLHEWVGIVCNLPKIKASRYQMSLTLSTVVHDEPRFNGLPKDCTDILGRVYTAIEKKLQGISEYVDKWLQFQSLWDLQSEQVYDLLGDELPKWLQLLQEIRKSRSTFDTSEVSRTFGHLTIDYGQVQDKVNAKYDQWQHEILMKFAGRLGGRMREVHAEIEQARRDLEGQRLEASSTAQAVQFITLVQNCKLKVKAWAPEVETFRQGQSTLVRQRYNLPSDWVDVQRVDSQWEALNEILTKKAKIVQDQTDALKAKISAEDQVVMKKIADIGVEWNEEKPVSGTIAPDAASTTLSSFESRITRLQEEFDMVAKAKDALDLPPSSESTLAMILEEVHDFKSVWAGLSTIWKSLNELKEILWNSVQPRKIRTSIDGLIKMTKDMPSRMRQYAAFEHIQNILRRYLKANSLLGDLKSEAIRERHWTKIWKDLKPGRRYSPVSMTLGDVWDLDLVASEVVIKDVIIQAQGEMALEEFLKQVKEIWNNYQLDLIAYQNKCRLIRGWDDLFAKCSENLNSLQAMKGSPYYKEFEEEASSWEDKLNRVHVLFDVWIDVQRQWVYLEGVFTGNADIKHLLPIESGRFQNINSEFMTVMKKVYKQPMVMDVLSIAGVQKSLERLADLLNKIQKALGEYLEKERVSFPRFYFVGDEDLLEMIGNSNDTLRIAKHFKKMFAGLTGLVMDDESIISGFTSKEGEVVRLKKEISLAKVPKINDWLALLENGMKATLAELLAEAVESYTPIFESESIDRAAIDEFMTAYPSQIVVLATQVVWTTAVESSLAQGGKTLQSLFDREVQILRLLAETVLGDLEVIQRKNCEALITECVHQRDAIEKLVKFNATSPTHYFWLLQMRYVYVPEGDFLQRLHIKMANAKLNYGFEYLGVPDRLVRTPLTDRCFGTLTQGLQQRLGGSPYGPAGTGKTESVKALGVQLGRFTLVFCCDDTFDFQAMGRIFLGICQVGAWGCFDEFNRLEERILSAVSQQIQNIQLGLKQGAEDEKSQIELIGRQLRVNANTGIFITMNPGYAGRSNLPDNLKKLFRSVAMSKPDKELIAEVMLYSQGFNQAKQLSKQTVPFFDQCSARLSKQAHYDFGLRALKSVLVSSGGLKRARLIENSGSIGTEEVVEPEIIVQSIRETIAPKLIRKDVEIMTDIEAECFPGIQYVPANLVQLEEAIRRRASEEHLVVNDTWMTKVLQLYQIQKIHHGVMMVGSSGTGKSAAWRLLLHALQEVEGVEGVSHVIDSKVMSKEALYGNLDSTTREWTDGLFTSILRKIVDNLRGEDSKRHWIVFDGDVDPEWVENLNSVLDDNKLLTLPNGERLNLPSNVRIMFEVETLKYATLATVSRCGMVWYSEDTVTPNMLVTHYLDTLRSKALEDLDEDAAAAGQSPVKTLQIQGQVSDLLNTYLTTDDFINTVLNEAEAFNHIMEFTVARVLTTLFSLLNKSVRDMIEYNASHVDFPLDPEQVEAYVSKKLLLALVWALTGDCPLNDRKVFGDKIGAIASFGSPPLDGSSSLIDFDVTLPQAEWTPWTNQVPTIEVNTHSITQTDVVIPTLDTVRHEDVLYSWLAEHKPLLLCGPPGSGKTMTLFSALRKLPNMETVGLNFSSATTPDLLIKTLEQYCEYKKTLNGVMLSPTQIGRWLVIFCDEINLPAPDKYGTQRAISFLRQMVEHNGFWRTSDKAWVTLDRIQFVGACNPPTDAGRTPMGARFLRHAPLIMVDYPGELSLMQIYGTFNSAVLKIIPTLRGHAEALTQAMVRFYLESQKRFTPKIQPHYVYSPRELTRWVRGVYEAIRPLETLTVEGLVRIWAHEALRLFQDRLVAEEERQWTDEAVRRIAGEYFPSMDESKALGGPILFSNWLSKNYVPVDREQLRDFVKARLKTFCEEEVDVPLILFNDVLEHVLRIDRVFRQPQGHLILIGVSGSGKTTLSRFVAWMNGLRVFQIKVHGKYSAEDFDDDLREVLRRCGCKGEKICFIMDESNVLDSGFLERMNTLLANAEVPGLFEGDDFAALMTACREGAQRQGLLLDSQEELYKWFTQQIVKNLHVVFTMNPPEDGLSSKAATSPALFNRCVLNWFGDWSDQALFQVANELTYSVDLDKPNFVAPDSIPVAYRALALPPSHRETIVNSMVYIHYSLQRFNTKLQKQQGKVTFLTPRHFLDFVAQYVKLYNEKREDLEEQQRHLNVGLDKLKDTVEKVRDLRVSLAEKKTQLETKNAEANEKLQRMIADQREAEQRKATSLIIQTELEKQEAEVASRKEVVLNDLARAEPAVEEARASVSNIKRQHLTEVRSMASPPQGVKLAMESVCTLLGHKIADWKGVQAVVRRDDFIASIVNFDNEKQMTKAMRTKMRNTYLNSPDFTYEKVNRASKACGPLVQWVEAQVNYSEILDRVGPLREEVDQLEEAALQTKAEAKAVENTISSLEESIATYKTEYAALISETEKIKAEMSRVEFKVNRSVRLLDSLSSERTRWEEGSKSFETQINTLVGDVLVAAAFLAYSGLYDQTFRKSMMEDWLHQLHLSGVSFKPHNPVTEYLSTADQRLSWQENTLPVDDLCTENAIILQRFNRYPLIIDPSGRVTEFLQRECKDRRLTVTSFLDDSFTKQLESSLRFGNPILIQDAEHLDPILNHVLNKEYQKTGGRVLIQLGKQQIDFSPTFKIYLSTRDPSATFPPDICSRTTFVNFTVTQSSLQTQSLNDVLKSERPDVDERRSNLIKLQGEFKVHLRQLEKRLLQALNDSRGNILDDDNVIETLETLKTEAGEITAKMSNTEGVMAEVDEITQQYGIIARSCSAVFAVLEQLHYLNHFYQFSLQYFLDIFHSVLHGNKKLANETNHNVRRDVIIKDLFVTTFKRTALGLIQKDRITLAMLLAQASPYKMDKGLIDVILDDRIEGKDLSTDIDDREETLVRAKRLNSLKGKLEQVPSNAWDKFFSEEFAENSIPQIWEADSEPFDQGLLSLLLVKIFRLDRFVPMAERFVASVFGPEMFDIVDDLQGTVKQVPPTRPISLVSSPGFDASYKVDNLVERMHTKCTNIAMGSNESLASADKAISNAAQVGNWVLIKNVHLAPTWLQSLEKRMESLNPSSDFRLFLSMESSPKIPVNLLRASRVLMYEQPAGVRANMKDSMSSLVTRAAKSPVERTRMYLLLSFLHAVVQERLRYAPNLGWKGFWEFNDSDYECSAFIIDTWVDTVAQNRSNIAPQNIPWDMICYLVRETYGGKIDDEGDFAQLTELVYRILTPKAYDIGHKLVEGIGEDGEDGALLVPTGTNHSQFMDWVNKLPEREPPTYLGLPANAEKLLLVGLGRSLCGNLKKVVELLDEGESLVTES

SEQ ID NO: 3567 - DNA, 14019 bp, Muscodor strobelii
  misc_feature: SGI EST ID NO. CUFF.8973.0
  misc_feature: Variant of the nucleotide sequence at SEQ ID NO 3565
gggaaggatgccaatgaggaggagacacgggacgcttgagccccacctcgaagaaacatggctcacccttgtcaggtcgcgactgcgggtgcatgtgtcatgttgcagctgggcggtcgcgttaaaacattattatttgatattggcggccgaggtgactcgtaatatcccatatcccatatcctgttatcgacgtagagctgtagaaactgacgacaaacgccggccgctgtacctaacagaccgccatacactcctttcttctttgttctgctgcctgcattaccataccatctatctaatcggtctgctcagtctttcggcgtcttgtgcattggtgcatctgtttctcgtgataccccctagcccctgtgacggtccgcaacctccagacttccgaaccggcatatcgcgacatctcgagcgatgcggccgggcctgtaaataaccacaacgccttcaccaccacattgcacctctcgccacgatggaggccgtggcatcgcccctcaccccgcaagacacgggccccaacggcctctcgccgaccacgctgagcgccgtcgatcccgccgtcatcgtcgagcacctggcctcggtcatcaccattgccctcggagccacccgagaagagctcgagagccccgacagcctgctttcgagctcacactactccgataccattcacagatgcagccgcttcgccaccgatgcccaagtcgttctgtacatacaaaaggacatcgtccagctcaacggtgtcagcgacaatgacacccccgtcgtggacaacgcccctatgtcctacacctacaccatcgcatccgagatatccagctccccgacgaccattgcctacctcgcgctcctcaaacgacctcaagcgatcgacccctcgcttcccctgacctcgcagatccagatccagaccctgcccggcaccgcttccctcgccagcctcgtcgccgagcagggcccttctgcctcgcccttcgagatcctccactccatcctccacaatgcgctggcgccctacttcgatgccaataccaagtcttctcagaccgccaacggtgttaggaaccgtgcagacgtcgatgcgaagacgggcatccccgtcaccaagaagcgcatgaccgagctcgagctcagcctgctccatctccagcagaatgtcgagatccccgagctctccctctccttccaccccgtcatccagtccgccctggaagacgccgcgtctaggggcacccggccttccaccgacatgatcccctccaacctgctgggcgacagcacatttatgaacaatctgcagtccaccgtcaacggctggatcaagtccatccaggccatcaccaagctgaccagagatcccgtcacgaggacggcaacacaggagatcaacttctggctgtccatggagtccgctctcgagggcatcgaggtccagctgagaagcgagggcgtcatgctgaccttggagatcttgaagaatgccaagcgcttccaggccaccgtcagcttcagttcagatacgggcttaaaggaggctatggagatggtgcagaagtacaaccagcttatgcgcgactttccgctcgacgagctgctctccgcgacttcacttcccaagatccaggatgccgtggctcagatctttaaccacatgaacaagaagatgagattcagcaactaccccatcgcgcgaactctgcacctcgtcgaagccatctcggcagacttggaggaagtcatgcaccgtcttctacccggctcagagctggtcgatctcgaatatagcgacttcaagggccttatgaccaccgctgatgagatattcaaatcgtgggacactcagatcaaagaattcacaaacatcgcccgagagacgacccgtcgccgtcaagaaagattcattcccatcaaagttagccctaagcatagcgagctacaagctcgtttgaagtatattgacaacttccgagacaaccacgagcagcttcaaaggaccattctcaacgtgctggggcccaaagcagcagccgatgggacgaacgaaggcaccacccccaacggcgttgctttagtggaagaaatgggagatgtagacgctgttgaagaagtgagacaagcatgggatgccttgaagaatgttgatttgctcgatgtctcacccgaggggacgcaacgatgggtcaaagctgagaacacatataacgaacgtacctcgagggttgaaaactccatcattgctaggttgcgagatcgtcttgccactgcgaaaaacgccaatgagatgtttcgcgttttctcccagttcaacgccctcttcgtccgacccaagattcgaggcgctatcgctgaatatcaaaatcaactcatcgacaatgtgaagcaggcgatcgcggcactccatgagcgcttcaaacagcaatacggccactcggaggcgcatgctatggcccagctccatgatctgcccccggtctccggcgcaattatatgggcgcgtcagatcgaacgtcagctcgacggatatatgaagaaagtcgaagatattctaggctccgactgggcgctccacaccgaaggccagaagctccaaacggaaagcgagctgtttagaaagaaactgaatacgcaagcgatctataaggcgtggatcgaagatgttcagcgcaaacagatatcaatttccggcagactcttcaacatcaacaaaatcagggctgctaataatgcgttagaactgtctgtcaattttgacgctcagatcatcgcactcttcaaagaaacccgaaatcttggatggcagaatttcaatgtcccccatgctgtgaataacgtcgcgaaggaggctaagagagtctacccctacgctgtaagcttgatggagagtgtgagaacatttggacagacaactcgacagatttccgagatgaacgatgtgtctattcttttgagtggctatcagggcgatgtccacaggctcgttgcgaaggggatccctctcaaatgggaaacctttatcaatacttgggaatcgtatcagaagccaacattactccctaacggcaccattgagcacaatacaggtcgcggagctgagagtaaacacgtcctatttgttcgcgagttcgccacagctgcttccctgcttcagtccaaagctgtcactctcgccaacatcaacgtcagcgttcagaaggctttagttgaattagccacttgcccataccaagcatctgaatttgagtctcggttgcaggccattcaggccgctgtcgatcagttgaatctcgagcaatacgtcaatttagggttctgggtcgaaagaatgaacgagcgcatcaaacttacgcttcttgcccgcctgcagcgtgcggtctctagttggatcgaggcattccaggatgatactccaatcaaacagatcgaagccaaccgacgaaagcagcttgtttcatcagccgaaccaccaaagtccgatgacccactgatgaagcctgtgattcatgaaatcacgatgcgaaatcaggtcatctatcttgatcctcctctcgaatacgcccgagccagctggtttttgcagttgcacgaatgggttggtatcgtctgtaatctacctaaaattaaggcatccaggtaccaaatgagcctgacactgagcaccgttgttcacgatgaacctcggtttaatggactaccgaaggactgcacagatatactaggcagagtttacactgccattgaaaagaaactgcagggcatcagtgaatatgtggacaaatggttgcaattccagtctctttgggatctgcagtcggagcaagtctatgatctgctcggcgacgagctccccaagtggcttcagctattacaagagattcgtaaatctcgctcgacatttgatacgtccgaggtgagccgcacattcggccacctcactattgactatggccaagtccaagacaaagtcaatgcaaagtatgatcaatggcagcatgaaatcctcatgaaattcgccggccgtcttggaggtcgtatgagagaagtccatgccgaaattgaacaagctcgtcgtgacctggaaggtcagaggctggaggccagttccactgctcaagctgtccaattcatcacccttgtgcagaattgcaagctgaaagttaaagcttgggcacctgaagtcgaaactttccgccagggccagtcaactctcgttcgacaacgatacaatcttcctagtgattgggttgatgtacagcgagtagactctcagtgggaagctcttaatgaaatactgacgaagaaagccaagatcgtccaggatcaaaccgatgcactcaaggctaagatttccgctgaagatcaggtcgtgatgaagaagattgctgatattggcgttgaatggaacgaagagaaacccgtttcgggcacaatcgcacctgatgccgcttctacgactctttcgtcctttgagtctcgtatcaccaggttacaggaagaattcgacatggtggcaaaggcaaaggacgcgctggatctaccaccaagttctgagtccactcttgcgatgattctcgaggaagttcatgatttcaaatctgtctgggccggtctgtccaccatctggaagagcttgaacgaactcaaagagatactttggaacagtgtccaaccccgcaagattcgcacttccattgatggtctcatcaaaatgaccaaggacatgccgagcaggatgcgacagtatgccgctttcgagcacatccagaacattctccggaggtatttgaaagccaacagtcttctcggtgatctcaaatcagaggctatcagagaaagacattggactaaaatttggaaggatctcaaacctggccgtcgctactcgcctgtgtctatgactcttggggatgtttgggatctggatttggttgcctctgaagttgtgatcaaagacgtcatcattcaagcgcagggtgaaatggccctcgaagagttcctgaagcaggtcaaagagatctggaataactaccaactcgatctgattgcctatcagaacaaatgccgtctcatccgtggttgggacgacttgttcgcgaaatgtagtgagaatctaaattctttgcaagcgatgaagggctcaccttattacaaagaattcgaagaggaagcatcatcttgggaagataaactcaaccgtgtccatgtcttatttgatgtgtggatcgacgtgcaacgccaatgggtgtacctggaaggtgtattcactggcaacgcagatatcaagcatttgctacctatcgaatcggggagatttcaaaacatcaacagcgagttcatgacagtaatgaagaaggtctacaagcagccaatggtaatggacgttttgagcatcgccggcgttcagaaatcgctagagcgtctcgctgacctcctaaacaaaattcaaaaagccttgggtgaatatcttgagaaagagcgtgtttcgttccctcgtttctactttgttggtgacgaagatcttctggaaatgatcggtaacagcaacgatacgcttcgtatcgccaaacatttcaagaagatgttcgctggtctgacaggactcgtcatggatgatgagtctatcatttccggattcacgtccaaggagggagaggtcgtccgtcttaagaaagaaatctcccttgccaaagtgcccaagatcaacgactggctggcactcctagagaatggcatgaaggctactcttgcggagttattggccgaggccgtcgagtcctacacgccaatctttgagtctgaaagcattgatcgagcagcgattgacgagttcatgacagcctatcctagtcagattgtagtgttagctactcaagttgtgtggacaacggccgtcgagtcatcccttgcccaaggcggcaagactcttcaatccttgttcgatcgcgaagttcaaatcctgagattgctcgctgagacggttctcggcgatctcgaggtgattcaacgcaagaattgcgaagccctcatcaccgagtgcgtccaccaacgtgatgccattgaaaaacttgtcaagttcaacgctacatcgcctacgcattacttctggctattacaaatgcgatatgtttatgtgccagagggcgacttcctacaacgcctccatatcaagatggccaatgccaaactcaattacggcttcgagtaccttggtgttccggaccggcttgtcaggaccccccttactgaccgctgtttcggcactcttacacagggcctccaacagagacttggtggttctccgtacggcccagctggaacgggaaaaaccgagtccgttaaggctctcggtgtccaacttggtcgctttacactcgtattctgttgtgacgatactttcgatttccaagctatgggccgtatcttcttgggtatttgtcaagtaggtgcttggggctgtttcgacgagttcaatcggttggaagagagaatcctttctgccgtgtcgcaacaaatccagaatattcaacttggcctcaaacaaggcgccgaagacgagaaatcccagatcgagttgattggtcgccagcttcgagtgaatgcaaacactggcatttttatcaccatgaacccaggctatgcgggacgatcgaatcttccagacaatttgaagaagttgttccgtagcgtcgccatgtccaagcccgacaaggaactcatcgccgaagttatgctttactcccagggatttaatcaagccaagcagctatcgaaacaaactgttcctttcttcgatcaatgttccgcaaggctgtctaagcaagcgcattacgatttcggacttcgtgcattgaagagtgtgctcgtgagctcaggtggtctcaaacgtgcccgccttatcgaaaatagtggcagtatcggcaccgaagaagtcgtcgaacccgaaatcatagtacaaagtatcagggaaactatcgcgcccaaattgattcgcaaggatgttgaaataatgactgacatcgaagccgaatgtttccctggtatccagtatgtacctgccaatctggttcaacttgaggaagctatcagacgtcgtgcatcagaggagcacctcgtcgtcaatgatacttggatgaccaaagtcctccagctgtatcaaattcagaagatccaccatggtgttatgatggtaggcagctctgggactggcaagtctgctgcctggagactcttgcttcacgctttgcaagaagttgagggggtggaaggtgtatcacatgtcatcgattccaaggtcatgtcgaaagaggcgctttatggcaatcttgactccacaacaagagaatggaccgatggtctcttcacaagcatattgcgtaagatcgtcgataatcttcgcggagaagattctaagcgacactggattgtctttgacggtgacgtcgacccggaatgggtcgaaaatttaaatagcgtgctggacgacaacaagttgctaacgctgcccaacggcgaacgtctcaatctaccgtcgaatgtacgcattatgttcgaagtcgagacgttgaaatacgccactctggctactgtcagtcgatgcggtatggtctggtatagtgaagatactgtgacaccaaacatgcttgtcacccattacctggacactctacgctcgaaggcgctagaggacttagatgaagacgctgctgcagcaggccagagtccagttaaaacactgcaaatccaaggccaagtttccgacctacttaatacctatctcaccacagatgatttcatcaatacagttctcaacgaagccgaggctttcaaccatatcatggagttcactgttgcccgtgttctaacgactttattttctctactgaacaagtctgtgagagacatgattgaatacaatgcctctcacgttgacttcccacttgatcctgaacaagtggaggcatacgtatctaagaagctattgctcgcgctggtctgggcattgactggtgactgccccctcaacgaccgcaaagtatttggcgataaaatcggagcaattgcaagtttcggttctcctcccttggacggaagcagttctctcatcgacttcgacgttacgcttcctcaagcggaatggacaccctggacaaaccaagttcccacaatcgaagtcaacacacattccatcactcaaacggacgtggtcattccgaccttagataccgtgcgtcacgaagacgttctctactcatggcttgctgagcacaagcctctgctactatgcggtcctcctggatcaggtaaaactatgaccttgttcagtgctcttcgtaaattaccgaacatggaaactgttggtctcaacttctccagtgccactaccccagatctcttgatcaagaccctcgagcagtactgcgagtacaagaaaactctgaatggagtgatgctttcccccacacagattgggcgatggcttgttatcttttgtgatgaaatcaatcttcctgctccggataaatatggcacccagcgagctatctcattcctccgacagatggttgagcataatggcttctggcgcacatctgataaagcatgggtgacactggatcgtattcagttcgtcggtgcttgcaatcctccgactgatgctggacgtacgcctatgggcgcacgattcttgcgccatgctccgcttatcatggtggattatcctggtgaactgtctctcatgcaaatttatggtaccttcaattcggcagtgctgaagatcattcctactctaagaggacacgccgaggcgcttacacaagccatggttcgcttctaccttgagtcacagaaacgcttcacgccaaagatacaaccgcactatgtatacagtcctcgtgaattgacacgatgggtccgtggtgtgtatgaagctattcgtccgctggagactctgactgtcgaggggttggtccgaatctgggcacatgaggctcttcgactcttccaagatcgcttggtcgctgaagaggaacgacaatggacagatgaagctgttcgtagaattgctggggagtatttcccatccatggacgaatcgaaagctctgggtggtcccatcttgttctccaactggctttccaagaattacgtcccagttgatagagagcaactccgagactttgtgaaggctcgactgaagaccttctgtgaggaagaagttgatgttcctctcattctcttcaatgatgttctggaacatgtcttgcgtatcgatcgggtcttccggcaacctcaagggcatcttatcttgattggtgtgagcggaagtggaaagactacgctgtcacgatttgttgcctggatgaatggtctcagggttttccagataaaagttcatggcaagtactctgcggaagacttcgatgacgatcttcgtgaggttctgcgtcgctgtggttgtaaaggtgagaagatttgcttcatcatggatgaatccaatgttcttgactcgggtttcttggagcgcatgaacactcttttggcgaacgccgaagtcccaggtcttttcgaaggtgatgacttcgccgcgctcatgactgcttgtagagaaggcgcccagcgacaaggattgctgctggactcgcaagaagagctgtataagtggtttacgcaacagattgtcaagaaccttcatgttgttttcacaatgaaccccccagaagacggcctctcatccaaggctgcaaccagtcctgccttgttcaatcgttgcgtcttgaactggtttggtgactggtctgatcaagcgctgttccaagtagcgaatgagctcacgtattccgttgacttggacaagccaaacttcgtggcacccgacagtattcctgttgcctatcgtgcccttgcccttccaccctcgcacagagaaaccatcgtcaattctatggtatacatccattattctctacaacgcttcaacaccaaactccagaagcagcagggtaaagtcacattcctgacccctcgccacttcttggatttcgtcgctcaatatgtcaaactttacaacgaaaagcgagaagatctcgaagagcagcagcgccatctgaacgttggtctagacaaactcaaagacacagtcgagaaagtccgagatctgcgagttagcctagcagagaagaaaacacagctagagaccaagaatgccgaagccaacgaaaagcttcagcgcatgatagctgatcagcgcgaggccgaacagcgaaaggccacatccctcataatccaaacggagctggagaagcaggaggcagaggtagcaagtcgaaaagaggttgtcttgaacgaccttgcgagggcagaaccagctgtcgaagaggcaagagctagtgttagtaacattaagcgccaacatttgacagaagttcgatctatggcttcccctcctcaaggtgtcaagcttgctatggagtcggtctgcaccctgctgggccacaagattgccgattggaagggcgtgcaagctgttgtgcgacgagatgacttcattgctagtattgtcaatttcgacaacgagaagcaaatgaccaaagccatgagaaccaaaatgcgaaacacttacctaaacagccctgattttacttacgaaaaagtcaatcgtgctagtaaggcttgtggaccattagttcaatgggttgaagcacaagtcaactattccgagatcctcgatcgggttggaccgttgcgagaggaggttgatcagctcgaagaagcggcacttcagacaaaagccgaagccaaagcggttgaaaacaccatctcgagtctggaagaaagcattgctacgtacaagactgaatatgccgcgctcatcagcgaaactgagaaaatcaaggcagagatgtctcgcgtcgagttcaaggttaaccgaagtgttcgattgctagacagtctttcttccgaaaggacccgttgggaagagggcagtaaatccttcgaaacccagatcaacacgctggtgggtgatgtactagtcgcagccgcgttcctcgcttatagcgggttgtacgaccagaccttccgaaagtcgatgatggaagattggctacatcaacttcatctttccggcgtgagcttcaaaccacacaatcctgtgacggagtacttatccacggcagaccaaagattgtcttggcaagagaatacactgcctgtggatgatctctgcaccgagaatgcaattatccttcaacgcttcaaccggtatccactcatcatcgatccttcgggccgcgtgactgagttcttacagcgagaatgcaaagatcgtcgtctgactgttactagtttcttggacgattcatttaccaagcaacttgagagttctcttcggttcggtaatccaattctgattcaagatgctgagcatctagatcctatcctgaaccatgtgctcaacaaggagtaccagaagactggcggtcgtgttctcattcaacttggcaaacaacagattgacttctcgcctactttcaaaatctacctatccacacgtgatccttcggctactttcccaccagacatctgcagtcgaacaacattcgtcaacttcacagtgacgcagagcagtctccagactcagtcccttaatgatgttctgaagtctgagagacctgacgttgatgagagaagatctaatctcatcaaacttcaaggcgaattcaaggtccatcttcggcagcttgagaagcgacttctgcaggccctcaatgactcacgtggaaacattcttgatgatgacaatgtcattgagacccttgagactctgaaaacagaagccggcgagatcacagctaaaatgagcaataccgaaggtgtcatggctgaagtggatgagatcacacaacagtacggcatcatcgcacgatcgtgcagtgcggtcttcgccgttcttgaacaacttcattatctcaatcacttctaccaattctctttgcagtatttcctggacatcttccactccgttctccatggtaacaagaaactcgcaaacgagactaatcacaatgttcgaagagatgtcatcatcaaggatctattcgtgacaacgttcaagagaacggcccttgggttgattcaaaaagatcgaatcacgctcgccatgttgcttgcccaagcgtcaccatacaagatggacaaggggctcatcgatgttatcctggatgaccgaatcgagggcaaagacctttctaccgacatcgatgatagggaagagacccttgtccgcgcaaagagactcaattcgctcaagggcaaacttgagcaggtaccatccaatgcctgggataagttcttctcagaagagtttgcagagaattccattcctcaaatctgggaagcagacagcgagccgttcgatcaaggactactctcacttcttctcgtcaaaattttccgtcttgatcgctttgttcctatggcagagcgctttgtcgcttcggtcttcgggcccgaaatgttcgatattgtcgatgacttgcaaggcactgtgaagcaagtaccaccaacgcgacctatctcgcttgtatcgagtccgggttttgacgccagctacaaggtcgacaatttagttgagcgtatgcatacaaagtgtaccaacatagctatgggatccaacgagagtctcgccagtgctgacaaagccatcagcaacgcagcgcaggttggaaactgggtgcttatcaagaacgttcatcttgcacccacctggctgcagtctcttgagaagcgtatggagtctctcaaccctagctccgacttcagattgttcctatctatggagtccagtcctaagattccagtcaatcttctccgcgcttctcgcgtgctcatgtacgagcagcccgctggtgtgagagctaacatgaaggactcgatgtcgtcacttgtaacacgggctgcaaagagccctgttgagcgcacgaggatgtacctgcttctttcgttcttacacgccgtggtccaagagcgtcttcggtacgcaccaaacttgggatggaagggtttctgggagttcaacgacagcgattatgaatgctcagcctttatcatcgacacatgggttgacactgtggcccaaaacagatcaaacatcgcgccacaaaacataccctgggacatgatctgttaccttgtccgcgagacgtatggtggcaagatcgatgacgaaggggatttcgcacagcttacagagctagtgtatagaatcctaaccccgaaggcatatgacatcgggcataagctcgtcgaaggaattggcgaggatggagaggatggcgccttgctagtgccaactggtacgaatcatagccagttcatggattgggtcaataagctacctgaacgagagccgccgacgtatctggggcttcctgctaatgcggagaagttgctcctggtgggcttgggaaggagcttatgtggcaatttgaagaaggttgttgagcttcttgatgaaggggagtcacttgtcacggagtcttagggtggtatggcataaaggcacaaagactggttgatattttgggggcaatacgtcatgcactgataccctgtttactatatttgattgaggctcctagtttagaacgttggtagtggaattgaatcccttttgttcaaaacttatgatatttttggctgtgatgctactgagctgtgacgctcacttcacgaggcagagcggggggaaaaaagtgatattcccagtaatgtaatatggtgtaagaatgtatcactattttttggctccgcttcgcttgacaatgcaacattccccagattttattaataagcttcacgacggacttgtcattaactgtggagtttccgtgctctagttcgtgatgtagctaacaatcggactagcagaaattttctgaccaatccatctcatgtgattggttgctttcctctcgatagctgcaacattgacgttttggaggtttg

SEQ ID NO: 3568 - DNA, 972 bp, Muscodor strobelii
  misc_feature: SGI cDNA ID NO. 560852
  misc_feature: Encodes the peptide sequence at SEQ ID NO 3569
atgtctaacaatattgcaattcatcctgtccaccacaattggcaacgagtcacctccttcggacgcaagcgagtcggagactgcagtcggcacggtgttaagacatggcctggattcgccatggaatttcagtcttcgaagccaatgaagcgccctgtgcggcctgaagatcgcgacttggtttttcgatcgcttccgctgtactgcaacccacccctaacatcgacttcatctgagccatcagagtctgccggcggaatttccttcctagatttgccccctgaggtccgcaacatgatttacaagctcgctgtgcgttatcccactatgtacgagctgaaggaagcacattacgcacaacgtgtacgcgacggcaacgcccgcggttctgagacacgcatgcacacacctgttatcctcctgctgtgtaaacagatcacccacgaggccgtatcggtactccagcttcagtcgttgatcattgatcgccttcccccgtggatcatgggcaacaatctcccgcagcctatcaccgatctcatcggcagagacactctccagggcattcgattcgccgaaatccgaatcacgttcggagacgcatggggtgcaaggaccggcagtctctggttcggtgtagtgtccaaccttctgaaggtctggtctgagaagaactcgctcatccgcctccacgtcatgctcaaggtccacaacgtcaatctccttaacatgtgggatgtggagtttcatgactatgttcgcgttagcagagcacttgaggaatttgcatttcgctatggcgccaagcccgacatgctccagtacgagcactgggtcattgatggatcctgggcctttaaaggtgccggcaagaatcgtcagatccgaacccaccccgatcccaacatctggcccggagatttcacagagtttctgtctaagagacaaatgccagcaagctttctcggttag

SEQ ID NO: 3569 - protein, 323 aa, Muscodor strobelii
  misc_feature: SGI Peptide ID NO. 560852
  misc_feature (74)..(233): NCBI GI: 226283728 Blast Desc: PAAG_01756 [Paracoccidioides brasiliensis Pb01]
  misc_feature (74)..(233): NCBI GI: 226288221 Blast Desc: PADG_00022 [Paracoccidioides brasiliensis Pb18]
  misc_feature (87)..(234): NCBI GI: 239608293 Blast Desc: [Ajellomyces dermatitidis ER-3]
MSNNIAIHPVHHNWQRVTSFGRKRVGDCSRHGVKTWPGFAMEFQSSKPMKRPVRPEDRDLVFRSLPLYCNPPLTSTSSEPSESAGGISFLDLPPEVRNMIYKLAVRYPTMYELKEAHYAQRVRDGNARGSETRMHTPVILLLCKQITHEAVSVLQLQSLIIDRLPPWIMGNNLPQPITDLIGRDTLQGIRFAEIRITFGDAWGARTGSLWFGVVSNLLKVWSEKNSLIRLHVMLKVHNVNLLNMWDVEFHDYVRVSRALEEFAFRYGAKPDMLQYEHWVIDGSWAFKGAGKNRQIRTHPDPNIWPGDFTEFLSKRQMPASFLG

SEQ ID NO: 3570 - DNA, 504 bp, Muscodor strobelii
  misc_feature: SGI EST ID NO. CUFF.8951.0
  misc_feature: Variant of the nucleotide sequence at SEQ ID NO 3568
caagctcgctgtgcgttatcccactatgtacgagctgaaggaagcacattacgcacaacgtgtacgcgacggcaacgcccgcggttctgagacacgcatgcacacacctgttatcctcctgctgtgtaaacagatcacccacgaggccgtatcggtactccagcttcagtcgttgatcattgatcgccttcccccgtggatcatgggcaacaatctcccgcagcctatcaccgatctcatcggcagagacactctccagggcattcgattcgccgaaatccgaatcacgttcggagacgcatggggtgcaaggaccggcagtctctggttcggtgtagtgtccaaccttctgaaggtctggtctgagaagaactcgctcatccgcctccacgtcatgctcaaggtccacaacgtcaatctccttaacatgtgggatgtggagtttcatgactatgttcgcgttagcagagcacttgaggaatttgcatttcgctatggcgccaa

SEQ ID NO: 3571 - DNA, 2475 bp, Muscodor strobelii
  misc_feature: SGI cDNA ID NO. 560853
  misc_feature: Elevated expression when VOC is produced
  misc_feature: Encodes the peptide sequence at SEQ ID NO 3572
atggcaaagcacttcttttccaacatcggtagcaccaaatcacgacgagaattccacacagacacacaagacggccagtcgtgcccgccacctagttatgattcccttgttgacgacgtacacgaacgatatgaccaaatcgagacggagcaccctgcccaggaaggaggagaagaagtttctgaatatttggggccgcaaccacagcagccggagcttaacagcacagagctgctcgaactagactcaaggcaactgttccctatggcacagctagatgccgttaattatgactcacaacaagcaacatcttcagagggcagcattctagctgtgaaagcataccctcaccagttccggagcaaaccccagcgctcaacgtttctaaccccaagctcctcccttcgatctaactcgcacggaatctctccggtcactccttggagcacgagctctggatcttcagctttctggtcagcaggccctgcgttcgacaattcgactgcatcgccgataacgcccatgagtgcaaacccgcatgtgacagtcttacaggccgacagactatttaccaaggatacggatataaacatgctgaactgtccagatgattcttgccaattcgatctgggtaatctaccagaactacccggcgacggccaactgccattcggcatacccaagggcttatcagaccctttgatgttctcattcgacccgaaagacaactactcatggatgtcatccgtcgacacagagatatccctgggcacgtccgttaatatgatgtttaccgatcctcacccgaaaaacgcgataccttcgaactacctaatgtctcaaaaccctgatggatctgaagtcaaaaaccttcttgatgaaacgtggcagtgtctacgccaacatatctctaactcgatggacaaattgaatgggattcaagggaacgtcttagcagaccaattccgcgtgcagtcgcccagggcagtggccgccatgggtcttgaaggcttcagaaagatcatgggccgtgactatcttatggtgccagagccccttgagtatctctgcttcatccatttgatgtattcagtctctctgcccatctacaaggaagacctaatgagtcgatctgataaattgtacgaccaagcagtggcttatggaacattactggattcaatgtaccgaagggattatcatgaaatcgttttaagaatctggaagcaagagccacgtcgacaagtatcgcaaggtcgcacacgcgaatcacagagtagatcatcgagtaggaaaggcaaggagccagagtatcacacggcatcgatgggcgatcctctgctcaccacaggcctcaattttctagacatcttcgaaaacatggtcctaatcagcgacatgcccgaggtcgtgacatccgaactatattcttcccatcttgctgagagccaaactggtctgcaaggaaacactccgctcaccattgcgtcaactttcattgttgaagatctgcgtcgaaactttcgtgaggaaacttggttacggaagctgaagacaattggacaaagagtgcagtcgggctactacccaactatccggaaactagagcttgagctcttacaaataggaaaggactgtcttgagtcgaccgaattttttgatcactttgtcccccaggttcggaatctttgcgatcagatatattctcagcccggaactcgggggcgaattagatatcagcaacttggaatatcgcttttggatcatctatttcgaaacatcgcgcgcgaggaagtagagcagtctcaaacaggaaacacagatttctctatcggcctggcagcccagtacgatgatgacttcttacaagggcttgacaagacattttactacgatgtaagcccaagtacacaacaggcaggaatcacgcaagggcatcccgatttcggacctactctggatccgataactctccatacggtttctcacgatatacccttgactattcccgcttcaaaccccattctggcgactagtgtttcttctgagagccatagtgaatcttacacagtttcgccagccccgttatcagatgctcagctggaaatggtaggctcaaagtccaatcgacctacaccaccgaaacaagcccgaacagatcgagccgaaacagcagggccttctgttccttctttaagctcttcaggagcaaaagtagaggcaaacgactgctgtgagatctgtgggtacaggcccaagggcgacccgcaatggttcaaggggagcatggcaaagcacaagaagatgatgcactcatcgaaaccgcccatcatctacaaatgcccatttccgggctgcacctccgagtacaagaatcggcgagacaatctacgccagcaccagatcgaaaagaatcattttgtgggcgacgacactgggcgtcgaccacaaaaacgaaagaaaccttcgccatga

SEQ ID NO: 3572 - protein, 824 aa, Muscodor strobelii
  misc_feature: SGI Peptide ID NO. 560853
  misc_feature (1)..(821): NCBI GI: 256727032 Blast Desc: NECHADRAFT_91161 [Nectria haematococca mpVI 77-13-4]
  misc_feature (286)..(821): NCBI GI: 116196632 Blast Desc: CHGG_04914 [Chaetomium globosum CBS 148.51] gi|88180827|gb|EAQ88295.1| CHGG_04914 [Chaetomium globosum CBS 148.51]
  misc_feature (139)..(587): NCBI GI: 46136179 Blast Desc: FG09605.1 [Gibberella zeae PH-1]
  misc_feature (125)..(594): NCBI GI: 171688396 Blast Desc: protein product [Podospora anserina] gi|170944160|emb|CAP70270.1| protein product [Podospora anserina]
  misc_feature (738)..(821): NCBI GI: 46136179 Blast Desc: FG09605.1 [Gibberella zeae PH-1]
  misc_feature (83)..(587): NCBI GI: 85079291 Blast Desc: NCU04341 [Neurospora crassa OR74A] gi|28917381|gb|EAA27086.1| [Neurospora crassa OR74A]
  misc_feature (745)..(821): NCBI GI: 85079291 Blast Desc: NCU04341 [Neurospora crassa OR74A] gi|28917381|gb|EAA27086.1| [Neurospora crassa OR74A]
  misc_feature (739)..(795): NCBI GI: 171688396 Blast Desc: protein product [Podospora anserina] gi|170944160|emb|CAP70270.1| protein product [Podospora anserina]
  misc_feature (211)..(456): NCBI GI: 145603378 Blast Desc: MGG_06090 [Magnaporthe grisea 70-15] gi|145011619|gb|EDJ96275.1| MGG_06090 [Magnaporthe grisea 70-15]
  misc_feature (775)..(823): NCBI GI: 145603378 Blast Desc: MGG_06090 [Magnaporthe grisea 70-15] gi|145011619|gb|EDJ96275.1| MGG_06090 [Magnaporthe grisea 70-15]
  misc_feature: Useful for introducing or modulating the production of volatile compounds
MAKHFFSNIGSTKSRREFHTDTQDGQSCPPPSYDSLVDDVHERYDQIETEHPAQEGGEEVSEYLGPQPQQPELNSTELLELDSRQLFPMAQLDAVNYDSQQATSSEGSILAVKAYPHQFRSKPQRSTFLTPSSSLRSNSHGISPVTPWSTSSGSSAFWSAGPAFDNSTASPITPMSANPHVTVLQADRLFTKDTDINMLNCPDDSCQFDLGNLPELPGDGQLPFGIPKGLSDPLMFSFDPKDNYSWMSSVDTEISLGTSVNMMFTDPHPKNAIPSNYLMSQNPDGSEVKNLLDETWQCLRQHISNSMDKLNGIQGNVLADQFRVQSPRAVAAMGLEGFRKIMGRDYLMVPEPLEYLCFIHLMYSVSLPIYKEDLMSRSDKLYDQAVAYGTLLDSMYRRDYHEIVLRIWKQEPRRQVSQGRTRESQSRSSSRKGKEPEYHTASMGDPLLTTGLNFLDIFENMVLISDMPEVVTSELYSSHLAESQTGLQGNTPLTIASTFIVEDLRRNFREETWLRKLKTIGQRVQSGYYPTIRKLELELLQIGKDCLESTEFFDHFVPQVRNLCDQIYSQPGTRGRIRYQQLGISLLDHLFRNIAREEVEQSQTGNTDFSIGLAAQYDDDFLQGLDKTFYYDVSPSTQQAGITQGHPDFGPTLDPITLHTVSHDIPLTIPASNPILATSVSSESHSESYTVSPAPLSDAQLEMVGSKSNRPTPPKQARTDRAETAGPSVPSLSSSGAKVEANDCCEICGYRPKGDPQWFKGSMAKHKKMMHSSKPPIIYKCPFPGCTSEYKNRRDNLRQHQIEKNHFVGDDTGRRPQKRKKPSP

SEQ ID NO: 3573 - DNA, 3981 bp, Muscodor strobelii
  misc_feature: SGI EST ID NO. CUFF.8979.0
  misc_feature: Variant of the nucleotide sequence at SEQ ID NO 3571
cagtctgccttgttgcctatgcgtaccagcgtacctcaccgagtagggtttttggaccccaaactccaccatctgctcatcctacccatatggtgcgcggcgcaacgattgtattaaggcgttgccgaccatatagtgcacgggatctatcatggagggagcctgctcaccaatgactgggttactccccatcctgcggtcattgccgccgtggagctattccaagggtacatgtactggtactggtacctttgatccatgtccacaaagcaaagtcctacatcgtcatcctctatggtgtcggtagctaaggtactccagatctttaagataaagacatggggcggtggcgatcgaatccgccttgtaagatgctcccttctcttcaagcgtaagtctgtgctgttagatattcgtcttcatcatgcattcaaagaagagccttgcaaccgtcgagtcggcttccgtcgacgatgagcctattgatatgggcccacgaccgggccgtcggctgtccatggccgttccggtcgaatctacaactgcaagaaggcggtcactgtccagtcttcgatccgaatctcgaccatctgcctccatctcatgcatctcgcggagcactatgtctggtgaagactgcgcccggcaacggttcattgtgtgggctgccgtaaaacgaaatagatccgttcgtatggcggccagcgaacggttaagatgtccactcttgcgctgtggagaacgcttcgacggacatgaagaaatgctaaggcatctcacccattgccagcacctttccactggagaatatgtttgctacgagtgtatgaaggttgaacggtttaatgatgccaagtgtaggtgctgtttagggtcccctacaaagaggagacgcatcatcaacatggcaaagcacttcttttccaacatcggtagcaccaaatcacgacgagaattccacacagacacacaagacggccagtcgtgcccgccacctagttatgattcccttgttgacgacgtacacgaacgatatgaccaaatcgagacggagcaccctgcccaggaaggaggagaagaagtttctgaatatttggggccgcaaccacagcagccggagcttaacagcacagagctgctcgaactagactcaaggcaactgttccctatggcacagctagatgccgttaattatgactcacaacaagcaacatcttcaggtataaccgatacaatacgagaaaattcctctttaccagacacgaacatgttttcaaatagagggcagcattctagctgtgaaagcataccctcaccagttccggttgccttgagcaatggcggacgccgtccctcgttggctttagatactcatgtggatcgttacaggagcaaaccccagcgctcaacgtttctaaccccaagctcctcccttcgatctaactcgcacggaatctctccggtcactccttggagcacgagctctggatcttcagctttctggtcagcaggccctgcgttcgacaattcgactgcatcgccgataacgcccatgagtgcaaacccgcatgtgacagtcttacaggccgacagactatttaccaaggatacggatataaacatgctgaactgtccagatgattcttgccaattcgatctgggtaatctaccagaactacccggcgacggccaactgccattcggcatacccaagggcttatcagaccctttgatgttctcattcgacccgaaagacaactactcatggatgtcatccgtcgacacagagatatccctgggcacgtccgttaatatgatgtttaccgatcctcacccgaaaaacgcgataccttcgaactacctaatgtctcaaaaccctgatggatctgaagtcaaaaaccttcttgatgaaacgtggcagtgtctacgccaacatatctctaactcgatggacaaattgaatgggattcaagggaacgtcttagcagaccaattccgcgtgcagtcgcccagggcagtggccgccatgggtcttgaaggcttcagaaagatcatgggccgtgactatcttatggtgccagagccccttgagtatctctgcttcatccatttgatgtattcagtctctctgcccatctacaaggaagacctaatgagtcgatctgataaattgtacgaccaagcagtggcttatggaacattactggattcaatgtaccgaagggattatcatgaaatcgttttaagaatctggaagcaagagccacgtcgacaagtatcgcaaggtcgcacacgcgaatcacagagtagatcatcgagtaggaaaggcaaggagccagagtatcacacggcatcgatgggcgatcctctgctcaccacaggcctcaattttctagacatcttcgaaaacatggtcctaatcagcgacatgcccgaggtcgtgacatccgaactatattcttcccatcttgctgagagccaaactggtctgcaaggaaacactccgctcaccattgcgtcaactttcattgttgaagatctgcgtcgaaactttcgtgaggaaacttggttacggaagctgaagacaattggacaaagagtgcagtcgggctactacccaactatccggaaactagagcttgagctcttacaaataggaaaggactgtcttgagtcgaccgaattttttgatcactttgtcccccaggttcggaatctttgcgatcagatatattctcagcccggaactcgggggcgaattagatatcagcaacttggaatatcgcttttggatcatctatttcgaaacatcgcgcgcgaggaagtagagcagtctcaaacaggaaacacagatttctctatcggcctggcagcccagtacgatgatgacttcttacaagggcttgacaagacattttactacgatgtaagcccaagtacacaacaggcaggaatcacgcaagggcatcccgatttcggacctactctggatccgataactctccatacggtttctcacgatatacccttgactattcccgcttcaaaccccattctggcgactagtgtttcttctgagagccatagtgaatcttacacagtttcgccagccccgttatcagatgctcagctggaaatggtaggctcaaagtccaatcgacctacaccaccgaaacaagcccgaacagatcgagccgaaacagcagggccttctgttccttctttaagctcttcaggagcaaaagtagaggcaaacgactgctgtgagatctgtgggtacaggcccaagggcgacccgcaatggttcaaggggagcatggcaaagcacaagaagatgatgcactcatcgaaaccgcccatcatctacaaatgcccatttccgggctgcacctccgagtacaagaatcggcgagacaatctacgccagcaccagatcgaaaagaatcattttgtgggcgacgacactgggcgtcgaccacaaaaacgaaagaaaccttcgccatgatgccacaaggttataatctaaatgaggcataaacccacaggtttgggatacgttttctggtttaacaagcgcaggcgccatcagtaccttgatttgtaatatcttgatctcaacatgtctcctagcgagaactactgttactacttcatttcttaatcccaggaggatacaccagctagattaccagtaatttgcacttgatgggcacagggaaaaggaggacatagccagttgcttatgaatggggtttattttctcattttcttacatttagtcccacattacagcgaactttgagataccacggagaaaagtatagagatagatgggatggggaacgaagtgaacggtcggttggtcatcaggatgaccctaaagaccgaacacacacatagacaaccgcgcaagacagcgaaattcaatcaaccaatttcaatttcaatccagtgaaagttcgctttccaaatcaagtaaac

SEQ ID NO: 3574 - DNA, 1032 bp, Muscodor strobelii
  misc_feature: SGI cDNA ID NO. 560854
  misc_feature: Elevated expression when VOC is produced
  misc_feature: Encodes the peptide sequence at SEQ ID NO 3575
atgccgggaatggcccacgtgcaggtcgtacgcgagttagatctgaatgcctattgccgtcatcccactatgatggcacgcgtgagcgcagtgcctggtctaaagactagcactgctttcttcatcttccttcgagcaaacttagtagcaagctcctcaggaatgtcaacgccaatcatggatcctatctcatcctcaactctaccaccagtgccaccatcgcctcaaaccaccaaggccgaggcaccacccaagaccatcacagacaacctcccaccgttatcaacaactatattagaagagcaatcggataaagaagaagctctacgcttgatagccgattcaatagcgcaacaacgccagattgcatcctaccatttgattttccacccttaccttctccccccacttgcagtatgtctcgcaggcgcatatcagtacggctgggtacgacaaaatgacattggcacggcaatcatgacgatctgcggtgtgctaatgacatatcttctctccatccgatatttcacgggtccatacattcaagctgcagaatcagtcaattggtcatggctgcgaccatcctcctcctccacgccaattaccacctcatcaccatcggaggaggacttgattctcggtgtaaagttcggcaagcaattaataggagctctcgtgctccgtctcgagcccagcccctctataaccaactcttcgaacggcggccacaagcgacgctcgcgctcctctttgcttcgcggcggacgcggcgtcatccgggcttggactgtaaagcttcggtatcgtggacaaggcgttgggcgcgatctcctgcacgatgccgtgcgcgtaacgcgcgaacgctgtggtcgcgatgcggaagttggatttgccgccgagcacgccaattctacggcagtgcttcccgagatctttaacacgccattccggaagactgagcggcgcgccgcgaagagcctcgagaaagtcgtaggagagtgggagggctctcgcaggaggaggaaaccgtaa

SEQ ID NO: 3575 - protein, 343 aa, Muscodor strobelii
  misc_feature: SGI Peptide ID NO. 560854
  misc_feature (213)..(288): Pfam Id: PF00583 Pfam Desc: Acetyltransferase (GNAT) family
  misc_feature (10)..(341): NCBI GI: 39975963 Blast Desc: MGG_06092 [Magnaporthe grisea 70-15] gi|145011617|gb|EDJ96273.1| MGG_06092 [Magnaporthe grisea 70-15]
  misc_feature (1)..(335): NCBI GI: 85079287 Blast Desc: NCU04340 [Neurospora crassa OR74A] gi|28917380|gb|EAA27085.1| [Neurospora crassa OR74A]
  misc_feature (53)..(339): NCBI GI: 116196864 Blast Desc: CHGG_05030 [Chaetomium globosum CBS 148.51] gi|88180943|gb|EAQ88411.1| CHGG_05030 [Chaetomium globosum CBS 148.51]
  misc_feature (1)..(341): NCBI GI: 256726916 Blast Desc: [Nectria haematococca mpVI 77-13-4]
  misc_feature (10)..(341): NCBI GI: 46121393 Blast Desc: FG05075.1 [Gibberella zeae PH-1]
  misc_feature (5)..(341): NCBI GI: 261352375 Blast Desc: acetyltransferase [Verticillium albo-atrum VaMs.102]
  misc_feature (37)..(340): NCBI GI: 171688394 Blast Desc: protein product [Podospora anserina] gi|170944159|emb|CAP70269.1| protein product [Podospora anserina]
  misc_feature (28)..(339): NCBI GI: 156049319 Blast Desc: SS1G_08366 [Sclerotinia sclerotiorum 1980] gi|154692765|gb|EDN92503.1| SS1G_08366 [Sclerotinia sclerotiorum 1980]
  misc_feature (27)..(342): NCBI GI: 154303697 Blast Desc: BC1G_08733 [Botryotinia fuckeliana B05.10] gi|150854527|gb|EDN29719.1| BC1G_08733 [Botryotinia fuckeliana B05.10]
  misc_feature (92)..(327): NCBI GI: 46127031 Blast Desc: FG07893.1 [Gibberella zeae PH-1]
  misc_feature: Useful for introducing or modulating the production of volatile compounds
MPGMAHVQVVRELDLNAYCRHPTMMARVSAVPGLKTSTAFFIFLRANLVASSSGMSTPIMDPISSSTLPPVPPSPQTTKAEAPPKTITDNLPPLSTTILEEQSDKEEALRLIADSIAQQRQIASYHLIFHPYLLPPLAVCLAGAYQYGWVRQNDIGTAIMTICGVLMTYLLSIRYFTGPYIQAAESVNWSWLRPSSSSTPITTSSPSEEDLILGVKFGKQLIGALVLRLEPSPSITNSSNGGHKRRSRSSLLRGGRGVIRAWTVKLRYRGQGVGRDLLHDAVRVTRERCGRDAEVGFAAEHANSTAVLPEIFNTPFRKTERRAAKSLEKVVGEWEGSRRRRKP

SEQ ID NO: 3576 - DNA, 3933 bp, Muscodor strobelii
  misc_feature: SGI EST ID NO. CUFF.9395.0
  misc_feature: Variant of the nucleotide sequence at SEQ ID NO 3574
ctttgattttaccaaccagactacatttgaagaaacaactaattacatcagatcatgaagccattcacacattgtccttccaagtctggtcagtgatactgttgatctcatgatgcaacgctcttccgtcattgctacattccaaaagaagcacaacgtatgcgcgtttttgtggtgctcaaagggtataattcaaaatcgcagttcacatggattatcgctgcgcgcaattaacaacccaagtccgtccatgtacgcagtttataacgaatacgtaagtcggacgtggccatgcatgtaaatcgtagcgggatggaatggacggaccaatgctaccaagaccacgagttcatgggggtaaccccttgcgagaccctgtccgatgttgaagcgagtcaaatctcgacattcttgtgccgcagatctagcacccttgctgctgtttcaagacacctgtcatgggttgaaagacgtttcaagatggctcggcgcgcacacgtaattggttgcaccaagtcaacacccacagctcggccacaggcgaagttttcacattccaaccccgcgacaacgctaagcattcgctctcccgactgggcaagagaaagtcgtcaactacacacgatcgaggcactgatctaccgaatttgcgacaacgttgacgacgatatgggggcccttgacagttagcccctgcagaagtcataaattacggacatcgttcgaccttccgagggagatcaaccgtagcacgagtagcaaaaatctcgtaagactagtggaatcattcgtccagtctcgccaatctactgcttgacgccatcccaacggcggacagagctatgaatcgtctatattagaccaaacaatgggctgggaacgggggatgaaccaactgactaaaataactgatagcggccggccggcatattacctggtgctcttgaggatttaatagattccagatttcgtcgtaggatgatcatgcaagtaccgtcaaaatttgccattcttttgattggcttccgagtcttttgaggcgtttatagttccctttcccccatcgtccaacaggtttgcagaccgatcgagactatttcttagtaggagaccgccaattcagctccggactcacgcgacacctacagccaacaggagcgaaatctctggtgcagccatcgaacgcatcgtgctcgtctattggaggtcgacgttggcatcctattcgtctgccgcgtttagtcttatcttgagaacagagatagccaaagccaagacctgcgcaatcctgaggacatccctcccttttattctcgatccccggtctcccgaggagcatagcatgttataaggacagaacgtgcgattgagaccggggccagcattatcatatcttcgttgccgtgggttatctatctgcatcgagaacctgcacgatcgtctcagcgttcgtgactggcgtgctcatcctcgtctcattgctctttggtgcatataaccacagcaacggaccccgtcgatcatcatcaggaggacctggtttaacttgctcaaacttcctccctcctcttctgtctcttttcaatcctttccgcctatttcccttcatctccagatacccctcctattcatgatctcctatctatataactaccggcgtataccccattattattagactcctcaataggaataagaacacgcacgggctgcgaaacatccccacactagctctgtcgtcagctccccgtagtcccggcagagatttcggggctcttttacgtataatttgcgacatcccaaacgcatcttttcaggatcttccgcggctggcttcgtggttgtcctatcgttcaagctgttggtcgaacacgtatatccagcagcttggaaataaattagcactgcaacgacatcttcgtctaattaataccgaccacaccctactgcaccttacagctacctaatctaaatatcactttacaagggcacttgcgcgctactaccttatcaacgtgctggtcctgtccacaaccccccatcggctgtgctgcaatcggacagctccaagctggccataccactcagcatgccgggaatggcccacgtgcaggtcgtacgcgagttagatctgaatgcctattgccgtcatcccactatgatggcacgcgtgagcgcagtgcctggtctaaagactagcactgctttcttcatcttccttcgagcaaacttagtagcaagctcctcaggaatgtcaacgccaatcatggatcctatctcatcctcaactctaccaccagtgccaccatcgcctcaaaccaccaaggccgaggcaccacccaagaccatcacagacaacctcccaccgttatcaacaactatattagaagagcaatcggataaagaagaagctctacgcttgatagccgattcaatagcgcaacaacgccagattgcatcctaccatttgattttccacccttaccttctccccccacttgcagtatgtctcgcaggcgcatatcagtacggctgggtacgacaaaatgacattggcacggcaatcatgacgatctgcggtgtgctaatgacatatcttctctccatccgatatttcacgggtccatacattcaagctgcagaatcagtcaattggtcatggctgcgaccatcctcctcctccacgccaattaccacctcatcaccatcggaggaggacttgattctcggtgtaaagttcggcaagcaattaataggagctctcgtgctccgtctcgagcccagcccctctataaccaactcttcgaacggcggccacaagcgacgctcgcgctcctctttgcttcgcggcggacgcggcgtcatccgggcttggactgtaaagcttcggtatcgtggacaaggcgttgggcgcgatctcctgcacgatgccgtgcgcgtaacgcgcgaacgctgtggtcgcgatgcggaagttggatttgccgccgagcacgccaattctacggcagtgcttcccgagatctttaacacgccattccggaagactgagcggcgcgccgcgaagagcctcgagaaagtcgtaggagagtgggagggctctcgcaggaggaggaaaccgtaaacgctatacaccagtactggagtggtgcatcaaaaagaggttaaagaaaaagatgatctaggagagaagagaaagaagctgattttcggcgtttaccgggttagtgtataggcgtcggaagagcgttgttttttcaagctacaaatacccctttcgttttatgggttggccaagacatagcatggctgctataatgcttcgttctctcgtttccaggatcgggattggaacagtctattatgagactagatataacggtcacttcttattcagagataccactttgtcatgccataagcaggcaaatagaaattcgtgatttctaactcatgcaaagtattcgcagcttgcctattgcaaatagctgctagggtatctagtgaaacgacaaatccacgcagcacggtgctttccgttatacattcatagcgttttacgaaaccgggcgaaatctcatttaaacgcaaatatgtaccttcctcgcaaatgccaaatgcaaacgcaaacgcaacaatgtgtgcagtgtggtcggctgcagaggtttgcatatctgcatcgcatcgcacaaacaatgatagacctcatcgtgaatccgtcaattgtaaacgcctttaacgcccagccaatcgtttccgagcttctttatactgtcgtgcaaagttaataacgatagatatggaccggtctcagtcctgatgagtaaggatggcaggaagtgataggcaaagtctcaggacgccttaactcttcccccttggacatcgtcgaacccataaattgggcggccttgacgtcgcaaagcatgaaggacc

SEQ ID NO: 3577 - DNA, 384 bp, Muscodor strobelii
  misc_feature: SGI cDNA ID NO. 560855
  misc_feature: Encodes the peptide sequence at SEQ ID NO 3578
atgccgggaaaactcgatccccgtggtgcaaagggtgcgcgcggccttggaaaaggcaagggcatgggaggacttggtggtaagggaggcatcaagcgtcaccgaaagattctacgtgacaacatcctcggaatcaccaagcccgccattcgtcgtcttgcccgtcgtggaggcgtaaagcgaatttctgcgaacatatacgaggaaactcgcctcgttctgcgcaagcgtcttgaggagatcatcaaggactgtgtcacgtacacagagtatcgccaggctaagacggttaccatcaatgacgtccttcatgctttgcgacgtcaaggccgcccaatttatgggttcgacgatgtccaagggggaagagttaaggcgtcctga

SEQ ID NO: 3578 - protein, 127 aa, Muscodor strobelii
  misc_feature: SGI Peptide ID NO. 560855
  misc_feature (40)..(109): Pfam Id: PF00125 Pfam Desc: Core histone H2A/H2B/H3/H4
  misc_feature (5)..(117): NCBI GI: 256727480 Blast Desc: NECHADRAFT_105899 [Nectria haematococca mpVI 77-13-4]
  misc_feature (33)..(116): NCBI GI: 258565241 Blast Desc: histone H4.2 [Uncinocarpus reesii 1704] gi|237907066|gb|EEP81467.1| histone H4.2 [Uncinocarpus reesii 1704]
  misc_feature (33)..(116): NCBI GI: 119190663 Blast Desc: histone H4.2 [Coccidioides immitis RS] gi|240107263|gb|EER25448.1| histone H4.2, [Coccidioides posadasii C735 delta SOWgp]
  misc_feature (33)..(116): NCBI GI: 50548501 Blast Desc: YALI0C11385p [Yarrowia lipolytica] gi|50556958|ref|XP_505887.1| YALI0F25883p [Yarrowia lipolytica] gi|49647587|emb|CAG82030.1| YALI0C11385p [Yarrowia lipolytica]
  misc_feature (33)..(116): NCBI GI: 66361758 Blast Desc: histone H4 [Cryptosporidium parvum Iowa II] gi|67624013|ref|XP_668289.1| [Cryptosporidium hominis TU502] gi|46228775|gb|EAK89645.1| histone H4 [Cryptosporidium parvum II]
  misc_feature (33)..(116): NCBI GI: 74004215 Blast Desc: : similar to germinal histone H4 gene [Canis familiaris]
  misc_feature (33)..(116): NCBI GI: 51315725 Blast Desc: H4_ARXAD RecName: Full=Histone H4 gi|27550961|emb|CAD59972.1| histone H4 [Arxula adeninivorans]
  misc_feature (33)..(116): NCBI GI: 209882272 Blast Desc: histone H4 [Cryptosporidium muris RN66] gi|209558179|gb|EEA08224.1| histone H4, [Cryptosporidium muris RN66]
  misc_feature (33)..(116): NCBI GI: 68484793 Blast Desc: histone H4 [Candida albicans SC5314] gi|68484884|ref|XP_713663.1| histone H4 [Candida albicans SC5314] gi|68490206|ref|XP_711083.1| histone H4 [Candida albicans SC5314]
  misc_feature (33)..(116): NCBI GI: 149244616 Blast Desc: histone H4 [Lodderomyces elongisporus NRRL YB-4239] gi|146449245|gb|EDK43501.1| histone H4 [Lodderomyces elongisporus NRRL YB-4239]
MPGKLDPRGAKGARGLGKGKGMGGLGGKGGIKRHRKILRDNILGITKPAIRRLARRGGVKRISANIYEETRLVLRKRLEEIIKDCVTYTEYRQAKTVTINDVLHALRRQGRPIYGFDDVQGGRVKAS

SEQ ID NO: 3579 - DNA, 4876 bp, Muscodor strobelii
  misc_feature: SGI EST ID NO. CUFF.9396.1
  misc_feature: Variant of the nucleotide sequence at SEQ ID NO 3577
ggaagttgcccctggttgaatgactgcaacttcctgatagacgcaacttgattagaaaccggcatctgattgggtgacagttgctggatttaaacaacgtctgattagatgcaatcagcccccaattccaaaccaatcagcttgtttatttacagttcaagcccccctttacctgccatctcttacccggaagcttcctacctcataacaacttgttgttgtcctggttgcctccccactctaccttacccacatcatcatcgccgccgcttcacatgtgaagctactagccacttgttgtgaaccaactcattcctctaataaggccaattatcttatctgttgttcactcacttgccagccggcctactaaaatgccgggaaaactcgatccccgtggtgcaaagggtgcgcgcggccttggaaaaggcaagggcatgggaggacttggtggtaagggaggcatcaagcgtcaccgaaagattctacgtgacaacatcctcggaatcaccaagcccgccattcgtcgtcttgcccgtcgtggaggcgtaaagcgaatttctgcgaacatatacgaggaaactcgcctcgttctgcgcaagcgtcttgaggagatcatcaaggactgtgtcacgtacacagagtatcgccaggctaagacggttaccatcaatgacgtccttcatgctttgcgacgtcaaggccgcccaatttatgggttcgacgatgtccaagggggaagagttaaggcgtcctgagactttgcctatcacttcctgccatccttactcatcaggactgagaccggtccatatctatcgttattaactttgcacgacagtataaagaagctcggaaacgattggctgggcgttaaaggcgtttacaattgacggattcacgatgaggtctatcattgtttgtgcgatgcgatgcagatatgcaaacctctgcagccgaccacactgcacacattgttgcgtttgcgtttgcatttggcatttgcgaggaaggtacatatttgcgtttaaatgagatttcgcccggtttcgtaaaacgctatgaatgtataacggaaagcaccgtgctgcgtggatttgtcgtttcactagataccctagcagctatttgcaataggcaagctgcgaatactttgcatgagttagaaatcacgaatttctatttgcctgcttatggcatgacaaagtggtatctctgaataagaagtgaccgttatatctagtctcataatagactgttccaatcccgatcctggaaacgagagaacgaagcattatagcagccatgctatgtcttggccaacccataaaacgaaaggggtatttgtagcttgaaaaaacaacgctcttccgacgcctatacactaacccggtaaacgccgaaaatcagcttctttctcttctctcctagatcatctttttctttaacctctttttgatgcaccactccagtactggtgtatagcgtttacggtttcctcctcctgcgagagccctcccactctcctacgactttctcgaggctcttcgcggcgcgccgctcagtcttccggaatggcgtgttaaagatctcgggaagcactgccgtagaattggcgtgctcggcggcaaatccaacttccgcatcgcgaccacagcgttcgcgcgttacgcgcacggcatcgtgcaggagatcgcgcccaacgccttgtccacgataccgaagctttacagtccaagcccggatgacgccgcgtccgccgcgaagcaaagaggagcgcgagcgtcgcttgtggccgccgttcgaagagttggttatagaggggctgggctcgagacggagcacgagagctcctattaattgcttgccgaactttacaccgagaatcaagtcctcctccgatggtgatgaggtggtaattggcgtggaggaggaggatggtcgcagccatgaccaattgactgattctgcagcttgaatgtatggacccgtgaaatatcggatggagagaagatatgtcattagcacaccgcagatcgtcatgattgccgtgccaatgtcattttgtcgtacccagccgtactgatatgcgcctgcgagacatactgcaagtggggggagaaggtaagggtggaaaatcaaatggtaggatgcaatctggcgttgttgcgctattgaatcggctatcaagcgtagagcttcttctttatccgattgctcttctaatatagttgttgataacggtgggaggttgtctgtgatggtcttgggtggtgcctcggccttggtggtttgaggcgatggtggcactggtggtagagttgaggatgagataggatccatgattggcgttgacattcctgaggagcttgctactaagtttgctcgaaggaagatgaagaaagctgcacgtgacaagagttgattagtttcgttgtgggattatgaatgaggtgcgatgtggtgtaagacaattaagaccatgaagtgcccaaatgacaactatcgtaaagatcgaaagtgcgacgtgattgattgatagggatcttgacacaaaggagggcgagctcaatgcattgcttcgcaagagttgtaaacgaaaagaaagagtttgaagtgcgacaattaaaatagttatcgaagcttggaagaaaaaatcaatcatgacttaccagtgctagtctttagaccaggcactgcgctcacgcgtgccatcatagtgggatgacggcaataggcattcagatctaactcgcgtacgacctgcacgtgggccattcccggcatgctgagtggtatggccagcttggagctgtccgattgcagcacagccgatggggggttgtggacaggaccagcacgttgataaggtagtagcgcgcaagtgcccttgtaaagtgatatttagattaggtagctgtaaggtgcagtagggtgtggtcggtattaattagacgaagatgtcgttgcagtgctaatttatttccaagctgctggatatacgtgttcgaccaacagcttgaacgataggacaaccacgaagccagccgcggaagatcctgaaaagatgcgtttgggatgtcgcaaattatacgtaaaagagccccgaaatctctgccgggactacggggagctgacgacagagctagtgtggggatgtttcgcagcccgtgcgtgttcttattcctattgaggagtctaataataatggggtatacgccggtagttatatagataggagatcatgaataggaggggtatctggagatgaagggaaataggcggaaaggattgaaaagagacagaagaggagggaggaagtttgagcaagttaaaccaggtcctcctgatgatgatcgacggggtccgttgctgtggttatatgcaccaaagagcaatgagacgaggatgagcacgccagtcacgaacgctgagacgatcgtgcaggttctcgatgcagatagataacccacggcaacgaagatatgataatgctggccccggtctcaatcgcacgttctgtccttataacatgctatgctcctcgggagaccggggatcgagaataaaagggagggatgtcctcaggattgcgcaggtcttggctttggctatctctgttctcaagataagactaaacgcggcagacgaataggatgccaacgtcgacctccaatagacgagcacgatgcgttcgatggctgcaccagagatttcgctcctgttggctgtaggtgtcgcgtgagtccggagctgaattggcggtctcctactaagaaatagtctcgatcggtctgcaaacctgttggacgatgggggaaagggaactataaacgcctcaaaagactcggaagccaatcaaaagaatggcaaattttgacggtacttgcatgatcatcctacgacgaaatctggaatctattaaatcctcaagagcaccaggtaatatgccggccggccgctatcagttattttagtcagttggttcatcccccgttcccagcccattgtttggtctaatatagacgattcatagctctgtccgccgttgggatggcgtcaagcagtagattggcgagactggacgaatgattccactagtcttacgagatttttgctactcgtgctacggttgatctccctcggaaggtcgaacgatgtccgtaatttatgacttctgcaggggctaactgtcaagggcccccatatcgtcgtcaacgttgtcgcaaattcggtagatcagtgcctcgatcgtgtgtagttgacgactttctcttgcccagtcgggagagcgaatgcttagcgttgtcgcggggttggaatgtgaaaacttcgcctgtggccgagctgtgggtgttgacttggtgcaaccaattacgtgtgcgcgccgagccatcttgaaacgtctttcaacccatgacaggtgtcttgaaacagcagcaagggtgctagatctgcggcacaagaatgtcgagatttgactcgcttcaacatcggacagggtctcgcaaggggttacccccatgaactcgtggtcttggtagcattggtccgtccattccatcccgctacgatttacatgcatggccacgtccgacttacgtattcgttataaactgcgtacatggacggacttgggttgttaattgcgcgcagcgataatccatgtgaactgcgattttgaattataccctttgagcaccacaaaaacgcgcatacgttgtgcttcttttggaatgtagcaatgacggaagagcgttgcatcatgagatcaacagtatcactgaccagacttggaaggacaatgtgtgaatggcttcatgatctgatgtaattagttgtttcttcaaatgtagtctggttggtaaaatcaaag

SEQ ID NO: 3580 - DNA, 1161 bp, Muscodor strobelii
  misc_feature: SGI cDNA ID NO. 560856
  misc_feature: Encodes the peptide sequence at SEQ ID NO 3581
atgttcacttgggccaaacaaactctggctaacgtcgttggcactgaagagcctatctacggcccttcagccattcgatccgtggccgaggacgccaaagaaacaccctataccgagattacgagagatgatctcaaatgggttgctatggactcgacctgtgttgagacccagtgcttttacttcatgtccgatgaggggaacttgggaatggcccagcttatctggagcaacgtagctggcatccgcacgacatgtcagttcaactctaaggtcttctacaaagatggatcacagcctcacctctggtgctcaactccactgagcgatcaagagttcagcgaggacatgacatcgctttatggaaaggactgcgccgtggagctatctgaggacgggaacacctacaccatcaagtccatgaatgacccaagatctattgtcaacctcaagttgacaaagtcggctcctggctttgtggccggtaaagacgggaagaccttgtatggcacagacttgaaaaatccttggggctctatgaggcacgccatatggcctaggtgtactggagaggggaccatcgtgacgccggatggcccagtcaacttcacaggtaaggccatgttcgtcatggctctacagggcatgaagccccaccatgccgccgccaaatggaacttcgcagacttccaaggaccaacgtactccgcgacgcttatggagttcacaacacctctttcttatggggctacggtggtagacgtcggtggaatcgcgaaggatggcgagatcgttatggccagcacagattgtaccgtcgcgcacacgaagatcaagcaagacaccgtaaatgactggccagaaccaacagacgtcaagttcacctggtctgggaagagtaaggatggaaagcccgttgaggccgtcatcgagggacctctaggtgagagacaagatcggatcgatgtgatggccgaggttcctggtttcgtcaagacattagtcgctactgctgtcgggacaaaaccttatatttaccaatattctccgcataaaattccagttactttgaagatgaagataggcgatgaacaaataacagaagagggccatctgttctcagaggccacgttcattgtctcgacggatgaagagaaatga

SEQ ID NO: 3581 - protein, 386 aa, Muscodor strobelii
  misc_feature: SGI Peptide ID NO. 560856
  misc_feature (53)..(380): Pfam Id: PF08622 Pfam Desc: Svf1-like
  misc_feature (9)..(379): NCBI GI: 261352377 Blast Desc: survival factor 1 [Verticillium albo-atrum VaMs.102]
  misc_feature (1)..(379): NCBI GI: 85079277 Blast Desc: survival factor 1 [Neurospora crassa OR74A] gi|74613747|sp|Q7RX39.1|SVF1_NEUCR RecName: Full=Survival factor 1 gi|28917377|gb|EAA27082.1| survival factor 1 [Neurospora crassa
  misc_feature (1)..(379): NCBI GI: 116196860 Blast Desc: CHGG_05028 [Chaetomium globosum CBS 148.51] gi|88180941|gb|EAQ88409.1| CHGG_05028 [Chaetomium globosum CBS 148.51]
  misc_feature (1)..(379): NCBI GI: 256726917 Blast Desc: NECHADRAFT_32356 [Nectria haematococca mpVI 77-13-4]
  misc_feature (1)..(379): NCBI GI: 46121387 Blast Desc: FG05072.1 [Gibberella zeae PH-1] gi|83305840|sp|Q4ICI6.1|SVF1_GIBZE RecName: Full=Survival factor 1
  misc_feature (1)..(379): NCBI GI: 171688390 Blast Desc: protein product [Podospora anserina] gi|170944157|emb|CAP70267.1| protein product [Podospora anserina]
  misc_feature (1)..(379): NCBI GI: 39976003 Blast Desc: MGG_06072 [Magnaporthe grisea 70-15] gi|145011642|gb|EDJ96298.1| MGG_06072 [Magnaporthe grisea 70-15]
  misc_feature (2)..(379): NCBI GI: 240106818 Blast Desc: CPC735_016040 [Coccidioides posadasii C735 delta SOWgp]
  misc_feature (2)..(379): NCBI GI: 119174412 Blast Desc: CIMG_09188 [Coccidioides immitis RS]
  misc_feature (4)..(379): NCBI GI: 154283373 Blast Desc: survival factor 1 [Ajellomyces capsulatus NAm1] gi|150410662|gb|EDN06050.1| survival factor 1 [Ajellomyces capsulatus NAm1]
MFTWAKQTLANVVGTEEPIYGPSAIRSVAEDAKETPYTEITRDDLKWVAMDSTCVETQCFYFMSDEGNLGMAQLIWSNVAGIRTTCQFNSKVFYKDGSQPHLWCSTPLSDQEFSEDMTSLYGKDCAVELSEDGNTYTIKSMNDPRSIVNLKLTKSAPGFVAGKDGKTLYGTDLKNPWGSMRHAIWPRCTGEGTIVTPDGPVNFTGKAMFVMALQGMKPHHAAAKWNFADFQGPTYSATLMEFTTPLSYGATVVDVGGIAKDGEIVMASTDCTVAHTKIKQDTVNDWPEPTDVKFTWSGKSKDGKPVEAVIEGPLGERQDRIDVMAEVPGFVKTLVATAVGTKPYIYQYSPHKIPVTLKMKIGDEQITEEGHLFSEATFIVSTDEEK

SEQ ID NO: 3582 - DNA, 1850 bp, Muscodor strobelii
  misc_feature: SGI EST ID NO. CUFF.9000.0
  misc_feature: Variant of the nucleotide sequence at SEQ ID NO 3580
cctgtcgacagcccaccccgccaaatcaagccccgccactggttcgtgggtagctccagcgccatcatatgccaactcaagacggtcccaagcgaatttgcgactttgcttttttccgttgttcaactccctactcctgcgtagacgtaaaccacttgagcaagggctgcaggctgtgtcacatgcttttgcgtttcttgacttgcgtcgtccttttacctacactcgacataccaccctcacaccgctgtctcaatctgtatttagctgattacagtatttgttactgacatcgccatcatgttcacttgggccaaacaaactctggctaacgtcgttggcactgaagagcctatctacggcccttcagccattcgatccgtggccgaggacgccaaagaaacaccctataccgagattacgagagatgatctcaaatgggttgctatggactcgacctgtgttgagacccagtgcttttacttcatgtccgatgaggggaacttgggaatggcccagcttatctggagcaacgtagctggcatccgcacgacatgtcagttcaactctaaggtcttctacaaagatggatcacagcctcacctctggtgctcaactccactgagcgatcaagagttcagcgaggacatgacatcgctttatggaaaggactgcgccgtggagctatctgaggacgggaacacctacaccatcaagtccatgaatgacccaagatctattgtcaacctcaagttgacaaagtcggctcctggctttgtggccggtaaagacgggaagaccttgtatggcacagacttgaaaaatccttggggctctatgaggcacgccatatggcctaggtgtactggagaggggaccatcgtgacgccggatggcccagtcaacttcacaggtaaggccatgttcgtcatggctctacagggcatgaagccccaccatgccgccgccaaatggaacttcgcagacttccaaggaccaacgtactccgcgacgcttatggagttcacaacacctctttcttatggggctacggtggtagacgtcggtggaatcgcgaaggatggcgagatcgttatggccagcacagattgtaccgtcgcgcacacgaagatcaagcaagacaccgtaaatgactggccagaaccaacagacgtcaagttcacctggtctgggaagagtaaggatggaaagcccgttgaggccgtcatcgagggacctctaggtgagagacaagatcggatcgatgtgatggccgaggttcctggtttcgtcaagacattagtcgctactgctgtcgggacaaaaccttatatttaccaatattctccgcataaaattccagttactttgaagatgaagataggcgatgaacaaataacagaagagggccatctgttctcagaggccacgttcattgtctcgacggatgaagagaaatgattgccatgctagaacgataccagcatcatcaacgttgacagacacccatacttttgtgtataatgaactggtccaagtttcatgtagattttaagaccgtttcttcggttagccttgttctggatagcacacctaatgagtagagaggatggcaagacggcgttaggcaatgatatggatagcatcaacactcgttaatagagaatctttgaaatcttgtcaatgtctgaatggtggtaccaggcgataactgcacgtacacgagaatcattcctctcggacgatagctacgaagagtatcggcatggatatttttgaagtccacacaactaatgacgatacagaacaaatggcaagacatattatcgttcacaagaggggaattgtct

SEQ ID NO: 3583 - DNA, 471 bp, Muscodor strobelii
  misc_feature: SGI cDNA ID NO. 560857
  misc_feature: Reduced expression when VOC is produced
  misc_feature: Encodes the peptide sequence at SEQ ID NO 3584
atgtcaagaaaaggcgccgcggcagctgccgaccagattgtcaagctcattgtcggagctggacaggccagcccaagtccgcccgtcggtccagctctgggcagtaagggtgtcaagtccatggacttttgcaaggagttcaacgccaggacggcacacatattgcccggcacgcccatgcccacgcgagtgaccgtacgcgccgaccgcacattccacttcgatatccgcacgccgcagacctcctggctgttgcgcaatgccgcagacctgccagtcgggaagaagggaaagaggagggcggcaaacaagcctggtcacgaaatagtagggaccgtcagcctgaaacacgtctacgagattgccaaaataaagcagtccgagctgcggttgtctggattagccctcgagggcctctgcaaatctgtcatctaccagtgcaagtctatgggcatcgatgttgtcgcatag

SEQ ID NO: 3584 - protein, 156 aa, Muscodor strobelii
  misc_feature: SGI Peptide ID NO. 560857
  misc_feature (77)..(154): Pfam Id: PF00298 Pfam Desc: Ribosomal protein L11, RNA binding domain
  misc_feature (13)..(72): Pfam Id: PF03946 Pfam Desc: Ribosomal protein L11, N-terminal domain
  misc_feature (6)..(155): NCBI GI: 116196858 Blast Desc: CHGG_05027 [Chaetomium globosum CBS 148.51] gi|88180940|gb|EAQ88408.1| CHGG_05027 [Chaetomium globosum CBS 148.51]
  misc_feature (4)..(155): NCBI GI: 85079273 Blast Desc: NCU04336 [Neurospora crassa OR74A] gi|28917376|gb|EAA27081.1| NCU04336 [Neurospora crassa OR74A]
  misc_feature (5)..(156): NCBI GI: 171688388 Blast Desc: protein product [Podospora anserina] gi|170944156|emb|CAP70266.1| protein product [Podospora anserina]
  misc_feature (4)..(154): NCBI GI: 39976005 Blast Desc: MGG_06071 [Magnaporthe grisea 70-15] gi|145011643|gb|EDJ96299.1| MGG_06071 [Magnaporthe grisea 70-15]
  misc_feature (1)..(155): NCBI GI: 256726864 Blast Desc: [Nectria haematococca mpVI 77-13-4]
  misc_feature (9)..(155): NCBI GI: 261352378 Blast Desc: 54S ribosomal protein L19 [Verticillium albo-atrum VaMs.102]
  misc_feature (1)..(156): NCBI GI: 46123653 Blast Desc: FG06204.1 [Gibberella zeae PH-1]
  misc_feature (7)..(155): NCBI GI: 115387523 Blast Desc: 60S ribosomal protein L19, mitochondrial precursor [Aspergillus terreus NIH2624] gi|114195351|gb|EAU37051.1| 60S ribosomal protein L19, mitochondrial precursor [Aspergillus
  misc_feature (7)..(155): NCBI GI: 70997441 Blast Desc: mitochondrial ribosomal protein L11 [Aspergillus fumigatus Af293] gi|66851104|gb|EAL91430.1| mitochondrial ribosomal protein L11, [Aspergillus fumigatus Af293] ribosomal
  misc_feature (7)..(155): NCBI GI: 67515669 Blast Desc: AN0116.2 [Aspergillus nidulans FGSC A4] gi|40746138|gb|EAA65294.1| AN0116.2 [Aspergillus nidulans FGSC A4] gi|259489689|tpe|CBF90167.1| TPA: mitochondrial ribosomal A4]
  misc_feature: Useful for introducing or modulating the production of volatile compounds
MSRKGAAAAADQIVKLIVGAGQASPSPPVGPALGSKGVKSMDFCKEFNARTAHILPGTPMPTRVTVRADRTFHFDIRTPQTSWLLRNAADLPVGKKGKRRAANKPGHEIVGTVSLKHVYEIAKIKQSELRLSGLALEGLCKSVIYQCKSMGIDVVA

SEQ ID NO: 3585 - DNA, 1311 bp, Muscodor strobelii
  misc_feature: SGI EST ID NO. CUFF.8987.0
  misc_feature: Variant of the nucleotide sequence at SEQ ID NO 3583
taaatttgcagtggaactggaagtcagtgtcgctagaggtgaagctttaaccggtttgttggacgaggcatcactagtcgttcgttttcctctgcctctggccacgacatcttcacaaacgcattcaagatgtcaagaaaaggcgccgcggcagctgccgaccagattgtcaagctcattgtcggagctggacaggccagcccaagtccgcccgtcggtccagctctgggcagtaagggtgtcaagtccatggacttttgcaaggagttcaacgccaggacggcacacatattgcccggcacgcccatgcccacgcgagtgaccgtacgcgccgaccgcacattccacttcgatatccgcacgccgcagacctcctggctgttgcgcaatgccgcagacctgccagtcgggaagaagggaaagaggagggcggcaaacaagcctggtcacgaaatagtagggaccgtcagcctgaaacacgtctacgagattgccaaaataaagcagtccgagctgcggttgtctggattagccctcgagggcctctgcaaatctgtcatctaccagtgcaagtctatgggcatcgatgttgtcgcatagaagaaatgagtatgccacacgagggtcaagcaagccgcctcattagcaagactacacgatataaaagaccatgtcgaatcacgtgtacatcacatgtataacaaaccacgtcagctgtcggcggtccaatggaaatatagaagctggctgcttcagatattgtatataaaattggctttactgcgcgtcttgtttgcgctttacagctgtatttgtacgatttttatagcgagtggagaagtaccggacatgtcgaacaagaaacactacaccttcaagcttgatttcagagaatcgaatcatgtctaaacttaggctttcaggagccttctattgcatcagcactatggccaggtatctcagtagatgtcgaaaatagaaatccacgtttttgacgtgttacctaatgctttcgatctctcaagcagatccgacacttgctgccatttggatccactagccaagcacgggttggactcgggtagcgagttttgctactcggggtggtattggcgtttcaatcattgataccatgtgtggaaaaatgacgagctgccagctgcgtccgactgcgggtctaggggatcttcgaaactcttaccgctgctctcaccaccgcattcatcacctggttcgacgcgatgatcaacggtggatgagtgcatacttatgatcagagttgatcgccatcactttttcaattgccgcctg

SEQ ID NO: 3586 - DNA, 5010 bp, Muscodor strobelii
  misc_feature: SGI cDNA ID NO. 560858
  misc_feature: Encodes the peptide sequence at SEQ ID NO 3587
atgtcccgtctcgggatcccacgaggcgtagacgccgaggaatggctccgaatgagggaacggaaatcgataaatcagctgctatacgtcagttatccatctacgaaggaagtcaacgcagtgaagagccaagcagaactagacgcgatgaacgtaaacgagcacgaccttctcgccgttgctctaggagccccggctcgacaagtcatgctgagggcggaggagattgggcccaagatcggctgggcggatggatatctaagtgctgagcatggagcctgtccgccggactatgaagagtctcctggcgccctcgcgagatcaccaggtcgaatctggatagatttagcggatcgaatgcctggatgtgttgctcgaggtcgtgtccgcgagtccgttgcagcgctaccattgatcgaaggtaccaaggacgtcatccctgacatggccctttgggctgcggttgtagtattggggatgatctgctctatataccgttatgaggataaatacgatggcaataacggagttactgcaaacgtttcaaaaaggacgaggccgaattgccccatgggagacgagctcggagcagaactggcaggaattcctctttctgttgctcttccatactttcaaatttcccgaaggctaggaagaacacttccccacctgagttttcctgaccaatcttcatacaaccttaagattcgagatgtcgcatcgactaccccttatcttgcccggtctgataatattgatctaagatggacaatgtttggggaaaaggcagagatagcttttctaaaaggctgcgctgatacgtctgcatcgttccagcacgggccagacgcaatagcagcatgtcaagaacacgtcatgaatcggaatatcgaggggctccttcgggagatgattcgtctaaaagagattctcgagcgtatgccgaacgccttccattcgatctcgacaaatccaaattccggcgacaattatgttccaagccagcaatgggtgcactggggacagttctccactccgctttcgaaacgatgtcctgcatcttctggtctccaatttcctccctatcttatcatggacgctttcttgggtcgcaaaaaatacacgtcgttccttggaaaagagggtgttcacttgcgagcatggctgccatccaatctacgggcttttatcgccgccatcgaataccactatcgcattcccgagtttgttgagcagtctggagaccctaggttgatgggagtcctggatggaattgtggaagcttatgccggcgaacgaggtttcatgggcgtgcacagatacaaagtctttggcattctagaaattgccggcaagacggggaggactgagaccaatggtttatcaggggctgcggatgcgtctcggccctgggaagaaacccataagcagttttccgaggccatgaaggaacgacttgaaccatatcggggaagtcttgcagtagaaccgcatgagatgcgtggaacctttgaagagtgtcgttatgttacgcacgtgctcaataggtcaacagtcgacaacgatccatcacgctctattgcgcttgtaaccctggatatacaggataccggaatcacttttatgccgggcgatcgactagctattatgcctcttaacaactgggaagaatgtgctaaggtagccgctgcactcgggctagaagatctaatcaacaatccgattgaggtgacaggaacgtgggctcgattcgaaaatcacctcaagtctgtgagacattcaacagctaaaaatctgatcactgttaccgatattctgcgtcgtggtcatttggcgcccatcacaaaggagctggcgctgagattacacgaaatgcttcatgcctcttccaacacaatccttcaagtcctcgctacgaacgagtggcctgttcgtggctctctaggtgatatgttacaagccgcactaatggatactccggagcacatctgggacaaagcatttgatctggacaatctctcatggcttgccgaaatgatccctcttgaagtcccacgcacatattccattgctagttacacagacgaactcttaccgtgcaccgttgacatggctgtatcgcgagctgaatacaaactttgcgccacatttgccggaaacgaagatatctcaagagctggcgtgtccagcgggtttcttaaccctattccaagctctgaagtatccccacccaacctttcatacgatgacgaaattctcgttggtgtctctcgtcctgcagccttccagctgcctatcgacccaatggctccagttgcattcttcgctggcggtagtggtatagctccgttccgaagcttttggcagtctcgcttgattacgtctggactgtctggcggcaagaattacttgtacctcggggtacagtcacgggaaaagttctgctttgaagaggaactaagggaatatgtcggtgcaggtttcatggaagtacatctcgccttctcgcgtgatacgcgtggtttgttctatgatccttatacacgcgatctcatcgaacgccatacaccaccgcgatacatcgatactctgatcatagaacaggccgcaacggtctctgaaatggtcatgtcgaagaagcaaggcggcctaggtggatatatgttcgtttgtggttccgtctccgtatttgattccgtcatgaatggaatccgccaggccatctacacacactgtacggcctcgatggataacgtggacaacatcgtaaacaaggcctttgcagaaaggcggttcatgcttgatgttttcatgacgcctaagcccctcccatgcaatttgccgactatcccgctttcgcaacttgccctgcacacaggtcacagacctggaacgcgcagctggatcggcgtacacgggagtgtctacgacgtgacagatttttgtcctatgcaccctggaggaaccctcattatcaagtcaaacgctggtgtcgattgctcgcagtccttcgacaaccttgcccacaccaataacccagaagttaccagtctcctgacaaagtatttcgttggtcatcttacccccaagccaaattatcagaccgttgctgcgagcggcatgggagacgatgtggatatgtcatcaatgtatgatctatggtcacagtatttacgttcatgcgttgagactctcgttgcccaccagtttgaaatgtacgaaattatgggagccacacgtgatttcgaagccacgaacagcctgaatatgtggcttcgggaggctctcccgaatactatggccgtgcggaccttttacagcttccagagcagactacttcaaggtggattcgccgctctttttggagcgaaatttcaggagctcgtgctcaagctgtctttcggccttgccaacgcgagcggacctgctggcgcccagcttcaattacccgacatcttgggaactattacgcgtgccaagaccaatcctgacgctatcgcatgtacaagagagacagccctggttggtcagtttgtcattgatgcggagagttctttacgatttcaggagcgtggtgtgttcacctacgcggcgaaggccgtccagcttgacatggagctattggaggatctaagacaagaagcctgcaacggtatggatgcgtttgatacaattgccaataacgggccatccttggaagcgggcatggatcatgatgacagagatccagacgatgagatgaacaaaatgatcgccttgtcgtcgtatctgcttcagactctagagcggatggcgcgtcggctcggggtctactacgggcaactagcgcagtgctccgtctaccatcccgaaatcgaaaagaatccagcgcgctcccgttgggctcttgtacgtcgatgtatgcgcgacggaagtctctttgtgcttgctggcgggacccgtctgatcaattctgcatctgcggagaacacccattacatctcgcgggcgaacgctagtcaaaaggttgatttcacaacaatcatgtcacaaatccaagagacgattggttctgataccgcccgagcggccatgggtggtttgtaccatactcaaggaaaagcccagtctcaggagcaggtcactctcaacgacgtgcaccacgcaagaggtcgcagtacaggaggtgcaagcgctgttgcgacacggaacaataagggtgctctcaaggcgatgagcagtttcgttcagaaaaacagcaaggccatacgccggctgagtaagatgcctgctctcgatacaggcgcaagcggagcattcaacttcgaagagatgaagagacaattcggggatttgtcctcaaatcagatgatgacgccgccagaagagcacaactcgtcaccattcgagaccatgaagaccatcgctattacgcgcgcacacttgggacccactccaccttcgagtcgaggttcaagtcgttcgcccacgcgcgtcccggcgaccaacttagctcccacgtcggccgaaatactgttaagcaaactgcaacatcggcgaagatcattgtcccgctctcgcaacaacaccatgcaaagcaggcccaactcacccggctccgcgcagtactaccccgtgataagtggtagcagccggcctccctcgccgccaacgactcacgcatttatatctgggcacatgcacagttcacagctatcacgtcaacagccaccgcaaatgacactgacgatgcccaacaaaatgaaccaaggactgatggccgttagcccgtatcagaacgcgaagccccttaatactaggcgccgcacaactcattccgagggatcacaccatcatgcccatgcgtacagtcctacgccttcagcacccggagcatttgcgagcacttcgctgcagcggatgcggtcgacgtcgtcgtcgtcaagcctgagcattcacagcaggaatacctcgctgcggacgcttcgactcggaggtttggcggaaagacgacccgcgcccaccttttga

SEQ ID NO: 3587 - protein, 1669 aa, Muscodor strobelii
  misc_feature: SGI Peptide ID NO. 560858
  misc_feature (949)..(1028): Pfam Id: PF00173 Pfam Desc: Cytochrome b5-like Heme/Steroid binding domain
  misc_feature (502)..(717): Pfam Id: PF00667 Pfam Desc: FAD binding domain
  misc_feature (773)..(872): Pfam Id: PF00175 Pfam Desc: Oxidoreductase NAD-binding domain
  misc_feature (524)..(577): Pfam Id: PF00667 Pfam Desc: FAD binding domain
  misc_feature (773)..(823): Pfam Id: PF00175 Pfam Desc: Oxidoreductase NAD-binding domain
  misc_feature (18)..(1439): NCBI GI: 171682852 Blast Desc: protein product [Podospora anserina] gi|170941385|emb|CAP67035.1| protein product [Podospora anserina]
  misc_feature (20)..(1452): NCBI GI: 46139817 Blast Desc: FG11423.1 [Gibberella zeae PH-1]
  misc_feature (2)..(1425): NCBI GI: 261360418 Blast Desc: sulfite reductase flavoprotein alpha-component [Verticillium albo-atrum VaMs.102]
  misc_feature (16)..(1425): NCBI GI: 145608580 Blast Desc: MGG_06527 [Magnaporthe grisea 70-15] gi|145016037|gb|EDK00527.1| MGG_06527 [Magnaporthe grisea 70-15]
  misc_feature (20)..(1445): NCBI GI: 189198571 Blast Desc: conserved [Pyrenophora tritici-repentis Pt-1C-BFP] gi|187981571|gb|EDU48197.1| conserved [Pyrenophora tritici-repentis Pt-1C-BFP]
  misc_feature (120)..(888): NCBI GI: 169623985 Blast Desc: SNOG_15242 [Phaeosphaeria nodorum SN15] gi|160705089|gb|EAT77467.2| SNOG_15242 [Phaeosphaeria nodorum SN15]
  misc_feature (960)..(1424): NCBI GI: 169623985 Blast Desc: SNOG_15242 [Phaeosphaeria nodorum SN15] gi|160705089|gb|EAT77467.2| SNOG_15242 [Phaeosphaeria nodorum SN15]
  misc_feature (2)..(155): NCBI GI: 238584978 Blast Desc: MPER_09950 [Moniliophthora perniciosa FA553] gi|215454482|gb|EEB91659.1| MPER_09950 [Moniliophthora perniciosa FA553]
  misc_feature (442)..(557): NCBI GI: 238571426 Blast Desc: MPER_14463 [Moniliophthora perniciosa FA553] gi|215440770|gb|EEB87965.1| MPER_14463 [Moniliophthora perniciosa FA553]
  misc_feature (111)..(486): NCBI GI: 169626297 Blast Desc: SNOG_16434 [Phaeosphaeria nodorum SN15] gi|160705808|gb|EAT76132.2| SNOG_16434 [Phaeosphaeria nodorum SN15]
MSRLGIPRGVDAEEWLRMRERKSINQLLYVSYPSTKEVNAVKSQAELDAMNVNEHDLLAVALGAPARQVMLRAEEIGPKIGWADGYLSAEHGACPPDYEESPGALARSPGRIWIDLADRMPGCVARGRVRESVAALPLIEGTKDVIPDMALWAAVVVLGMICSIYRYEDKYDGNNGVTANVSKRTRPNCPMGDELGAELAGIPLSVALPYFQISRRLGRTLPHLSFPDQSSYNLKIRDVASTTPYLARSDNIDLRWTMFGEKAEIAFLKGCADTSASFQHGPDAIAACQEHVMNRNIEGLLREMIRLKEILERMPNAFHSISTNPNSGDNYVPSQQWVHWGQFSTPLSKRCPASSGLQFPPYLIMDAFLGRKKYTSFLGKEGVHLRAWLPSNLRAFIAAIEYHYRIPEFVEQSGDPRLMGVLDGIVEAYAGERGFMGVHRYKVFGILEIAGKTGRTETNGLSGAADASRPWEETHKQFSEAMKERLEPYRGSLAVEPHEMRGTFEECRYVTHVLNRSTVDNDPSRSIALVTLDIQDTGITFMPGDRLAIMPLNNWEECAKVAAALGLEDLINNPIEVTGTWARFENHLKSVRHSTAKNLITVTDILRRGHLAPITKELALRLHEMLHASSNTILQVLATNEWPVRGSLGDMLQAALMDTPEHIWDKAFDLDNLSWLAEMIPLEVPRTYSIASYTDELLPCTVDMAVSRAEYKLCATFAGNEDISRAGVSSGFLNPIPSSEVSPPNLSYDDEILVGVSRPAAFQLPIDPMAPVAFFAGGSGIAPFRSFWQSRLITSGLSGGKNYLYLGVQSREKFCFEEELREYVGAGFMEVHLAFSRDTRGLFYDPYTRDLIERHTPPRYIDTLIIEQAATVSEMVMSKKQGGLGGYMFVCGSVSVFDSVMNGIRQAIYTHCTASMDNVDNIVNKAFAERRFMLDVFMTPKPLPCNLPTIPLSQLALHTGHRPGTRSWIGVHGSVYDVTDFCPMHPGGTLIIKSNAGVDCSQSFDNLAHTNNPEVTSLLTKYFVGHLTPKPNYQTVAASGMGDDVDMSSMYDLWSQYLRSCVETLVAHQFEMYEIMGATRDFEATNSLNMWLREALPNTMAVRTFYSFQSRLLQGGFAALFGAKFQELVLKLSFGLANASGPAGAQLQLPDILGTITRAKTNPDAIACTRETALVGQFVIDAESSLRFQERGVFTYAAKAVQLDMELLEDLRQEACNGMDAFDTIANNGPSLEAGMDHDDRDPDDEMNKMIALSSYLLQTLERMARRLGVYYGQLAQCSVYHPEIEKNPARSRWALVRRCMRDGSLFVLAGGTRLINSASAENTHYISRANASQKVDFTTIMSQIQETIGSDTARAAMGGLYHTQGKAQSQEQVTLNDVHHARGRSTGGASAVATRNNKGALKAMSSFVQKNSKAIRRLSKMPALDTGASGAFNFEEMKRQFGDLSSNQMMTPPEEHNSSPFETMKTIAITRAHLGPTPPSSRGSSRSPTRVPATNLAPTSAEILLSKLQHRRRSLSRSRNNTMQSRPNSPGSAQYYPVISGSSRPPSPPTTHAFISGHMHSSQLSRQQPPQMTLTMPNKMNQGLMAVSPYQNAKPLNTRRRTTHSEGSHHHAHAYSPTPSAPGAFASTSLQRMRSTSSSSSLSIHSRNTSLRTLRLGGLAERRPAPTF

SEQ ID NO: 3588 - DNA, 3004 bp, Muscodor strobelii
  misc_feature: SGI EST ID NO. CUFF.8993.0
  misc_feature: Variant of the nucleotide sequence at SEQ ID NO 3586
cggctggtggtctttgcgttcaatgttcatgaacgcgtaagccatatatgataatggagcttctttcgctccgactatatcgttgtctgtctagtcagtgcctggggctcaccgcgatctgtcgagttgagaccagcgttatttcatcttgttggcgtgtttatcttcttttcttgccccggcggttcttgtttagtcttcataattcatggtcttttgtttcttacaatcgtccccttaagctggctggagagggtttttatttacaatattactataatcgctcgtcgccatgtctgaaagatcatgtcccgtctcggggtcagttgcaggtcattgtccggttggcatgagtgcgtcaaggagcagtagccgcatggggccacggggctgctccttttcaggattcacacagcctggggatattcacgcggcttttgatatcccacgaggcgtagacgccgaggaatggctccgaatgagggaacggaaatcgataaatcagctgctatacgtcagttatccatctacgaaggaagtcaacgcagtgaagagccaagcagaactagacgcgatgaacgtaaacgagcacgaccttctcgccgttgctctaggagccccggctcgacaagtcatgctgagggcggaggagattgggcccaagatcggctgggcggatggatatctaagtgctgagcatggagcctgtccgccggactatgaagagtctcctggcgccctcgcgagatcaccaggtcgaatctggatagatttagcggatcgaatgcctggatgtgttgctcgaggtcgtgtccgcgagtccgttgcagcgctaccattgatcgaaggtaccaaggacgtcatccctgacatggccctttgggctgcggttgtagtattggggatgatctgctctatataccgttatgaggataaatacgatggcaataacggagttactgcaaacgtttcaaaaaggacgaggccgaattgccccatgggagacgagctcggagcagaactggcaggaattcctctttctgttgctcttccatactttcaaatttcccgaaggctaggaagaacacttccccacctgagttttcctgaccaatcttcatacaaccttaagattcgagatgtcgcatcgactaccccttatcttgcccggtctgataatattgatctaagatggacaatgtttggggaaaaggcagagatagcttttctaaaaggctgcgctgatacgtctgcatcgttccagcacgggccagacgcaatagcagcatgtcaagaacacgtcatgaatcggaatatcgaggggctccttcgggagatgattcgtctaaaagagattctcgagcgtatgccgaacgccttccattcgatctcgacaaatccaaattccggcgacaattatgttccaagccagcaatgggtgcactggggacagttctccactccgctttcgaaacgatgtcctgcatcttctggtctccaatttcctccctatcttatcatggacgctttcttgggtcgcaaaaaatacacgtcgttccttggaaaagagggtgttcacttgcgagcatggctgccatccaatctacgggcttttatcgccgccatcgaataccactatcgcattcccgagtttgttgagcagtctggagaccctaggttgatgggagtcctggatggaattgtggaagcttatgccggcgaacgaggtttcatgggcgtgcacagatacaaagtctttggcattctagaaattgccggcaagacggggaggactgagaccaatggtttatcaggggctgcggatgcgtctcggccctgggaagaaacccataagcagttttccgaggccatgaaggaacgacttgaaccatatcggggaagtcttgcagtagaaccgcatgagatgcgtggaacctttgaagagtgtcgttatgttacgcacgtgctcaataggtcaacagtcgacaacgatccatcacgctctattgcgcttgtaaccctggatatacaggataccggaatcacttttatgccgggcgatcgactagctattatgcctcttaacaactgggaagaatgtgctaaggtagccgctgcactcgggctagaagatctaatcaacaatccgattgaggtgacaggaacgtgggctcgattcgaaaatcacctcaagtctgtgagacattcaacagctaaaaatctgatcactgttaccgatattctgcgtcgtggtcatttggcgcccatcacaaaggagctggcgctgagattacacgaaatgcttcatgcctcttccaacacaatccttcaagtcctcgctacgaacgagtggcctgttcgtggctctctaggtgatatgttacaagccgcactaatggatactccggagcacatctgggacaaagcatttgatctggacaatctctcatggcttgccgaaatgatccctcttgaagtcccacgcacatattccattgctagttacacagacgaactcttaccgtgcaccgttgacatggctgtatcgcgagctgaatacaaactttgcgccacatttgccggaaacgaagatatctcaagagctggcgtgtccagcgggtttcttaaccctattccaagctctgaagtatccccacccaacctttcatacgatgacgaaattctcgttggtgtctctcgtcctgcagccttccagctgcctatcgacccaatggctccagttgcattcttcgctggcggtagtggtatagctccgttccgaagcttttggcagtctcgcttgattacgtctggactgtctggcggcaagaattacttgtacctcggggtacagtcacgggaaaagttctgctttgaagaggaactaagggaatatgtcggtgcaggtttcatggaagtacatctcgccttctcgcgtgatacgcgtggtttgttctatgatccttatacacgcgatctcatcgaacgccatacaccaccgcga

SEQ ID NO: 3589 - DNA, 3876 bp, Muscodor strobelii
  misc_feature: SGI cDNA ID NO. 560859
  misc_feature: Encodes the peptide sequence at SEQ ID NO 3590
atggaaaacaaccttttccccaatcttgtcttgaggaagaggaacccaccggctgcgccaacgcccgaaacccttcttgacaggttgtcgaagtcctttgtttgcagccgattcaacgaaaaagaggagaagttcctgccggcgaatctagtcgaggtattagttacagacgcatctatcatcgagacaataggctcgaataaccttcagctgctcaaccgccccgaagatcgagagtcgtttgtggaatggatcagaacgcgtgcgccaaagattttcctcattcatgtgctaatgcatcgaccgccccatgtgctgtttgatgcaatgatgttgtttcttacccagagactggatgatggatgtcttcctcttgaaaatcatgcatgtagcacctcatgcgagagcccatgtgtcgtcaagaggattcctaagggcgaagaagagctgggcaaaccctactatagagaacgattccacgaacttcagtggaagttcaagagtcctgtattccgtggggacaagcaaaactacgatatctctattcatgaaatcttgccttttatcgagaaagatgttcataaggacgaaggcgctttcagtacagtttccatggtgacgatacacaaaagccatggggatccctcttttctcaaggtcgcgatcaaagaaatacaggtcaaccatgatcctatcccgaagatgggcacaacagcccatcagacggaaaagagtcaggagaatgaaacagaccgtgtttgggaaaccgaggtcaaggccctcaatatggctcgccagattaaaaaccagcacatggtgcgctgcctcgcaaacatccggatgggtaataggcgattgctcatgtttccatgggccgacggcggtagcctgcgaaatttctggaagaaaaaccccgagcctgtcctcacaacacagctagttcgagattctctcagccagcttcgcggactggcagatgccttatacaatcttcataattacatccccgaatatactttacctgctcaggaaaagaacgattcgagagttcccctaagcgatgacgcccacatcgacgagaaaatctcgaaggtgccggacatggaggttaatggacatcctgtaattataacgcacgaggaagacggctctcagagtatcagacatggggatttgaagcctgagaacattctccagtttttctatgacggagagaatactggtgcgattagtttgataggaattctcaagatcgccgacttaggcctagcgaagcgtcatgtattgcgaactcaattgagagatcaggtcacaacaacaaaatatggaacagctctctacgaagcgccggaagccattgttaacgcacagcagaaaaagggtcgatcgcggctctatgacatttggtccatgggctgtattatgttcgagtttattctttggatgctctacggcaacgatgccatcatcatgctccaccgccaacttcagaattcgcagcgtttccagtactttgagatctctaaagacaaagctcggatccttgttgttgacctgcctcaaaaaggaaacagtggaagaagaggagaggcgatcacccccgagcctctatttgacgcactctctggaaaggctgagaagggtgatcggggcacatcacaagaactcctggaaggcatcagtcatatattggacctcttagtggaagatgacgtattgcaggacagcctatcgagtactggctccgaatcgctaggaattcctgctaacagatccatcagtctttcgactaatctgtcaataggacgagcgtctattacaggcagaaatacccgaacagcaagagctgactatacgatacccccactaaaggactgggagtattttgttgacaatggtttcgctgagaaagttgcgacagaactggacgctcgcaccttacaacctagctggtctaagaaggtcacactatgtgatgactgtagaagcctcgacttttggaaaggcggatttaccatagacgttgctttggcagaccttcaagagcgatccgtgagttgctctctttgcgagattctatggactacccataggaacagaagcgggtttcaaaggctgcccagggtccgatttgagcgcgactcgtcgaatcttaagctgatggggacagacggtatgcttccggttctctcaatacttcgggatcaaggactccatacgccgactccaatacagcttgggttccccaagctgctggaaccgggaacttccggttactttagactccttagactctggttacgggattgtgacgaacatgacggttgtcagataagtcgaaaaacggcattaccaactcggctggtggacgtcggaaccgcggataacgagactcttcgccttgtggagacgcaggagatcgggctcgacggggtacgagacaagtatattgctctatcgcacccttggggagatccgttgaagcacccacctttcagcacttttcgcactgatcctagtggggaaaacagagacctcgcagcactcaagagagccattcctcacgacgagctgcctcatacttttcaagatgcagttcggacgactagagctcttggaatccgttatttgtggattgattcactctgtatcatccaaggtgcggatggtgatttccacaaagaatcgaagaacatggaaaacgtttttagcggtgcttactgtgtgctggcagcgagtcgcgcaaaaggccagcacgatggattcctcggacctattcgacagagagaatatgtgacgattcaaagagggtccgagagtcccttctatatctgcgaggcaatcgacaatttcaacggggatgtacttgagggtcacctcaatacaagaggatggatcttgcaggagcgtgctttggctaggcgcaccatcttcttcaccgcaacccaagcatactttgaatgtgggaagggtgtgcggtgccaatcattaacgaagatgcataagtacagttcttttcatgttcccaatttcttctctgtcgtaccctatacaaatgttgacgtgatggctttctttagtaacatggccgatttcctcggcgacccaaacttccccaataaggccgaaaagggccagcgcggtttgaaaattgcctactttcaggatctctacaagaaatatagtagactaaatttttcgcacatcgcggatcgcccatttgcgatcgagggcttggaaaatcgccttcgtaccgtcttgaagtcaaagggcgcgttcgggatacttgacgacggacctggcaaagggctgtttcaccgtagccttctatggattcgggatgagagcaaagacaaccctgagccctcgatgattctcattcaattccctcctgaccgaaaggtaaatgtgcccacttggtcgtggatggcctacaaaggccacatcgactatctcgagccgcccttcgacaagaccgattgggagaaggaggatgtccacccaccgcaaatcagagcaagcagcagcctccctgtggacggcagagccggggactctgctccagccctcgggctggagatagtcgctactgtccgtccctttgacgtcgctggccgctcgatgggcgacgtcagcctcacctacgacagagagcgaactcagctggacagcagccgaaagcattgtgttgtcgtcgcgacgtcaaaagatggaaaatcgagggaggagaaaaggcattatgtgctcctcgtgtccccgctaccgagtgcggccggcgatgtcggcgagactgcatacgagcgtgtcggcgcaggctatatgcttggcaagttcatcacttttgatgagtcggctcagccagcgaaaattctctag

SEQ ID NO: 3590 - protein, 1291 aa, Muscodor strobelii
  misc_feature: SGI Peptide ID NO. 560859
  misc_feature (816)..(969): Pfam Id: PF06985 Pfam Desc: Heterokaryon incompatibility protein (HET)
  misc_feature (816)..(912): Pfam Id: PF06985 Pfam Desc: Heterokaryon incompatibility protein (HET)
  misc_feature (384)..(480): Pfam Id: PF00069 Pfam Desc: Protein kinase domain
  misc_feature (303)..(1290): NCBI GI: 169607331 Blast Desc: SNOG_06722 [Phaeosphaeria nodorum SN15] gi|160701390|gb|EAT85373.2| SNOG_06722 [Phaeosphaeria nodorum SN15]
  misc_feature (45)..(1274): NCBI GI: 256729997 Blast Desc: NECHADRAFT_82546 [Nectria haematococca mpVI 77-13-4]
  misc_feature (74)..(1290): NCBI GI: 256723790 Blast Desc: NECHADRAFT_78344 [Nectria haematococca mpVI 77-13-4]
  misc_feature (39)..(1280): NCBI GI: 256723898 Blast Desc: NECHADRAFT_78374 [Nectria haematococca mpVI 77-13-4]
  misc_feature (81)..(1290): NCBI GI: 256722363 Blast Desc: NECHADRAFT_82209 [Nectria haematococca mpVI 77-13-4]
  misc_feature (632)..(1258): NCBI GI: 256722820 Blast Desc: NECHADRAFT_87137 [Nectria haematococca mpVI 77-13-4]
  misc_feature (44)..(1275): NCBI GI: 256720668 Blast Desc: NECHADRAFT_85605 [Nectria haematococca mpVI 77-13-4]
  misc_feature (670)..(1288): NCBI GI: 164425000 Blast Desc: NCU06583 [Neurospora crassa OR74A] gi|157070747|gb|EAA32707.2| NCU06583 [Neurospora crassa OR74A]
  misc_feature (625)..(1285): NCBI GI: 46110541 Blast Desc: FG02152.1 [Gibberella zeae PH-1]
  misc_feature (744)..(1279): NCBI GI: 170940327 Blast Desc: protein product [Podospora anserina]
MENNLFPNLVLRKRNPPAAPTPETLLDRLSKSFVCSRFNEKEEKFLPANLVEVLVTDASIIETIGSNNLQLLNRPEDRESFVEWIRTRAPKIFLIHVLMHRPPHVLFDAMMLFLTQRLDDGCLPLENHACSTSCESPCVVKRIPKGEEELGKPYYRERFHELQWKFKSPVFRGDKQNYDISIHEILPFIEKDVHKDEGAFSTVSMVTIHKSHGDPSFLKVAIKEIQVNHDPIPKMGTTAHQTEKSQENETDRVWETEVKALNMARQIKNQHMVRCLANIRMGNRRLLMFPWADGGSLRNFWKKNPEPVLTTQLVRDSLSQLRGLADALYNLHNYIPEYTLPAQEKNDSRVPLSDDAHIDEKISKVPDMEVNGHPVIITHEEDGSQSIRHGDLKPENILQFFYDGENTGAISLIGILKIADLGLAKRHVLRTQLRDQVTTTKYGTALYEAPEAIVNAQQKKGRSRLYDIWSMGCIMFEFILWMLYGNDAIIMLHRQLQNSQRFQYFEISKDKARILVVDLPQKGNSGRRGEAITPEPLFDALSGKAEKGDRGTSQELLEGISHILDLLVEDDVLQDSLSSTGSESLGIPANRSISLSTNLSIGRASITGRNTRTARADYTIPPLKDWEYFVDNGFAEKVATELDARTLQPSWSKKVTLCDDCRSLDFWKGGFTIDVALADLQERSVSCSLCEILWTTHRNRSGFQRLPRVRFERDSSNLKLMGTDGMLPVLSILRDQGLHTPTPIQLGFPKLLEPGTSGYFRLLRLWLRDCDEHDGCQISRKTALPTRLVDVGTADNETLRLVETQEIGLDGVRDKYIALSHPWGDPLKHPPFSTFRTDPSGENRDLAALKRAIPHDELPHTFQDAVRTTRALGIRYLWIDSLCIIQGADGDFHKESKNMENVFSGAYCVLAASRAKGQHDGFLGPIRQREYVTIQRGSESPFYICEAIDNFNGDVLEGHLNTRGWILQERALARRTIFFTATQAYFECGKGVRCQSLTKMHKYSSFHVPNFFSVVPYTNVDVMAFFSNMADFLGDPNFPNKAEKGQRGLKIAYFQDLYKKYSRLNFSHIADRPFAIEGLENRLRTVLKSKGAFGILDDGPGKGLFHRSLLWIRDESKDNPEPSMILIQFPPDRKVNVPTWSWMAYKGHIDYLEPPFDKTDWEKEDVHPPQIRASSSLPVDGRAGDSAPALGLEIVATVRPFDVAGRSMGDVSLTYDRERTQLDSSRKHCVVVATSKDGKSREEKRHYVLLVSPLPSAAGDVGETAYERVGAGYMLGKFITFDESAQPAKIL

SEQ ID NO: 3591 - DNA, 2484 bp, Muscodor strobelii
  misc_feature: SGI cDNA ID NO. 560860
  misc_feature: Elevated expression when VOC is produced
  misc_feature: Encodes the peptide sequence at SEQ ID NO 3592
atgactgacccatcgtttcattcccaagatttagccatcgaggcgacattgccacatcagcagaaaactgtcaatgccaatgatttgaaccttgccacgactcacggtagttctgtgggtaaagaagaaaccagtcttggtcgtttgaccggcttctccgagcagctattgcaagtacctcagctgcatacgtcgctacatcctgttccaacaccatctcagactcccatctctgagatagatgactctgaatatggacagtcaagtcaggcaaagagcccacgaggaagtagtgaagctaccagtccaccaggacgaactccacgctcatcctttggtaatgccgatatcagtccaagctcaactcaggcattcctgcatcttcctcgagatgacagtgacagacgtcccccagtcttcgaagcagatgatttgaactcaattggtgactcagacaaccatcgtcatgagcgggagcatcgaaaactgctgaattcggtttcatccttgaggattctaagactcgcgaaatcacaaaaagagtcatcaggcccgaatcttcacgatcgtatgtggaaatgtctcaaacggtcttttgttcggtggcctgtccaggaagagagacacttcttggcggacggatctctgaacgagctattcactctcgacgctgtgcaacgcgaacttcgccgcgatgaccagatgaatgaggttgaggctaatctggttgccgcgataatatgtgaccagaataacacggaaacccccattcgcaagatattcgcaacactggtctgcatcaatcgccctgcagaaattttgcttttcttagaggcagatatatgcgattttgatctgcccttggtcacgattcacggccaagcacgatgggtgcatgcgaaacgcagaggagagggctacaagaaaagcctaccaccactcgcagacatcccagcttttgcatcctggtccgcttataatctggaagaattttggaaatggcagaggatcgtcatggctcccgtcttcgaggagggcgagtacaactacatcccccattattttcttgacgaggacgatgtattaccattcattaagccagatgacttcaatgacccatcagagcacaagaaattcctcggtgggtattccacagtctacatggcacgcatacatcaccagcatcatggatttagcgacccaattctcgttgaccgcggttttgcgatcaaagtaattgacgaggaacatcaagaatcgtttgagaaggaatgccaagttcttaagaagttcaagggtggaaagcagcatccccatgtgattacactccttgcgacattcgaaagagggcgagagcgaggtctaatctcctatcgagcggaatgcgatctctctcagttctggagtgatcattgccccaagccgcagttcgacagcaaaacagtcacttgggttgctcagcaagtcgctgggatggcagatggattattgagacttcacaaacaccatacctggactcgggacaaaccgattgcgaatccaaacgggaaatcacgaatgagcaaacagacagtaaagagtttgaccaaatctgactcgcatattcagactgaagggggcaagatcaccaagtacggccgccacggcgacatcaaagccgacaacatcctcctgttctatgatccagcgaattcatttggcacattgaagtttaccgatttcggaacttcagacctgaactcaattttgagcaagtcagagttcaggcacaatgtcgccaacacttggaattatcgacctcccgaggcggaagtcatctctcaagcgatccgtcaatctgcagacatgtggtctttgggttgcgtctatcttgagttcgtcgcatggcttctcggagggcacgatttcctcatgcatttcgccgagtcaagaagcaagaaggcgacccaagacctggaaacgcaggcttcggaaccgagggtagatgcgttctttgactctactatctattacgatacgatgaaccagcagcaaaagcgcatcgaggtcaaagaacctgtgatcaagttcttccagaccgcatatgaccaccaaaattgcagcggatacatatacgatttcctccgcctcattcaggaagagatgctggttctggagccgtggaactcctcggcgaccaaccgtatttcttgcgagaatctcgtgcagcgactcaacgggttctgcaagaggtgctcagaagacgagtcctacgccactcagcgcatcatctttccggaccaccgacgcccgaggagcgcgccgccaaacgacagcaagcggcgcattgtgataccgatgactagtttgaccaatccggttatcagattgaagggtcggcacggctccgagcaggttatgtccgcgatgaacaaacagccgaggaagcctctggtcctgggaaaggatctcgagaagatcaagacacgggcaaacacccagtga

SEQ ID NO: 3592 - protein, 827 aa, Muscodor strobelii
  misc_feature: SGI Peptide ID NO. 560860
  misc_feature (548)..(627): Pfam Id: PF00069 Pfam Desc: Protein kinase domain
  misc_feature (257)..(644): NCBI GI: 169607333 Blast Desc: SNOG_06723 [Phaeosphaeria nodorum SN15] gi|111064254|gb|EAT85374.1| SNOG_06723 [Phaeosphaeria nodorum SN15]
  misc_feature (205)..(747): NCBI GI: 170940330 Blast Desc: protein product [Podospora anserina]
  misc_feature (238)..(645): NCBI GI: 256722881 Blast Desc: NECHADRAFT_87138 [Nectria haematococca mpVI 77-13-4]
  misc_feature (259)..(751): NCBI GI: 154300072 Blast Desc: BC1G_11225 [Botryotinia fuckeliana B05.10] gi|150856838|gb|EDN32030.1| BC1G_11225 [Botryotinia fuckeliana B05.10]
  misc_feature (249)..(742): NCBI GI: 171685536 Blast Desc: protein product [Podospora anserina] gi|170942729|emb|CAP68382.1| protein product [Podospora anserina]
  misc_feature (195)..(720): NCBI GI: 116200846 Blast Desc: CHGG_10968 [Chaetomium globosum CBS 148.51] gi|88175682|gb|EAQ83150.1| CHGG_10968 [Chaetomium globosum CBS 148.51]
  misc_feature (259)..(751): NCBI GI: 259480575 Blast Desc: TPA: protein kinase domain-containing protein (AFU_orthologue; AFUA_2G14650) [Aspergillus nidulans FGSC A4]
  misc_feature (259)..(751): NCBI GI: 67541591 Blast Desc: AN6959.2 [Aspergillus nidulans FGSC A4] gi|40738411|gb|EAA57601.1| AN6959.2 [Aspergillus nidulans FGSC A4]
  misc_feature (258)..(746): NCBI GI: 46126729 Blast Desc: FG07742.1 [Gibberella zeae PH-1]
  misc_feature (216)..(755): NCBI GI: 121716138 Blast Desc: protein kinase domain protein [Aspergillus clavatus NRRL 1] gi|119403835|gb|EAW14252.1| protein kinase domain protein [Aspergillus clavatus NRRL 1]
  misc_feature: Useful for introducing or modulating the production of volatile compounds
MTDPSFHSQDLAIEATLPHQQKTVNANDLNLATTHGSSVGKEETSLGRLTGFSEQLLQVPQLHTSLHPVPTPSQTPISEIDDSEYGQSSQAKSPRGSSEATSPPGRTPRSSFGNADISPSSTQAFLHLPRDDSDRRPPVFEADDLNSIGDSDNHRHEREHRKLLNSVSSLRILRLAKSQKESSGPNLHDRMWKCLKRSFVRWPVQEERHFLADGSLNELFTLDAVQRELRRDDQMNEVEANLVAAIICDQNNTETPIRKIFATLVCINRPAEILLFLEADICDFDLPLVTIHGQARWVHAKRRGEGYKKSLPPLADIPAFASWSAYNLEEFWKWQRIVMAPVFEEGEYNYIPHYFLDEDDVLPFIKPDDFNDPSEHKKFLGGYSTVYMARIHHQHHGFSDPILVDRGFAIKVIDEEHQESFEKECQVLKKFKGGKQHPHVITLLATFERGRERGLISYRAECDLSQFWSDHCPKPQFDSKTVTWVAQQVAGMADGLLRLHKHHTWTRDKPIANPNGKSRMSKQTVKSLTKSDSHIQTEGGKITKYGRHGDIKADNILLFYDPANSFGTLKFTDFGTSDLNSILSKSEFRHNVANTWNYRPPEAEVISQAIRQSADMWSLGCVYLEFVAWLLGGHDFLMHFAESRSKKATQDLETQASEPRVDAFFDSTIYYDTMNQQQKRIEVKEPVIKFFQTAYDHQNCSGYIYDFLRLIQEEMLVLEPWNSSATNRISCENLVQRLNGFCKRCSEDESYATQRIIFPDHRRPRSAPPNDSKRRIVIPMTSLTNPVIRLKGRHGSEQVMSAMNKQPRKPLVLGKDLEKIKTRANTQ

SEQ ID NO: 3593 - DNA, 3338 bp, Muscodor strobelii
  misc_feature: SGI EST ID NO. CUFF.9018.0
  misc_feature: Variant of the nucleotide sequence at SEQ ID NO 3591
aaattcacgactgacgtcgtttttgcgcatgcagtagaacatacatggtggggggcgcagcagtatgcccctgctgagggtcgtttttccactttctactattcaccgagccatgcatgggtcttacaacagtcgactaggctttttttcgcgttactctatagggcacgaggcgttttgtatggctttcagctccctctatggccatcttaagtctgccctttttgaggctacacggtcggtgtgttctaccactggcgcttgatgaggcctctgctgcggcccaaagtagtgctgctgagttctatagaatgatacgtctcccagtggcggataactggcggcctggccaatccacaactacttgtcaagtttttggaatactatacgaaacatgactgacccatcgtttcattcccaagatttagccatcgaggcgacattgccacatcagcagaaaactgtcaatgccaatgatttgaaccttgccacgactcacggtagttctgtgggtaaagaagaaaccagtcttggtcgtttgaccggcttctccgagcagctattgcaagtacctcagctgcatacgtcgctacatcctgttccaacaccatctcagactcccatctctgagatagatgactctgaatatggacagtcaagtcaggcaaagagcccacgaggaagtagtgaagctaccagtccaccaggacgaactccacgctcatcctttggtaatgccgatatcagtccaagctcaactcaggcattcctgcatcttcctcgagatgacagtgacagacgtcccccagtcttcgaagcagatgatttgaactcaattggtgactcagacaaccatcgtcatgagcgggagcatcgaaaactgctgaattcggtttcatccttgaggattctaagactcgcgaaatcacaaaaagagtcatcaggcccgaatcttcacgatcgtatgtggaaatgtctcaaacggtcttttgttcggtggcctgtccaggaagagagacacttcttggcggacggatctctgaacgagctattcactctcgacgctgtgcaacgcgaacttcgccgcgatgaccagatgaatgaggttgaggctaatctggttgccgcgataatatgtgaccagaataacacggaaacccccattcgcaagatattcgcaacactggtctgcatcaatcgccctgcagaaattttgcttttcttagaggcagatatatgcgattttgatctgcccttggtcacgattcacggccaagcacgatgggtgcatgcgaaacgcagaggagagggctacaagaaaagcctaccaccactcgcagacatcccagcttttgcatcctggtccgcttataatctggaagaattttggaaatggcagaggatcgtcatggctcccgtcttcgaggagggcgagtacaactacatcccccattattttcttgacgaggacgatgtattaccattcattaagccagatgacttcaatgacccatcagagcacaagaaattcctcggtgggtattccacagtctacatggcacgcatacatcaccagcatcatggatttagcgacccaattctcgttgaccgcggttttgcgatcaaagtaattgacgaggaacatcaagaatcgtttgagaaggaatgccaagttcttaagaagttcaagggtggaaagcagcatccccatgtgattacactccttgcgacattcgaaagagggcgagagcgaggtctaatctcctatcgagcggaatgcgatctctctcagttctggagtgatcattgccccaagccgcagttcgacagcaaaacagtcacttgggttgctcagcaagtcgctgggatggcagatggattattgagacttcacaaacaccatacctggactcgggacaaaccgattgcgaatccaaacgggaaatcacgaatgagcaaacagacagtaaagagtttgaccaaatctgactcgcatattcagactgaagggggcaagatcaccaagtacggccgccacggcgacatcaaagccgacaacatcctcctgttctatgatccagcgaattcatttggcacattgaagtttaccgatttcggaacttcagacctgaactcaattttgagcaagtcagagttcaggcacaatgtcgccaacacttggaattatcgacctcccgaggcggaagtcatctctcaagcgatccgtcaatctgcagacatgtggtctttgggttgcgtctatcttgagttcgtcgcatggcttctcggagggcacgatttcctcatgcatttcgccgagtcaagaagcaagaaggcgacccaagacctggaaacgcaggcttcggaaccgagggtagatgcgttctttgactctactatctattacgatacgatgaaccagcagcaaaagcgcatcgaggtcaaagaacctgtgatcaagttcttccagaccgcatatgaccaccaaaattgcagcggatacatatacgatttcctccgcctcattcaggaagagatgctggttctggagccgtggaactcctcggcgaccaaccgtatttcttgcgagaatctcgtgcagcgactcaacgggttctgcaagaggtgctcagaagacgagtcctacgccactcagcgcatcatctttccggaccaccgacgcccgaggagcgcgccgccaaacgacagcaagcggcgcattgtgataccgatgactagtttgaccaatccggttatcagattgaagggtcggcacggctccgagcaggttatgtccgcgatgaacaaacagccgaggaagcctctggtcctgggaaaggatctcgagaagatcaagacacgggcaaacacccagtgactggtcgtcaccgggcgcactcacctttttggcaccctttccctttctcttctattttccgtctgtaaagcgtttctaggcggcgcaatgggttggtcaggtacctttgaccgaggaatagtattcaaacagggcgctccagattggtggaacggctagcttgggatatggagctcaagcttctttgcttcagatgtataccagttcatgctagagtgttttgctgtaacatagaggtttgctgtaacacagaggttctcgtttccgacggtagccgagctggtagtgcgagctcgcgatcatccttcatatacctttttagcgcaagtcagagccgcgagaggagtggtaccgcgagaggagtggtaccgcgactccggttctgcaaatgcgctgcaacacactagtaaattaactacttaacctatgtgagcaacactatttcgtatttcaatacgca

SEQ ID NO: 3594 - DNA, 273 bp, Muscodor strobelii
  misc_feature: SGI cDNA ID NO. 560861
  misc_feature: Elevated expression when VOC is produced
  misc_feature: Encodes the peptide sequence at SEQ ID NO 3595
atgtccaacaccacgcttgatcctgttgaagaagaaggctcccaggaggaagcacggttacagcagaaaggttcgagagaaatgctgtcatttaatagcaatacgacccaagatttctcggggcgaaatataaactccaagaagctgatggctttgctgaggacgaagttcggcaccggcgcatatgacgtacatatgatacataactgctattatgtcaaagcgcccagaaagctctcagacagcgagatcgcagagtgcaaatatcgttga

SEQ ID NO: 3595 - protein, 90 aa, Muscodor strobelii
  misc_feature: SGI Peptide ID NO. 560861
  misc_feature (25)..(88): NCBI GI: 170940329 Blast Desc: protein product [Podospora anserina]
  misc_feature: Useful for introducing or modulating the production of volatile compounds
MSNTTLDPVEEEGSQEEARLQQKGSREMLSFNSNTTQDFSGRNINSKKLMALLRTKFGTGAYDVHMIHNCYYVKAPRKLSDSEIAECKYR

SEQ ID NO: 3596 - DNA, 1868 bp, Muscodor strobelii
  misc_feature: SGI EST ID NO. CUFF.9196.0
  misc_feature: Variant of the nucleotide sequence at SEQ ID NO 3594
gccatgagtagaatttgacaacattatgaaactataaaaaatggtccagctgagaggaggttgtgaaggaatcggcaccgcaaaatggtatatatattgagaagacgtcttatctccacgacagaaagggtctgtcaagtgtgtcgtcaggaatattagagctcattacatataattcgagtctcttgcatcgacgttacatctccaatgtccaacaccacgcttgatcctgttgaagaagaaggctcccaggaggaagcacggttacagcagaaaggttcgagagaaatgctgtcatttaatagcaatacgacccaagatttctcggggcgaaatataaactccaagaagctgatggctttgctgaggacgaagttcggcaccggcgcatatgacgtacatatgatacataactgctattatgtcaaagcgcccagaaagctctcagacagcgagatcgcagagtgcaaatatcgttgatccatcaccattgttgggaacttcttttcaaagccctttggaggttgagatattcgatgatgacattcagtaaaggaatcgaagtggtggaaaatcaaggagttgtgggccaactagccgtgacagaggacgcattgagagcaatatcttaaggttctcaaatataatagctgccgcgatacatcggacagattgatacaggttgacgtggtcggggcggtgtagcgtcgatttctcatgattgaatgaaccaaagtacttagtcacttaaagtgagccgctgggggccagctactcctctataatcctacccttcgtcttcatttttccaatgacgccctcgaaaagctagggcagaatctccgccgcgctgtcctggaagaagaagtctctgctcgtaaggccctcggcggcgtcagcgccagggttgacgacggcaacaacggcgccctgccgctgcgccttgcgcgtgtatccagcagccgggtatacggcagcagcagtgtcgacgacgagcattagatcgacgttgccctgcgggatccagttgtctacgcccgcgagcatgtcgaaatctagcgactcgccataccagacgacgccggggcgcagcagcgcgtttcggcagctaggacactgcggcagggcctcgacctcgatcttcggcaccggggtgtacgggtcgaggagcggcttcgtctggtccggcgggcgcgagcgcgagacacggcgggtcgtcgtggttgtcgtgctctacgtagccgcatttgtccgaggagcacttgacggtgagaatgctgccgtgcagatttcgtagttgcgagtcgggatggccgccacgaggtgcgaatcctgcgcgagtgagcgaatgtgtttagccaaactatgcggaataaatagtgtcgatctgtccattagactcaccatccacgttctgcgtaaggcacaagaatccccctttcttcttcgcgagctcggcgggggcgtagtgccctcgattcggctgcgccttgagcgccatgtgcttgcgctaggcgtagaagagccaaacgatggcgaggtccatctcgaaggcctcgggcgtcacgagggacgtcggttcgtggttgtgccagagcccgtcggcagcgcgaaaggtaggcaggcccgaggcagtggagaggccggcgccgcagagggcgagtatgcgggtgttgccgttgacgagctcgcggaactcggtgatggaggtcttgggcgccatggctgctgctgcgttggctatgtgtcggtacatgtacaagctgctggtgtttgtctttctgctcggtgtcggttgacaaagtcgacggacgaccggccgcatgatgggggcatggcggcgcctctcgttggttcacattccaggc

SEQ ID NO: 3597 - DNA, 717 bp, Muscodor strobelii
  misc_feature: SGI cDNA ID NO. 560862
  misc_feature: Encodes the peptide sequence at SEQ ID NO 3598
atggcgcccaagacctccatcaccgagttccgcgagctcgtcaacggcaacacccgcatactcgccctctgcggcgccggcctctccactgcctcgggcctgcctacctttcgcgctgccgacgggctctggcacaaccacgaaccgacgtccctcgtgacgcccgaggccttcgagatggacctcgccatcccgaatcgagggcactacgcccccgccgagctcgcgaagaagaaagggggattcttgtgccttacgcagaacgtggatggattcgcacctcgtggcggccatcccgactcgcaactacgaaatctgcacggcagcattctcaccgtcaagtgctcctcggacaaatgcggctacacgaagccgctcctcgacccgtacaccccggtgccgaagatcgaggtcgaggccctgccgcagtgtcctagctgccgaaacgcgctgctgcgccccggcgtcgtctggtatggcgagtcgctagatttcgacatgctcgcgggcgtagacaactggatcccgcagggcaacgtcgatctaatgctcgtcgtcgacactgctgctgccgtatacccggctgctggatacacgcgcaaggcgcagcggcagggcgccgttgttgccgtcgtcaaccctggcgctgacgccgccgagggccttacgagcagagacttcttcttccaggacagcgcggcggagattctgccctag

SEQ ID NO: 3598 - protein, 238 aa, Muscodor strobelii
  misc_feature: SGI Peptide ID NO. 560862
  misc_feature (25)..(194): Pfam Id: PF02146 Pfam Desc: Sir2 family
  misc_feature (63)..(194): Pfam Id: PF02146 Pfam Desc: Sir2 family
  misc_feature (25)..(58): Pfam Id: PF02146 Pfam Desc: Sir2 family
  misc_feature (1)..(238): NCBI GI: 256727712 Blast Desc: NECHADRAFT_105923 [Nectria haematococca mpVI 77-13-4]
  misc_feature (1)..(238): NCBI GI: 46134931 Blast Desc: FG09314.1 [Gibberella zeae PH-1]
  misc_feature (3)..(238): NCBI GI: 119470471 Blast Desc: SIR2 family histone deacetylase, [Neosartorya fischeri NRRL 181] gi|119406191|gb|EAW16142.1| SIR2 family histone deacetylase, [Neosartorya fischeri NRRL 181]
  misc_feature (3)..(238): NCBI GI: 169769274 Blast Desc: [Aspergillus oryzae RIB40] gi|83766965|dbj|BAE57105.1| protein product [Aspergillus oryzae]
  misc_feature (7)..(238): NCBI GI: 67522651 Blast Desc: AN1782.2 [Aspergillus nidulans FGSC A4] gi|40744802|gb|EAA63958.1| AN1782.2 [Aspergillus nidulans FGSC A4] gi|259487127|tpe|CBF85551.1| TPA: SIR2 family histone FGSC
  misc_feature (3)..(238): NCBI GI: 238501730 Blast Desc: SIR2 family histone deacetylase, [Aspergillus flavus NRRL3357] gi|220692336|gb|EED48683.1| SIR2 family histone deacetylase, [Aspergillus flavus NRRL3357]
  misc_feature (1)..(238): NCBI GI: 169606502 Blast Desc: SNOG_06294 [Phaeosphaeria nodorum SN15] gi|111065005|gb|EAT86125.1| SNOG_06294 [Phaeosphaeria nodorum SN15]
  misc_feature (3)..(238): NCBI GI: 121699526 Blast Desc: SIR2 family histone deacetylase, [Aspergillus clavatus NRRL 1] gi|119396191|gb|EAW06623.1| SIR2 family histone deacetylase, [Aspergillus clavatus NRRL 1]
  misc_feature (1)..(238): NCBI GI: 189191294 Blast Desc: NAD-dependent deacetylase sirtuin-5 [Pyrenophora tritici-repentis Pt-1C-BFP] gi|187973592|gb|EDU41091.1| NAD-dependent deacetylase sirtuin-5 [Pyrenophora tritici-repentis
  misc_feature (7)..(238): NCBI GI: 70991921 Blast Desc: SIR2 family histone deacetylase [Aspergillus fumigatus Af293] gi|66848442|gb|EAL88771.1| SIR2 family histone deacetylase, [Aspergillus fumigatus Af293] SIR2 family histone
MAPKTSITEFRELVNGNTRILALCGAGLSTASGLPTFRAADGLWHNHEPTSLVTPEAFEMDLAIPNRGHYAPAELAKKKGGFLCLTQNVDGFAPRGGHPDSQLRNLHGSILTVKCSSDKCGYTKPLLDPYTPVPKIEVEALPQCPSCRNALLRPGVVWYGESLDFDMLAGVDNWIPQGNVDLMLVVDTAAAVYPAAGYTRKAQRQGAVVAVVNPGADAAEGLTSRDFFFQDSAAEILP

SEQ ID NO: 3599 - DNA, 1910 bp, Muscodor strobelii
  misc_feature: SGI EST ID NO. CUFF.9197.1
  misc_feature: Variant of the nucleotide sequence at SEQ ID NO 3597
gcctggaatgtgaaccaacgagaggcgccgccatgcccccatcatgcggccggtcgtccgtcgactttgtcaaccgacaccgagcagaaagacaaacaccagcagcttgtacatgtaccgacacatagccaacgcagcagcagccatggcgcccaagacctccatcaccgagttccgcgagctcgtcaacggcaacacccgcatactcgccctctgcggcgccggcctctccactgcctcgggcctgcctacctttcgcgctgccgacgggctctggcacaaccacgaaccgacgtccctcgtgacgcccgaggccttcgagatggacctcgccatcgtttggctcttctacgcctagcgcaagcacatggcgctcaaggcgcagccgaatcgagggcactacgcccccgccgagctcgcgaagaagaaagggggattcttgtgccttacgcagaacgtggatggattcgcacctcgtggcggccatcccgactcgcaactacgaaatctgcacggcagcattctcaccgtcaagtgctcctcggacaaatgcggctacgtagagcacgacaaccacgacgacccgccgtgtctcgcgctcgcgcccgccggaccagacgaagccgctcctcgacccgtacaccccggtgccgaagatcgaggtcgaggccctgccgcagtgtcctagctgccgaaacgcgctgctgcgccccggcgtcgtctggtatggcgagtcgctagatttcgacatgctcgcgggcgtagacaactggatcccgcagggcaacgtcgatctaatgctcgtcgtcgacactgctgctgccgtatacccggctgctggatacacgcgcaaggcgcagcggcagggcgccgttgttgccgtcgtcaaccctggcgctgacgccgccgagggccttacgagcagagacttcttcttccaggacagcgcggcggagattctgccctagcttttcgagggcgtcattggaaaaatgaagacgaagggtaggattatagaggagtagctggcccccagcggctcactttaagtgactaagtactttggttcattcaatcatgagaaatcgacgctacaccgccccgaccacgtcaacctgtatcaatctgtccgatgtatcgcggcagctattatatttgagaaccttaagatattgctctcaatgcgtcctctgtcacggctagttggcccacaactccttgattttccaccacttcgattcctttactgaatgtcatcatcgaatatctcaacctccaaagggctttgaaaagaagttcccaacaatggtgatggatcaacgatatttgcactctgcgatctcgctctgtgcgttatgagcatgtgaacagtccgtgaggctataaggcgaacttacgtctgagagctttctgggcgctttgacataatagcagttatgtatcatctggggctcgacagtcagacttgaccatctcttacacactgccggattgaaaagtagactcacatgtacgtcatatgcgccggtgccgaacttcgtcctcagcaaagccatcagcttcttggagtttatatttcgccccgagaaatcttgggtcgtattgctattaaatgacagcatttctctcgaacctttctgctgtaaccgtgcttcctcctgggagccttcttcttcaacaggatcaagcgtggtgttggacattggagatgtaacgtcgatgcaagagactcgaattatatgtaatgagctctaatattcctgacgacacacttgacagaccctttctgtcgtggagataagacgtcttctcaatatatataccattttgcggtgccgattccttcacaacctcctctcagctggaccattttttatagtttcataatgttgtcaaattctactcatggc

SEQ ID NO: 3600 - DNA, 1218 bp, Muscodor strobelii
  misc_feature: SGI cDNA ID NO. 560863
  misc_feature: Encodes the peptide sequence at SEQ ID NO 3601
atgctttctcaatatccttctaccgctcccacgcaggacatcaagtacgccctggatcaggtaaaagatgagggacgtaggtttctggacggagagtctacatcccgagaacaattgatctccaaaaccagacacctcttggcggtcgcctcggatcccgcagagtcgctcctatggcacatttggtcgcagccaacccgactggttgctgcacgggttgctctcgatctcaacattttccaaacagtcatccacaatgatggacgggccaaaaccgacagccaacttgctgcaccgaccggtgcctctccaaaattagtgagacgcatcgctcgagcctgcgtgtcaatgggtatgctagaccaagcgggccccggcctctatgagcctaatgaattcactcgcctcctttcgaagccagagtattccggcggcatcgtcttcccctttgactgcacgcaattgtcgttttcgatgatgccagcctttttaaagaccactgggtaccgcaacccagctaaccccgtcgatgggccgtttcaattcgcaaataactgcaaaggcaagcacgcctttgagtggctcgcagagaacccagaggtgttccaggccttccacggctatgtccacgcgctccgggtccaccggcccagctggcgtgagatatatcccgtagccgagcggctcaccagcggtctcctgacagagggcgatgcctcggcgctcgtcgacgtcggtggcggaatcggccaggatctggaggctttcagggtcgggtgcccggagtacagcgggagactggtcctgcaggaactccctcatgttatcgcttcggcaaaagcctcgaacccggaccctcgtatagagctacaggcgcacgacttcttcaagccgcagccttcaaagggtgcacgtgcgtacttcatgcgctccgtgctacatgattggtccggtgatgagtgtcgaaccattcttgggcatattaaagatgccatgacgccggggtactcgaagttactgatcagtgaatgtgtcattgctgacgagaaccctgcctggcaacacgtgtctttagatatttttatgatggcgctcggctcagcccaagagcggacgaagagtgaatggcacgagctactcagtagctgcggcttgcgagtcgcgaagatctatagccaaggagagggcaatgaaagcgtcatcgaggttgtgatctag

SEQ ID NO: 3601 - protein, 405 aa, Muscodor strobelii
  misc_feature: SGI Peptide ID NO. 560863
  misc_feature (121)..(381): Pfam Id: PF00891 Pfam Desc: O-methyltransferase
  misc_feature (266)..(381): Pfam Id: PF00891 Pfam Desc: O-methyltransferase
  misc_feature (14)..(402): NCBI GI: 242783242 Blast Desc: O-methyltransferase, [Talaromyces stipitatus ATCC 10500] gi|218720295|gb|EED19714.1| O-methyltransferase, [Talaromyces stipitatus ATCC 10500]
  misc_feature (12)..(402): NCBI GI: 240107098 Blast Desc: sterigmatocystin 8-O-methyltransferase precursor, [Coccidioides posadasii C735 delta SOWgp]
  misc_feature (18)..(402): NCBI GI: 255943319 Blast Desc: Pc18g06010 [Penicillium chrysogenum Wisconsin 54-1255] gi|211587161|emb|CAP94825.1| Pc18g06010 [Penicillium chrysogenum Wisconsin 54-1255]
  misc_feature (12)..(402): NCBI GI: 119175356 Blast Desc: CIMG_09542 [Coccidioides immitis RS]
  misc_feature (36)..(402): NCBI GI: 242759956 Blast Desc: O-methyltransferase, [Talaromyces stipitatus ATCC 10500] gi|218723087|gb|EED22504.1| O-methyltransferase, [Talaromyces stipitatus ATCC 10500]
  misc_feature (30)..(402): NCBI GI: 145235619 Blast Desc: An03g05790 [Aspergillus niger] gi|134058145|emb|CAK38339.1| protein product [Aspergillus niger]
  misc_feature (20)..(402): NCBI GI: 115395870 Blast Desc: conserved [Aspergillus terreus NIH2624] gi|114193143|gb|EAU34843.1| conserved [Aspergillus terreus NIH2624]
  misc_feature (3)..(402): NCBI GI: 255933237 Blast Desc: Pc12g12810 [Penicillium chrysogenum Wisconsin 54-1255] gi|211582708|emb|CAP80908.1| Pc12g12810 [Penicillium chrysogenum Wisconsin 54-1255]
  misc_feature (18)..(405): NCBI GI: 256734271 Blast Desc: NECHADRAFT_36367 [Nectria haematococca mpVI 77-13-4]
  misc_feature (20)..(402): NCBI GI: 255931801 Blast Desc: Pc12g06140 [Penicillium chrysogenum Wisconsin 54-1255] gi|211582076|emb|CAP80241.1| Pc12g06140 [Penicillium chrysogenum Wisconsin 54-1255]
  misc_feature (74)..(387): SWISSPROT Homolog: EC 2.1.1.110 Sterigmatocystin 8-O-methyltransferase
MLSQYPSTAPTQDIKYALDQVKDEGRRFLDGESTSREQLISKTRHLLAVASDPAESLLWHIWSQPTRLVAARVALDLNIFQTVIHNDGRAKTDSQLAAPTGASPKLVRRIARACVSMGMLDQAGPGLYEPNEFTRLLSKPEYSGGIVFPFDCTQLSFSMMPAFLKTTGYRNPANPVDGPFQFANNCKGKHAFEWLAENPEVFQAFHGYVHALRVHRPSWREIYPVAERLTSGLLTEGDASALVDVGGGIGQDLEAFRVGCPEYSGRLVLQELPHVIASAKASNPDPRIELQAHDFFKPQPSKGARAYFMRSVLHDWSGDECRTILGHIKDAMTPGYSKLLISECVIADENPAWQHVSLDIFMMALGSAQERTKSEWHELLSSCGLRVAKIYSQGEGNESVIEVVI

SEQ ID NO: 3602 - DNA, 945 bp, Muscodor strobelii
  misc_feature: SGI cDNA ID NO. 560864
  misc_feature: Encodes the peptide sequence at SEQ ID NO 3603
atggctggaacgaccacccaactgccgccagacgacaatcgaggtcctctcctgaacgctttgagctggactggcgccgccatcgccacagtcttcgtcattttgcggttgtatagtagattctttgtcattcgtgccccaggatgggatgatctcgtcatttctattgccgcagtcctcaatattgctaccattactctcgcatctttggccatatcacacggaataggtcgacacatctattacttatctagcgatgagattacgaacaccctttactattccgcaatcctacaaccggttggggtcgtagcctttgttctcccgaagctcgctgtggtaatattaatcatcaaaatcatgggcccagctaaacgcggtgcctattttttatactccacgatcatagtgttgagcattatttctttcatcgcaatcatcgtcttgtttgcccaatgcgaccctcctgaccacttctggcatccatctgaaaaggccaagtgcataccaaaatctgtctttcgggatcttacttacatcaatggcgcgtggtccgcttttaccgacctagtgctggccgtcttcccaaccacaatcttctggaatctgcagataagcaagtcgcggaaaatctcgatgatgttaatcatgggactcggatttcttggtacgatcgcagctatcgcgaagaccacccagctttcccagaaccagtcaccagatgccacctggggtcttttcaccctcatgttaacaaccttcattgagcaggatatcgtcatcgtatgtgcgtgtgcgccgacattgccgaagcttttccagaaaatagttcggaagcacaatcaaagttcatacaactcgtcttacccggcggcacgcggttatctcaatgtccaagacgaaaacgcttcggttgcactggacatgtacagcaagggggtatga

SEQ ID NO: 3603 - protein, 314 aa, Muscodor strobelii
  misc_feature: SGI Peptide ID NO. 560864
  misc_feature (12)..(286): NCBI GI: 255943321 Blast Desc: Pc18g06020 [Penicillium chrysogenum Wisconsin 54-1255] gi|211587162|emb|CAP94826.1| Pc18g06020 [Penicillium chrysogenum Wisconsin 54-1255]
  misc_feature (10)..(302): NCBI GI: 115387199 Blast Desc: [Aspergillus terreus NIH2624] gi|114195189|gb|EAU36889.1| [Aspergillus terreus NIH2624]
  misc_feature (2)..(289): NCBI GI: 242783189 Blast Desc: conserved [Talaromyces stipitatus ATCC 10500] gi|218720293|gb|EED19712.1| conserved [Talaromyces stipitatus ATCC 10500]
  misc_feature (9)..(312): NCBI GI: 225557238 Blast Desc: integral membrane protein [Ajellomyces capsulatus G186AR]
  misc_feature (7)..(279): NCBI GI: 238840019 Blast Desc: integral membrane protein [Microsporum canis CBS 113480]
  misc_feature (9)..(273): NCBI GI: 226287054 Blast Desc: integral membrane protein [Paracoccidioides brasiliensis Pb18]
  misc_feature (13)..(294): NCBI GI: 119477918 Blast Desc: NFIA_073250 [Neosartorya fischeri NRRL 181] gi|119407461|gb|EAW17410.1| conserved [Neosartorya fischeri NRRL 181]
  misc_feature (11)..(293): NCBI GI: 238844609 Blast Desc: integral membrane protein [Microsporum canis CBS 113480]
  misc_feature (10)..(300): NCBI GI: 121709772 Blast Desc: conserved [Aspergillus clavatus NRRL 1] gi|119400665|gb|EAW11090.1| conserved [Aspergillus clavatus NRRL 1]
  misc_feature (13)..(312): NCBI GI: 154285646 Blast Desc: [Ajellomyces capsulatus NAm1] gi|150407259|gb|EDN02800.1| [Ajellomyces capsulatus NAm1]
MAGTTTQLPPDDNRGPLLNALSWTGAAIATVFVILRLYSRFFVIRAPGWDDLVISIAAVLNIATITLASLAISHGIGRHIYYLSSDEITNTLYYSAILQPVGVVAFVLPKLAVVILIIKIMGPAKRGAYFLYSTIIVLSIISFIAIIVLFAQCDPPDHFWHPSEKAKCIPKSVFRDLTYINGAWSAFTDLVLAVFPTTIFWNLQISKSRKISMMLIMGLGFLGTIAAIAKTTQLSQNQSPDATWGLFTLMLTTFIEQDIVIVCACAPTLPKLFQKIVRKHNQSSYNSSYPAARGYLNVQDENASVALDMYSKGV

SEQ ID NO: 3604 - DNA, 434 bp, Muscodor strobelii
  misc_feature: SGI EST ID NO. CUFF.9030.0
  misc_feature: Variant of the nucleotide sequence at SEQ ID NO 3602
tgggactcggatttcttggtacgatcgcagctatcgcgaagaccacccagctttcccagaaccagtcaccagatgccacctggggtcttttcaccctcatgttaacaaccttcattgagcaggatatcgtcatcgtatgtgcgtgtgcgccgacattgccgaagcttttccagaaaatagttcggaagcacaatcaaagttcatacaactcgtcttacccggcggcacgcggttatctcaatgtccaagacgaaaacgcttcggttgcactggacatgtacagcaagggggtatgaaaacgcattgggctgctgaattgtgcaggattttgtcgtcgtcacttggagaagcgatgatgaaatccagcagctgtgctacattagccgtaaatactggggttttgtcgtgaatgaattgtctgtcacagattggca

SEQ ID NO: 3605 - DNA, 564 bp, Muscodor strobelii
  misc_feature: SGI cDNA ID NO. 560865
  misc_feature: Encodes the peptide sequence at SEQ ID NO 3606
atggctaggtatgataatacgctcggggcatatggtagcagcgcgagtgggatgcgaaagacagcgaaagatagggctaccgcttttagtagacagcttcattggtctgcgattgcaagacacgaagttgatgagctaagggctgttgtcactagcgagatacttgcaatcaatacgctcctggcaatagtggagtggcaagccctcacgagacaggatctcgatcagataaactacgccacccaaatagagaccctgatcactacaacaaaggacgccgggaccgaaatcaagcaattccttgtagacgcgaaactagcttcagaatatctgcagcagctgattatgtcaggtaatctgacgcagactgaacagatgaccatactcgctaaggtaaccgaccaaaccggcgatactcagagggccatccaacccttatcccactcgaatgacgagcagcacagtagcattcgccatgctattgacggtgtgtctatgcaggttgtcaaattactctcaatgaaaacatacatagagaaatggatacaaaatattggtcagtaa

SEQ ID NO: 3606 - protein, 187 aa, Muscodor strobelii
  misc_feature: SGI Peptide ID NO. 560865
MARYDNTLGAYGSSASGMRKTAKDRATAFSRQLHWSAIARHEVDELRAVVTSEILAINTLLAIVEWQALTRQDLDQINYATQIETLITTTKDAGTEIKQFLVDAKLASEYLQQLIMSGNLTQTEQMTILAKVTDQTGDTQRAIQPLSHSNDEQHSSIRHAIDGVSMQVVKLLSMKTYIEKWIQNIGQ

SEQ ID NO: 3607 - DNA, 1275 bp, Muscodor strobelii
  misc_feature: SGI cDNA ID NO. 560866
  misc_feature: Encodes the peptide sequence at SEQ ID NO 3608
atggcttcatcgaaggttattatcatagggtgtggtgtcgccgggcccgtgatcgcatgccttcttaagaaaaaaggatacaatccaataatattcgagcgggctgaggtcgtcggggatattggagcatctttcatgatctgtcccaatgggttgaaggttcttgacttaattgactctttcactgagcgactgctgagtaatggaccacatttacagtggttgtatgattacacagctgtcggcgaagagctcgcaagctctgacgtgccttcagactttgtttcactgttcggtaaaccagctgtgggcgtcaaacggacgttacttgcgtcatggcttcgagatactgtcaaagcccatggtattgaactgagagaagggtggacattagaaggtattgaggaaacacaggatggtgtaacagcgtctttcaatcacgggcgttctgagacgggagcattccttattggctgcgatggattgaaagcggcgtcgagaaaactgttactagcccgccacaacgtatcagatggcttgccaacctttactggccttactcagacggcgggtatctccccaacaccaagcagcttgcaggaccgacctggagtgcggaactggtacggtgcgaacatgcacttggtgtgctatgccataactcatgatcgcacaagttgggggttgacactcccggaagacagtggctcggaagcctcgtggggattgcttgatgatgagcggagatccgccgcgaaagtacacttggctcaaacactaagggagcaaaactgggatcccgcggttctagaaatggtcacaaatgccgagaggctcataaagtacggtatatttgatcgtccagatctgagtcccagtcaatggtattcaggtcgatgtgttatggtgggtgatgcggtgcatccgatggcagttcacattggtcaaggtgcaaaccaagcctgcgcgcccaaggtctctatattccgcgctgacatcgtcagtgaggactgctactatctagccgaacaaatccctcctttcgactccacaagctcgctctcgagcgtgcagctgtctgaggcattcgacatctatgctaagaagcaacagccacatacttccattttattcaaggctgctaggaagcaaggtggtctacgtgtagtgccagctgagggttgcgaagagcgcaacaagatggtgggcagcgcaatgaaagatcgggacagggtgctagctaaatttgcggcaacgttctctcggccattttga

SEQ ID NO: 3608 - protein, 424 aa, Muscodor strobelii
  misc_feature: SGI Peptide ID NO. 560866
  misc_feature (3)..(349): Pfam Id: PF01494 Pfam Desc: FAD binding domain
  misc_feature (1)..(423): NCBI GI: 39944458 Blast Desc: MGG_04240 [Magnaporthe grisea 70-15] gi|145014987|gb|EDJ99555.1| MGG_04240 [Magnaporthe grisea 70-15]
  misc_feature (1)..(424): NCBI GI: 145246824 Blast Desc: An12g05970 [Aspergillus niger] gi|134080383|emb|CAK46304.1| protein product [Aspergillus niger]
  misc_feature (3)..(424): NCBI GI: 154304986 Blast Desc: BC1G_08583 [Botryotinia fuckeliana B05.10] gi|150853746|gb|EDN28938.1| BC1G_08583 [Botryotinia fuckeliana B05.10]
  misc_feature (3)..(424): NCBI GI: 156062528 Blast Desc: SS1G_01380 [Sclerotinia sclerotiorum 1980] gi|154696716|gb|EDN96454.1| SS1G_01380 [Sclerotinia sclerotiorum 1980]
  misc_feature (2)..(424): NCBI GI: 242211765 Blast Desc: [Postia placenta Mad-698-R] gi|220729145|gb|EED83024.1| [Postia placenta Mad-698-R]
  misc_feature (80)..(203): NCBI GI: 148979838 Blast Desc: [Colletotrichum cereale]
  misc_feature (3)..(389): NCBI GI: 227367020 Blast Desc: FAD-binding monooxygenase [Chryseobacterium gleum ATCC 35910] gi|227109957|gb|EEI44922.1| FAD-binding monooxygenase [Chryseobacterium gleum ATCC 35910]
  misc_feature (2)..(358): NCBI GI: 256781559 Blast Desc: monooxygenase FAD-binding protein [Streptomyces hygroscopicus ATCC 53653]
  misc_feature (5)..(402): NCBI GI: 27380088 Blast Desc: monooxygenase [Bradyrhizobium japonicum USDA 110] gi|27353242|dbj|BAC50242.1| blr4977 [Bradyrhizobium japonicum USDA 110]
  misc_feature (5)..(413): NCBI GI: 238025032 Blast Desc: Salicylate 1-monooxygenase [Burkholderia glumae BGR1] gi|237879697|gb|ACR32029.1| Salicylate 1-monooxygenase [Burkholderia glumae BGR1]
  misc_feature (4)..(328): SWISSPROT Homolog: EC 1.14.13.24 3-hydroxybenzoate 6-monooxygenase
MASSKVIIIGCGVAGPVIACLLKKKGYNPIIFERAEVVGDIGASFMICPNGLKVLDLIDSFTERLLSNGPHLQWLYDYTAVGEELASSDVPSDFVSLFGKPAVGVKRTLLASWLRDTVKAHGIELREGWTLEGIEETQDGVTASFNHGRSETGAFLIGCDGLKAASRKLLLARHNVSDGLPTFTGLTQTAGISPTPSSLQDRPGVRNWYGANMHLVCYAITHDRTSWGLTLPEDSGSEASWGLLDDERRSAAKVHLAQTLREQNWDPAVLEMVTNAERLIKYGIFDRPDLSPSQWYSGRCVMVGDAVHPMAVHIGQGANQACAPKVSIFRADIVSEDCYYLAEQIPPFDSTSSLSSVQLSEAFDIYAKKQQPHTSILFKAARKQGGLRVVPAEGCEERNKMVGSAMKDRDRVLAKFAATFSRPF

SEQ ID NO: 3609 - DNA, 4039 bp, Muscodor strobelii
  misc_feature: SGI EST ID NO. CUFF.9187.1
  misc_feature: Variant of the nucleotide sequence at SEQ ID NO 3607
cagagctctgactcgtgaccgttttgctatcgccgatatatgacttacatcattgattgtcctttgtgactatgatgattctagactggtacatctatggcaccagctccttcgcggaagataggcctactatcgacacactggccgtgactattgaccgagatcgcagtttctgtaagttgactatcctgcgaagttatcatctcacgaatacgaggttagcacagatgtctcaatttcaatctggattgctttgtcattggagcgacacttgtgtgacgatacccagatacgcgggtgccatgtcaatctgaacctacttcgagcagctccttcaagagaccctgagattgcgtgcttcttgaacagccatatctgggatatcgatcctctatgcatagtccctgcatgcatttgcagactcaccgctttgaaacagcgccaagtagccgagactcgcacctagctacatgtacctagatgagcatcgcgtaacttcgtgacttgcactgttgggggcttgtgggcatatatatgactattatttctagtcggagacaggagtcggaagaaggaaaattattacccatttgctttctttcctacagtgagttaactcattagagagccctgattggttgaacaacacacgaaatgggcgagttacctacttctagaattgcccttgtcctgcaaggtccgaacactctgaaaacagttacgctcggcattcctgaagcactaccttcgactgccgcgcttgtcaaggtagcatgcatcgccctaaacccatcggatgcgaaaatggttgccggaggttacccttcgaactcgattgctggcactgagtttgctgggacgatagtggctcgagggactgaggttccggaactattgacaatcgggaagcgtgtttgtggcgtatcgcatgggtataataacgatacgtacgaagggactggcggattttcaacttacgttgtcgccgaagctcacctattgcttcctgtacccgaccatctgagttttgaggatgcagcaacactaccagcgagtgtgctgacaggtggtctagtgctgtaccaaacaatggggctccggaacaagccggtggacaaggacatccccgttctggtatacggcggcagcacagcttcgggtatcatgatgatccaactacttcgtcagtatgtatatacggtattactcatccgaagaagggtcctacacttactgatcagggataatagttccggttattctccaattgccacgtgctctccgcacaattacgacctggttcagtctgccggagcattgctcgctttcgactatcatgaacccagtacagcggcctctaatatccgcgcggcgacgaataatcagcttgcatacgcgatcgactgcattacaacacccgattcgatgcaagtctgctatgcagccctaggaagcgaaggcggccgctacgtggcgttggacgattttgccgtagcagggcactctcgccgtgcggtgagaccttcctgggtctttgcgatgcgggcaatgggcaaaaagatggactggggcggcccgtacaaatgcgctggatcctcagaagacaggcagtttacggccgactggattctggaggcagcagatctattgaacaaagggattgtgaaaccgcttcgctgggatatagtgaagcaaggtggtcttagcggtgtcgcaagtggactggaaagacttcaacatggggcggtatctggaatgaagctggtgtgtcccctctgaggtttctggaaattccaattgttgatagttgccaagcaaactcgcgaaccgctgagtaagacacttgcagcgaagaagctccgtaggatccgaacaactctagtggtaaatgtgctcatgatcgtcgtttatgttctcacctaccatctttatcagttgtaggggttccgtagaatcgtattgaagtgtttgtgcataatggataattccttgtaagctcttggctcttggctcttggctcttggatatgaaccgaagtggttcgacacgaaaatttgtggagaatcgaacccgctttcgggctgtcacttcttacatctagtcgcctaggcatcggcaagccgctgtgaacggtctagaagtctggcagatcgataagtataccacgcggcaggcaatatgcaatgagagaaaaacatatacaggatgcagaatgtttatcactgaggagttgctatgattttcagtgttgcgcacctggctcgtgccatcccggttctcacataagctaaggtggacaacacagttgacaagacaggtcggggttatggctcagtcatcaaagtttcatcgtcaacaatcaacatggcttcatcgaaggttattatcatagggtgtggtgtcgccgggcccgtgatcgcatgccttcttaagaaaaaaggatacaatccaataatattcgagcgggctgaggtcgtcggggatattggagcatctttcatgatctgtcccaatgggttgaaggttcttgacttaattgactctttcactgagcgactgctgagtaatggaccacatttacagtggttgtatgattacacagctgtcggcgaagagctcgcaagctctgacgtgccttcagactttgtttcactgttcggtaaaccagctgtgggcgtcaaacggacgttacttgcgtcatggcttcgagatactgtcaaagcccatggtattgaactgagagaagggtggacattagaaggtattgaggaaacacaggatggtgtaacagcgtctttcaatcacgggcgttctgagacgggagcattccttattggctgcgatggattgaaagcggcgtcgagaaaactgttactagcccgccacaacgtatcagatggcttgccaacctttactggccttactcagacggcgggtatctccccaacaccaagcagcttgcaggaccgacctggagtgcggaactggtacggtgcgaacatgcacttggtgtgctatgccataactcatgatcgcacaagttgggggttgacactcccggaagacagtggctcggaagcctcgtggggattgcttgatgatgagcggagatccgccgcgaaagtacacttggctcaaacactaagggagcaaaactgggatcccgcggttctagaaatggtcacaaatgccgagaggctcataaagtacggtatatttgatcgtccagatctgagtcccagtcaatggtattcaggtcgatgtgttatggtgggtgatgcggtgcatccgatggcagttcacattggtcaaggtgcaaaccaagcctgtgaggactgctactatctagccgaacaaatccctcctttcgactccacaagctcgctctcgagcgtgcagctgtctgaggcattcgacatctatgctaagaagcaacagccacatacttccattttattcaaggctgctaggaagcaaggtggtctacgtgtagtgccagctgagggttgcgaagagcgcaacaagatggtgggcagcgcaatgaaagatcgggacagggtgctagctaaatttgcggcaacgttctctcggccattttgaacatttgtagcgaagactttcgatttgatcatcaacagggtcccaaatgccatgctttcaagtgctaacatgttcctgtcctattctagcttttgccacttgtggttcctgcaaactccctatcaatcaatttgtaactatgccgagaccgtaaatgaagacactgcgcgcctggatccgagaaaagatagttctacaagatcaatggtctgctacgttgagctcagactgttgtcgcagtcgtctactacacgctttctttgcaaaacttacaaggggcagcatgtcctccaccgctcttgctacattactggattttccagcggagcgttgctttgcaacaccaaccaaggactctagggtcctttcgactatgccgaacataattcggatcatagaatattggcttgaatgagccaaacgaacgctccattcaccc

SEQ ID NO: 3610 - DNA, 11901 bp, Muscodor strobelii
  misc_feature: SGI cDNA ID NO. 560867
  misc_feature: Encodes the peptide sequence at SEQ ID NO 3611
atggagcccatcgcaatcatcggcatagctcatcgctttcctgggggtgcatcaactccttcggcgctttgggatctgctcctcagtctaccgaaagacctatcgaagccaccaccgccggacaggctgaatctttcaaaatttcatcatccaaatgatgaccaacatggcagtacgcccgtgtcaaatgcgtattttcttgacgaagacgcgacagtcttcgactcctcattcttctctatcagccctctagaagctgaggcgatggacccgcagcaaaggttgctccttgaggctacatatgaagctagtgagcgcgcaggtttgccgctagagcagcttcgcggaagccgatgttcagttttcgttggcgtcatgaccgcggactacgagcacatccagtatcatgatattgaagatatgtctgcctacacggggacaggaacctcaagagcgatattggcaaatcggatatcgtatttctttgatttcaagggacagtcaacggtcattgacacagcatgctcgtcctcgctagttgccctgcatcttgcagtgcaggatctaagggccggaaattctgaaatggctgttgttgccggatgtaatctgatgttagggcctggcctatacgtcagcgaagcaaagttacatatgctttcgccaacgggaacatgtaaaatgtgggatgctggggctgatggctacgcgcggggcgagggagttgcatcaataatcctgaaaccacttagcgcagccatacgcgacggtgatcccatacaaagtgttatacgtcagacgggtgtcaactcggatggacgaacgcgcggaatcacaatgccgagtgcaaggtcgcaagcagcactgatacggcacacgtatcatactgcgggactggatccctcaaagcccgaggataggtgccaatattttgaagctcacgggacaggaaccaaagcaggagaccctaacgaggccagaggtatctgtgaagctttcttcccgaatcatgagcctattccttcggaagcagacgataaagatgttctccttgttggttccatcaaaacggtcataggccatctggagggtgctgccgggttggcggggatgatcaagtcaatactagcaatgcaacaagctacagtcccagccaacctccatctcaattccctaaaccctgaagtttcgcccttctgtggacctttgaaagttcctaggcaacatctaccatggccatcgccagcccccggacacccaaagcgagccagtgtcaatagttttggcttcggcggaaccaatgctcatgtcattttggaagaatatcaggacaatcatagaggggtgttcgaggaagccaatcacaggcgactgatgacactggctatgccgcttttcactagtgccaacacgcagagttcactctcgaatcgtgctcgacagcttgcagaatacttacgccagcatggtgaagtaggatatctagacgtcgcccagactctgtggaaacgacacagtgagcaaccttatcgacaagctttctctggatctacgtttgaaaatgtaattcaggacttggagaagtgctctgcggaccagtcgctcttaggactcagggttcaaccatttgtgtcgccagaggaaggcttcggtgtactgggcgtattcaccggccagggcgctcaatggccaggtatgggacgagaactgctaatacacaacgccacgttcagaagcgtgatagaaacatgcgatgatgcactgtcgagtctctctgaggcaccgtcgtggtctctcgtcagccaacttcttgccgactcctcaacaagctctattgcggatgcggccgttgctcaaccagcgacaacagctttagaaattggccttgttgcagttctggaggcaatgggtgtcagcttcagtgctgtgatcgggcactcctccggtgaaatggcggcgtgctacgcagctggtatcctcactctcgaagaagcgatccgcattgcgtattatcgggggttgtatgctgagaaatatactgggaaagggtctatgatggctgtgggtatgagttcgcaagctgccgccaggttatgcacagacaaaaggtttcagaaccggctatggcttgcggccaagaactctccttccagcgtcactctatccggtgatgtagacgccgtgctggaagccaagtctgtcctggacgatcgcaagatttttgctcgcattctacatacggacaaagcttaccactcaccgcatatgcaaaaatgtgcacgcgcataccgagaagcactctcaagatgtgaaataaagccccagagtcctcgtgagggctgtgtgtggatcagcactgtcgacgggcatgcggatcgctcttgggatgccgatgttcaatccttgagcggcgaatattgggtccagaacatgttacagcccgtcctgtttaccgacggtgtcacggcagctctcacgaatgggggtccgtacgatctggccctagaagttggaccgcatcctgcgctcaaaggtccggcatccgagacaatatccacgcatttgccaggcggtatcccgtactatggttgcatgtatcggaaaagagactgtctagagagcatctccaggctgttaggcaatttggctgtcaactttggtaagaacgtggttgatctggattcgtaccaaaacagctggactcggtcaaagcaacgttcaagctaccgcgtcataagcgatctccctccatatccgtgggaccatgacaagagctactggcgagagtcacgtttatctcgcaaccatcgcctgaaacaagatgaacatcagaaaaacggtcttcgactcctgggacgacgatgtccagatgacaccgagaaagagccccgctggcggaatttcttaagtttgaaagaacttccatggctacgtggtcatgccttccaaggcgaggcattattcccggctgctggtcatttggcgttgatgctagaagctgcccaatacctagcctgtgggcgatctgtcaagtatttcgagatacgaagtgtcaagctcgaacgaacattgcgaatccacgaaggacccagacctgtcgaaattctgtgttccgcgagagtaaccaaggaagcaagtaaagataacaattcgctggaagctctattcgcgtgtcatttcagctcagaccaaaaacaattagaggagcaggcttctaccgctacgctgcatatcttcttgaaccacccaggtgaagcagaacatacaatcctcccaccgagagaagtgccacgtactccgatgtcaaatgtggatgttggcaggttctacgccaacatgagaaacatcggtttagaataccaaggggctttcaaagcattgaaatcaatacgtcgggttgatggaattgccactgccacggcgtcgtggtccctggatgagataggggatgacaggggcaagggaaacctctatcatccagctctgttagacacagcgctacatccgatattcagtgctttcactactccttcaaccgatcgcatatggaccgcttttctaccacagtccattgagaaggtcatcattggtgcgcaaggccaattgcttttgtctcctgctggcactatagacattgctatagacgcctgcctaacagaagcatcaccaacaagaattgttggagaagtggacatttattcctttgatgatacccctatggtgcaactccaaggcgtcgcattagcagcattggaacgaccaagcgcagaaaatgatcgcaatatcttcagcaaagtctcatggcagcccgacattctcggaggcgcagacttccccattgattatgagccacggcaggataatatggtggtagctgcggaacgtgtgggttacttttatgcacgtaaaatgctagctgaggcggctgctgtgggcatagagaatctaaaatggcacgaaaagcaaatggtagagactctccaagtgcttacaggcaagatcaatcaatggaatgacgacaatgaagacgtggtcgaggccatagttgagaagtactgcaaccaggttgacttccagctaatgcgcacagtgggtcgtgagattgggagcgttttgcgcaatgaaaagcagatggttgaagtactctttgtggataacgtcatgaacgatttctaccgtcaaggcctagggctgcgaaatgcccagcggcaggttgcaagctatatgcagtcaatatcgcatcgccaccctagagcatcgatcttggagcttggagccggcactgcagcgacaacatcgagcgtattccacgccattgggaacacctatggttcatacaccttcactgacgtctctgcggggttcttccctcaggctcaagctatgttcgccgaccatgcagatcgcatggtctttcggaagctggatatatcaagtccattcgaagatcaaggtttccaggaagaatcctacgatgttgttatagcagccaatgtgttacacatcagtgaagatgttgaggttgttctgcgtcgtgtgaggggactcctcaagcctggtggttatcttgttgcaacagagccaacatcaagtctgcttcgtcttcatgtcattctgggcggtttggaaggttggtggctggctcgcgatggatgtcgtacagccgggcctatcctgacgtgcgaaagctgggacgagaagttgcgccagactggattctccgggattgacctgatgggctatgatcaggtagatgaaggactgcactcatgtacgtctttcgtcagtcaagcaaccagtcaccgcgtcgacagtcttcgtagccccttggaacatatagatcaactgccaaagtcagcgcgcattgctatagtggggggttctgttttgactacttcgaagttgatacggtctattcgtgcgaagctttcatcacacggaatagccatctctcagtatgcgggtgccagacaagtcattgtgtccgaggtagcagcaccgacatacattctatatctttcggagttagaccggccagctttccaggacggttacgatcacggaacgcttacaggcatgaaagctcttctgtcaaatccgaaggcctttatggcgctgaccaaaaatgccgggtcgagtaatgcattctccaatatgatagttgggctgttccgcggcctacgtgtcgagtcaccatctctccaattacaggtgcttgatctagagaactctgagttgaatgccgacaaaatcttggagcggttcctccatttcatctttgccattctcgacagcgctgaagccagcaatagtctgttgacaattgagcctgaactgttgctgaaagacaataagcttttcatccctcgcgttgtgacggatgtgcatccgaacgaacgtgttaactcacatcggcgaccaatccccaggcttgtcacgaaatacactcatgtcatcgaagcttactcgacagcaagcatgacaataatgacggccagcgcgaaactcggcttggtcaagctctgctcgacaacagtaaatgtcgactattctgtacggataccaatcagcagtctgacaatccctcggccatggtatatgtgcgtaggagcgattgctgagaatcctatgcaatctgtcataacgttatcgcatgtcaatgcctcggagatccaagttcaggctggagacgtgtatcctgtagatgcggaagttttcaagcctgagatgcttacagtactaatattattcgcggctatacgagcatggctgggacgagtcccacgggcctccacggtatgggttcatggactggatgactttgcggtgagcatttttgagcgcgaagctgcacggaaagaagtacgtatcgtagcgacttctagcaatccgaacgactctaaatatcttcatccgcacgccacatcacgcacaatcaaaagtctcgtcccaggcaatgtcgctgctcttattgtcgatgaaggcgtccatgaaagaatggcgttcaccaagaccatgcaatcgaagtttggactggcgcagtctctgtgtagaccattatatgaccttctacctgcatggtttgagtccatgacgacttatgatgtcctcgacgaagtttacgaatcagcgcacgcaacacatttcgcaataagcagcgctctccatatgcagccaattgtgcctattgccgagtttgatgcctcttcgtctggtcattcaggttcgatattggattggagagcgtcatctccagtccgtgccaacatctcgcccgccccgccagagacactattgcgatctgacaagagttacttactggtaggcttaacaggagaggtaggactatccatctgctcgtggatgatcgcacatggcgtccgtcatgtggcattagcaagtcgtaaaccgaagattgatcagcatgtgctcgacgcgatgtccagacagggagctgaaatacgcgtgttcgcattggacgtaacggatactgccagcgtacaggaagtgatcagcgacattcgaatcacaatgccgcctctagtgggcgtttgcaacggtagcatggtcctatccgacggcctgttccaggaaatggacaaagcacaagtcgacacggttctaaatcccaaggcccgaggaagcatgatccttgatagcattctgtcaagtgagaaacttgacttcttcatcatgctgtcttctttaggctcagtgattggcacgcctggccaggcgaattatcacatggccaatatgtttatggtagcgcttgccacagaccgacgacgaagaggccttgctgcatcggtgattgatgtgggcttcatttcagatataggttacgttcctcgccaagacgtggcagtggaacgtactctgcgggcaatgaacatgctggctctttgggaagaagaggtccatgtgatgtttgccgaagcaatcattgctggtcgcccggattctggacgctctccagaattaataattggtcttcccattagcgacgacgagtctaaacgaccgcattgggtcatcgatccgcgtttttctcattttgtggaagataaacgctcagtggcttccgctcaatctggctcttctgctattcaagaccttcgatccatcttagcatcattgacggatgaggaggccatcgtcggcaagatacaaaatgcatttggcgagcaattggagtcattactgcagttactccctggtggagcaaacatggactcacccctcattgcactgggtatggactcgttgcttgctatggaagtacagcgatggtttcgtaagatggtgggtgctgagatatctgtattgcagattttgggcggcgcttctggtcaagaggtgtgccgagtggctgcgaactcaatacttggcgaacagcagagccaaggtacactctcagactccaaacctaccgatcgccatgctgaagcttcaaatctggatggagacgacaaggccatgaaatctgacgatatatcaattactctatcatctgagtccattccagtaacgcttgctacttcgactgcgtcaccagggactgcgacaccagcgacgagtgctggcgatgagactcctgactgtgatcatccagagggacatggaagacccctgaaagagattccaatgtcctttgcgcaggcacaattgtggtttctacaagactttctggaagatccaactacgtataacgagactgcccagtacaagatccatggcccattagacatagacaagttgcgtacggcattctataaagtgacatcgcatcacgagatgctaagaactcagtttcgcaacaacccaaacacgggcgaaccaagtcaggttgtcttgagcgcatccgtttgtcctttccagtatgtggatgaggccatggcagacactgtcgatcgcgaatatgggaaattgacttcgagggtctgggacttggcaagcggcgcaagtctaggcttgacagttgttcggcattcccaagttcaccatacccttatgataggtagtcaccatattgctgtggatggtgtgagttgggccatcctgctccgccatcttgctctcgcatatcaagcaagacctctaccacctgtgccaggctacacagagtttgccgtgtcgcaacaccaaaaattccgcagcaattcttttgccaaggatattgacttctggaaacgagagcttcgtggcattcaagatgccttgcccctatttccaatggcgcgtgtcaacacccgaccgtccagcaatagctacaacagtgttacagcccataccacgttagacgagaacgtagtatcgaaaatcaaacgagcaagcagcaagatgcacgtcacgccgtttcattttcatttgagcatgctcgcggcccttgtatcgcgcctctcccagactacagatatatgtatcgggacagtagacgcaggcaggtcggacggtcgcttcgcagaaacagtcggattcttcatcaatattgtcccaatacgcgtccaagtcactgacaaagattcttttgcaacaatctgcaaacaggtctcgtcaaaggtgtttgcatctctgagccactcccaggtcccgctgcacgtacttcttgatgcacttcgagtccagcgtacggccaggcacagtccgctgtttcagattatcatcaactatcgccttgacatcttaggtcaagactcgattggcgattgtaaagttgaatatagcacatcaaaaagctcaggaaacccctacgacttgtgcctcaatattacggagactccagaaaggacttgtcatatcgaattgtcggcaaaggaggcactttattccaacgaagccgcgcagtccattctcgcttattaccgcggtatgctcaactcggcaagtcatactgcagattctctcatctcacaagttctgttgcggaaccacagtgaacagtctcttaggggaactataggggcaggctgtgggaagagagttcaatgcacatgggacgaaaccgtctcgcgtcgcatcgaaagtatttcacaacgccaccctgatgtcgtcgctgttgagtatcaaggaaatagctattgctatcgggacttactgaagagagccactggtatttcaattgcgcttaagcactcatttgatgcacagggggtttattgcggccttctatttgagccatcagcggatcatatcgcgtccttcttagccgtgctcagatccgccgccgtagcagtgccattagacgccctcaacagcagagaacgattgtctgttattgttgaagactgtaaacctgcagtcgttttgtatcatcggcaaacggcgggcacggcgcagtggcttcaaaccatcaacccactcacgactttcatagatgtgtctcgaatctccaccagcttgcaacaactcgaaaatattgacttgtcgaaagccgacgcaccggcaacactcctctataccagtggcacaaccggcacacccaaaggggtgattctgacaaactcaaattaccgctctattatagcatctacgactaacaggatgcagctctcctacatgaatgaggtagtactacaccaaacggctctgggctttgacatgtccattatgcagattctgctcggcttgtgcaacgccaatacccttgtggtggcaacagcaacacagcgcagagacccctgcgctgtagcggaactgctggctgaacgtggaatctcatgcatgattgccactcctactgagtactcgatgatgtttcaacatgcgccagaaactctgagccaatgtcagtcgctgcgcatagctggcgctggcggtgaagtattcacagcgcatcttgcggcccagttccgtcgaatgttcgctcgagatttgaacgtattcaacgtgtatggtccgacggaaacgtgcatcaacagtaatgttggcttagttgagcattggagagatgacttggatctcattccagtgggccctccacttgacaacgttagcacgtatgtgctagatgaagcccgcaatccagtacctcacagctgtacaggcgaaatctatgtgtccggttgtggagtaggtaaaggctactttggtcggccagatctcaccgctgcatctttcctctcggatccattcgcaacacccagtgatatcagccaggaccctgcatacatgtatcgtacgggtgataaaggatatcttcaacccgacggtaaactagtcatcctaggacgcgtaaacggtgatagccaagtcaagcttcgcggtatccgcatcgagctagaagacattgcatcgaacatcatcacggttgcttgtggaaagatctcacaggcagtcgttacgactcgcggcgagacacaaatgctagtcggcttcgccgttcctgcctctggtgcgaagctggatatcaacgataactttttggagacgctgatacaaagtctcccgcttcccgagtatatgaagcccgctgtcatcataccgattgaaaagctaccaaggacaacaaatgggaaactagatcggaacgcgctcggtcagatttcgttgcctgacagaatgatgaggggcgctattgctcaggagacactttcacccctggaagctgaacttcgtcagatatggacagagattcttccacactcaactgttgatattccacgcgactcagacttcttccgattcggaggaaactcaacgcttttagtcacgctacgcagtcggataaaattgaagtggcacgtgaatgtgcctttgctccgactctttgaggcaagcaccctgaaatctatggctgcaagtattcgaagcgtcaaggaatcacgcatcggcaacaataatagtgattgggaattctgggatcgcgagacccggttcgattacgctttcaataatggcactgcgaagactattactccgattggaagacagtacttgtccgccatgacgcaagggccgaaaactattcttatcactggcgctaatacgctcctgggctcggaagtgctaaagatccttctcaacagtcctgatgtagctcgagttcattgtgtggctctctcccatgagcagcagtctcatcttccagcgagcgataagatcgtggcctataccggaagtctcggagatccgacactcggattgaccccagagacagaagctcaaatgcagaaagaagttgatatcatactgcacggcggcgctgaaggctcctgtctcaatgaatactcgtctattagtcaacaaaacgttgagtctacaaggtttctcgctcatctggcggtgacgaggccgatcccgttacactacatttcaagcgcaagagtcattttattcacaggcaagaatgagtggaacgaagcatctacacatggccattatcctcctagtgatcatggcagggagggttttactgctactaagtgggccagtgaaatgatcttagagagctgtcataggcgaaccggattacccattgcagttcatcgtaccgggtatttgatgagtgacaatgctgatgaaatggacatcgtcaacatgattcataagtattcgagccagctgcgcgctgttccatcactcactagattctctgggcatatagatatgagtgaggtcgagtccgtcgcgggtggtattgccaccgctgttttgacaaccgagttcaacaacgagaagctactctacaaacaccacactgataacaatgcggtaccagtgcatggtttcaggaagtacatggaatgcaagcttggatgcttacttgatgagttgccaatggatgagtgggcaaaggaggctgagtgcattggtatgaacccattcttggcagagtttttggcagctgttgtcgagaagggagacgaagcaaggtatcctaagcttctgaaggcgacataa

SEQ ID NO: 3611 - protein, 3966 aa, Muscodor strobelii
  misc_feature: SGI Peptide ID NO. 560867
  misc_feature (555)..(890): Pfam Id: PF00698 Pfam Desc: Acyl transferase domain
  misc_feature (2103)..(2267): Pfam Id: PF00106 Pfam Desc: short chain dehydrogenase
  misc_feature (3028)..(3447): Pfam Id: PF00501 Pfam Desc: AMP-binding enzyme
  misc_feature (2544)..(2839): Pfam Id: PF00668 Pfam Desc: Condensation domain
  misc_feature (2)..(253): Pfam Id: PF00109 Pfam Desc: Beta-ketoacyl synthase, N-terminal domain
  misc_feature (261)..(390): Pfam Id: PF02801 Pfam Desc: Beta-ketoacyl synthase, C-terminal domain
  misc_feature (2104)..(2280): Pfam Id: PF08659 Pfam Desc: KR domain
  misc_feature (1422)..(1525): Pfam Id: PF08241 Pfam Desc: Methyltransferase domain
  misc_feature (1422)..(1523): Pfam Id: PF08242 Pfam Desc: Methyltransferase domain
  misc_feature (3658)..(3880): Pfam Id: PF07993 Pfam Desc: Male sterility protein
  misc_feature (3536)..(3602): Pfam Id: PF00550 Pfam Desc: Phosphopantetheine attachment site
  misc_feature (555)..(843): Pfam Id: PF00698 Pfam Desc: Acyl transferase domain
  misc_feature (3697)..(3774): Pfam Id: PF07993 Pfam Desc: Male sterility protein
  misc_feature (3805)..(3837): Pfam Id: PF07993 Pfam Desc: Male sterility protein
  misc_feature (2)..(3919): NCBI GI: 171680492 Blast Desc: protein product [Podospora anserina] gi|170939873|emb|CAP65099.1| protein product [Podospora anserina]
  misc_feature (3)..(3962): NCBI GI: 220694839 Blast Desc: hybrid PKS/NRPS enzyme, [Aspergillus flavus NRRL3357]
  misc_feature (1)..(3898): NCBI GI: 121701571 Blast Desc: equisetin synthetase, [Aspergillus clavatus NRRL 1] gi|119397193|gb|EAW07624.1| equisetin synthetase, [Aspergillus clavatus NRRL 1]
  misc_feature (2)..(3949): NCBI GI: 121719578 Blast Desc: hybrid NRPS/PKS enzyme, [Aspergillus clavatus NRRL 1] gi|119404686|gb|EAW15062.1| hybrid NRPS/PKS enzyme, [Aspergillus clavatus NRRL 1]
  misc_feature (2)..(3947): NCBI GI: 171695604 Blast Desc: protein product [Podospora anserina] gi|170948044|emb|CAP60208.1| protein product [Podospora anserina]
  misc_feature (2)..(3949): NCBI GI: 159124036 Blast Desc: hybrid NRPS/PKS enzyme, [Aspergillus fumigatus A1163]
  misc_feature (2)..(3949): NCBI GI: 154818234 Blast Desc: pseurotin A precursor [Aspergillus fumigatus Af293]
  misc_feature (2)..(3386): NCBI GI: 238845970 Blast Desc: nonribosomal peptide synthase [Microsporum canis CBS 113480]
  misc_feature (2)..(3943): NCBI GI: 238837915 Blast Desc: polyketide synthase [Microsporum canis CBS 113480]
  misc_feature (2)..(3966): NCBI GI: 255938466 Blast Desc: Pc14g00080 [Penicillium chrysogenum Wisconsin 54-1255] gi|211584624|emb|CAP74149.1| Pc14g00080 [Penicillium chrysogenum Wisconsin 54-1255]
  misc_feature (2)..(2960): SWISSPROT Homolog: EC 2.3.1.161 Lovastatin nonaketide synthase
  misc_feature: Useful for fungicidal and/or biocontrol applications
MEPIAIIGIAHRFPGGASTPSALWDLLLSLPKDLSKPPPPDRLNLSKFHHPNDDQHGSTPVSNAYFLDEDATVFDSSFFSISPLEAEAMDPQQRLLLEATYEASERAGLPLEQLRGSRCSVFVGVMTADYEHIQYHDIEDMSAYTGTGTSRAILANRISYFFDFKGQSTVIDTACSSSLVALHLAVQDLRAGNSEMAVVAGCNLMLGPGLYVSEAKLHMLSPTGTCKMWDAGADGYARGEGVASIILKPLSAAIRDGDPIQSVIRQTGVNSDGRTRGITMPSARSQAALIRHTYHTAGLDPSKPEDRCQYFEAHGTGTKAGDPNEARGICEAFFPNHEPIPSEADDKDVLLVGSIKTVIGHLEGAAGLAGMIKSILAMQQATVPANLHLNSLNPEVSPFCGPLKVPRQHLPWPSPAPGHPKRASVNSFGFGGTNAHVILEEYQDNHRGVFEEANHRRLMTLAMPLFTSANTQSSLSNRARQLAEYLRQHGEVGYLDVAQTLWKRHSEQPYRQAFSGSTFENVIQDLEKCSADQSLLGLRVQPFVSPEEGFGVLGVFTGQGAQWPGMGRELLIHNATFRSVIETCDDALSSLSEAPSWSLVSQLLADSSTSSIADAAVAQPATTALEIGLVAVLEAMGVSFSAVIGHSSGEMAACYAAGILTLEEAIRIAYYRGLYAEKYTGKGSMMAVGMSSQAAARLCTDKRFQNRLWLAAKNSPSSVTLSGDVDAVLEAKSVLDDRKIFARILHTDKAYHSPHMQKCARAYREALSRCEIKPQSPREGCVWISTVDGHADRSWDADVQSLSGEYWVQNMLQPVLFTDGVTAALTNGGPYDLALEVGPHPALKGPASETISTHLPGGIPYYGCMYRKRDCLESISRLLGNLAVNFGKNVVDLDSYQNSWTRSKQRSSYRVISDLPPYPWDHDKSYWRESRLSRNHRLKQDEHQKNGLRLLGRRCPDDTEKEPRWRNFLSLKELPWLRGHAFQGEALFPAAGHLALMLEAAQYLACGRSVKYFEIRSVKLERTLRIHEGPRPVEILCSARVTKEASKDNNSLEALFACHFSSDQKQLEEQASTATLHIFLNHPGEAEHTILPPREVPRTPMSNVDVGRFYANMRNIGLEYQGAFKALKSIRRVDGIATATASWSLDEIGDDRGKGNLYHPALLDTALHPIFSAFTTPSTDRIWTAFLPQSIEKVIIGAQGQLLLSPAGTIDIAIDACLTEASPTRIVGEVDIYSFDDTPMVQLQGVALAALERPSAENDRNIFSKVSWQPDILGGADFPIDYEPRQDNMVVAAERVGYFYARKMLAEAAAVGIENLKWHEKQMVETLQVLTGKINQWNDDNEDVVEAIVEKYCNQVDFQLMRTVGREIGSVLRNEKQMVEVLFVDNVMNDFYRQGLGLRNAQRQVASYMQSISHRHPRASILELGAGTAATTSSVFHAIGNTYGSYTFTDVSAGFFPQAQAMFADHADRMVFRKLDISSPFEDQGFQEESYDVVIAANVLHISEDVEVVLRRVRGLLKPGGYLVATEPTSSLLRLHVILGGLEGWWLARDGCRTAGPILTCESWDEKLRQTGFSGIDLMGYDQVDEGLHSCTSFVSQATSHRVDSLRSPLEHIDQLPKSARIAIVGGSVLTTSKLIRSIRAKLSSHGIAISQYAGARQVIVSEVAAPTYILYLSELDRPAFQDGYDHGTLTGMKALLSNPKAFMALTKNAGSSNAFSNMIVGLFRGLRVESPSLQLQVLDLENSELNADKILERFLHFIFAILDSAEASNSLLTIEPELLLKDNKLFIPRVVTDVHPNERVNSHRRPIPRLVTKYTHVIEAYSTASMTIMTASAKLGLVKLCSTTVNVDYSVRIPISSLTIPRPWYMCVGAIAENPMQSVITLSHVNASEIQVQAGDVYPVDAEVFKPEMLTVLILFAAIRAWLGRVPRASTVWVHGLDDFAVSIFEREAARKEVRIVATSSNPNDSKYLHPHATSRTIKSLVPGNVAALIVDEGVHERMAFTKTMQSKFGLAQSLCRPLYDLLPAWFESMTTYDVLDEVYESAHATHFAISSALHMQPIVPIAEFDASSSGHSGSILDWRASSPVRANISPAPPETLLRSDKSYLLVGLTGEVGLSICSWMIAHGVRHVALASRKPKIDQHVLDAMSRQGAEIRVFALDVTDTASVQEVISDIRITMPPLVGVCNGSMVLSDGLFQEMDKAQVDTVLNPKARGSMILDSILSSEKLDFFIMLSSLGSVIGTPGQANYHMANMFMVALATDRRRRGLAASVIDVGFISDIGYVPRQDVAVERTLRAMNMLALWEEEVHVMFAEAIIAGRPDSGRSPELIIGLPISDDESKRPHWVIDPRFSHFVEDKRSVASAQSGSSAIQDLRSILASLTDEEAIVGKIQNAFGEQLESLLQLLPGGANMDSPLIALGMDSLLAMEVQRWFRKMVGAEISVLQILGGASGQEVCRVAANSILGEQQSQGTLSDSKPTDRHAEASNLDGDDKAMKSDDISITLSSESIPVTLATSTASPGTATPATSAGDETPDCDHPEGHGRPLKEIPMSFAQAQLWFLQDFLEDPTTYNETAQYKIHGPLDIDKLRTAFYKVTSHHEMLRTQFRNNPNTGEPSQVVLSASVCPFQYVDEAMADTVDREYGKLTSRVWDLASGASLGLTVVRHSQVHHTLMIGSHHIAVDGVSWAILLRHLALAYQARPLPPVPGYTEFAVSQHQKFRSNSFAKDIDFWKRELRGIQDALPLFPMARVNTRPSSNSYNSVTAHTTLDENVVSKIKRASSKMHVTPFHFHLSMLAALVSRLSQTTDICIGTVDAGRSDGRFAETVGFFINIVPIRVQVTDKDSFATICKQVSSKVFASLSHSQVPLHVLLDALRVQRTARHSPLFQIIINYRLDILGQDSIGDCKVEYSTSKSSGNPYDLCLNITETPERTCHIELSAKEALYSNEAAQSILAYYRGMLNSASHTADSLISQVLLRNHSEQSLRGTIGAGCGKRVQCTWDETVSRRIESISQRHPDVVAVEYQGNSYCYRDLLKRATGISIALKHSFDAQGVYCGLLFEPSADHIASFLAVLRSAAVAVPLDALNSRERLSVIVEDCKPAVVLYHRQTAGTAQWLQTINPLTTFIDVSRISTSLQQLENIDLSKADAPATLLYTSGTTGTPKGVILTNSNYRSIIASTTNRMQLSYMNEVVLHQTALGFDMSIMQILLGLCNANTLVVATATQRRDPCAVAELLAERGISCMIATPTEYSMMFQHAPETLSQCQSLRIAGAGGEVFTAHLAAQFRRMFARDLNVFNVYGPTETCINSNVGLVEHWRDDLDLIPVGPPLDNVSTYVLDEARNPVPHSCTGEIYVSGCGVGKGYFGRPDLTAASFLSDPFATPSDISQDPAYMYRTGDKGYLQPDGKLVILGRVNGDSQVKLRGIRIELEDIASNIITVACGKISQAVVTTRGETQMLVGFAVPASGAKLDINDNFLETLIQSLPLPEYMKPAVIIPIEKLPRTTNGKLDRNALGQISLPDRMMRGAIAQETLSPLEAELRQIWTEILPHSTVDIPRDSDFFRFGGNSTLLVTLRSRIKLKWHVNVPLLRLFEASTLKSMAASIRSVKESRIGNNNSDWEFWDRETRFDYAFNNGTAKTITPIGRQYLSAMTQGPKTILITGANTLLGSEVLKILLNSPDVARVHCVALSHEQQSHLPASDKIVAYTGSLGDPTLGLTPETEAQMQKEVDIILHGGAEGSCLNEYSSISQQNVESTRFLAHLAVTRPIPLHYISSARVILFTGKNEWNEASTHGHYPPSDHGREGFTATKWASEMILESCHRRTGLPIAVHRTGYLMSDNADEMDIVNMIHKYSSQLRAVPSLTRFSGHIDMSEVESVAGGIATAVLTTEFNNEKLLYKHHTDNNAVPVHGFRKYMECKLGCLLDELPMDEWAKEAECIGMNPFLAEFLAAVVEKGDEARYPKLLKAT

SEQ ID NO: 3612 - DNA, 2288 bp, Muscodor strobelii
  misc_feature: SGI EST ID NO. CUFF.9087.0
  misc_feature: Variant of the nucleotide sequence at SEQ ID NO 3610
cggaactgctggctgaacgtggaatctcatgcatgattgccactcctactgagtactcgatgatgtttcaacatgcgccagaaactctgagccaatgtcagtcgctgcgcatagctggcgctggcggtgaagtattcacagcgcatcttgcggcccagttccgtcgaatgttcgctcgagatttgaacgtattcaacgtgtatggtccgacggaaacgtgcatcaacagtaatgttggcttagttgagcattggagagatgacttggatctcattccagtgggccctccacttgacaacgttagcacgtatgtgctagatgaagcccgcaatccagtacctcacagctgtacaggcgaaatctatgtgtccggttgtggagtaggtaaaggctactttggtcggccagatctcaccgctgcatctttcctctcggatccattcgcaacacccagtgatatcagccaggaccctgcatacatgtatcgtacgggtgataaaggatatcttcaacccgacggtaaactagtcatcctaggacgcgtaaacggtgatagccaagtcaagcttcgcggtatccgcatcgagctagaagacattgcatcgaacatcatcacggttgcttgtggaaagatctcacaggcagtcgttacgactcgcggcgagacacaaatgctagtcggcttcgccgttcctgcctctggtgcgaagctggatatcaacgataactttttggagacgctgatacaaagtctcccgcttcccgagtatatgaagcccgctgtcatcataccgattgaaaagctaccaaggacaacaaatgggaaactagatcggaacgcgctcggtcagatttcgttgcctgacagaatgatgaggggcgctattgctcaggagacactttcacccctggaagctgaacttcgtcagatatggacagagattcttccacactcaactgttgatattccacgcgactcagacttcttccgattcggaggaaactcaacgcttttagtcacgctacgcagtcggataaaattgaagtggcacgtgaatgtgcctttgctccgactctttgaggcaagcaccctgaaatctatggctgcaagtattcgaagcgtcaaggaatcacgcatcggcaacaataatagtgattgggaattctgggatcgcgagacccggttcgattacgctttcaataatggcactgcgaagactattactccgattggaagacagtacttgtccgccatgacgcaagggccgaaaactattcttatcactggcgctaatacgctcctgggctcggaagtgctaaagatccttctcaacagtcctgatgtagctcgagttcattgtgtggctctctcccatgagcagcagtctcatcttccagcgagcgataagatcgtggcctataccggaagtctcggagatccgacactcggattgaccccagagacagaagctcaaatgcagaaagaagttgatatcatactgcacggcggcgctgaaggctcctgtctcaatgaatactcgtctattagtcaacaaaacgttgagtctacaaggtttctcgctcatctggcggtgacgaggccgatcccgttacactacatttcaagcgcaagagtcattttattcacaggcaagaatgagtggaacgaagcatctacacatggccattatcctcctagtgatcatggcagggagggttttactgctactaagtgggccagtgaaatgatcttagagagctgtcataggcgaaccggattacccattgcagttcatcgtaccgggtatttgatgagtgacaatgctgatgaaatggacatcgtcaacatgattcataagtattcgagccagctgcgcgctgttccatcactcactagattctctgggcatatagatatgagtgaggtcgagtccgtcgcgggtggtattgccaccgctgttttgacaaccgagttcaacaacgagaagctactctacaaacaccacactgataacaatgcggtaccagtgcatggtttcaggaagtacatggaatgcaagcttggatgcttacttgatgagttgccaatggatgagtgggcaaaggaggctgagtgcattggtatgaacccattcttggcagagtttttggcagctgttgtcgagaagggagacgaagcaaggtatcctaagcttctgaaggcgacataagacgcattatcaatgtgtgttgtaaataagatgatgatagtataatttgcctaaattcacatctgtccatacctcgca

SEQ ID NO: 3613 - DNA, 11937 bp, Muscodor strobelii
  misc_feature: SGI cDNA ID NO. 560868
  misc_feature: Encodes the peptide sequence at SEQ ID NO 3614
atggagcccatcgcaatcatcggcatagctcatcgctttcctgggggtgcatcaactccttcggcgctttgggatctgctcctcagtctaccgaaagacctatcgaagccaccaccgccggacaggctgaatctttcaaaatttcatcatccaaatgatgaccaacatggcagtacgcccgtgtcaaatgcgtattttcttgacgaagacgcgacagtcttcgactcctcattcttctctatcagccctctagaagctgaggcgatggacccgcagcaaaggttgctccttgaggctacatatgaagctagtgagcgcgcaggtttgccgctagagcagcttcgcggaagccgatgttcagttttcgttggcgtcatgaccgcggactacgagcacatccagtatcatgatattgaagatatgtctgcctacacggggacaggaacctcaagagcgatattggcaaatcggatatcgtatttctttgatttcaagggacagtcaacggtcattgacacagcatgctcgtcctcgctagttgccctgcatcttgcagtgcaggatctaagggccggaaattctgaaatggctgttgttgccggatgtaatctgatgttagggcctggcctatacgtcagcgaagcaaagttacatatgctttcgccaacgggaacatgtaaaatgtgggatgctggggctgatggtgaaagtatgaaagcttacatgaaatctcttttaggctacgcgcggggcgagggagttgcatcaataatcctgaaaccacttagcgcagccatacgcgacggtgatcccatacaaagtgttatacgtcagacgggtgtcaactcggatggacgaacgcgcggaatcacaatgccgagtgcaaggtcgcaagcagcactgatacggcacacgtatcatactgcgggactggatccctcaaagcccgaggataggtgccaatattttgaagctcacgggacaggaaccaaagcaggagaccctaacgaggccagaggtatctgtgaagctttcttcccgaatcatgagcctattccttcggaagcagacgataaagatgttctccttgttggttccatcaaaacggtcataggccatctggagggtgctgccgggttggcggggatgatcaagtcaatactagcaatgcaacaagctacagtcccagccaacctccatctcaattccctaaaccctgaagtttcgcccttctgtggacctttgaaagttcctaggcaacatctaccatggccatcgccagcccccggacacccaaagcgagccagtgtcaatagttttggcttcggcggaaccaatgctcatgtcattttggaagaatatcaggacaatcatagaggggtgttcgaggaagccaatcacaggcgactgatgacactggctatgccgcttttcactagtgccaacacgcagagttcactctcgaatcgtgctcgacagcttgcagaatacttacgccagcatggtgaagtaggatatctagacgtcgcccagactctgtggaaacgacacagtgagcaaccttatcgacaagctttctctggatctacgtttgaaaatgtaattcaggacttggagaagtgctctgcggaccagtcgctcttaggactcagggttcaaccatttgtgtcgccagaggaaggcttcggtgtactgggcgtattcaccggccagggcgctcaatggccaggtatgggacgagaactgctaatacacaacgccacgttcagaagcgtgatagaaacatgcgatgatgcactgtcgagtctctctgaggcaccgtcgtggtctctcgtcagccaacttcttgccgactcctcaacaagctctattgcggatgcggccgttgctcaaccagcgacaacagctttagaaattggccttgttgcagttctggaggcaatgggtgtcagcttcagtgctgtgatcgggcactcctccggtgaaatggcggcgtgctacgcagctggtatcctcactctcgaagaagcgatccgcattgcgtattatcgggggttgtatgctgagaaatatactgggaaagggtctatgatggctgtgggtatgagttcgcaagctgccgccaggttatgcacagacaaaaggtttcagaaccggctatggcttgcggccaagaactctccttccagcgtcactctatccggtgatgtagacgccgtgctggaagccaagtctgtcctggacgatcgcaagatttttgctcgcattctacatacggacaaagcttaccactcaccgcatatgcaaaaatgtgcacgcgcataccgagaagcactctcaagatgtgaaataaagccccagagtcctcgtgagggctgtgtgtggatcagcactgtcgacgggcatgcggatcgctcttgggatgccgatgttcaatccttgagcggcgaatattgggtccagaacatgttacagcccgtcctgtttaccgacggtgtcacggcagctctcacgaatgggggtccgtacgatctggccctagaagttggaccgcatcctgcgctcaaaggtccggcatccgagacaatatccacgcatttgccaggcggtatcccgtactatggttgcatgtatcggaaaagagactgtctagagagcatctccaggctgttaggcaatttggctgtcaactttggtaagaacgtggttgatctggattcgtaccaaaacagctggactcggtcaaagcaacgttcaagctaccgcgtcataagcgatctccctccatatccgtgggaccatgacaagagctactggcgagagtcacgtttatctcgcaaccatcgcctgaaacaagatgaacatcagaaaaacggtcttcgactcctgggacgacgatgtccagatgacaccgagaaagagccccgctggcggaatttcttaagtttgaaagaacttccatggctacgtggtcatgccttccaaggcgaggcattattcccggctgctggtcatttggcgttgatgctagaagctgcccaatacctagcctgtgggcgatctgtcaagtatttcgagatacgaagtgtcaagctcgaacgaacattgcgaatccacgaaggacccagacctgtcgaaattctgtgttccgcgagagtaaccaaggaagcaagtaaagataacaattcgctggaagctctattcgcgtgtcatttcagctcagaccaaaaacaattagaggagcaggcttctaccgctacgctgcatatcttcttgaaccacccaggtgaagcagaacatacaatcctcccaccgagagaagtgccacgtactccgatgtcaaatgtggatgttggcaggttctacgccaacatgagaaacatcggtttagaataccaaggggctttcaaagcattgaaatcaatacgtcgggttgatggaattgccactgccacggcgtcgtggtccctggatgagataggggatgacaggggcaagggaaacctctatcatccagctctgttagacacagcgctacatccgatattcagtgctttcactactccttcaaccgatcgcatatggaccgcttttctaccacagtccattgagaaggtcatcattggtgcgcaaggccaattgcttttgtctcctgctggcactatagacattgctatagacgcctgcctaacagaagcatcaccaacaagaattgttggagaagtggacatttattcctttgatgatacccctatggtgcaactccaaggcgtcgcattagcagcattggaacgaccaagcgcagaaaatgatcgcaatatcttcagcaaagtctcatggcagcccgacattctcggaggcgcagacttccccattgattatgagccacggcaggataatatggtggtagctgcggaacgtgtgggttacttttatgcacgtaaaatgctagctgaggcggctgctgtgggcatagagaatctaaaatggcacgaaaagcaaatggtagagactctccaagtgcttacaggcaagatcaatcaatggaatgacgacaatgaagacgtggtcgaggccatagttgagaagtactgcaaccaggttgacttccagctaatgcgcacagtgggtcgtgagattgggagcgttttgcgcaatgaaaagcagatggttgaagtactctttgtggataacgtcatgaacgatttctaccgtcaaggcctagggctgcgaaatgcccagcggcaggttgcaagctatatgcagtcaatatcgcatcgccaccctagagcatcgatcttggagcttggagccggcactgcagcgacaacatcgagcgtattccacgccattgggaacacctatggttcatacaccttcactgacgtctctgcggggttcttccctcaggctcaagctatgttcgccgaccatgcagatcgcatggtctttcggaagctggatatatcaagtccattcgaagatcaaggtttccaggaagaatcctacgatgttgttatagcagccaatgtgttacacatcagtgaagatgttgaggttgttctgcgtcgtgtgaggggactcctcaagcctggtggttatcttgttgcaacagagccaacatcaagtctgcttcgtcttcatgtcattctgggcggtttggaaggttggtggctggctcgcgatggatgtcgtacagccgggcctatcctgacgtgcgaaagctgggacgagaagttgcgccagactggattctccgggattgacctgatgggctatgatcaggtagatgaaggactgcactcatgtacgtctttcgtcagtcaagcaaccagtcaccgcgtcgacagtcttcgtagccccttggaacatatagatcaactgccaaagtcagcgcgcattgctatagtggggggttctgttttgactacttcgaagttgatacggtctattcgtgcgaagctttcatcacacggaatagccatctctcagtatgcgggtgccagacaagtcattgtgtccgaggtagcagcaccgacatacattctatatctttcggagttagaccggccagctttccaggacggttacgatcacggaacgcttacaggcatgaaagctcttctgtcaaatccgaaggcctttatggcgctgaccaaaaatgccgggtcgagtaatgcattctccaatatgatagttgggctgttccgcggcctacgtgtcgagtcaccatctctccaattacaggtgcttgatctagagaactctgagttgaatgccgacaaaatcttggagcggttcctccatttcatctttgccattctcgacagcgctgaagccagcaatagtctgttgacaattgagcctgaactgttgctgaaagacaataagcttttcatccctcgcgttgtgacggatgtgcatccgaacgaacgtgttaactcacatcggcgaccaatccccaggcttgtcacgaaatacactcatgtcatcgaagcttactcgacagcaagcatgacaataatgacggccagcgcgaaactcggcttggtcaagctctgctcgacaacagtaaatgtcgactattctgtacggataccaatcagcagtctgacaatccctcggccatggtatatgtgcgtaggagcgattgctgagaatcctatgcaatctgtcataacgttatcgcatgtcaatgcctcggagatccaagttcaggctggagacgtgtatcctgtagatgcggaagttttcaagcctgagatgcttacagtactaatattattcgcggctatacgagcatggctgggacgagtcccacgggcctccacggtatgggttcatggactggatgactttgcggtgagcatttttgagcgcgaagctgcacggaaagaagtacgtatcgtagcgacttctagcaatccgaacgactctaaatatcttcatccgcacgccacatcacgcacaatcaaaagtctcgtcccaggcaatgtcgctgctcttattgtcgatgaaggcgtccatgaaagaatggcgttcaccaagaccatgcaatcgaagtttggactggcgcagtctctgtgtagaccattatatgaccttctacctgcatggtttgagtccatgacgacttatgatgtcctcgacgaagtttacgaatcagcgcacgcaacacatttcgcaataagcagcgctctccatatgcagccaattgtgcctattgccgagtttgatgcctcttcgtctggtcattcaggttcgatattggattggagagcgtcatctccagtccgtgccaacatctcgcccgccccgccagagacactattgcgatctgacaagagttacttactggtaggcttaacaggagaggtaggactatccatctgctcgtggatgatcgcacatggcgtccgtcatgtggcattagcaagtcgtaaaccgaagattgatcagcatgtgctcgacgcgatgtccagacagggagctgaaatacgcgtgttcgcattggacgtaacggatactgccagcgtacaggaagtgatcagcgacattcgaatcacaatgccgcctctagtgggcgtttgcaacggtagcatggtcctatccgacggcctgttccaggaaatggacaaagcacaagtcgacacggttctaaatcccaaggcccgaggaagcatgatccttgatagcattctgtcaagtgagaaacttgacttcttcatcatgctgtcttctttaggctcagtgattggcacgcctggccaggcgaattatcacatggccaatatgtttatggtagcgcttgccacagaccgacgacgaagaggccttgctgcatcggtgattgatgtgggcttcatttcagatataggttacgttcctcgccaagacgtggcagtggaacgtactctgcgggcaatgaacatgctggctctttgggaagaagaggtccatgtgatgtttgccgaagcaatcattgctggtcgcccggattctggacgctctccagaattaataattggtcttcccattagcgacgacgagtctaaacgaccgcattgggtcatcgatccgcgtttttctcattttgtggaagataaacgctcagtggcttccgctcaatctggctcttctgctattcaagaccttcgatccatcttagcatcattgacggatgaggaggccatcgtcggcaagatacaaaatgcatttggcgagcaattggagtcattactgcagttactccctggtggagcaaacatggactcacccctcattgcactgggtatggactcgttgcttgctatggaagtacagcgatggtttcgtaagatggtgggtgctgagatatctgtattgcagattttgggcggcgcttctggtcaagaggtgtgccgagtggctgcgaactcaatacttggcgaacagcagagccaaggtacactctcagactccaaacctaccgatcgccatgctgaagcttcaaatctggatggagacgacaaggccatgaaatctgacgatatatcaattactctatcatctgagtccattccagtaacgcttgctacttcgactgcgtcaccagggactgcgacaccagcgacgagtgctggcgatgagactcctgactgtgatcatccagagggacatggaagacccctgaaagagattccaatgtcctttgcgcaggcacaattgtggtttctacaagactttctggaagatccaactacgtataacgagactgcccagtacaagatccatggcccattagacatagacaagttgcgtacggcattctataaagtgacatcgcatcacgagatgctaagaactcagtttcgcaacaacccaaacacgggcgaaccaagtcaggttgtcttgagcgcatccgtttgtcctttccagtatgtggatgaggccatggcagacactgtcgatcgcgaatatgggaaattgacttcgagggtctgggacttggcaagcggcgcaagtctaggcttgacagttgttcggcattcccaagttcaccatacccttatgataggtagtcaccatattgctgtggatggtgtgagttgggccatcctgctccgccatcttgctctcgcatatcaagcaagacctctaccacctgtgccaggctacacagagtttgccgtgtcgcaacaccaaaaattccgcagcaattcttttgccaaggatattgacttctggaaacgagagcttcgtggcattcaagatgccttgcccctatttccaatggcgcgtgtcaacacccgaccgtccagcaatagctacaacagtgttacagcccataccacgttagacgagaacgtagtatcgaaaatcaaacgagcaagcagcaagatgcacgtcacgccgtttcattttcatttgagcatgctcgcggcccttgtatcgcgcctctcccagactacagatatatgtatcgggacagtagacgcaggcaggtcggacggtcgcttcgcagaaacagtcggattcttcatcaatattgtcccaatacgcgtccaagtcactgacaaagattcttttgcaacaatctgcaaacaggtctcgtcaaaggtgtttgcatctctgagccactcccaggtcccgctgcacgtacttcttgatgcacttcgagtccagcgtacggccaggcacagtccgctgtttcagattatcatcaactatcgccttgacatcttaggtcaagactcgattggcgattgtaaagttgaatatagcacatcaaaaagctcaggaaacccctacgacttgtgcctcaatattacggagactccagaaaggacttgtcatatcgaattgtcggcaaaggaggcactttattccaacgaagccgcgcagtccattctcgcttattaccgcggtatgctcaactcggcaagtcatactgcagattctctcatctcacaagttctgttgcggaaccacagtgaacagtctcttaggggaactataggggcaggctgtgggaagagagttcaatgcacatgggacgaaaccgtctcgcgtcgcatcgaaagtatttcacaacgccaccctgatgtcgtcgctgttgagtatcaaggaaatagctattgctatcgggacttactgaagagagccactggtatttcaattgcgcttaagcactcatttgatgcacagggggtttattgcggccttctatttgagccatcagcggatcatatcgcgtccttcttagccgtgctcagatccgccgccgtagcagtgccattagacgccctcaacagcagagaacgattgtctgttattgttgaagactgtaaacctgcagtcgttttgtatcatcggcaaacggcgggcacggcgcagtggcttcaaaccatcaacccactcacgactttcatagatgtgtctcgaatctccaccagcttgcaacaactcgaaaatattgacttgtcgaaagccgacgcaccggcaacactcctctataccagtggcacaaccggcacacccaaaggggtgattctgacaaactcaaattaccgctctattatagcatctacgactaacaggatgcagctctcctacatgaatgaggtagtactacaccaaacggctctgggctttgacatgtccattatgcagattctgctcggcttgtgcaacgccaatacccttgtggtggcaacagcaacacagcgcagagacccctgcgctgtagcggaactgctggctgaacgtggaatctcatgcatgattgccactcctactgagtactcgatgatgtttcaacatgcgccagaaactctgagccaatgtcagtcgctgcgcatagctggcgctggcggtgaagtattcacagcgcatcttgcggcccagttccgtcgaatgttcgctcgagatttgaacgtattcaacgtgtatggtccgacggaaacgtgcatcaacagtaatgttggcttagttgagcattggagagatgacttggatctcattccagtgggccctccacttgacaacgttagcacgtatgtgctagatgaagcccgcaatccagtacctcacagctgtacaggcgaaatctatgtgtccggttgtggagtaggtaaaggctactttggtcggccagatctcaccgctgcatctttcctctcggatccattcgcaacacccagtgatatcagccaggaccctgcatacatgtatcgtacgggtgataaaggatatcttcaacccgacggtaaactagtcatcctaggacgcgtaaacggtgatagccaagtcaagcttcgcggtatccgcatcgagctagaagacattgcatcgaacatcatcacggttgcttgtggaaagatctcacaggcagtcgttacgactcgcggcgagacacaaatgctagtcggcttcgccgttcctgcctctggtgcgaagctggatatcaacgataactttttggagacgctgatacaaagtctcccgcttcccgagtatatgaagcccgctgtcatcataccgattgaaaagctaccaaggacaacaaatgggaaactagatcggaacgcgctcggtcagatttcgttgcctgacagaatgatgaggggcgctattgctcaggagacactttcacccctggaagctgaacttcgtcagatatggacagagattcttccacactcaactgttgatattccacgcgactcagacttcttccgattcggaggaaactcaacgcttttagtcacgctacgcagtcggataaaattgaagtggcacgtgaatgtgcctttgctccgactctttgaggcaagcaccctgaaatctatggctgcaagtattcgaagcgtcaaggaatcacgcatcggcaacaataatagtgattgggaattctgggatcgcgagacccggttcgattacgctttcaataatggcactgcgaagactattactccgattggaagacagtacttgtccgccatgacgcaagggccgaaaactattcttatcactggcgctaatacgctcctgggctcggaagtgctaaagatccttctcaacagtcctgatgtagctcgagttcattgtgtggctctctcccatgagcagcagtctcatcttccagcgagcgataagatcgtggcctataccggaagtctcggagatccgacactcggattgaccccagagacagaagctcaaatgcagaaagaagttgatatcatactgcacggcggcgctgaaggctcctgtctcaatgaatactcgtctattagtcaacaaaacgttgagtctacaaggtttctcgctcatctggcggtgacgaggccgatcccgttacactacatttcaagcgcaagagtcattttattcacaggcaagaatgagtggaacgaagcatctacacatggccattatcctcctagtgatcatggcagggagggttttactgctactaagtgggccagtgaaatgatcttagagagctgtcataggcgaaccggattacccattgcagttcatcgtaccgggtatttgatgagtgacaatgctgatgaaatggacatcgtcaacatgattcataagtattcgagccagctgcgcgctgttccatcactcactagattctctgggcatatagatatgagtgaggtcgagtccgtcgcgggtggtattgccaccgctgttttgacaaccgagttcaacaacgagaagctactctacaaacaccacactgataacaatgcggtaccagtgcatggtttcaggaagtacatggaatgcaagcttggatgcttacttgatgagttgccaatggatgagtgggcaaaggaggctgagtgcattggtatgaacccattcttggcagagtttttggcagctgttgtcgagaagggagacgaagcaaggtatcctaagcttctgaaggcgacataa

SEQ ID NO: 3614 - protein, 3978 aa, Muscodor strobelii
  misc_feature: SGI Peptide ID NO. 560868
  misc_feature (567)..(902): Pfam Id: PF00698 Pfam Desc: Acyl transferase domain
  misc_feature (2115)..(2279): Pfam Id: PF00106 Pfam Desc: short chain dehydrogenase
  misc_feature (3040)..(3459): Pfam Id: PF00501 Pfam Desc: AMP-binding enzyme
  misc_feature (2556)..(2851): Pfam Id: PF00668 Pfam Desc: Condensation domain
  misc_feature (2)..(265): Pfam Id: PF00109 Pfam Desc: Beta-ketoacyl synthase, N-terminal domain
  misc_feature (273)..(402): Pfam Id: PF02801 Pfam Desc: Beta-ketoacyl synthase, C-terminal domain
  misc_feature (2116)..(2292): Pfam Id: PF08659 Pfam Desc: KR domain
  misc_feature (1434)..(1537): Pfam Id: PF08241 Pfam Desc: Methyltransferase domain
  misc_feature (1434)..(1535): Pfam Id: PF08242 Pfam Desc: Methyltransferase domain
  misc_feature (3670)..(3892): Pfam Id: PF07993 Pfam Desc: Male sterility protein
  misc_feature (3548)..(3614): Pfam Id: PF00550 Pfam Desc: Phosphopantetheine attachment site
  misc_feature (567)..(855): Pfam Id: PF00698 Pfam Desc: Acyl transferase domain
  misc_feature (3709)..(3786): Pfam Id: PF07993 Pfam Desc: Male sterility protein
  misc_feature (3817)..(3849): Pfam Id: PF07993 Pfam Desc: Male sterility protein
  misc_feature (1)..(3975): NCBI GI: 54144463 Blast Desc: TPA: polyketide synthase [Magnaporthe grisea 70-15]
  misc_feature (1)..(3614): NCBI GI: 149209041 Blast Desc: MGCH7_ch7g16 [Magnaporthe grisea 70-15] gi|86195971|gb|EAQ70609.1| MGCH7_ch7g16 [Magnaporthe grisea 70-15]
  misc_feature (268)..(3614): NCBI GI: 145615001 Blast Desc: MGG_09589 [Magnaporthe grisea 70-15] gi|145021875|gb|EDK05952.1| MGG_09589 [Magnaporthe grisea 70-15]
  misc_feature (4)..(3977): NCBI GI: 67902850 Blast Desc: AN8412.2 [Aspergillus nidulans FGSC A4] gi|40747878|gb|EAA67034.1| AN8412.2 [Aspergillus nidulans FGSC A4] gi|259484347|tpe|CBF80487.1| TPA: hybrid PKS-NRPS (Eurofung)
  misc_feature (1)..(3974): NCBI GI: 169768692 Blast Desc: [Aspergillus oryzae RIB40] gi|83766674|dbj|BAE56814.1| protein product [Aspergillus oryzae]
  misc_feature (1)..(3974): NCBI GI: 238498016 Blast Desc: hybrid PKS/NRPS enzyme, [Aspergillus flavus NRRL3357] gi|220693517|gb|EED49862.1| hybrid PKS/NRPS enzyme, [Aspergillus flavus NRRL3357]
  misc_feature (89)..(3977): NCBI GI: 119473651 Blast Desc: hybrid NRPS/PKS enzyme, [Neosartorya fischeri NRRL 181] gi|119406854|gb|EAW16804.1| hybrid NRPS/PKS enzyme, [Neosartorya fischeri NRRL 181]
  misc_feature (2)..(3972): NCBI GI: 158392448 Blast Desc: PKS-NRPS protein [Penicillium expansum]
  misc_feature (2)..(3974): NCBI GI: 242815617 Blast Desc: hybrid PKS-NRPS enzyme, [Talaromyces stipitatus ATCC 10500] gi|218714943|gb|EED14366.1| hybrid PKS-NRPS enzyme, [Talaromyces stipitatus ATCC 10500]
  misc_feature (390)..(3559): NCBI GI: 145607429 Blast Desc: MGG_04238 [Magnaporthe grisea 70-15] gi|145014984|gb|EDJ99552.1| MGG_04238 [Magnaporthe grisea 70-15]
  misc_feature (2)..(2972): SWISSPROT Homolog: EC 2.3.1.161 Lovastatin nonaketide synthase
  misc_feature: Useful for fungicidal and/or biocontrol applications
MEPIAIIGIAHRFPGGASTPSALWDLLLSLPKDLSKPPPPDRLNLSKFHHPNDDQHGSTPVSNAYFLDEDATVFDSSFFSISPLEAEAMDPQQRLLLEATYEASERAGLPLEQLRGSRCSVFVGVMTADYEHIQYHDIEDMSAYTGTGTSRAILANRISYFFDFKGQSTVIDTACSSSLVALHLAVQDLRAGNSEMAVVAGCNLMLGPGLYVSEAKLHMLSPTGTCKMWDAGADGESMKAYMKSLLGYARGEGVASIILKPLSAAIRDGDPIQSVIRQTGVNSDGRTRGITMPSARSQAALIRHTYHTAGLDPSKPEDRCQYFEAHGTGTKAGDPNEARGICEAFFPNHEPIPSEADDKDVLLVGSIKTVIGHLEGAAGLAGMIKSILAMQQATVPANLHLNSLNPEVSPFCGPLKVPRQHLPWPSPAPGHPKRASVNSFGFGGTNAHVILEEYQDNHRGVFEEANHRRLMTLAMPLFTSANTQSSLSNRARQLAEYLRQHGEVGYLDVAQTLWKRHSEQPYRQAFSGSTFENVIQDLEKCSADQSLLGLRVQPFVSPEEGFGVLGVFTGQGAQWPGMGRELLIHNATFRSVIETCDDALSSLSEAPSWSLVSQLLADSSTSSIADAAVAQPATTALEIGLVAVLEAMGVSFSAVIGHSSGEMAACYAAGILTLEEAIRIAYYRGLYAEKYTGKGSMMAVGMSSQAAARLCTDKRFQNRLWLAAKNSPSSVTLSGDVDAVLEAKSVLDDRKIFARILHTDKAYHSPHMQKCARAYREALSRCEIKPQSPREGCVWISTVDGHADRSWDADVQSLSGEYWVQNMLQPVLFTDGVTAALTNGGPYDLALEVGPHPALKGPASETISTHLPGGIPYYGCMYRKRDCLESISRLLGNLAVNFGKNVVDLDSYQNSWTRSKQRSSYRVISDLPPYPWDHDKSYWRESRLSRNHRLKQDEHQKNGLRLLGRRCPDDTEKEPRWRNFLSLKELPWLRGHAFQGEALFPAAGHLALMLEAAQYLACGRSVKYFEIRSVKLERTLRIHEGPRPVEILCSARVTKEASKDNNSLEALFACHFSSDQKQLEEQASTATLHIFLNHPGEAEHTILPPREVPRTPMSNVDVGRFYANMRNIGLEYQGAFKALKSIRRVDGIATATASWSLDEIGDDRGKGNLYHPALLDTALHPIFSAFTTPSTDRIWTAFLPQSIEKVIIGAQGQLLLSPAGTIDIAIDACLTEASPTRIVGEVDIYSFDDTPMVQLQGVALAALERPSAENDRNIFSKVSWQPDILGGADFPIDYEPRQDNMVVAAERVGYFYARKMLAEAAAVGIENLKWHEKQMVETLQVLTGKINQWNDDNEDVVEAIVEKYCNQVDFQLMRTVGREIGSVLRNEKQMVEVLFVDNVMNDFYRQGLGLRNAQRQVASYMQSISHRHPRASILELGAGTAATTSSVFHAIGNTYGSYTFTDVSAGFFPQAQAMFADHADRMVFRKLDISSPFEDQGFQEESYDVVIAANVLHISEDVEVVLRRVRGLLKPGGYLVATEPTSSLLRLHVILGGLEGWWLARDGCRTAGPILTCESWDEKLRQTGFSGIDLMGYDQVDEGLHSCTSFVSQATSHRVDSLRSPLEHIDQLPKSARIAIVGGSVLTTSKLIRSIRAKLSSHGIAISQYAGARQVIVSEVAAPTYILYLSELDRPAFQDGYDHGTLTGMKALLSNPKAFMALTKNAGSSNAFSNMIVGLFRGLRVESPSLQLQVLDLENSELNADKILERFLHFIFAILDSAEASNSLLTIEPELLLKDNKLFIPRVVTDVHPNERVNSHRRPIPRLVTKYTHVIEAYSTASMTIMTASAKLGLVKLCSTTVNVDYSVRIPISSLTIPRPWYMCVGAIAENPMQSVITLSHVNASEIQVQAGDVYPVDAEVFKPEMLTVLILFAAIRAWLGRVPRASTVWVHGLDDFAVSIFEREAARKEVRIVATSSNPNDSKYLHPHATSRTIKSLVPGNVAALIVDEGVHERMAFTKTMQSKFGLAQSLCRPLYDLLPAWFESMTTYDVLDEVYESAHATHFAISSALHMQPIVPIAEFDASSSGHSGSILDWRASSPVRANISPAPPETLLRSDKSYLLVGLTGEVGLSICSWMIAHGVRHVALASRKPKIDQHVLDAMSRQGAEIRVFALDVTDTASVQEVISDIRITMPPLVGVCNGSMVLSDGLFQEMDKAQVDTVLNPKARGSMILDSILSSEKLDFFIMLSSLGSVIGTPGQANYHMANMFMVALATDRRRRGLAASVIDVGFISDIGYVPRQDVAVERTLRAMNMLALWEEEVHVMFAEAIIAGRPDSGRSPELIIGLPISDDESKRPHWVIDPRFSHFVEDKRSVASAQSGSSAIQDLRSILASLTDEEAIVGKIQNAFGEQLESLLQLLPGGANMDSPLIALGMDSLLAMEVQRWFRKMVGAEISVLQILGGASGQEVCRVAANSILGEQQSQGTLSDSKPTDRHAEASNLDGDDKAMKSDDISITLSSESIPVTLATSTASPGTATPATSAGDETPDCDHPEGHGRPLKEIPMSFAQAQLWFLQDFLEDPTTYNETAQYKIHGPLDIDKLRTAFYKVTSHHEMLRTQFRNNPNTGEPSQVVLSASVCPFQYVDEAMADTVDREYGKLTSRVWDLASGASLGLTVVRHSQVHHTLMIGSHHIAVDGVSWAILLRHLALAYQARPLPPVPGYTEFAVSQHQKFRSNSFAKDIDFWKRELRGIQDALPLFPMARVNTRPSSNSYNSVTAHTTLDENVVSKIKRASSKMHVTPFHFHLSMLAALVSRLSQTTDICIGTVDAGRSDGRFAETVGFFINIVPIRVQVTDKDSFATICKQVSSKVFASLSHSQVPLHVLLDALRVQRTARHSPLFQIIINYRLDILGQDSIGDCKVEYSTSKSSGNPYDLCLNITETPERTCHIELSAKEALYSNEAAQSILAYYRGMLNSASHTADSLISQVLLRNHSEQSLRGTIGAGCGKRVQCTWDETVSRRIESISQRHPDVVAVEYQGNSYCYRDLLKRATGISIALKHSFDAQGVYCGLLFEPSADHIASFLAVLRSAAVAVPLDALNSRERLSVIVEDCKPAVVLYHRQTAGTAQWLQTINPLTTFIDVSRISTSLQQLENIDLSKADAPATLLYTSGTTGTPKGVILTNSNYRSIIASTTNRMQLSYMNEVVLHQTALGFDMSIMQILLGLCNANTLVVATATQRRDPCAVAELLAERGISCMIATPTEYSMMFQHAPETLSQCQSLRIAGAGGEVFTAHLAAQFRRMFARDLNVFNVYGPTETCINSNVGLVEHWRDDLDLIPVGPPLDNVSTYVLDEARNPVPHSCTGEIYVSGCGVGKGYFGRPDLTAASFLSDPFATPSDISQDPAYMYRTGDKGYLQPDGKLVILGRVNGDSQVKLRGIRIELEDIASNIITVACGKISQAVVTTRGETQMLVGFAVPASGAKLDINDNFLETLIQSLPLPEYMKPAVIIPIEKLPRTTNGKLDRNALGQISLPDRMMRGAIAQETLSPLEAELRQIWTEILPHSTVDIPRDSDFFRFGGNSTLLVTLRSRIKLKWHVNVPLLRLFEASTLKSMAASIRSVKESRIGNNNSDWEFWDRETRFDYAFNNGTAKTITPIGRQYLSAMTQGPKTILITGANTLLGSEVLKILLNSPDVARVHCVALSHEQQSHLPASDKIVAYTGSLGDPTLGLTPETEAQMQKEVDIILHGGAEGSCLNEYSSISQQNVESTRFLAHLAVTRPIPLHYISSARVILFTGKNEWNEASTHGHYPPSDHGREGFTATKWASEMILESCHRRTGLPIAVHRTGYLMSDNADEMDIVNMIHKYSSQLRAVPSLTRFSGHIDMSEVESVAGGIATAVLTTEFNNEKLLYKHHTDNNAVPVHGFRKYMECKLGCLLDELPMDEWAKEAECIGMNPFLAEFLAAVVEKGDEARYPKLLKAT

SEQ ID NO: 3615 - DNA, 2288 bp, Muscodor strobelii; identical to SEQ ID NO: 3612
  misc_feature: SGI EST ID NO. CUFF.9087.0
  misc_feature: Variant of the nucleotide sequence at SEQ ID NO 3613

SEQ ID NO: 3616 - DNA, 405 bp, Muscodor strobelii
  misc_feature: SGI cDNA ID NO. 560869
  misc_feature: Encodes the peptide sequence at SEQ ID NO 3617
atgttagtgaccaattggacctacgaaatgcgttatctcgtcgtccaccccattatacaccatgcgaccctcggggagccaactccgaaccagaaactgtcaatcgtctccggtatccccatcgacgcaaacagcaccgaaaacaacaatggtgttaacaacgcctcaaccagggccgagcccaatccttctgaaagtgaagaacacggttcccttgagagtcctatccacgattctgacgaccaatctaccgccctgacgaatggcctcgctgtggagcttgacctattccatattacggatgaggggggggggagattgaaaaagagcggcagaaactggccgtttattgcgcaagtttggatcaagcagcctctaaagagtagagtggacattgctggatga

SEQ ID NO: 3617 - protein, 134 aa, Muscodor strobelii
  misc_feature: SGI Peptide ID NO. 560869
MLVTNWTYEMRYLVVHPIIHHATLGEPTPNQKLSIVSGIPIDANSTENNNGVNNASTRAEPNPSESEEHGSLESPIHDSDDQSTALTNGLAVELDLFHITDEGGGRLKKSGRNWPFIAQVWIKQPLKSRVDIAG

SEQ ID NO: 3618 - DNA, 516 bp, Muscodor strobelii
  misc_feature: SGI cDNA ID NO. 560870
  misc_feature: Encodes the peptide sequence at SEQ ID NO 3619
atggatcaaatcatgaccttggaccatgtgcgaggccgatcctactcggtgggtcctatctacactgaggccacccagcccctcgcagaggtggccacgggactgaaagctattcttcgacgcacacagtcgatgcaccaacagtctgcgcttgagaggacactcaggaacgtcattgtatacagcaaaggccataatggaatattacaagacaaagcccaatctcctctgtgtgccaactcggagcgtagaagatctgccatttcgcagaataatgacggaaacaaagagcgacaatcactgcacagattgccaattcatcccgagaaggtttgcacgcagagctggctgacttatctcaccacctccatccatggacccgtgaggagtctcacgcagacgcgaggtctcaggagcgatcccgcgacagagggcaatccagggaccggactcgcagaaggcaaatttcaattactaatgacaacagtaaacagacaggcagataccaaggagtag

SEQ ID NO: 3619 - protein, 171 aa, Muscodor strobelii
  misc_feature: SGI Peptide ID NO. 560870
MDQIMTLDHVRGRSYSVGPIYTEATQPLAEVATGLKAILRRTQSMHQQSALERTLRNVIVYSKGHNGILQDKAQSPLCANSERRRSAISQNNDGNKERQSLHRLPIHPEKVCTQSWLTYLTTSIHGPVRSLTQTRGLRSDPATEGNPGTGLAEGKFQLLMTTVNRQADTKE

SEQ ID NO: 3620 - DNA, 2525 bp, Muscodor strobelii
  misc_feature: SGI EST ID NO. CUFF.9100.0
  misc_feature: Variant of the nucleotide sequence at SEQ ID NO 3618
atttctcgttcttaggtcctcacgggcctggcaaactcccccttgatctcacatcatggatcaaatcatgaccttggaccatgtgcgaggccgatcctactcggtgggtcctatctacactgaggccacccagcccctcgcagaggtggccacgggactgaaagctattcttcgacgcacacagtcgatgcaccaacagtctgcgcttgagaggacactcaggaacgtcattgtatacagcaaaggccataatggaatattacaagacaaagcccaatctcctctgtgtgccaactcggagcgtagaagatctgccatttcgcagaataatgacggaaacaaagagcgacaatcactgcacagatgtgaatctatggaattgcgcttgggctcatctcgctcatattttgggtgtacatctcggagtgccaattcatcccgagaaggtttgcacgcagagctggctgacttatctcaccacctccatccatggacccgtgaggagtctcacgcagacgcgaggtctcaggagcgatcccgcgacagagggcaatccagggaccggactcgcagaaggcaaatttcaattactaatgacaacagtaaacagacaggcagataccaaggagtagatgtgcatcatatcgtggatgagcgccaagagcttgcggaaggttcttcgacatcgctttctaggtcttatgtgaactttgcgattcatctacatgctgttgatagcgcctctgatctccggagctctgatgctagaaaagactcacatgtcgcaaaggggaaatttcgattgcgaaatcgagatttggcggaagtccgttacccaaagccttcgccttcacatgagccgatctggtatgccggggatggatttacgactgcagaggcaaagccctttcggataaccagtagtcgcaaacacaaaaagaaaccatgtagagcattgttggctctaggccagctggtcttagaacgagatattgcccttgaacagaaccagttgttggttactcccactcacccgcactcagagacttcaaaaggatcgcgggctaaagcccactgctttgacgcaacagaagattggccaactcaacaaagcttctatgaagttgatcagcaaagtagtaggctgtcgaagccaatcgtaacccgcaaactctcgttcacattggctgaggaaccctgccggcccgtccttcctcagaaaacaagcttagagatcagaccaagtttgccacggaagagaccacgatctcacttcgagacctttggtagacgccaacgcagatcactcggcgggcatggagattctttggcgctgctatcttcccaggagcaactgcagcttggaaatttgccactaagcgacaataatgatgctgcagactgacaggaccacgagctagacggtgggagaaaaatgagggacgagagtcctgacaacgggcatgaactccctagtgtccaaattggccaggacgtgagcaacagtgctcagtatctgagtgagagttgtgaaaatgcagagcctggaatatcaaaccgagatcaaccaagaggcggacggtatgggaatatgagaagcaacaaggatgcgtccaaaggaaaacaagtactagaatttgagtctgctaccaattgcggtacgagttcagaccacagaatgaaaccgagaacagcaccgcgataatgtacccacaaagtgttgaaagcaataaaatagaagaaccgatttacagcgatgaatccgatagagacgggccaaaacattcggaggttcttggaaagagcggcaacatgttacaaacctggctcatctagcggttcgccttgcagatccttaacaaggacatcgacatcgtctggttcgacgtcgccctggccgtcaccgacgtgtaatgactccctttcaatcctatatccacacgccatgagagcttggaatagaaaagaacagtgcggccctctacgaccacacccttattcttgtctctccgctcccatgcctccaacgacaacaccatccttgacccctcctccatcgtcgtgctcgtacacgatagtgagatctgccgcgcgatcgacagcattatcgagcgccttgtgcttggtgaccttgctgatcaacactaacaaagccccgaagggcaagatcatgtgggtgtatgggtattgcttccgctccaaatctgcgatacctcggaaatacacgtttttgcgagtataagccgtaacattgaaaggcacccgaaggagaagcatatagtggttagtgattttaaagctattggttgtagcagctagctattacatagagagacatttcctgtgacaagcctgctacccatcacctgatgggataggcagtcaagtctgggggtttttgtttgcaggtaatagtagggagaatcaccgtgccccttagagaggcacaaggggctctccacatatttgaattaatatgtgcttaaattgatagctaaagagcagaactaaaagagtgattggtt

SEQ ID NO: 3621 - DNA, 1238 bp, Muscodor strobelii
  misc_feature: SGI cDNA ID NO. 560871
  misc_feature: Elevated expression when VOC is produced
  misc_feature: Encodes the peptide sequence at SEQ ID NO 3622
atgaaggggaatctgcttgcagtcggtctcgcaatcggcggcagtcatgtcactgcactgccgtccgtgtctcagcccgaagagaggaccgtgaacgcctatacttcggatcctttctacccttcgccttgggtgaactacgaggccgacggctggaagtccgctcacaagaaggccaagcacttcgtctcgcaactgacactgcttgagaaagtcaacttgactacaggtgtcggctgggaaaacggtccctgcgtcggcaataccggctctgtcccgcgacttggcttcaaaggtttctgcaaccaggattcgccgcaaggtgttcgcttcggcgactatgtttccgcattcacgtccagtcagctcgccgctgcgacatttgaccgggatgttctctaccaacgcggcgttgcgatggctgaagaacataaggggaaaggagtcacggttcaattgggccccgttgctggacctcttggtcgcgctgtggaaggcggacgtatctgggaaggcttctcttctgaccctgttctcaccggagttgccatgaccgaaacgatcaagggcatacaggacaccagtatcgttgccactgcgaagcacttcatcgcaaacgagcaggaacatttccgacaagtcggcgaggctcagaactatggctacaacatctctgagaccctctcatccaacattgatgacagaaccatgcatgagctctatgtatggccattcgctgatgctgtacgagctggagtgggagcggtcatgtgctcttaccagcagatcaacaactcttacggctgccagaatagtaagatgttgaatggtgtattgaaaggcgagctcggcttccagggattcgttatgagtgattggcaggcgcagcattccggcgtttcttccgcacttgccgggttggatatgacgatgccaggtgatactgtctttgacagcagcctctctttctggggcgccaacctgactgtcgctgtcttgaacggtaccgtcccagaatggcgactagacgacatggtgacccgtattatggccgcttatttcaaggtcggaaatactatcgaaagccaacctgatgttaacttcaactcctggacaccaaacacgtttggttacaaatatgcctacagccaggaaggctacgaacaagtcaactggcacattgatgtccgtggcgagcatgccaagcagatccgggagaccgctgccaagggcactgt

SEQ ID NO: 3622 - protein, 412 aa, Muscodor strobelii
  misc_feature: SGI Peptide ID NO. 560871
  misc_feature (89)..(312): Pfam Id: PF00933 Pfam Desc: Glycosyl hydrolase family 3 N terminal domain
  misc_feature (1)..(412): NCBI GI: 145688454 Blast Desc: beta-glucosidase [Penicillium brasilianum]
  misc_feature (35)..(412): NCBI GI: 154301968 Blast Desc: BC1G_10221 [Botryotinia fuckeliana B05.10] gi|150855613|gb|EDN30805.1| BC1G_10221 [Botryotinia fuckeliana B05.10]
  misc_feature (8)..(412): NCBI GI: 145605453 Blast Desc: conserved [Magnaporthe grisea 70-15] gi|145013276|gb|EDJ97917.1| conserved [Magnaporthe grisea 70-15]
  misc_feature (8)..(412): NCBI GI: 59802998 Blast Desc: beta-glucosidase-like protein [Magnaporthe grisea]
  misc_feature (35)..(412): NCBI GI: 156051478 Blast Desc: beta-glucosidase 1 precursor [Sclerotinia sclerotiorum 1980] gi|154704924|gb|EDO04663.1| beta-glucosidase 1 precursor [Sclerotinia sclerotiorum 1980]
  misc_feature (6)..(412): NCBI GI: 85078070 Blast Desc: beta-glucosidase 1 precursor [Neurospora crassa OR74A] gi|28917151|gb|EAA26868.1| beta-glucosidase 1 precursor [Neurospora crassa OR74A]
  misc_feature (35)..(412): NCBI GI: 116208256 Blast Desc: CHGG_03421 [Chaetomium globosum CBS 148.51] gi|88184018|gb|EAQ91486.1| CHGG_03421 [Chaetomium globosum CBS 148.51]
  misc_feature (6)..(412): NCBI GI: 225590470 Blast Desc: beta-glucosidase [Chaetomium thermophilum]
  misc_feature (36)..(412): NCBI GI: 171685516 Blast Desc: protein product [Podospora anserina] gi|170942719|emb|CAP68372.1| protein product [Podospora anserina]
  misc_feature (25)..(412): NCBI GI: 256726369 Blast Desc: NECHADRAFT_39290 [Nectria haematococca mpVI 77-13-4]
  misc_feature (36)..(412): SWISSPROT Homolog: EC 3.2.1.21 Beta-glucosidase
  misc_feature: Useful for introducing or modulating the production of volatile compounds
MKGNLLAVGLAIGGSHVTALPSVSQPEERTVNAYTSDPFYPSPWVNYEADGWKSAHKKAKHFVSQLTLLEKVNLTTGVGWENGPCVGNTGSVPRLGFKGFCNQDSPQGVRFGDYVSAFTSSQLAAATFDRDVLYQRGVAMAEEHKGKGVTVQLGPVAGPLGRAVEGGRIWEGFSSDPVLTGVAMTETIKGIQDTSIVATAKHFIANEQEHFRQVGEAQNYGYNISETLSSNIDDRTMHELYVWPFADAVRAGVGAVMCSYQQINNSYGCQNSKMLNGVLKGELGFQGFVMSDWQAQHSGVSSALAGLDMTMPGDTVFDSSLSFWGANLTVAVLNGTVPEWRLDDMVTRIMAAYFKVGNTIESQPDVNFNSWTPNTFGYKYAYSQEGYEQVNWHIDVRGEHAKQIRETAAKGT

SEQ ID NO: 3623 - DNA, 1465 bp, Muscodor strobelii
  misc_feature: SGI EST ID NO. CUFF.9127.0
  misc_feature: Variant of the nucleotide sequence at SEQ ID NO 3621
gacaggatagcgttcctcttccatggtacgtgaataccatgacgaaattatcaatggacagcccaataatatccacgttgtcacgttgctttgcatcgtgaaatgacagggttccgcgtcttctgggagatcgaatcacagtataagtaatcctgttctcgtgtccgcgcactagatctttctccttgatggtcgcacgactaggtcattccaacagagcaatctcatcatgaaggggaatctgcttgcagtcggtctcgcaatcggcggcagtcatgtcactgcactgccgtccgtgtctcagcccgaagagaggaccgtgaacgcctatacttcggatcctttctacccttcgccttgggtgaactacgaggccgacggctggaagtccgctcacaagaaggccaagcacttcgtctcgcaactgacactgcttgagaaagtcaacttgactacaggtgtcggctgggaaaacggtccctgcgtcggcaataccggctctgtcccgcgacttggcttcaaaggtttctgcaaccaggattcgccgcaaggtgttcgcttcggcgactatgtttccgcattcacgtccagtcagctcgccgctgcgacatttgaccgggatgttctctaccaacgcggcgttgcgatggctgaagaacataaggggaaaggagtcacggttcaattgggccccgttgctggacctcttggtcgcgctgtggaaggcggacgtatctgggaaggcttctcttctgaccctgttctcaccggagttgccatgaccgaaacgatcaagggcatacaggacaccagtatcgttgccactgcgaagcacttcatcgcaaacgagcaggaacatttccgacaagtcggcgaggctcagaactatggctacaacatctctgagaccctctcatccaacattgatgacagaaccatgcatgagctctatgtatggccattcgctgatgctgtacgagctggagtgggagcggtcatgtgctcttaccagcagatcaacaactcttacggctgccagaatagtaagatgttgaatggtgtattgaaaggcgagctcggcttccagggattcgttatgagtgattggcaggcgcagcattccggcgtttcttccgcacttgccgggttggatatgacgatgccaggtgatactgtctttgacagcagcctctctttctggggcgccaacctgactgtcgctgtcttgaacggtaccgtcccagaatggcgactagacgacatggtgacccgtattatggccgcttatttcaaggtcggaaatactatcgaaagccaacctgatgttaacttcaactcctggacaccaaacacgtttggttacaaatatgcctacagccaggaaggctacgaacaagtcaactggcacattgatgtccgtggcgagcatgccaagcagatccgggagaccgctgccaagggcact

SEQ ID NO: 3624 - DNA, 690 bp, Muscodor strobelii
  misc_feature: SGI cDNA ID NO. 560872
  misc_feature: Encodes the peptide sequence at SEQ ID NO 3625
atgtcgagaaaggtaaaagccaaaggcaggaggtcgaatgatctggaatccattgaatcagctacatcggcagcgaacgcagccttttgtaaagctatgaaacagcatttcgacgatgagagacttaccgacgcagtcgttcattgcaatggaacagaattcaaagtccatgcgctgattttgtctatgcactcggaatacttcgccacggcattcaatggaaattggaaggaaagcaaagacgaaaaacgcataaaacttgaagaaattgagactgatgttgttggagcaatgttgcgcttcatgtatcacttcgaatacacctgcccggataacatgtctactctactgtttgacgcaaaagtctatagtgcagctgaactatatctaatacctcacttaaaggattattgcaagacgaggttcaaagatgcaatggatactcagtgggcagacgacaacttcccggtcgatttggagtctgtcaccagggaggtgtacggtttcaccccagaagcagacagagggcttcgcgatctggtagtgtcgttctgtcatgatcacttgcagagcttctccacgaataatggctttcgccccattttggatgatgtcacgggatttgcggccgatcttgtcatgcacggtttgacgttctataccatgcaaactacacttactacttcttga

SEQ ID NO: 3625 - protein, 229 aa, Muscodor strobelii
  misc_feature: SGI Peptide ID NO. 560872
  misc_feature (33)..(146): Pfam Id: PF00651 Pfam Desc: BTB/POZ domain
  misc_feature (33)..(103): Pfam Id: PF00651 Pfam Desc: BTB/POZ domain
  misc_feature (29)..(213): NCBI GI: 46115274 Blast Desc: FG03479.1 [Gibberella zeae PH-1]
  misc_feature (42)..(213): NCBI GI: 121698245 Blast Desc: BTB/POZ domain protein [Aspergillus clavatus NRRL 1] gi|119395901|gb|EAW06333.1| BTB/POZ domain protein [Aspergillus clavatus NRRL 1]
  misc_feature (41)..(212): NCBI GI: 240108794 Blast Desc: BTB/POZ domain containing protein [Coccidioides posadasii C735 delta SOWgp]
  misc_feature (31)..(180): NCBI GI: 256725432 Blast Desc: NECHADRAFT_101136 [Nectria haematococca mpVI 77-13-4]
  misc_feature (39)..(212): NCBI GI: 119176043 Blast Desc: CIMG_09774 [Coccidioides immitis RS]
  misc_feature (29)..(213): NCBI GI: 46139111 Blast Desc: FG11070.1 [Gibberella zeae PH-1]
  misc_feature (32)..(212): NCBI GI: 240273973 Blast Desc: BTB/POZ domain-containing protein [Ajellomyces capsulatus H143]
  misc_feature (14)..(212): NCBI GI: 225557917 Blast Desc: BTB/POZ domain-containing protein [Ajellomyces capsulatus G186AR]
  misc_feature (19)..(213): NCBI GI: 238837775 Blast Desc: BTB/POZ domain-containing protein [Microsporum canis CBS 113480]
  misc_feature (76)..(222): NCBI GI: 238843977 Blast Desc: BTB/POZ domain-containing protein [Microsporum canis CBS 113480]
MSRKVKAKGRRSNDLESIESATSAANAAFCKAMKQHFDDERLTDAVVHCNGTEFKVHALILSMHSEYFATAFNGNWKESKDEKRIKLEEIETDVVGAMLRFMYHFEYTCPDNMSTLLFDAKVYSAAELYLIPHLKDYCKTRFKDAMDTQWADDNFPVDLESVTREVYGFTPEADRGLRDLVVSFCHDHLQSFSTNNGFRPILDDVTGFAADLVMHGLTFYTMQTTLTTS

SEQ ID NO: 3626 - DNA, 800 bp, Muscodor strobelii
  misc_feature: SGI EST ID NO. CUFF.9148.0
  misc_feature: Variant of the nucleotide sequence at SEQ ID NO 3624
cagtttcttgaactgtggaaattcgaaggcttctgtgtaggactggtttagcagcttggtgccatcaatgctaagcatggcgttcgagcgtggtcaagcaatttgcaatggttgcgatattatgatcagtgagtatcaatgtcaactaaacatttcaataaaagagtataacgtaggtatattccatcttcttatcaacaaattgatcatgtcaatgctgtcagaaattctcagcgttggtgattaggtggtcgtcaaaggcggggtaaatgtattcatatccatgtcagtcgccaacgcgctgcgatgctcaacaggctagtcactgtgaacctcatcttacattggttcccgcaatacgactacatcctacttgcgtttccataaatagctgccttgaagtcccatcgtattcgatgaaacttacaaggaggcgatagcaagagctatacactgttacacgtatgctattcgcatctgcccgacctagctctcgtgcgattcggcttagtactttatatctcttgtgccaattttagccataccacctgcgtctactaataaacagaaagaatgtcgagaaaggtaaaagccaaaggcaggaggtcgaatgatctggaatccattgaatcagctacatcggcagcgaacgcagccttttgtaaagctatgaaacagcatttcgacgatgagagacttaccgacgcagtcgttcattgcaatggaacagaattcaaagtccatgcgctgattttgtctatgcactcggaatacttcgccacggcattcaatggaaattg

SEQ ID NO: 3627 - DNA, 1254 bp, Muscodor strobelii
  misc_feature: SGI cDNA ID NO. 560873
  misc_feature: Encodes the peptide sequence at SEQ ID NO 3628
atgcttagcattgatggcaccaagctgctaaaccagtcctacacagaagccttcgaatttccacagttcaagaaactgccctgggagcttcgaaatcagatttggacatctacactacagacaaagcgtctcatcagagtgtcgctgaagaacccaccgccggagaacatcgtcgagcacgcatcaagcgtagttcggtacggcaccgcctcgctgtttgttaatgggtttcagttgttgtctaaactgttgcgcgtgagctcggaagcaagaaaggcggctctagagttctattacatcaagctaccatgcatcatggtaaattccggcggggacaatcctgatacacgctccggctttcttccattcaaccctctctacgattgtctctggatacaggaaagccatcatcttcagcccttacttgagctgttcaaagcatgcaaggcgcatgataggtatcaaattggagtacgtagcatcgcattgtctatcgagaataatatggagctcttccggcccttcctagatgaaggcagcgcgataccgcaagatgaaagtaccctttgcaaaaatatcaacgaactacacttcgtgacgcaaatcagttcatatcatgcgcagcaggcgaaggagcgatataacgatgatcgtcatcgcaacaccccagcgcgatcacctcgccctttcgcgcatcgaaggaccatttcacaaaaattcgcccctttgtcgtctagtatacccagctttgagcttctggcacatgaccctcgaccaataaaagacgatctagcgaggctgttcttgggttacgagaacatggccgagcagatttccatagctacacaacggctttcgtcccagtacggtctcgatccctccaacgtgaagtcgaatgtccttttcatgtgtagagacgaaaacccatgcttgcaggcatctcactctctccacgacgcgccatctttgctgagaaagcgcctgtccatctcaaagtcacagatatctgaatcattatcgccagtgactcctgaaatttatttaacgattgacgacgaatcgcaagaggagcagagttgcactgccgtcggattttggctgttcccactttcggcattcagcgcatataacaatcttgtccaccctgtcggttcactgcgagtttgggatatgtccgagagctggccccaacttggactgtttcacttgccggccgattcctctgcagatacagagggcgtaacggaggtgtag

SEQ ID NO: 3628 - protein, 417 aa, Muscodor strobelii
  misc_feature: SGI Peptide ID NO. 560873
  misc_feature (12)..(405): NCBI GI: 256724034 Blast Desc: NECHADRAFT_86393 [Nectria haematococca mpVI 77-13-4]
  misc_feature (20)..(404): NCBI GI: 256728994 Blast Desc: NECHADRAFT_79831 [Nectria haematococca mpVI 77-13-4]
  misc_feature (20)..(403): NCBI GI: 39974073 Blast Desc: [Magnaporthe grisea 70-15] gi|145018246|gb|EDK02525.1| [Magnaporthe grisea 70-15]
  misc_feature (20)..(406): NCBI GI: 149210945 Blast Desc: MGCH7_ch7g942 [Magnaporthe grisea 70-15] gi|86196897|gb|EAQ71535.1| MGCH7_ch7g942 [Magnaporthe grisea 70-15]
  misc_feature (20)..(259): NCBI GI: 171677780 Blast Desc: protein product [Podospora anserina] gi|170936958|emb|CAP61617.1| protein product [Podospora anserina]
  misc_feature (80)..(406): NCBI GI: 145609592 Blast Desc: [Magnaporthe grisea 70-15] gi|145017009|gb|EDK01372.1| [Magnaporthe grisea 70-15]
  misc_feature (20)..(400): NCBI GI: 46139773 Blast Desc: FG11401.1 [Gibberella zeae PH-1]
  misc_feature (23)..(403): NCBI GI: 116207304 Blast Desc: [Chaetomium globosum CBS 148.51] gi|88183542|gb|EAQ91010.1| [Chaetomium globosum CBS 148.51]
MLSIDGTKLLNQSYTEAFEFPQFKKLPWELRNQIWTSTLQTKRLIRVSLKNPPPENIVEHASSVVRYGTASLFVNGFQLLSKLLRVSSEARKAALEFYYIKLPCIMVNSGGDNPDTRSGFLPFNPLYDCLWIQESHHLQPLLELFKACKAHDRYQIGVRSIALSIENNMELFRPFLDEGSAIPQDESTLCKNINELHFVTQISSYHAQQAKERYNDDRHRNTPARSPRPFAHRRTISQKFAPLSSSIPSFELLAHDPRPIKDDLARLFLGYENMAEQISIATQRLSSQYGLDPSNVKSNVLFMCRDENPCLQASHSLHDAPSLLRKRLSISKSQISESLSPVTPEIYLTIDDESQEEQSCTAVGFWLFPLSAFSAYNNLVHPVGSLRVWDMSESWPQLGLFHLPADSSADTEGVTEV

SEQ ID NO: 3629 - DNA, 807 bp, Muscodor strobelii
  misc_feature: SGI cDNA ID NO. 560874
  misc_feature: Encodes the peptide sequence at SEQ ID NO 3630
atggcggaaacaaactcaacagttgagacacgaaaagtgcctatggaggtgctatcgctcggctttagcaggacaggaacttccacgatgcaaacagcactgcagatactcggcgtgccatgttaccatgcgtttgagctctacgatcacgtagatcattgcgcagattggaataaagcccttgatgctaagttcttcggccaaggcaaacctttcacgcgcgcagactgggacaatcttctagcggattacggcgccgtcactgatgtccccgccatcgcgttttctgaagatcttatcgccgcatatccagaagccaaggtcgtgctgattgagcgcgacatagataaatggtataacagcttcgacgaaaatgtcataaaacatctatacgatttcgcatccaatttggtcgcgaaattggacaaatggttcctaggcccgcctgtcagcgtacaccatagatgggcgcgtgggtggatgcgcgcagggaccaaaattgagatgcagcaaaaggcaaaggaacactaccgcaagcactacgagaatgttcgaaagtgcacaccatcatctcggctcttagaatatgagctcggtaccggatgggggccgttgtgccagttcctgggcaagccgatccctgatgtcccattccctcgcgtcaacgagtcggcggcaatggaagccaagatccaaggagtcgtgcaacaaggcatgaacagcatattagtcaatagcgccttttatctcgctccggcagccgccgctggggtcgcatattggttctttgtagcgaggggctcttga

SEQ ID NO: 3630 - protein, 268 aa, Muscodor strobelii
  misc_feature: SGI Peptide ID NO. 560874
  misc_feature (11)..(230): NCBI GI: 145239849 Blast Desc: An08g04530 [Aspergillus niger] gi|134077085|emb|CAK45426.1| protein product [Aspergillus niger]
  misc_feature (30)..(258): NCBI GI: 169765908 Blast Desc: [Aspergillus oryzae RIB40] gi|83765280|dbj|BAE55423.1| protein product [Aspergillus oryzae]
  misc_feature (30)..(258): NCBI GI: 238482519 Blast Desc: efflux pump antibiotic resistance protein, [Aspergillus flavus NRRL3357] gi|220700548|gb|EED56886.1| efflux pump antibiotic resistance protein, [Aspergillus flavus NRRL3357]
  misc_feature (30)..(262): NCBI GI: 256722558 Blast Desc: NECHADRAFT_49708 [Nectria haematococca mpVI 77-13-4]
  misc_feature (6)..(257): NCBI GI: 226287907 Blast Desc: [Paracoccidioides brasiliensis Pb18]
  misc_feature (10)..(230): NCBI GI: 256727924 Blast Desc: NECHADRAFT_7929 [Nectria haematococca mpVI 77-13-4]
  misc_feature (6)..(263): NCBI GI: 226282047 Blast Desc: [Paracoccidioides brasiliensis Pb01]
  misc_feature (6)..(206): NCBI GI: 225682214 Blast Desc: conserved [Paracoccidioides brasiliensis Pb03]
  misc_feature (2)..(247): NCBI GI: 256728010 Blast Desc: NECHADRAFT_45960 [Nectria haematococca mpVI 77-13-4]
  misc_feature (21)..(265): NCBI GI: 115397361 Blast Desc: [Aspergillus terreus NIH2624] gi|114192463|gb|EAU34163.1| [Aspergillus terreus NIH2624]
MAETNSTVETRKVPMEVLSLGFSRTGTSTMQTALQILGVPCYHAFELYDHVDHCADWNKALDAKFFGQGKPFTRADWDNLLADYGAVTDVPAIAFSEDLIAAYPEAKVVLIERDIDKWYNSFDENVIKHLYDFASNLVAKLDKWFLGPPVSVHHRWARGWMRAGTKIEMQQKAKEHYRKHYENVRKCTPSSRLLEYELGTGWGPLCQFLGKPIPDVPFPRVNESAAMEAKIQGVVQQGMNSILVNSAFYLAPAAAAGVAYWFFVARGS

SEQ ID NO: 3631 - DNA, 2644 bp, Muscodor strobelii
  misc_feature: SGI EST ID NO. CUFF.9151.0
  misc_feature: Variant of the nucleotide sequence at SEQ ID NO 3629
cgacctggtttatcatttatatcgaacagcatagttctatcgtatcgcctgacaatccttatggcggaaacaaactcaacagttgagacacgaaaagtgcctatggaggtgctatcgctcggctttagcaggacaggaacttccacgatgcaaacagcactgcagatactcggcgtgccatgttaccatgcgtttgagctctacgatcacgtagatcattgcgcagattggaataaagcccttgatgctaagttcttcggccaaggcaaacctttcacgcgcgcagactgggacaatcttctagcggattacggcgccgtcactgatgtccccgccatcgcgttttctgaagatcttatcgccgcatatccagaagccaaggtcgtgctgattgagcgcgacatagataaatggtataacagcttcgacgaaaatgtcataaaacatctatacgatttcgcatccaatttggtcgcgaaattggacaaatggttcctaggcccgcctgtcagcgtacaccatagatgggcgcgtgggtggatgcgcgcagggaccaaaattgagatgcagcaaaaggcaaaggaacactaccgcaagcactacgagaatgttcgaaagtgcacaccatcatctcggctcttagaatatgagctcggtaccggatgggggccgttgtgccagttcctgggcaagccgatccctgatgtcccattccctcgcgtcaacgagtcggcggcaatggaagccaagatccaaggagtcgtgcaacaaggcatgaacagcatattagtcaatagcgccttttatctcgctccggcagccgccgctggggtcgcatattggttctttgtagcgaggggctcttgatccgaagctgtctcaatgttaccgcgcgagtggcgctacaaaggaaagaaaatagctcccattacgaggagatcgaccgaaattcttgtgtctagtacttgaagcagtcttgatataccatagattgctaatcggacgctctgaattgattgttatgatcggcgtaacgtgaggacctcaaactattgggagaggtgtgggatgtgctagagatccaagacaggagctcatatcaattcagccaccgctctctgattcttatacatatgaaagtgtacttgatactttcgtaatatgtctggatgctacgtgtatggtgtacagtttctatcataccattgccctctcaatctcatcgcctcagctctgaggtcagcgatcggcattgcccagacagttcgcataatatgatctactcctacaagaccaggcgacatattcacaacgaagcagcgccatataaagacgaatcgataacatctgcgtgccgctacctgctgctatgcaccacaatttctgcacttagtcctgcgtatctttaccagattattcatgctacttccaagatatggcaagaaagatataagattcagttgtaaagaccaagcatgcaaatcggtgaagccaaaacatgtttagcaggagcacaggcacggcttcggggggatatagaggtttccaatatcctacacctccgttacgccctctgtatctgcagaggaatcggccggcaagtgaaacagtccaagttggggccagctctcggacatatcccaaactcgcagtgaaccgacagggtggacaagattgttatatgcgctgaatgccgaaagtgggaacagccaaaatccgacggcagtgcaactctgctcctcttgcgattcgtcgtcaatcgttaaataaatttcaggagtcactggcgataatgattcagatatctgtgactttgagatggacaggcgctttctcagcaaagatggcgcgtcgtggagagagtgagatgcctgcaagcatgggttttcgtctctacacatgaaaaggacattcgacttcacgttggagggatcgagaccgtactgggacgaaagccgttgtgtagctatggaaatctgctcggccatgttctcgtaacccaagaacagcctcgctagatcgtcttttattggtcgagggtcatgtgccagaagctcaaagctgggtatactagacgacaaaggggcgaatttttgtgaaatggtccttcgatgcgcgaaagggcgaggtgatcgcgctggggtgttgcgatgacgatcatcgttatatcgctccttcgcctgctgcgcatgatatgaactgatttgcgtcacgaagtgtagttcgttgatatttttgcaaagggtactttcatcttgcggtatcgcgctgccttcatctaggaagggccggaagagctccatattattctcgatagacaatgcgatgctacgtactccaatttgatacctatcatgcgccttgcatgctttgaacagctcaagtaagggctgaagatgatggctttcctgtatccagagacaatcgtagagagggttgaatggaagaaagccggagcgtgtatcaggattgtccccgccggaatttaccatgatgcatggtagcttgatgtaatagaactctagagccgcctttcttgcttccgagctcacgcgcaacagtttagacaacaactgaaacccattaacaaacagcgaggcggtgccgtaccgaactacgcttgatgcgtgctcgacgatgttct

SEQ ID NO: 3632 - DNA, 1719 bp, Muscodor strobelii
  misc_feature: SGI cDNA ID NO. 560875
  misc_feature: Encodes the peptide sequence at SEQ ID NO 3633
atgaaggatgatgcccggaacgaaaattctgagacgcctaatcaaaatttgaaaaagaagcctcgaacgtgggcaccgaagtctagactaggctgtaaaacatgcaagataagacgagttaaatgtgatcagttacggccatcatgcctgaaatgcacatctactggccgtacatgcgacggatatagtgagcggccttatgcattgaaaacagacagcgagtcaagcgacgatcgaaagggggcggatactggaacagagagggatgaccgtggtcagccgtcaaacatatttcgtacatgccaggcaggacaacgaagctctagactcttgggtcctgtcttgcggaacctccaatcgttcatgatcttacccttagatggatcggcgcaagaagctatgcgtttcttcgaacaagtttcgatccgtcatctcaatgaataccaaccttgcgtaccatggcggaggactctgatgttcttttctcaatcagtgcctacagttcggtacgccgcaatagcattagggttgatgtaccgaaagtacctgagctgtatttcaacgaaagacactcatcaactgccattcttcgacaatctcctgatagataacgcatctctgctttactataaccgagccatccaccttctgctgacacaagaagttggcaatgttgccgaaacaacagcaatcacacttttagtatgttatctgtttacttgctttgaacatttggcaggaaacaatgtacaagctttgaaacacttacggggaggtgtggagctgttgcgcaacatcaaagacagcgacaatgcaaatggccacacccgaccgtccgagctacgcacgatcataggtcaagttacgaaacaaatccgacgcctcgacatgcaagccgcaacatctctggtcgattgggttcccgctgatataccagacacactcatatcgcagcttccggcctacgacaatgcctttcactccatcgatgaagcggcagatcatctccagatcctcgtggctcgagtcatgagacttcgaaacgcagagcagcaaatgtgcccgactggtgacgtgccactcccgcctccgtcatataaggatatagttctgggacaattggagaggtggtggtgtctcttcagaaatatgctgcgacaaggcgctttatgtgagacagaatccatgtcttactcgccgatagtcctactacgtctgcaatataccatatcttggacgttgctcagtagctacggaataggcagggagatggagtacgacaactacctaccctactttcagcaatgtatcgcattagcagaggaggtagcttcggcacatgagcagtattcggaatcctcaaacgcaacttttactgcagaacttgggatattgcccgtgctttatatcatcggtgctaaatgtcgacatccaacggtccgacgcgaagctttgcgaatcttgcgacggcaaccaatgcgggaagggatctgggatagtatcaccgcgagtcgggtcgtcgaacgtattatagaggttgaggagggaggatccgaggagagtggaagggcacaaagcatggagcaaattgctatatggcaaaggatcgaggcgctgacttggctgaatgtctttgctggacaatcggcgcctcggctcgacatcggatacacattctgcactcgcgagggcatacataaggagtctctgatgctatga

SEQ ID NO: 3633 - protein, 572 aa, Muscodor strobelii
  misc_feature: SGI Peptide ID NO. 560875
  misc_feature (30)..(69): Pfam Id: PF00172 Pfam Desc: Fungal Zn(2)-Cys(6) binuclear cluster domain
  misc_feature (1)..(520): NCBI GI: 238500209 Blast Desc: sugar transporter, [Aspergillus flavus NRRL3357] gi|220693092|gb|EED49438.1| sugar transporter, [Aspergillus flavus NRRL3357]
  misc_feature (4)..(572): NCBI GI: 119499604 Blast Desc: NFIA_101460 [Neosartorya fischeri NRRL 181] gi|119414724|gb|EAW24662.1| conserved [Neosartorya fischeri NRRL 181]
  misc_feature (114)..(572): NCBI GI: 169779547 Blast Desc: [Aspergillus oryzae RIB40] gi|83772977|dbj|BAE63105.1| protein product [Aspergillus oryzae]
  misc_feature (1)..(572): NCBI GI: 242821201 Blast Desc: C6 transcription factor, [Talaromyces stipitatus ATCC 10500] gi|218712553|gb|EED11978.1| C6 transcription factor, [Talaromyces stipitatus ATCC 10500]
  misc_feature (36)..(572): NCBI GI: 115396462 Blast Desc: [Aspergillus terreus NIH2624] gi|114193439|gb|EAU35139.1| [Aspergillus terreus NIH2624]
  misc_feature (15)..(572): NCBI GI: 46115762 Blast Desc: FG03723.1 [Gibberella zeae PH-1]
  misc_feature (133)..(572): NCBI GI: 145611926 Blast Desc: MGG_00032 [Magnaporthe grisea 70-15] gi|145019138|gb|EDK03417.1| MGG_00032 [Magnaporthe grisea 70-15]
  misc_feature (5)..(516): NCBI GI: 242800024 Blast Desc: conserved [Talaromyces stipitatus ATCC 10500] gi|218716847|gb|EED16268.1| conserved [Talaromyces stipitatus ATCC 10500]
  misc_feature (16)..(520): NCBI GI: 169597647 Blast Desc: SNOG_01611 [Phaeosphaeria nodorum SN15] gi|111070140|gb|EAT91260.1| SNOG_01611 [Phaeosphaeria nodorum SN15]
  misc_feature (19)..(515): NCBI GI: 121711765 Blast Desc: C6 zinc finger domain protein [Aspergillus clavatus NRRL 1] gi|119401649|gb|EAW12072.1| C6 zinc finger domain protein [Aspergillus clavatus NRRL 1]
MKDDARNENSETPNQNLKKKPRTWAPKSRLGCKTCKIRRVKCDQLRPSCLKCTSTGRTCDGYSERPYALKTDSESSDDRKGADTGTERDDRGQPSNIFRTCQAGQRSSRLLGPVLRNLQSFMILPLDGSAQEAMRFFEQVSIRHLNEYQPCVPWRRTLMFFSQSVPTVRYAAIALGLMYRKYLSCISTKDTHQLPFFDNLLIDNASLLYYNRAIHLLLTQEVGNVAETTAITLLVCYLFTCFEHLAGNNVQALKHLRGGVELLRNIKDSDNANGHTRPSELRTIIGQVTKQIRRLDMQAATSLVDWVPADIPDTLISQLPAYDNAFHSIDEAADHLQILVARVMRLRNAEQQMCPTGDVPLPPPSYKDIVLGQLERWWCLFRNMLRQGALCETESMSYSPIVLLRLQYTISWTLLSSYGIGREMEYDNYLPYFQQCIALAEEVASAHEQYSESSNATFTAELGILPVLYIIGAKCRHPTVRREALRILRRQPMREGIWDSITASRVVERIIEVEEGGSEESGRAQSMEQIAIWQRIEALTWLNVFAGQSAPRLDIGYTFCTREGIHKESLML

SEQ ID NO: 3634 - DNA, 598 bp, Muscodor strobelii
  misc_feature: SGI EST ID NO. CUFF.9157.0
  misc_feature: Variant of the nucleotide sequence at SEQ ID NO 3632
tctagactaggctgtaaaacatgcaagataagacgagttaaatgtgatcagttacggccatcatgcctgaaatgcacatctactggccgtacatgcgacggatatagtgagcggccttatgcattgaaaacagacagcgagtcaagcgacgatcgaaagggggcggatactggaacagagagggatgaccgtggtcagccgtcaaacatatttcgtacatgccaggcaggacaacgaagctctagactcttgggtcctgtcttgcggaacctccaatcgttcatgatcttacccttagatggatcggcgcaagaagctatgcgtttcttcgaacaagtttcgatccgtcatctcaatgaataccaaccttgcgtaccatggcggaggactctgatgttcttttctcaatcagtgcctacagttcggtacgccgcaatagcattagggttgatgtaccgaaagtacctgagctgtatttcaacgaaagacactcatcaactgccattcttcgacaatctcctgatagataacgcatctctgctttactataaccgagccatccaccttctgctgacacaagaagttggcaatgttgccg

SEQ ID NO: 3635 - DNA, 450 bp, Muscodor strobelii
  misc_feature: SGI cDNA ID NO. 560876
  misc_feature: Encodes the peptide sequence at SEQ ID NO 3636
atggagtacgacaactacctaccctactttcagcaatgtatcgcattagcagaggaggtagcttcggcacatgagcagtattcggaatcctcaaacgcaacttttactgcagaacttgggatattgcccgtgctttatatcatcggtgctaaatgtcgacatccaacggtccgacgcgaagctttgcgaatcttgcgacggcaaccaatgcgggaagggatctgggatagtatcaccgcgagtcgggtcgtcgaacgtattatagaggttgaggagggaggatccgaggagagtggaagggcacaaagcatggagcaaattgctatatggcaaaggatcgaggcgctgacttggctgaatgtctttgctggacaatcggcgcctcggctcgacatcggatacacattctgcactcgcgagggcatacataaggagtctctgatgctatga

SEQ ID NO: 3636 - protein, 149 aa, Muscodor strobelii
  misc_feature: SGI Peptide ID NO. 560876
  misc_feature (1)..(149): NCBI GI: 119499604 Blast Desc: NFIA_101460 [Neosartorya fischeri NRRL 181] gi|119414724|gb|EAW24662.1| conserved [Neosartorya fischeri NRRL 181]
  misc_feature (1)..(147): NCBI GI: 115396462 Blast Desc: [Aspergillus terreus NIH2624] gi|114193439|gb|EAU35139.1| [Aspergillus terreus NIH2624]
  misc_feature (1)..(149): NCBI GI: 242821201 Blast Desc: C6 transcription factor, [Talaromyces stipitatus ATCC 10500] gi|218712553|gb|EED11978.1| C6 transcription factor, [Talaromyces stipitatus ATCC 10500]
  misc_feature (3)..(149): NCBI GI: 145611926 Blast Desc: MGG_00032 [Magnaporthe grisea 70-15] gi|145019138|gb|EDK03417.1| MGG_00032 [Magnaporthe grisea 70-15]
  misc_feature (1)..(97): NCBI GI: 238500209 Blast Desc: sugar transporter, [Aspergillus flavus NRRL3357] gi|220693092|gb|EED49438.1| sugar transporter, [Aspergillus flavus NRRL3357]
  misc_feature (1)..(149): NCBI GI: 46115762 Blast Desc: FG03723.1 [Gibberella zeae PH-1]
  misc_feature (1)..(99): NCBI GI: 154292733 Blast Desc: BC1G_14751 [Botryotinia fuckeliana B05.10] gi|150845833|gb|EDN21026.1| BC1G_14751 [Botryotinia fuckeliana B05.10]
  misc_feature (1)..(111): NCBI GI: 169613811 Blast Desc: SNOG_10039 [Phaeosphaeria nodorum SN15] gi|160707224|gb|EAT82374.2| SNOG_10039 [Phaeosphaeria nodorum SN15]
  misc_feature (1)..(92): NCBI GI: 116206476 Blast Desc: CHGG_02531 [Chaetomium globosum CBS 148.51] gi|88183128|gb|EAQ90596.1| CHGG_02531 [Chaetomium globosum CBS 148.51]
  misc_feature (1)..(106): NCBI GI: 156053479 Blast Desc: SS1G_06907 [Sclerotinia sclerotiorum 1980] gi|154704685|gb|EDO04424.1| SS1G_06907 [Sclerotinia sclerotiorum 1980]
MEYDNYLPYFQQCIALAEEVASAHEQYSESSNATFTAELGILPVLYIIGAKCRHPTVRREALRILRRQPMREGIWDSITASRVVERIIEVEEGGSEESGRAQSMEQIAIWQRIEALTWLNVFAGQSAPRLDIGYTFCTREGIHKESLML

SEQ ID NO: 3637 - DNA, 1083 bp, Muscodor strobelii
  misc_feature: SGI EST ID NO. CUFF.9153.0
  misc_feature: Variant of the nucleotide sequence at SEQ ID NO 3635
aaacaatgtacaagctttgaaacacttacggggaggtgtggagctgttgcgcaacatcaaagacagcgacaatgcaaatggccacacccgaccgtccgagctacgcacgatcataggtcaagttacgaaacaaatccgacgcctcgacatgcaagccgcaacatctctggtcgattgggttcccgctgatataccagacacactcatatcgcagcttccggcctacgacaatgcctttcactccatcgatgaagcggcagatcatctccagatcctcgtggctcgagtcatgagacttcgaaacgcagagcagcaaatgtgcccgactggtgacgtgccactcccgcctccgtcatataaggatatagttctgggacaattggagaggtggtggtgtctcttcagaaatatgctgcgacaaggcgctttatgtgagacagaatccatgtcttactcgccgatagtcctactacgtctgcaatataccatatcttggacgttgctcagtagctacggaataggcagggagatggagtacgacaactacctaccctactttcagcaatgtatcgcattagcagaggaggtagcttcggcacatgagcagtattcggaatcctcaaacgcaacttttactgcagaacttgggatattgcccgtgctttatatcatcggtgctaaatgtcgacatccaacggtccgacgcgaagctttgcgaatcttgcgacggcaaccaatgcgggaagggatctgggatagtatcaccgcgagtcgggtcgtcgaacgtattatagaggttgaggagggaggatccgaggagagtggaagggcacaaagcatggagcaaattgctatatggcaaaggatcgaggcgctgacttggctgaatgtctttgctggacaatcggcgcctcggctcgacatcggatacacattctgcactcgcgagggcatacataaggagtctctgatgctatgatgaatagggagctacagttctagttgataggtcaatcgtcgaagtgagttggcatcctcgcacgcttgtgagaggtggatcaatcataagagagttcatgtcgc

SEQ ID NO: 3638 - DNA, 1605 bp, Muscodor strobelii
  misc_feature: SGI cDNA ID NO. 560877
  misc_feature: Encodes the peptide sequence at SEQ ID NO 3639
atgaaagctttcgtcgtttcgctcgctgtcctggcgagttttggatgcaatgtcatcgagccatctgccaatctcacatggacgccatgctatggtgatctcacttgcacgaagttgcaagttcccttagactattcgaataagagccttggtaccacgtcgattgcgttcgtaaaactgacaggcaagaatgcgactgccgaatctcaaagcatcgtgatcataccaggtggtccgggtggttctggcatagaccttcttctatcgaatcgcgacatcataggtccagccttgggagaacagtacaacttcgtatcttttgaccctcgcggcgtgaacaatagcggactcgttatagactgtttctctggaaatgcggaggccagacaaacctttattgagcttcaccatacaagtactacaaatatctcgtcaacatcactcgagacacagttctattcgagctccattttcggagagtggtgtaacaacgttgtggataccgagcaacagcatggatattatgtatctacgccagctgtagttcgcgatctactcacatttatcgaaacagaagctgaggaaagaggccagtcaacgacagactccaaactttgggcatatggcattagctatggcaccgtcgtcgggaccaccttcgcttccatgtttcccgaccgggttggtcgaatggtactcgatgggatagtggatacagaacattattacaccaatacttggacggatgttgagcaaatggacgagtccatagagcagttttcgagcctctgtcacacagcaggccccaaatcgtgttctttctggggacccactccagccaacataacagcgagattggacgccattatccaagaactcgagcatcatccacttcccataagcggggcccaggataaagagttaccggcactcgtcacatattcagacctcaaggctgttctcctcaatgctatgtacttcccactggtgattttcccagagatggccgatgcccttcaccagtacgaagctggtaacccatctttacttgcaaacagtttcggagcgctcaacgcatctacagctttctccggcaacgtcattcgctgcgtcgattcgtatcgaagaaacaatcttactaccattgaggatttcaaggaatacgtcgagtacacaacttcaaaaagcaaatatatcggcgatatatggcccatctacatagataatgttttgtgcagatcattcgagccgaatttacctgagagtatggtgatacgagatccaacactcaaactggacaagccaacttcctttccaatcgtgtttgcaagcaacaccgttgacggtgtgactccactgaaatcggctcgtacaatgtcgtctcgcttccctggatcggtgctcttagtgcaagaggccgttggtgaagggaacacccattgcagtaaaggtgatgaggagatcgtactgggacgagtctatctcacgtacgcccccacgacctccaacaagatgggaaggcgggatgtgttcagaacatatcacgtccggttctcgccggctctcgcatggttgaccaaagtagacattaacatgtacgagtag

SEQ ID NO: 3639 - protein, 534 aa, Muscodor strobelii
  misc_feature: SGI Peptide ID NO. 560877
  misc_feature (1)..(475): NCBI GI: 119499606 Blast Desc: NFIA_101470 [Neosartorya fischeri NRRL 181] gi|119414725|gb|EAW24663.1| conserved [Neosartorya fischeri NRRL 181]
  misc_feature (23)..(508): NCBI GI: 238500211 Blast Desc: conserved [Aspergillus flavus NRRL3357] gi|220693093|gb|EED49439.1| conserved [Aspergillus flavus NRRL3357]
  misc_feature (1)..(475): NCBI GI: 242821196 Blast Desc: conserved [Talaromyces stipitatus ATCC 10500] gi|218712552|gb|EED11977.1| conserved [Talaromyces stipitatus ATCC 10500]
  misc_feature (37)..(426): NCBI GI: 169779549 Blast Desc: [Aspergillus oryzae RIB40] gi|83772978|dbj|BAE63106.1| protein product [Aspergillus oryzae]
  misc_feature (75)..(455): NCBI GI: 115396460 Blast Desc: conserved [Aspergillus terreus NIH2624] gi|114193438|gb|EAU35138.1| conserved [Aspergillus terreus NIH2624]
  misc_feature (14)..(435): NCBI GI: 67902646 Blast Desc: AN8310.2 [Aspergillus nidulans FGSC A4] gi|40747777|gb|EAA66933.1| AN8310.2 [Aspergillus nidulans FGSC A4] gi|259484234|tpe|CBF80281.1| TPA: conserved [Aspergillus FGSC
  misc_feature (17)..(397): NCBI GI: 145611924 Blast Desc: MGG_00033 [Magnaporthe grisea 70-15] gi|145019137|gb|EDK03416.1| MGG_00033 [Magnaporthe grisea 70-15]
  misc_feature (1)..(484): NCBI GI: 46115764 Blast Desc: FG03724.1 [Gibberella zeae PH-1]
  misc_feature (17)..(481): NCBI GI: 115399452 Blast Desc: [Aspergillus terreus NIH2624] gi|114192198|gb|EAU33898.1| [Aspergillus terreus NIH2624]
  misc_feature (19)..(476): NCBI GI: 189195916 Blast Desc: conserved [Pyrenophora tritici-repentis Pt-1C-BFP] gi|187980175|gb|EDU46801.1| conserved [Pyrenophora tritici-repentis Pt-1C-BFP]
MKAFVVSLAVLASFGCNVIEPSANLTWTPCYGDLTCTKLQVPLDYSNKSLGTTSIAFVKLTGKNATAESQSIVIIPGGPGGSGIDLLLSNRDIIGPALGEQYNFVSFDPRGVNNSGLVIDCFSGNAEARQTFIELHHTSTTNISSTSLETQFYSSSIFGEWCNNVVDTEQQHGYYVSTPAVVRDLLTFIETEAEERGQSTTDSKLWAYGISYGTVVGTTFASMFPDRVGRMVLDGIVDTEHYYTNTWTDVEQMDESIEQFSSLCHTAGPKSCSFWGPTPANITARLDAIIQELEHHPLPISGAQDKELPALVTYSDLKAVLLNAMYFPLVIFPEMADALHQYEAGNPSLLANSFGALNASTAFSGNVIRCVDSYRRNNLTTIEDFKEYVEYTTSKSKYIGDIWPIYIDNVLCRSFEPNLPESMVIRDPTLKLDKPTSFPIVFASNTVDGVTPLKSARTMSSRFPGSVLLVQEAVGEGNTHCSKGDEEIVLGRVYLTYAPTTSNKMGRRDVFRTYHVRFSPALAWLTKVDINMYE

SEQ ID NO: 3640 - DNA, 621 bp, Muscodor strobelii
  misc_feature: SGI EST ID NO. CUFF.9165.0
  misc_feature: Variant of the nucleotide sequence at SEQ ID NO 3638
tgttgagcaaatggacgagtccatagagcagttttcgagcctctgtcacacagcaggccccaaatcgtgttctttctggggacccactccagccaacataacagcgagattggacgccattatccaagaactcgagcatcatccacttcccataagcggggcccaggataaagagttaccggcactcgtcacatattcagacctcaaggctgttctcctcaatgctatgtacttcccactggtgattttcccagagatggccgatgcccttcaccagtacgaagctggtaacccatctttacttgcaaacagtttcggagcgctcaacgcatctacagctttctccggcaacgtcattcgctgcgtcgattcgtatcgaagaaacaatcttactaccattgaggatttcaaggaatacgtcgagtacacaacttcaaaaagcaaatatatcggcgatatatggcccatctacatagataatgttttgtgcagatcattcgagccgaatttacctgagagtatggtgatacgagatccaacactcaaactggacaagccaacttcctttccaatcgtgtttgcaagcaacaccgttgacggtgtgactccactgaaatcgta

SEQ ID NO: 3641 - DNA, 1425 bp, Muscodor strobelii
  misc_feature: SGI cDNA ID NO. 560878
  misc_feature: Encodes the peptide sequence at SEQ ID NO 3642
atgagtgcgacgatccattccaacgtcttagcgattgtcgatgcgttttggcattttgtacagaatgagaaaatcagtgatctcagcaatgtacagcaagccaagcttctgactgcaccacatactcaaatgagtcttcccgtcgtccaggttcaatgcagcgctacagattatgccgatgctaaggttatcctcgaagatgatcagcaggatctcatcttccagaccgacgcgattagcgactacgttattgagactaatcagttacggaacccgtatcaaacaaatcaatggattgtaccaccaacttctatccctgcgaaatttcctggctcgaacatcactgtaagctggattgattcacggaatatctcgaatagtcagcaaaatactctccgtccgtccctaggtctagttgtgacagtacccacggtgaacttgaaccgactggatggtgacgagtgggcggcccaaggaagctacgtcgttccatgcgtggtcgatgctcgctggatacgaactgatctattttttgatagtgtatcgagcgatgtggtcgaaacagccctgacgaaagacctaaaactagctaactctccattgtctggaggaaaagacttcgtggatatcataaaaaaattagcagatgaaaagtctgtgagtctgccgatatacttaacagcgagttgggcgagagctttgaactctctagcgccagaccgatttacctatgacgatccggaggcaattggtgctcgattcttggggaatgtcctccgccaaggggtctcgtttgatcctgatactggttttcaacagttctatcctatcatatataatttcactgacatcgatattgcaaacgagattgccatcactatcagtacagtgatcgcagactggctatctcgttcgacactctttgacgccgaatttactaccgtcacatcaacgtacaagaacgacacgatatctataatagatttaaaagaaatcgaacccaacgaaagacatgttttttcttcgacactgattaaccagactcgggtccagtttcatgtggaacgctatggttggggttatggcctggaatcgggagccgtgaagtttgcagtcgttgttttgctagcacacgtatttctcgttgtcgtctactctatatatctcttgattacatggtctcgcaagactagctggacgagttcagcatggggtggggttggcgaattgcttgctctcgctattctttcacctccggctgaggagttgaagaattgcggtgcaggtatagataggccaaagacatggactacaagtctacgcataagaaaacgtgcaccagactctgaagagatacagcttgttctgggcgatggggaagatcttgaagacagaaggttggaaaggggcaaggcttataggtaa

SEQ ID NO: 3642 - protein, 474 aa, Muscodor strobelii
  misc_feature: SGI Peptide ID NO. 560878
  misc_feature (165)..(474): NCBI GI: 46113732 Blast Desc: FG02940.1 [Gibberella zeae PH-1]
  misc_feature (349)..(469): NCBI GI: 169624463 Blast Desc: SNOG_15491 [Phaeosphaeria nodorum SN15] gi|111056036|gb|EAT77156.1| SNOG_15491 [Phaeosphaeria nodorum SN15]
  misc_feature (358)..(463): NCBI GI: 46134193 Blast Desc: FG09236.1 [Gibberella zeae PH-1]
  misc_feature (348)..(473): NCBI GI: 189201687 Blast Desc: conserved [Pyrenophora tritici-repentis Pt-1C-BFP] gi|187984279|gb|EDU49767.1| conserved [Pyrenophora tritici-repentis Pt-1C-BFP]
  misc_feature (360)..(471): NCBI GI: 67538486 Blast Desc: AN5413.2 [Aspergillus nidulans FGSC A4] gi|40743383|gb|EAA62573.1| [Aspergillus nidulans FGSC A4] gi|259485142|tpe|CBF81952.1| TPA: conserved [Aspergillus nidulans
  misc_feature (346)..(473): NCBI GI: 169625479 Blast Desc: SNOG_16012 [Phaeosphaeria nodorum SN15] gi|111055471|gb|EAT76591.1| SNOG_16012 [Phaeosphaeria nodorum SN15]
  misc_feature (352)..(473): NCBI GI: 212533423 Blast Desc: PMAA_073960 [Penicillium marneffei ATCC 18224] gi|210072232|gb|EEA26321.1| PMAA_073960 [Penicillium marneffei ATCC 18224]
  misc_feature (294)..(445): NCBI GI: 255956735 Blast Desc: Pc21g21450 [Penicillium chrysogenum Wisconsin 54-1255] gi|77377683|gb|ABA70578.1| [Penicillium chrysogenum] gi|211590831|emb|CAP97042.1| Pc21g21450 [Penicillium chrysogenum
MSATIHSNVLAIVDAFWHFVQNEKISDLSNVQQAKLLTAPHTQMSLPVVQVQCSATDYADAKVILEDDQQDLIFQTDAISDYVIETNQLRNPYQTNQWIVPPTSIPAKFPGSNITVSWIDSRNISNSQQNTLRPSLGLVVTVPTVNLNRLDGDEWAAQGSYVVPCVVDARWIRTDLFFDSVSSDVVETALTKDLKLANSPLSGGKDFVDIIKKLADEKSVSLPIYLTASWARALNSLAPDRFTYDDPEAIGARFLGNVLRQGVSFDPDTGFQQFYPIIYNFTDIDIANEIAITISTVIADWLSRSTLFDAEFTTVTSTYKNDTISIIDLKEIEPNERHVFSSTLINQTRVQFHVERYGWGYGLESGAVKFAVVVLLAHVFLVVVYSIYLLITWSRKTSWTSSAWGGVGELLALAILSPPAEELKNCGAGIDRPKTWTTSLRIRKRAPDSEEIQLVLGDGEDLEDRRLERGKAYR

SEQ ID NO: 3643 - DNA, 326 bp, Muscodor strobelii
  misc_feature: SGI EST ID NO. CUFF.9177.0
  misc_feature: Variant of the nucleotide sequence at SEQ ID NO 3641
cagcaatgagtgcgacgatccattccaacgtcttagcgattgtcgatgcgttttggcattttgtacagaatgagaaaatcagtgatctcagcaatgtacagcaagccaagcttctgactgcaccacatactcaaatgagtcttcccgtcgtccaggttcaatgcagcgctacagattatgccgatgctaaggttatcctcgaagatgatcagcaggatctcatcttccagaccgacgcgattagcgactacgttattgagactaatcagttacggaacccgtatcaaacaaatcaatggattgtaccaccaacttctatccctgcg

SEQ ID NO: 3644 - DNA, 2247 bp, Muscodor strobelii
  misc_feature: SGI cDNA ID NO. 560879
  misc_feature: Encodes the peptide sequence at SEQ ID NO 3645
atggcaagaggtgaacctggaacagaatcgagcagaatcggcggcacagaggatgtccaaaattttctccgaagttgggctgaagtcaggcagccgcgacatgagaatcttctatctccggcgatttctgggcccaataagtcatctcaggaagatgaaatatccagcctgcacgattccgtcgaaagtcgggttcttgactacggatttagagcttcagtccgtaacttgaaacctcgacgactgtcacacgatgctgctgatttccttgggttttcggattctactgcgttgtcagtcgtaccgccgaccaacgatgttgatttgggtctcgaccagtctctaggagagaatgataaattgcttgacgtcttgaaaagcgcaatgatcgccgcaaaacctgatgacagcaagacctttttgccattaggacagctggagaaaatatgccatgagagggtcgtccgtcgcgagctcatggagacatttgacaatgcgctacctaccgagatagatgcctacatggagtatatatgtggaaatccgaacgatcctcgaagtgccgagaataggagccgaaaaatattcgccatcttggtactcatagggcaagtacacatgattggaagtctcatgcgcgagggcatcaaagacaagcatctcccattcaaaaaatcggaaaagagagactctattagttcatttatgttggtaaaaagaaccaccaccaataactgggaacctacacctttacgttgcttcaatggatggagtttgaatcaaaaacgagacttctatatgaatcaatggcgtctcttgagcccatattttgcgaaagcagaagacaaatcagttggtctatatgagcttgacgagcaagctatcatgccatggacatcaatcggtgttgagaagctgggctccttcgttcctgctgagaactggggcggctatgcgcgggtcacccaagttaccattcattcagatcaccatgcctttgaagccgaaaaatttgcgatcaagaagctgattgacaacaatgctagcaagtttcgaaatgagttccgaaatttaaaaagagttgagacaaagcaacacttgttgccagtctatgttgcataccgacagggaacgaactactctttcctatttccatgggcagatggtggtagcatgatggatctctggaagacacatccccgggagttgaaacagagattacacgacagcccaagtcaaagcgatacaatacatccttctaagcgtgtcattgcctgggttgctggtcaattagccggtttgaccggcaaatatggcctcggttttctgcatgggaccgaatttcttgaatcacctcagccccagcgaaacttaactgttcctggcgatgaaaggcgctacggtatacatggagatattaaaccaggtaatattctctactttgaacaagaccgtgaagaaaatgagtatggcctaggtttatttaagatttctgattttgggttgactggtttccattccgccttgacgagatcgagacagcctccaactgggccgcattccccaacataccgagcgccagagtatggggcagtcgaggcgtacttatcaaggaaatatgacatttggggcatggggtgtgttatgctacaacttctaacatggcttatcagcgggccagaagtgctcgcagacttcgaccgagatcgtcttgatgagatagacgaggccaagccaggcttcaaagaagacaaatttttcaagatagcaaggccaggaagatctcggggcagatatctacgcattgctatacaaagagtgctcaccatgtttgtccaagcacctcttgcacccaagcacaacaattctggggacaatgaagcaaacgcgttcaaggaagatacctttttcaagattgctaaaccaggaggcccgagcggcaagcgaaagcccaaaaaggccgtgcaatcacgcattgaggatctacaaaagattgtgggcccagggaactatctccatgattgtctcgacttgatcaagtcacgaatgttgcaaataaatgttaaagaacgagcagactgtaaagaagtacacaatactcttcagcaatactacgacaggtgctgccacgacgatcaatacgtcgccatcaatctacctacattccaagatacaagagtaccggagtcgagtcggacagaccccgttcctgagattcgcatttttcataatgacggtcagacatag

SEQ ID NO: 3645 - protein, 748 aa, Muscodor strobelii
  misc_feature: SGI Peptide ID NO. 560879
  misc_feature (469)..(554): Pfam Id: PF00069 Pfam Desc: Protein kinase domain
  misc_feature (63)..(587): NCBI GI: 46133835 Blast Desc: FG09057.1 [Gibberella zeae PH-1]
  misc_feature (137)..(595): NCBI GI: 256722881 Blast Desc: NECHADRAFT_87138 [Nectria haematococca mpVI 77-13-4]
  misc_feature (136)..(592): NCBI GI: 116202875 Blast Desc: CHGG_09322 [Chaetomium globosum CBS 148.51] gi|88177840|gb|EAQ85308.1| CHGG_09322 [Chaetomium globosum CBS 148.51]
  misc_feature (133)..(746): NCBI GI: 46126729 Blast Desc: FG07742.1 [Gibberella zeae PH-1]
  misc_feature (125)..(589): NCBI GI: 169607333 Blast Desc: SNOG_06723 [Phaeosphaeria nodorum SN15] gi|111064254|gb|EAT85374.1| SNOG_06723 [Phaeosphaeria nodorum SN15]
  misc_feature (189)..(714): NCBI GI: 261359076 Blast Desc: protein kinase domain-containing protein [Verticillium albo-atrum VaMs.102]
  misc_feature (140)..(589): NCBI GI: 171685536 Blast Desc: protein product [Podospora anserina] gi|170942729|emb|CAP68382.1| protein product [Podospora anserina]
  misc_feature (90)..(587): NCBI GI: 259480575 Blast Desc: TPA: protein kinase domain-containing protein (AFU_orthologue; AFUA_2G14650) [Aspergillus nidulans FGSC A4]
  misc_feature (90)..(587): NCBI GI: 67541591 Blast Desc: AN6959.2 [Aspergillus nidulans FGSC A4] gi|40738411|gb|EAA57601.1| AN6959.2 [Aspergillus nidulans FGSC A4]
  misc_feature (116)..(587): NCBI GI: 67522665 Blast Desc: AN1789.2 [Aspergillus nidulans FGSC A4] gi|40744809|gb|EAA63965.1| AN1789.2 [Aspergillus nidulans FGSC A4] gi|259487135|tpe|CBF85566.1| TPA: conserved [Aspergillus FGSC
MARGEPGTESSRIGGTEDVQNFLRSWAEVRQPRHENLLSPAISGPNKSSQEDEISSLHDSVESRVLDYGFRASVRNLKPRRLSHDAADFLGFSDSTALSVVPPTNDVDLGLDQSLGENDKLLDVLKSAMIAAKPDDSKTFLPLGQLEKICHERVVRRELMETFDNALPTEIDAYMEYICGNPNDPRSAENRSRKIFAILVLIGQVHMIGSLMREGIKDKHLPFKKSEKRDSISSFMLVKRTTTNNWEPTPLRCFNGWSLNQKRDFYMNQWRLLSPYFAKAEDKSVGLYELDEQAIMPWTSIGVEKLGSFVPAENWGGYARVTQVTIHSDHHAFEAEKFAIKKLIDNNASKFRNEFRNLKRVETKQHLLPVYVAYRQGTNYSFLFPWADGGSMMDLWKTHPRELKQRLHDSPSQSDTIHPSKRVIAWVAGQLAGLTGKYGLGFLHGTEFLESPQPQRNLTVPGDERRYGIHGDIKPGNILYFEQDREENEYGLGLFKISDFGLTGFHSALTRSRQPPTGPHSPTYRAPEYGAVEAYLSRKYDIWGMGCVMLQLLTWLISGPEVLADFDRDRLDEIDEAKPGFKEDKFFKIARPGRSRGRYLRIAIQRVLTMFVQAPLAPKHNNSGDNEANAFKEDTFFKIAKPGGPSGKRKPKKAVQSRIEDLQKIVGPGNYLHDCLDLIKSRMLQINVKERADCKEVHNTLQQYYDRCCHDDQYVAINLPTFQDTRVPESSRTDPVPEIRIFHNDGQT

SEQ ID NO: 3646 - DNA, 4192 bp, Muscodor strobelii
  misc_feature: SGI EST ID NO. CUFF.9321.0
  misc_feature: Variant of the nucleotide sequence at SEQ ID NO 3644
cagacacgaaccaatcagatcgccatcgcaaagcgtatcctagcatccagcagctttcatgcggcttaagcagcagcttgtccaatcaaaggcgccacctctcatgcaggtaaacaactcctaacgctacttgaatacatggtactttcaatgttgcctttatcatgttccatccgaaaatgcattggggtaagaatttgcagtacataggttcagcgctcactggtcctgatatgcattgccaacacattcgcagcgatggcagagtttgacatacaagatcacggactcccacagcagcaattagtgcctgacccctggagtcttgatttgttgaagaactcgtcacgtgggctagccttgtcaagagttcttgctagtggcccgatttgtccacgacgatggcaagaggtgaacctggaacagaatcgagcagaatcggcggcacagaggatgtccaaaattttctccgaagttgggctgaagtcaggcagccgcgacatgagaatcttctatctccggcgatttctgggcccaataagtcatctcaggaagatgaaatatccagcctgcacgattccgtcgaaagtcgggttcttgactacggatttagagcttcagtccgtaacttgaaacctcgacgactgtcacacgatgctgctgatttccttgggttttcggattctactgcgttgtcagtcgtaccgccgaccaacgatgttgatttgggtctcgaccagtctctaggagagaatgataaattgcttgacgtcttgaaaagcgcaatgatcgccgcaaaacctgatgacagcaagacctttttgccattaggacagctggagaaaatatgccatgagagggtcgtccgtcgcgagctcatggagacatttgacaatgcgctacctaccgagatagatgcctacatggagtatatatgtggaaatccgaacgatcctcgaagtgccgagaataggagccgaaaaatattcgccatcttggtactcatagggcaagtacacatgattggaagtctcatgcgcgagggcatcaaagacaagcatctcccattcaaaaaatcggaaaagagagactctattagttcatttatgttggtaaaaagaaccaccaccaataactgggaacctacacctttacgttgcttcaatggatggagtttgaatcaaaaacgagacttctatatgaatcaatggcgtctcttgagcccatattttgcgaaagcagaagacaaatcagttggtctatatgagcttgacgagcaagctatcatgccatggacatcaatcggtgttgagaagctgggctccttcgttcctgctgagaactggggcggctatgcgcgggtcacccaagttaccattcattcagatcaccatgcctttgaagccgaaaaatttgcgatcaagaagctgattgacaacaatgctagcaagtttcgaaatgagttccgaaatttaaaaagagttgagacaaagcaacacttgttgccagtctatgttgcataccgacagggaacgaactactctttcctatttccatgggcagatggtggtagcatgatggatctctggaagacacatccccgggagttgaaacagagattacacgacagcccaagtcaaagcgatacaatacatccttctaagcgtgtcattgcctgggttgctggtcaattagccggtttgaccggcaaatatggcctcggttttctgcatgggaccgaatttcttgaatcacctcagccccagcgaaacttaactgttcctggcgatgaaaggcgctacggtatacatggagatattaaaccaggtaatattctctactttgaacaagaccgtgaagaaaatgagtatggcctaggtttatttaagatttctgattttgggttgactggtttccattccgccttgacgagatcgagacagcctccaactgggccgcattccccaacataccgagcgccagagtatggggcagtcgaggcgtacttatcaaggaaatatgacatttggggcatggggtgtgttatgctacaacttctaacatggcttatcagcgggccagaagtgctcgcagacttcgaccgagatcgtcttgatgagatagacgaggccaagccaggcttcaaagaagacaaatttttcaagatagcaaggccaggaagatctcggggcagatatctacgcattgctatacaaagagtgctcaccatgtttgtccaagcacctcttgcacccaagcacaacaattctggggacaatgaagcaaacgcgttcaaggaagatacctttttcaagattgctaaaccaggaggcccgagcggcaagcgaaagcccaaaaaggccgtgcaatcacgcattgaggatctacaaaagattgtgggcccagggaactatctccatgattgtctcgacttgatcaagtcacgaatgttgcaaataaatgttaaagaacgagcagactgtaaagaagtacacaatactcttcagcaatactacgacaggtgctgccacgacgatcaatacgtcgccatcaatctacctacattccaagatacaagagtaccggagtcgagtcggacagaccccgttcctgagattcgcatttttcataatgacggtcagacatagttgcgtggtaacgatttataccaatcgactgaccaatcgcaacttgacgaaaatactgcactcctactcttccgttccacctccatatccatgttattccctgattggacccagccatgcctatctctcacaatcctataacatgtctcgtgatcacttagtcatagtgtcttcggatgctcgctgtcaggtcatcaacttgagtctatcaaattgtcagttattcgcggactatcaccttttttgcggcttatagagatccgaaccgtgctgagtagctgaggcactttcactgtccactgctcgcagtagaactgagaatcagttagccgaaaccgggtcaccattggccgataatacggataacatacagactcgatgataaagtcgctgctatctagaatcttcttcagatatgcctctagaaggcgcttgttaccataacggatgggcaacacttgtgtctggtacggcatagtgagcaagagaagagctgcaaaacaattatatcttgggtataactgaagcttcaatatactttgctacggcatcctaatatatgatatcgtcatttaagtacataaatattccaattaggctgagttgaggctctgctcagaacccgggccggcggcgttcagttgcagcccaacaagatataggcaacttagccacgccaaagagatgactgcaggcgctggcagtgcttgctcgcatccatttttctccaatcgagaacaaatacgactagtcgcagacgatagagctaagcggattactctgatcgtatgacacgtctcgagctgcagggcatcgcaagccgtcagcactccgcctgcaaaggccaagatgctcccgcctcatcattgcagttattggcactgggtcatgcaggctgcgatgaccgtgcagatcaatcgcacatcgaatcacacatgtaaggtagattctcaggctgataccaaaagcaggctccgaggaattgagcccgtaataagaatgcgggattatgggcgaacgccagaccgaagctaagcaagagttcgcgaactatccaggatgcctatcttcatgcaaagaaagatgcgctgcgttggagaatggtataggaaagcagcatatgcatgtgctttggaggcagtgtataacggcaattggcatggagatgatcgactaccccgcgtcagccagctcatgttcaccagatggagaagctcacatataccgcggtctgctcacgttggagctaagttcgccgaaggataatgtattcattgaatagtatgatacatgaatgaacaatttgactcaaatatggattggctacgatcagacagttcatcgtgggataagaacctaaatattctggactttgttcctatgacaagtactgttctagtcgtctcaaaacaagaagatgtgaatctgcatacaatcttacccctaactgcttgaaaatactgatataaaaaggccaagatgattgtggaagatcacaagctgagatccgatgaagaatggaacacatggcgtgcaacttggcg

SEQ ID NO: 3647 - DNA, 201 bp, Muscodor strobelii
  misc_feature: SGI cDNA ID NO. 560880
  misc_feature: Encodes the peptide sequence at SEQ ID NO 3648
atgccgtaccagacacaagtgttgcccatccgttatggtaacaagcgccttctagaggcatatctgaagaagattctagatagcagcgactttatcatcgagtctttctactgcgagcagtggacagtgaaagtgcctcagctactcagcacgactcaagttgatgacctgacagcgagcatccgaagacactatgactaa

SEQ ID NO: 3648 - protein, 66 aa, Muscodor strobelii
  misc_feature: SGI Peptide ID NO. 560880
MPYQTQVLPIRYGNKRLLEAYLKKILDSSDFIIESFYCEQWTVKVPQLLSTTQVDDLTASIRRHYD

SEQ ID NO: 3649 - DNA, 4127 bp, Muscodor strobelii
  misc_feature: SGI EST ID NO. CUFF.9322.1
  misc_feature: Variant of the nucleotide sequence at SEQ ID NO 3647
gcagattcacatcttcttgttttgagacgactagaacagtacttgtcataggaacaaagtccagaatatttaggttcttatcccacgatgaactgtctgatcgtagccaatccatatttgagtcaaattgttcattcatgtatcatactattcaatgaatacattatccttcggcgaacttagctccaacgtgagcagaccgcggtatatgtgagcttctccatctggtgaacatgagctggctgacgcggggtagtcgatcatctccatgccaattgccgttatacactgcctccaaagcacatgcatatgctgctttcctataccattctccaacgcagcgcatctttctttgcatgaagataggcatcctggatagttcgcgaactcttgcttagcttcggtctggcgttcgcccataatcccgcattcttattacgggctcaattcctcggagcctgcttttggtatcagcctgagaatctaccttacatgtgtgattcgatgtgcgattgatctgcacggtcatcgcagcctgcatgacccagtgccaataactgcaatgatgaggcgggagcatcttggcctttgcaggcggagtgctgacggcttgcgatgccctgcagctcgagacgtgtcatacgatcagagtaatccgcttagctctatcgtctgcgactagtcgtatttgttctcgattggagaaaaatggatgcgagcaagcactgccagcgcctgcagtcatctctttggcgtggctaagttgcctatatcttgttgggctgcaactgaacgccgccggcccgggttctgagcagagcctcaactcagcctaattggaatatttatgtacttaaatgacgatatcatatattaggatgccgtagcaaagtatattgaagcttcagttatacccaagatataattgttttgcagctcttctcttgctcactatgccgtaccagacacaagtgttgcccatccgttatggtaacaagcgccttctagaggcatatctgaagaagattctagatagcagcgactttatcatcgagtctttctactgcgagcagtggacagtgaaagtgcctcagctactcagcacgactcaagttgatgacctgacagcgagcatccgaagacactatgactaagtgatcacgagacatgttataggattgtgagagataggcatggctgggtccaatcagggaataacatggatatggaggtggaacggaagagtaggagtgcagtattttcgtcaagttgcgattggtcagtcgattggtataaatcgttaccacgcaactatgtctgaccgtcattatgaaaaatgcgaatctcaggaacggggtctgtccgactcgactccggtactcttgtatcttggaatgtaggtagattgatggcgacgtattgatcgtcgtggcagcacctgtcgtagtattgctgaagagtattgtgtacttctttacagtctgctcgttctttaacatttatttgcaacattcgtgacttgatcaagtcgagacaatcatggagatagttccctgggcccacaatcttttgtagatcctcaatgcgctgctcgagcgagtttttagcacccatcacaggtgtatagcgacaggatcacttactgattgcacggcctttttgggctttcgcttgccgctcgggcctcctggtttagcaatcttgaaaaaggtatcttccttgaacgcgtttgcttcattgtccccagaattgttgtgcttgggtgcaagaggtgcttggacaaacatggtgagcactctttgtatagcaatgcgtagatatctgccccgagatcttcctggccttgctatcttgaaaaatttgtcttctttgaagcctggcttggcctcgtctatctcatcaagacgatctcggtcgaagtctgcgagcacttctggcccgctgataagccatgttagaagttgtagcataacacaccccatgccccaaatgtcatatttccttgataagtacgcctcgactgccccatactctggcgctcggtatgttggggaatgcggcccagttggaggctgtctcgatctcgtcaaggcggaatggaaaccagtcaacccaaaatcagaaatcttaaataaacctaggccatactcattttcttcacggtcttgttcaaagtagagaatattacctggtttaatatctccatgtataccgtagcgcctttcatcgccaggaacagttaagtttcgctggggctgaggtgattcaagaaattcggtcccatgcagaaaaccgaggccatatttgccggtcaaaccggctaattgaccagcaacccaggcaatgacacgcttagaaggatgtattgtatcgctttgacttgggctgtcgtgtaatctctgtttcaactcccggggatgtgtcttccagagatccatcatgctaccaccatctgcccatggaaataggaaagagtagttcgttccctgtcggtatgcaacatagactggcaacaagtgttgctttgtctcaactctttttaaatttcggaactcatttcgaaacttgctagcattgttgtcaatcagcttcttgatcgcaaatttttcggcttcctacaccataagacttcaatcagttgctatctttctgatccacgggtatcaagacacgtacaaaggcatggtgatctgaatgaatggtaacttgggtgacccgcgcatagccgccccagttctcagcaggaacgaaggagcccagcttctcaacaccgattgatgtccatggcatgatagcttgctcgtcaagctcatatagaccaactgatttgtcttctgctttcgcaaaatatgggctcaagagacgccattgattcatatagaagtctcgtttttgattcaaactccatccattgaagcaacgtaaaggtgtaggttcccagttattggtggtggttctttttaccaacataaatgaactaatagagtctctcttttccgattttttgaatgggagatgcttgtctttgatgccctcgcgcatgagacttccaatcatgtgtacttgccctatgagtaccaagatggcgaatatttttcggctcctattctcggcacttcgaggatcgttcggatttccacatatatactccatgtaggcatctatctcggtaggtagcgcattgtcaaatgtctccatgagctcgcgacggacgaccctctcatggcatattttctccagctgtcctaatggcaaaaaggtcttgctgtcatcaggttttgcggcgatcattgcgcttttcaagacgtcaagcaatttatcattctctcctagagactggtcgagacccaaatcaacatcgttggtcggcggtacgactgacaacgcagtagaatccgaaaacccaaggaaatcagcagcatcgtgtgacagtcgtcgaggtttcaagttacggactgaagctctaaatccgtagtcaagaacccgactttcgacggaatcgtgcaggctggatatttcatcttcctgagatgacttattgggcccagaaatcgccggagatagaagattctcatgtcgcggctgcctgacttcagcccaacttcggagaaactagtcgctagttagtacatgttcgaaggaatgattttgatgtagtgctacattttggacatcctctgtgccgccgattctgctcgattctgttccaggttcacctcttgccatcgtcgtggacaaatcgggccactagcaagaactcttgacaaggctagcccacgtgacgagttcttcaacaaatcaagactccaggggtcaggcactaattgctgctgtgggagtccgtgatcttgtatgtcaaactctgccatcgctgcgaatgtgttggcaatgcatatcaggaccagtgagcgctgaacctatgtactgcaaattcttaccccaatgcattttcggatggaacatgataaaggcaacattgaaagtaccatgtattcaagtagcgttaggagttgtttacctgcatgagaggtggcgcctttgattggacaagctgctgcttaagccgcatgaaagctgctggatgctaggatacgctttgcgatggcgatctgattggttcgtgtctg

SEQ ID NO: 3650 - DNA, 1305 bp, Muscodor strobelii
  misc_feature: SGI cDNA ID NO. 560881
  misc_feature: Encodes the peptide sequence at SEQ ID NO 3651
atgattgtggaagatcacaagctgagatccgatgaagaatggaacacatggcgtgcaacttggcgacaggctcctatttcatcaagtcgactcaatctgattagtctaggtgcaagggccgattgcgatgatccagatcccggcaaagtctcatgtctccctttctcacgagacacgttcaaagtactcatagacgagttcaaaatccacggcacgattgcgcgaaccatcaatcgaaatacgagctatgcgtttatacgcaagttttgctcatgggacacgtcccctcaccaagcaatagtatacaattgcagatcgaatgctgcttggacaggcgatctagctctatccgtgacgttcacgcccaatgacatgactacccacgccgtcatgtacggctgtgataagcaaaccacagacgaggtctcgcgacgcttgacacacacggacatcgaagagttccatccaatggtgcttccagctttgttcgctgaactggaaagagaccgactcgaccgacttgctcgaagaaagatcaaccaactactgcagcggatcaaaagtatctccgagaacgtcaatctcgagcagaacgggtcggctccagcctccatcacggaatggctcgagatgggggagacgaggaatggacttctgacattcaagcgaaaaatgcaagatatgattgagcatgtcgaagagcttgaaaacatcatcttcagcacatctactaagaaagatgctgccccgcaaggcattgaccccgtgcgaatcgcagcgttgcgtgtagcagggacaaagatcaaagagagactaaaacatctcgtagatgaattcgatgaactcatccgcaaatgcgcaacgatgattgacggtgttactcttgcgtcacaacttgaatggaatcagatcggccgcaaggacacagtgacaaaccttgagattgcacacaacgggctagaagtagcgcagcatacccgtcgcgatagcgagcttatgaagtcaatcgcactcctaacaatgatctttctacctgcaacttttgtcgcaacactatttagcatgggattcttcaactatcaaggtccaaatggcgacatgttaagcgtaagcccttacatctggttatattttgtagtcactgtcgtcgtcacgtcagtggcattcggtatctggtatttgttgataaggaggcgacagcaagttggaggtgatattgagaagcaagatggaagcctcaccgagaaaagtctcttcagttcgtattcgggctcaaatgctacttcgagcgcttcgcagaattga

SEQ ID NO: 3651 - protein, 434 aa, Muscodor strobelii
  misc_feature: SGI Peptide ID NO. 560881
  misc_feature (91)..(401): NCBI GI: 261359078 Blast Desc: conserved [Verticillium albo-atrum VaMs.102]
  misc_feature (114)..(354): NCBI GI: 256728866 Blast Desc: NECHADRAFT_79930 [Nectria haematococca mpVI 77-13-4]
  misc_feature (187)..(407): NCBI GI: 46133833 Blast Desc: FG09056.1 [Gibberella zeae PH-1]
  misc_feature (108)..(401): NCBI GI: 116195252 Blast Desc: CHGG_04224 [Chaetomium globosum CBS 148.51] gi|88180137|gb|EAQ87605.1| CHGG_04224 [Chaetomium globosum CBS 148.51]
  misc_feature (245)..(408): NCBI GI: 169600193 Blast Desc: SNOG_02926 [Phaeosphaeria nodorum SN15] gi|111068537|gb|EAT89657.1| SNOG_02926 [Phaeosphaeria nodorum SN15]
  misc_feature (19)..(190): NCBI GI: 46133833 Blast Desc: FG09056.1 [Gibberella zeae PH-1]
  misc_feature (265)..(398): NCBI GI: 116195230 Blast Desc: [Chaetomium globosum CBS 148.51] gi|88180126|gb|EAQ87594.1| [Chaetomium globosum CBS 148.51]
  misc_feature (261)..(393): NCBI GI: 164424789 Blast Desc: NCU05356 [Neurospora crassa OR74A] gi|157070662|gb|EAA34111.2| [Neurospora crassa OR74A]
  misc_feature (261)..(393): NCBI GI: 16415998 Blast Desc: conserved [Neurospora crassa]
  misc_feature (53)..(240): NCBI GI: 46126733 Blast Desc: FG07744.1 [Gibberella zeae PH-1]
MIVEDHKLRSDEEWNTWRATWRQAPISSSRLNLISLGARADCDDPDPGKVSCLPFSRDTFKVLIDEFKIHGTIARTINRNTSYAFIRKFCSWDTSPHQAIVYNCRSNAAWTGDLALSVTFTPNDMTTHAVMYGCDKQTTDEVSRRLTHTDIEEFHPMVLPALFAELERDRLDRLARRKINQLLQRIKSISENVNLEQNGSAPASITEWLEMGETRNGLLTFKRKMQDMIEHVEELENIIFSTSTKKDAAPQGIDPVRIAALRVAGTKIKERLKHLVDEFDELIRKCATMIDGVTLASQLEWNQIGRKDTVTNLEIAHNGLEVAQHTRRDSELMKSIALLTMIFLPATFVATLFSMGFFNYQGPNGDMLSVSPYIWLYFVVTVVVTSVAFGIWYLLIRRRQQVGGDIEKQDGSLTEKSLFSSYSGSNATSSASQN

SEQ ID NO: 3652 - DNA, 1174 bp, Muscodor strobelii
  misc_feature: SGI EST ID NO. CUFF.9203.0
  misc_feature: Variant of the nucleotide sequence at SEQ ID NO 3650
tcgcgacgcttgacacacacggacatcgaagagttccatccaatggtgcttccagctttgttcgctgaactggaaagagaccgactcgaccgacttgctcgaagaaagatcaaccaactactgcagcggatcaaaagtatctccgagaacgtcaatctcgagcagaacgggtcggctccagcctccatcacggaatggctcgagatgggggagacgaggaatggacttctgacattcaagcgaaaaatgcaagatatgattgagcatgtcgaagagcttgaaaacatcatcttcagcacatctactaagaaagatgctgccccgcaaggcattgaccccgtgcgaatcgcagcgttgcgtgtagcagggacaaagatcaaagagagactaaaacatctcgtagatgaattcgatgaactcatccgcaaatgcgcaacgatgattgacggtgttactcttgcgtcacaacttgaatggaatcagatcggccgcaaggacacagtgacaaaccttgagattgcacacaacgggctagaagtagcgcagcatacccgtcgcgatagcgagcttatgaagtcaatcgcactcctaacaatgatctttctacctgcaacttttgtcgcaacactatttagcatgggattcttcaactatcaaggtccaaatggcgacatgttaagcgtaagcccttacatctggttatattttgtagtcactgtcgtcgtcacgtcagtggcattcggtatctggtatttgttgataaggaggcgacagcaagttggaggtgatattgagaagcaagatggaagcctcaccgagaaaagtctcttcagttcgtattcgggctcaaatgctacttcgagcgcttcgcagaattgaggaaagtgaaggcgtcagtagtgtaaagggtacctggaaagtagctgcataccggcctacttaacttgcccttccagcttgataatcgcctgtgacgcataccgagcctatcttgtgaggtggcttaaatcattactgttacttagctacatgcaccaacaggacgatccatcccgaattgaatgactctagctcaatagtggcacgcaatacacagcaattcctcgtcacactggtcccttcattctttccttcatcttcatctggaaagcttctcctgcggctagaagagtgc

SEQ ID NO: 3653 - DNA, 1272 bp, Muscodor strobelii
  misc_feature: SGI cDNA ID NO. 560882
  misc_feature: Encodes the peptide sequence at SEQ ID NO 3654
atgattgtggaagatcacaagctgagatccgatgaagaatggaacacatggcgtgcaacttggcgacaggctcctatttcatcaagtcgactcaatctgattagtctaggtgcaagggccgattgcgatgatccagatcccggcaaagtctcatgtctccctttctcacgagacacgttcaaagtactcatagacgagttcaaaatccacggcacgattgcgcgaaccatcaatcgaaatacgagctatgcgtttatacgcaagttttgctcatgggacacgtcccctcaccaagcaataggcgatctagctctatccgtgacgttcacgcccaatgacatgactacccacgccgtcatgtacggctgtgataagcaaaccacagacgaggtctcgcgacgcttgacacacacggacatcgaagagttccatccaatggtgcttccagctttgttcgctgaactggaaagagaccgactcgaccgacttgctcgaagaaagatcaaccaactactgcagcggatcaaaagtatctccgagaacgtcaatctcgagcagaacgggtcggctccagcctccatcacggaatggctcgagatgggggagacgaggaatggacttctgacattcaagcgaaaaatgcaagatatgattgagcatgtcgaagagcttgaaaacatcatcttcagcacatctactaagaaagatgctgccccgcaaggcattgaccccgtgcgaatcgcagcgttgcgtgtagcagggacaaagatcaaagagagactaaaacatctcgtagatgaattcgatgaactcatccgcaaatgcgcaacgatgattgacggtgttactcttgcgtcacaacttgaatggaatcagatcggccgcaaggacacagtgacaaaccttgagattgcacacaacgggctagaagtagcgcagcatacccgtcgcgatagcgagcttatgaagtcaatcgcactcctaacaatgatctttctacctgcaacttttgtcgcaacactatttagcatgggattcttcaactatcaaggtccaaatggcgacatgttaagcgtaagcccttacatctggttatattttgtagtcactgtcgtcgtcacgtcagtggcattcggtatctggtatttgttgataaggaggcgacagcaagttggaggtgatattgagaagcaagatggaagcctcaccgagaaaagtctcttcagttcgtattcgggctcaaatgctacttcgagcgcttcgcagaattga

SEQ ID NO: 3654 - protein, 423 aa, Muscodor strobelii
  misc_feature: SGI Peptide ID NO. 560882
  misc_feature (103)..(343): NCBI GI: 256728866 Blast Desc: NECHADRAFT_79930 [Nectria haematococca mpVI 77-13-4]
  misc_feature (101)..(390): NCBI GI: 261359078 Blast Desc: conserved [Verticillium albo-atrum VaMs.102]
  misc_feature (176)..(396): NCBI GI: 46133833 Blast Desc: FG09056.1 [Gibberella zeae PH-1]
  misc_feature (102)..(390): NCBI GI: 116195252 Blast Desc: CHGG_04224 [Chaetomium globosum CBS 148.51] gi|88180137|gb|EAQ87605.1| CHGG_04224 [Chaetomium globosum CBS 148.51]
  misc_feature (234)..(397): NCBI GI: 169600193 Blast Desc: SNOG_02926 [Phaeosphaeria nodorum SN15] gi|111068537|gb|EAT89657.1| SNOG_02926 [Phaeosphaeria nodorum SN15]
  misc_feature (254)..(387): NCBI GI: 116195230 Blast Desc: [Chaetomium globosum CBS 148.51] gi|88180126|gb|EAQ87594.1| [Chaetomium globosum CBS 148.51]
  misc_feature (19)..(179): NCBI GI: 46133833 Blast Desc: FG09056.1 [Gibberella zeae PH-1]
  misc_feature (250)..(382): NCBI GI: 164424789 Blast Desc: NCU05356 [Neurospora crassa OR74A] gi|157070662|gb|EAA34111.2| [Neurospora crassa OR74A]
  misc_feature (250)..(382): NCBI GI: 16415998 Blast Desc: conserved [Neurospora crassa]
  misc_feature (91)..(382): NCBI GI: 171677833 Blast Desc: protein product [Podospora anserina] gi|170936985|emb|CAP61643.1| protein product [Podospora anserina]
MIVEDHKLRSDEEWNTWRATWRQAPISSSRLNLISLGARADCDDPDPGKVSCLPFSRDTFKVLIDEFKIHGTIARTINRNTSYAFIRKFCSWDTSPHQAIGDLALSVTFTPNDMTTHAVMYGCDKQTTDEVSRRLTHTDIEEFHPMVLPALFAELERDRLDRLARRKINQLLQRIKSISENVNLEQNGSAPASITEWLEMGETRNGLLTFKRKMQDMIEHVEELENIIFSTSTKKDAAPQGIDPVRIAALRVAGTKIKERLKHLVDEFDELIRKCATMIDGVTLASQLEWNQIGRKDTVTNLEIAHNGLEVAQHTRRDSELMKSIALLTMIFLPATFVATLFSMGFFNYQGPNGDMLSVSPYIWLYFVVTVVVTSVAFGIWYLLIRRRQQVGGDIEKQDGSLTEKSLFSSYSGSNATSSASQN

SEQ ID NO: 3655 - DNA, 1174 bp, Muscodor strobelii; identical to SEQ ID NO: 3652
  misc_feature: SGI EST ID NO. CUFF.9203.0
  misc_feature: Variant of the nucleotide sequence at SEQ ID NO 3653

SEQ ID NO: 3656 - DNA, 1686 bp, Muscodor strobelii
  misc_feature: SGI cDNA ID NO. 560883
  misc_feature: Elevated expression when VOC is produced
  misc_feature: Encodes the peptide sequence at SEQ ID NO 3657
atggtgttcatcttagactatctccaacacaggcgagactgccaattcaaacagagcgagcgcattgagaggatcaaagcgcttacgcgataccaagcaccttataacaaccaagatagagagatcatagatcagcccattgagaaactcgtcgagtctgttcataatggcgagctcaacccgtcaaatctcctcgacacatatggcaaggtagcattgaaggcacatgagaagaccaattgcgtcaccgaagtcatgatctcggaggctgagggctggcttaaagatggctccatcaacttcaaaggccctctagccggaatcccagtcagcctgaaagacacgattaatgtaggaggttttgattccacagtcggctttagctctttcgtcggtaagacacacgcacaagatggccccactgttcggttactcaaggatgccggtgctgttccctacgtcaagaccgcttgtccgattacacttctcagtttcgaatctacgaatgatgtttggggacgttgcacaaacccccacaatagcaaatactcgccaggtggttcgactggcggtgaagcagcgcttttggcactgggtggtagaattggtgttggcagtgatgtcgcaggcagcgtgcgcgcgccggcgcatttctctggtatctactcgcttcgctgctcgactggtcgctggccgaaagctggtttcgcgacgagcatgccaggtcaagagggagtgccgagcgtctacagccctatgacccgtacgctaaacgacttaacgtacttcacgcgcgctgtcattggcatgcaaccgtggaaatatgactactcggttcatcctcttgcatggcggcctgagattgaggaggagtacaaggcgaagagcaagctccgtgtgggcatcatgagaacagatggcgtcgtggatccaagtcccgcttgccgacgtgcactcgaattgacagaatctgcgttgcgggctgcgggacacgagatcgtcgagatcgaccctccttcgccatatgaggcgctgtatcttggcgcacatctattgaacgcggatggatgccagatgttcaagtcattcttccgatggggcgaatggaacgacgccggtgctgcgcagatggatttcctgatgaacgtgccacgaccgctcaagtacatctactacctatgggtgaagtatgtacgccgcgataacgtatgggcaggtcttgtcaagggatggcatcagaagagtgcctatgagaattggcagcttgtggcaaagcgtgaggcatatcgatctaagtggtacgactggtgggacagcgttggtgtcgacttcctgctcacccccactaatgccacgcctgctgtaccacatgacggtatgggacaggcagtcagcagctgcggatatacgttcttgttcaatgtgcttgactacactgctggctgtgtccctatcacacatgttgacaagactgtcgacggtctaccggcaaacttcaatatcaagaagctgaatggtgttgcccagggtgcttacaagttgtacgatgctcaggccatgcatggactaccggttggtattcaggttgttgggcgtaggctggaagaggagaaggttttagctcttatgaagagggttgaggatgcgcttggcgaggataaatatgagttgcttgatattgactaa

SEQ ID NO: 3657 - protein, 561 aa, Muscodor strobelii
  misc_feature: SGI Peptide ID NO. 560883
  misc_feature (63)..(540): Pfam Id: PF01425 Pfam Desc: Amidase
  misc_feature (63)..(345): Pfam Id: PF01425 Pfam Desc: Amidase
  misc_feature (415)..(540): Pfam Id: PF01425 Pfam Desc: Amidase
  misc_feature (1)..(561): NCBI GI: 154300469 Blast Desc: BC1G_11058 [Botryotinia fuckeliana B05.10] gi|150856583|gb|EDN31775.1| BC1G_11058 [Botryotinia fuckeliana B05.10]
  misc_feature (1)..(561): NCBI GI: 156040257 Blast Desc: SS1G_12144 [Sclerotinia sclerotiorum 1980] gi|154696201|gb|EDN95939.1| SS1G_12144 [Sclerotinia sclerotiorum 1980]
  misc_feature (1)..(561): NCBI GI: 261358645 Blast Desc: acetamidase [Verticillium albo-atrum VaMs.102]
  misc_feature (2)..(561): NCBI GI: 156530442 Blast Desc: amidase protein [Ustilaginoidea virens]
  misc_feature (2)..(561): NCBI GI: 256734684 Blast Desc: NECHADRAFT_90290 [Nectria haematococca mpVI 77-13-4]
  misc_feature (1)..(559): NCBI GI: 85117444 Blast Desc: NCU08356 [Neurospora crassa OR74A] gi|28927065|gb|EAA36023.1| NCU08356 [Neurospora crassa OR74A]
  misc_feature (4)..(561): NCBI GI: 169594690 Blast Desc: SNOG_00072 [Phaeosphaeria nodorum SN15] gi|111070447|gb|EAT91567.1| SNOG_00072 [Phaeosphaeria nodorum SN15]
  misc_feature (4)..(561): NCBI GI: 189208522 Blast Desc: acetamidase [Pyrenophora tritici-repentis Pt-1C-BFP] gi|187976687|gb|EDU43313.1| acetamidase [Pyrenophora tritici-repentis Pt-1C-BFP]
  misc_feature (2)..(561): NCBI GI: 116182318 Blast Desc: CHGG_01787 [Chaetomium globosum CBS 148.51] gi|88186084|gb|EAQ93552.1| CHGG_01787 [Chaetomium globosum CBS 148.51]
  misc_feature (64)..(560): NCBI GI: 171695364 Blast Desc: protein product [Podospora anserina] gi|170947924|emb|CAP60088.1| protein product [Podospora anserina]
  misc_feature (41)..(551): SWISSPROT Homolog: EC 3.5.1.4 Amidase
  misc_feature: Useful for introducing or modulating the production of volatile compounds
MVFILDYLQHRRDCQFKQSERIERIKALTRYQAPYNNQDREIIDQPIEKLVESVHNGELNPSNLLDTYGKVALKAHEKTNCVTEVMISEAEGWLKDGSINFKGPLAGIPVSLKDTINVGGFDSTVGFSSFVGKTHAQDGPTVRLLKDAGAVPYVKTACPITLLSFESTNDVWGRCTNPHNSKYSPGGSTGGEAALLALGGRIGVGSDVAGSVRAPAHFSGIYSLRCSTGRWPKAGFATSMPGQEGVPSVYSPMTRTLNDLTYFTRAVIGMQPWKYDYSVHPLAWRPEIEEEYKAKSKLRVGIMRTDGVVDPSPACRRALELTESALRAAGHEIVEIDPPSPYEALYLGAHLLNADGCQMFKSFFRWGEWNDAGAAQMDFLMNVPRPLKYIYYLWVKYVRRDNVWAGLVKGWHQKSAYENWQLVAKREAYRSKWYDWWDSVGVDFLLTPTNATPAVPHDGMGQAVSSCGYTFLFNVLDYTAGCVPITHVDKTVDGLPANFNIKKLNGVAQGAYKLYDAQAMHGLPVGIQVVGRRLEEEKVLALMKRVEDALGEDKYELLDID

SEQ ID NO: 3658 - DNA, 2960 bp, Muscodor strobelii
  misc_feature: SGI EST ID NO. CUFF.9283.0
  misc_feature: Variant of the nucleotide sequence at SEQ ID NO 3656
ttttcatcctttacaacacattatcccttgtgtcgaattcattcattaagtcttgatttaattgacgttgttgggttgacgaccgcctgtatcaactcatcagacccaattctaactttcagggtcccctatcagcggtctccggcattggcaacatggtgttcatcttagactatctccaacacaggcgagactgccaattcaaacagagcgagcgcattgagaggatcaaagcgcttacgcgataccaagcaccttataacaaccaagatagagagatcatagatcagcccattgagaaactcgtcgagtctgttcataatggcgagctcaacccgtcaaatctcctcgacacatatggcaaggtagcattgaaggcacatgagaagaccaattgcgtcaccgaagtcatgatctcggaggctgagggctggcttaaagatggctccatcaacttcaaaggccctctagccggaatcccagtcagcctgaaagacacgattaatgtaggaggttttgattccacagtcggctttagctctttcgtcggtaagacacacgcacaagatggccccactgttcggttactcaaggatgccggtgctgttccctacgtcaagaccgcttgtccgattacacttctcagtttcgaatctacgaatgatgtttggggacgttgcacaaacccccacaatagcaaatactcgccaggtggttcgactggcggtgaagcagcgcttttggcactgggtggtagaattggtgttggcagtgatgtcgcaggcagcgtgcgcgcgccggcgcatttctctggtatctactcgcttcgctgctcgactggtcgctggccgaaagctggtttcgcgacgagcatgccaggtcaagagggagtgccgagcgtctacagccctatgacccgtacgctaaacgacttaacgtacttcacgcgcgctgtcattggcatgcaaccgtggaaatatgactactcggttcatcctcttgcatggcggcctgagattgaggaggagtacaaggcgaagagcaagctccgtgtgggcatcatgagaacagatggcgtcgtggatccaagtcccgcttgccgacgtgcactcgaattgacagaatctgcgttgcgggctgcgggacacgagatcgtcgagatcgaccctccttcgccatatgaggcgctgtatcttggcgcacatctattgaacgcggatggatgccagatgttcaagtcattcttccgatggggcgaatggaacgacgccggtgctgcgcagatggatttcctgatgaacgtgccacgaccgctcaagtacatctactacctatgggtgaagtatgtacgccgcgataacgtatgggcaggtcttgtcaagggatggcatcagaagagtgcctatgagaattggcagcttgtggcaaagcgtgaggcatatcgatctaagtggtacgactggtgggacagcgttggtgtcgacttcctgctcacccccactaatgccacgcctgctgtaccacatgacggtatgggacaggcagtcagcagctgcggatatacgttcttgttcaatgtgcttgactacactgctggctgtgtccctatcacacatgttgacaagactgtcgacggtctaccggcaaacttcaatatcaagaagctgaatggtgttgcccagggtgcttacaagttgtacgatgctcaggccatgcatggactaccggttggtattcaggttgttgggcgtaggctggaagaggagaaggttttagctcttatgaagagggttgaggatgcgcttggcgaggataaatatgagttgcttgatattgactaaacaagtgcttcttgagcatattataatagacttataatcaatagcgacttgagataaagatgtaaagaaagcgggaaaatatctaacatagttcaacattacttgttggtataagagataatgatgtcgtagcagagtgaggggtattgttattgactatttcgagtccaactataacaagaattcagggttaactcctctccattaactattcatatgccagaaaatagccctgcatattcacaaagaccttattgtcgacggtacatctgtgtacgcagatacaaggcgatctccacatattcaaaaagaactatccggtctctgtaatgccctaagagacgagcatgacgacatgtcgacatagatcgtgaccgtaaaggcgagagcataaagcaagccattcgcgcagtctccacactcgagaatctcgtatgacgacacagctcgtatccaaaatgccatgtatatggaagctccaaaagagagttttggtcgccattcgcgaggactatagacctgagggaaggcccaatctaggacaacgccatcgggcaatcaagcattgtctatacatagttgatgtagtctgacgggtataagcattgcggagatctcatgaatgtgaacaggttcaggtcctgacgaattctgcaatgtacttcatgttcgtaaagacgcacttaacgcgtaactcttctccggctcgaagggcgttggccctatctatggcagttttggaaaactcgtaaccaccaaaactcttagtcccataatctcggatatcgcaatgaatgagaaactcccgggctttcgctcttagatatttctgggaagctgggccgtgaactatggtaaagcggccacgagggtcttctatccgataagtgtacggcattatgcaggtttagtcttagatgaaatcgctgtgtaatagccggaataagatgaccgtaactctcgtcttcgttaaggtgctgtgaaataggggaagaagtatcgtggagtgtagataggagataaaacccccatagtatatgctaggtagaagaatcgttattattcgtgccctagaatgttgaaatttcgaagagctcataactttgaacagcatcttct

SEQ ID NO: 3659 - DNA, 936 bp, Muscodor strobelii
  misc_feature: SGI cDNA ID NO. 560884
  misc_feature: Elevated expression when VOC is produced
  misc_feature: Encodes the peptide sequence at SEQ ID NO 3660
atggcatcggaccccaccccctacgacccaacccgcacagaggactggctcgtgtgcaacgcctgtgggacacaattcccaacctcagagcgctccaagcttacaacatgcttcatatgcgacgacccccgacaattcacaccaccctccggccaatccttcaccacactctcttccctccgcagcacacacaaaaacacattcacacccctagccaccgacccagaacacataatctcaataacaacgactcccaaattcgccatcggccaacgcgcaatcctaatccgcaccccacagggaaacgtactctgggactgcataacgctcctcgacaccgaaacaatcaccaaaatcaagtctctaggcggactaagcgcaattataatttcccacccccactactactcaacacacttagaatggacaacagcattctcatgcccagtctacctctcatccgaggactcaacttggctcgcgcagcgctcagatagtcaggtcttcatcgaccgcaccaccgttccaattcttgggacgactgttctcaagcttggaggtcacttcaccgggtctcttgtcttgctatacaataagcggctcttcattgcagatacgctcgtcactacgccctcaggtctaggaaattgggatacagatgcagtcggaacgacgagggagaggccggctggtatgaatagttttgcgtttatgtggagtataccgaatatgatacctcttccgcccgatgagttggcgagaatgtggcggattttgaaggattatgagtttagtagtacgcatggggctttcttgggcttggacattgagaaaagcgtcccggagatgaagaagagggtattggagagtatacagatacaggtgaggtactctggacatggggcgcgtgagattttaaatgcgaggtttgaatga

SEQ ID NO: 3660 - protein, 311 aa, Muscodor strobelii
  misc_feature: SGI Peptide ID NO. 560884
  misc_feature (90)..(268): Pfam Id: PF00753 Pfam Desc: Metallo-beta-lactamase superfamily
  misc_feature (1)..(310): NCBI GI: 256735626 Blast Desc: NECHADRAFT_103278 [Nectria haematococca mpVI 77-13-4]
  misc_feature (8)..(299): NCBI GI: 46137965 Blast Desc: FG10497.1 [Gibberella zeae PH-1]
  misc_feature (11)..(311): NCBI GI: 154300467 Blast Desc: BC1G_11057 [Botryotinia fuckeliana B05.10] gi|150856582|gb|EDN31774.1| BC1G_11057 [Botryotinia fuckeliana B05.10]
  misc_feature (13)..(299): NCBI GI: 85111262 Blast Desc: NCU02116 [Neurospora crassa OR74A] gi|28925595|gb|EAA34617.1| conserved [Neurospora crassa OR74A]
  misc_feature (13)..(299): NCBI GI: 156040259 Blast Desc: SS1G_12145 [Sclerotinia sclerotiorum 1980] gi|154696202|gb|EDN95940.1| SS1G_12145 [Sclerotinia sclerotiorum 1980]
  misc_feature (78)..(299): NCBI GI: 39974217 Blast Desc: MGG_00745 [Magnaporthe grisea 70-15] gi|145018322|gb|EDK02601.1| MGG_00745 [Magnaporthe grisea 70-15]
  misc_feature (15)..(300): NCBI GI: 145230029 Blast Desc: An01g09020 [Aspergillus niger] gi|134055437|emb|CAK37146.1| protein product [Aspergillus niger]
  misc_feature (15)..(300): NCBI GI: 67522981 Blast Desc: AN1947.2 [Aspergillus nidulans FGSC A4] gi|40745956|gb|EAA65112.1| AN1947.2 [Aspergillus nidulans FGSC A4] gi|259487306|tpe|CBF85876.1| TPA: metallo-beta-lactamase FGSC
  misc_feature (15)..(300): NCBI GI: 119499916 Blast Desc: metallo-beta-lactamase domain protein, [Neosartorya fischeri NRRL 181] gi|119414880|gb|EAW24818.1| metallo-beta-lactamase domain protein, [Neosartorya fischeri NRRL
  misc_feature (15)..(300): NCBI GI: 169764527 Blast Desc: [Aspergillus oryzae RIB40] gi|238504220|ref|XP_002383342.1| metallo-beta-lactamase family protein [Aspergillus flavus NRRL3357] gi|83764589|dbj|BAE54733.1|
  misc_feature: Useful for introducing or modulating the production of volatile compounds
MASDPTPYDPTRTEDWLVCNACGTQFPTSERSKLTTCFICDDPRQFTPPSGQSFTTLSSLRSTHKNTFTPLATDPEHIISITTTPKFAIGQRAILIRTPQGNVLWDCITLLDTETITKIKSLGGLSAIIISHPHYYSTHLEWTTAFSCPVYLSSEDSTWLAQRSDSQVFIDRTTVPILGTTVLKLGGHFTGSLVLLYNKRLFIADTLVTTPSGLGNWDTDAVGTTRERPAGMNSFAFMWSIPNMIPLPPDELARMWRILKDYEFSSTHGAFLGLDIEKSVPEMKKRVLESIQIQVRYSGHGAREILNARFE

SEQ ID NO: 3661 - DNA, 1011 bp, Muscodor strobelii
  misc_feature: SGI cDNA ID NO. 560885
  misc_feature: Encodes the peptide sequence at SEQ ID NO 3662
atgagaggaattcaggtcgcccagtatgtcaagggccccaaagagctcaaagtgaccgagctgcccgatcccaagcctaccgcggaccaatatcttatcgaggtgcacgccgcggcaacgaattttttcgatatcctgcagatccagggcaaatatcagaaccagcctccattcccctgggtatcaggcgccgaattcgccggaaaagtcctcgcagtgccctcatcaatcaagaaccctcgctatccagtcggaagccgcgtcttcggtgccagccaaggctcgtacgcaacgcaagtatgcgccgcagaggagcaattactcccagtgcccgaaggctggtctgacaccgacgcggctgggctcttcgtgacggcgcctacgtcgtacggtgcgctcgtgctgcgagctggtgtcaaggagggcgattgggtacttgttcatgcggctgcgggcggcgttggtcttgctgctgtgcagatcgctaaggcgtttggcgcgactgtcattgcgactgcgggctcggagaggaaactcgaggtcgcgaagcagtttggtgcggatcatgttgtggattacagagaggcagactggcctgagaaggtcaagaagttgacgccgaagggtaggggtgtggatattgtgtatgatcctgttggtatggtggataagagtaccaagtgcgttgcgtggaatgggcggatcctcattgttggctttgccgcggggaatatcgagaaggttgcgatgaataaggtgttgcttaagaatatctcgctggttggcatccactggggtgcttatgcgaagtttgagaggggcagtataccggttgtttggaaggctatttttgaactcattgcgaagaagaaattcagagggacggtgtttagcgataaggagttcgtcgggttggagaaggtgcctgatgcgctcattgcgttaggtgggagggagacttgggggaaggtcgttgttaaggtgccgcagggtggtgagagtaagctatga

SEQ ID NO: 3662 - protein, 336 aa, Muscodor strobelii
  misc_feature: SGI Peptide ID NO. 560885
  misc_feature (28)..(110): Pfam Id: PF08240 Pfam Desc: Alcohol dehydrogenase GroES-like domain
  misc_feature (141)..(289): Pfam Id: PF00107 Pfam Desc: Zinc-binding dehydrogenase
  misc_feature (1)..(336): NCBI GI: 164424882 Blast Desc: NCU11325 [Neurospora crassa OR74A] gi|157070703|gb|EDO65096.1| NCU11325 [Neurospora crassa OR74A]
  misc_feature (1)..(336): NCBI GI: 171695374 Blast Desc: protein product [Podospora anserina] gi|170947929|emb|CAP60093.1| protein product [Podospora anserina]
  misc_feature (1)..(336): NCBI GI: 145611054 Blast Desc: MGG_11515 [Magnaporthe grisea 70-15] gi|145611062|ref|XP_001410916.1| MGG_11519 [Magnaporthe grisea 70-15] gi|145018394|gb|EDK02673.1| MGG_11515 [Magnaporthe grisea
  misc_feature (1)..(336): NCBI GI: 46107728 Blast Desc: FG00747.1 [Gibberella zeae PH-1]
  misc_feature (1)..(336): NCBI GI: 256734773 Blast Desc: [Nectria haematococca mpVI 77-13-4]
  misc_feature (1)..(305): NCBI GI: 116182324 Blast Desc: CHGG_01790 [Chaetomium globosum CBS 148.51] gi|88186087|gb|EAQ93555.1| CHGG_01790 [Chaetomium globosum CBS 148.51]
  misc_feature (1)..(334): NCBI GI: 240107615 Blast Desc: quinone oxidoreductase, [Coccidioides posadasii C735 delta SOWgp]
  misc_feature (1)..(334): NCBI GI: 119177629 Blast Desc: CIMG_07730 [Coccidioides immitis RS]
  misc_feature (1)..(334): NCBI GI: 154299867 Blast Desc: BC1G_10824 [Botryotinia fuckeliana B05.10] gi|150857104|gb|EDN32296.1| BC1G_10824 [Botryotinia fuckeliana B05.10]
  misc_feature (1)..(336): NCBI GI: 156053626 Blast Desc: SS1G_05660 [Sclerotinia sclerotiorum 1980] gi|154703441|gb|EDO03180.1| SS1G_05660 [Sclerotinia sclerotiorum 1980]
  misc_feature (1)..(263): SWISSPROT Homolog: EC 1.6.5.5 NADPH:quinone reductase
MRGIQVAQYVKGPKELKVTELPDPKPTADQYLIEVHAAATNFFDILQIQGKYQNQPPFPWVSGAEFAGKVLAVPSSIKNPRYPVGSRVFGASQGSYATQVCAAEEQLLPVPEGWSDTDAAGLFVTAPTSYGALVLRAGVKEGDWVLVHAAAGGVGLAAVQIAKAFGATVIATAGSERKLEVAKQFGADHVVDYREADWPEKVKKLTPKGRGVDIVYDPVGMVDKSTKCVAWNGRILIVGFAAGNIEKVAMNKVLLKNISLVGIHWGAYAKFERGSIPVVWKAIFELIAKKKFRGTVFSDKEFVGLEKVPDALIALGGRETWGKVVVKVPQGGESKL

SEQ ID NO: 3663 - DNA, 2851 bp, Muscodor strobelii
  misc_feature: SGI EST ID NO. CUFF.9286.0
  misc_feature: Variant of the nucleotide sequence at SEQ ID NO 3661
tagttttccattccagagaagaacctgatacttttcttgtgtttctatttctagcctttgagtgtatatatttcaatctcatccgaaatttgtaaaattagcgatcatgagaggaattcaggtcgcccagtatgtcaagggccccaaagagctcaaagtgaccgagctgcccgatcccaagcctaccgcggaccaatatcttatcgaggtgcacgccgcggcaacgaattttttcgatatcctgcagatccagggcaaatatcagaaccagcctccattcccctgggtatcaggcgccgaattcgccggaaaagtcctcgcagtgccctcatcaatcaagaaccctcgctatccagtcggaagccgcgtcttcggtgccagccaaggctcgtacgcaacgcaagtatgcgccgcagaggagcaattactcccagtgcccgaaggctggtctgacaccgacgcggctgggctcttcgtgacggcgcctacgtcgtacggtgcgctcgtgctgcgagctggtgtcaaggagggcgattgggtacttgttcatgcggctgcgggcggcgttggtcttgctgctgtgcagatcgctaaggcgtttggcgcgactgtcattgcgactgcgggctcggagaggaaactcgaggtcgcgaagcagtttggtgcggatcatgttgtggattacagagaggcagactggcctgagaaggtcaagaagttgacgccgaagggtaggggtgtggatattgtgtatgatcctgttggtatggtggataagagtaccaagtgcgttgcgtggaatgggcggatcctcattgttggctttgccgcggggaatatcgagaaggttgcgatgaataaggtgttgcttaagaatatctcgctggttggcatccactggggtgcttatgcgaagtttgagaggggcagtataccggttgtttggaaggctatttttgaactcattgcgaagaagaaattcagagggacggtgtttagcgataaggagttcgtcgggttggagaaggtgcctgatgcgctcattgcgttaggtgggagggagacttgggggaaggtcgttgttaaggtgccgcagggtggtgagagtaagctatgatcgtgcatgagattcctcggcaggtagttaccatgtaaattgggcgcctcgagtgttgcggcaaagtcgaggggtagaatagagtgttatagtgctcaattgtagctcaggcttccatcaagcagtcccgttgttacaatggtagagtggtaaggaagcctgcgagctcacgcgcctagtacggattttgtgcgaagcacccggatttgaatcctggtagtgtggttgtggtgacccacgcctgcttgacctccttttttttctttttgccaatttcatgttcgttttcattctgcgcctaggaagtgtcatgatgtatttcgtttatctctcaatgagatattgcatatttgaagaaggaacgttcatcacacgcgacacccatgagtggcgaaccgaccatctgttcgcccctaaacttcgccgtcccaccaactcattcaaacctcgcatttaaaatctcacgcgccccatgtccagagtacctcacctgtatctgtatactctccaataccctcttcttcatctccgggacgcttttctcaatgtccaagcccaagaaagccccatgcgtactactaaactcataatccttcaaaatccgccacattctcgccaactcatcgggcggaagaggtatcatattcggtatactccacataaacgcaaaactattcataccagccggcctctccctcgtcgttccgactgcatctgtatcccaatttcctagacctgagggcgtagtgacgagcgtatctgcaatgaagagccgcttattgtatagcaagacaagagacccggtgaagtgacctccaagcttgagaacagtcgtcccaagaattggaacggtggtgcggtcgatgaagacctgactatctgagcgctgcgcgagccaagttgagtcctcggatgagaggtagactgggcatgagaatgctgttgtccattctaagtgtgttgagtagtagtgggggtgggaaattataattgcgcttagtccgcctagagacttgattttggtgattgtttcggtgtcgaggagcgttatgcagtcccagagtacgtttccctgtggggtgcggattaggattgcgcgttggccgatggcgaatttgggagtcgttgttattgagattatgtgttctgggtcggtggctaggggtgtgaatgtgtttttgtgtgtgctgcggagggaagagagtgtggtgaaggattggccggagggtggtgtgaattgtcgggggtcgtcgcatatgaagcatgttgtaagcttggagcgctctgaggttgggaattgtgtcccacaggcgttgcacacgagccagtcctctgtgcgggttgggtcgtagggggtggggtccgatgccattttgttgttattatatgggagatcaagtcaagtattgagatacaaatgaaatctgtgtatgtgagtttcacgatacgccaagaatgagtgcggagatgaggctcttatcattcgagatggacgtctgccgtgatgcttagctagagttgcaagtggggggcttgacatatgtattcgccaagcatctatttaagaagcgatccggtgccttttataatcgtaatttcttagcgatatcatactacaagatgacaaatgcgacgaattctgcgttcttgtgtcgagtcacgatgctgtccacgcgatgaggacacatacttagcatcgtcctattgtcattcacttggagttctagaacccag

SEQ ID NO: 3664 - DNA, 1293 bp, Muscodor strobelii
  misc_feature: SGI cDNA ID NO. 560886
  misc_feature: Encodes the peptide sequence at SEQ ID NO 3665
atggccgacgctaccgagggggcctctgccgacccccagatcaccttcaaggtgaagacgtccggcgacaagcagcacaccatcaccatggctgagtccgccctggtgtccgatcttaaggcgaagctggcgggcgccgatttcgaggatatccccgccgatcgccaacgcctcatttactcgggtcgtgtcatgaagaatgaggagaccctcgccacctacaagatcaagtccggcaacaccgtccatcttgtcaagagcgctgcgagtaatcccgcgccccagccgtctgcctcgtccacatctaccccggccgctccccaggtgcccaccaacatggctgccggcacagccaacaaccctctcgccggcctcaccggcgccagatacgcaggcctgacgaacctgccctctgcagacatgtttgggcccgacggcggcatggtcggctctatgatggacgaggaccagctcgccaacatgatgagcaaccctaacgttgcccagcagatgaacgagatgatgaacaacgaccagttcctcgacctcatgatccaatccaaccccatgctgcgtaataaccccaacgcgcgagagatggtcaggtcacccttcttccgccagatgatgacgaacccagaggcgctgcgaggagccgcccgtctgcaacgcatgatgcgaggcggcaacaacggccagggctctttccccatgcccggcgtcacagataacacccccggccaaggcaacagcgatgcaagttataccggtgctcagggacaggctcccgcatttgatcctacagccttgttcggtgccttaggcggtggtgctggcgccggaggtgatcctcttgcggccttgcgcggtctgatgggaacgccgcccgctgccacaggaacaacggggaccgaaaaccctggcgcttctaacaccgcaagcaacaacacttcaggctcccctccaacagacgcatccaatccaccgcctaacccctttgccagcttattcggtaccggtgcctccaacccgaatgctgctgccaatcccttcggtatgccgcctatggacgccgaggcgatgcaacaattagcacagatatttggttccggatccggagggtttggagccccggccgcaccacccgacaacagacccccagaggagcgatacgctgagcagctccgtcaactcaatgacatgggcttctacgacttcgaccggaacgtggcggccctacgaagaagtggcgggagcgtacaaggtgcaatcgagcatctacttagctcataa

SEQ ID NO: 3665 - protein, 430 aa, Muscodor strobelii
  misc_feature: SGI Peptide ID NO. 560886
  misc_feature (390)..(427): Pfam Id: PF00627 Pfam Desc: UBA/TS-N domain
  misc_feature (19)..(89): Pfam Id: PF00240 Pfam Desc: Ubiquitin family
  misc_feature (1)..(429): NCBI GI: 256734772 Blast Desc: NECHADRAFT_75374 [Nectria haematococca mpVI 77-13-4]
  misc_feature (1)..(430): NCBI GI: 39951351 Blast Desc: MGG_01318 [Magnaporthe grisea 70-15] gi|145020866|gb|EDK04995.1| MGG_01318 [Magnaporthe grisea 70-15]
  misc_feature (9)..(429): NCBI GI: 46107726 Blast Desc: FG00746.1 [Gibberella zeae PH-1]
  misc_feature (1)..(429): NCBI GI: 171694994 Blast Desc: protein product [Podospora anserina] gi|170947739|emb|CAP59902.1| protein product [Podospora anserina]
  misc_feature (1)..(429): NCBI GI: 116182184 Blast Desc: CHGG_01720 [Chaetomium globosum CBS 148.51] gi|88186017|gb|EAQ93485.1| CHGG_01720 [Chaetomium globosum CBS 148.51]
  misc_feature (11)..(428): NCBI GI: 164427534 Blast Desc: NCU03028 [Neurospora crassa OR74A] gi|38566966|emb|CAE76267.1| related to ubiquitin-like protein DSK2 [Neurospora crassa] gi|157071783|gb|EAA36178.2| conserved
  misc_feature (1)..(429): NCBI GI: 154299869 Blast Desc: BC1G_10825 [Botryotinia fuckeliana B05.10] gi|150857105|gb|EDN32297.1| BC1G_10825 [Botryotinia fuckeliana B05.10]
  misc_feature (1)..(428): NCBI GI: 212531301 Blast Desc: ubiquitin-like protein DskB, [Penicillium marneffei ATCC 18224] gi|210071171|gb|EEA25260.1| ubiquitin-like protein DskB, [Penicillium marneffei ATCC 18224]
  misc_feature (6)..(430): NCBI GI: 238840684 Blast Desc: deubiquitination-protection protein dph1 [Microsporum canis CBS 113480]
  misc_feature (14)..(429): NCBI GI: 261196133 Blast Desc: deubiquitination-protection protein dph1 [Ajellomyces dermatitidis SLH14081] gi|239587603|gb|EEQ70246.1| deubiquitination-protection protein dph1 [Ajellomyces SLH14081]
MADATEGASADPQITFKVKTSGDKQHTITMAESALVSDLKAKLAGADFEDIPADRQRLIYSGRVMKNEETLATYKIKSGNTVHLVKSAASNPAPQPSASSTSTPAAPQVPTNMAAGTANNPLAGLTGARYAGLTNLPSADMFGPDGGMVGSMMDEDQLANMMSNPNVAQQMNEMMNNDQFLDLMIQSNPMLRNNPNAREMVRSPFFRQMMTNPEALRGAARLQRMMRGGNNGQGSFPMPGVTDNTPGQGNSDASYTGAQGQAPAFDPTALFGALGGGAGAGGDPLAALRGLMGTPPAATGTTGTENPGASNTASNNTSGSPPTDASNPPPNPFASLFGTGASNPNAAANPFGMPPMDAEAMQQLAQIFGSGSGGFGAPAAPPDNRPPEERYAEQLRQLNDMGFYDFDRNVAALRRSGGSVQGAIEHLLSS

SEQ ID NO: 3666 - DNA, 2152 bp, Muscodor strobelii
  misc_feature: SGI EST ID NO. CUFF.9662.0
  misc_feature: Variant of the nucleotide sequence at SEQ ID NO 3664
cccccccaaagccaaggcagcccaccttgcgaacgtgccccgccaacaatccagactccatcatcatccaccatctgcacccagtgtctctctgcgcccgttaggtcgtttttggcggcggctgcagtagcgaccgcactcaccggagccatcgaccactaccaacgaaagagcctccttcttctctaaccacctcctgcacctcgtgttcctcattttgcgagttcatttagtcgttcctcccgtcatcaccgttctcacagaaggggttcctgcctcgtcggcgacaacattctcacccgcaatagcaccccgcgcgcgatccgcaacaccacccgcaccagcaacgcccactcaaactagacactcgtacgacgacacgccttgactctcgtgcacttgctcccgccatggccgacgctaccgagggggcctctgccgacccccagatcaccttcaaggtgaagacgtccggcgacaagcagcacaccatcaccatggctgagtccgccctggtgtccgatcttaaggcgaagctggcgggcgccgatttcgaggatatccccgccgatcgccaacgcctcatttactcgggtcgtgtcatgaagaatgaggagaccctcgccacctacaagatcaagtccggcaacaccgtccatcttgtcaagagcgctgcgagtaatcccgcgccccagccgtctgcctcgtccacatctaccccggccgctccccaggtgcccaccaacatggctgccggcacagccaacaaccctctcgccggcctcaccggcgccagatacgcaggcctgacgaacctgccctctgcagacatgtttgggcccgacggcggcatggtcggctctatgatggacgaggaccagctcgccaacatgatgagcaaccctaacgttgcccagcagatgaacgagatgatgaacaacgaccagttcctcgacctcatgatccaatccaaccccatgctgcgtaataaccccaacgcgcgagagatggtcaggtcacccttcttccgccagatgatgacgaacccagaggcgctgcgaggagccgcccgtctgcaacgcatgatgcgaggcggcaacaacggccagggctctttccccatgcccggcgtcacagataacacccccggccaaggcaacagcgatgcaagttataccggtgctcagggacaggctcccgcatttgatcctacagccttgttcggtgccttaggcggtggtgctggcgccggaggtgatcctcttgcggccttgcgcggtctgatgggaacgccgcccgctgccacaggaacaacggggaccgaaaaccctggcgcttctaacaccgcaagcaacaacacttcaggctcccctccaacagacgcatccaatccaccgcctaacccctttgccagcttattcggtaccggtgcctccaacccgaatgctgctgccaatcccttcggtatgccgcctatggacgccgaggcgatgcaacaattagcacagatatttggttccggatccggagggtttggagccccggccgcaccacccgacaacagacccccagaggagcgatacgctgagcagctccgtcaactcaatgacatgggcttctacgacttcgaccggaacgtggcggccctacgaagaagtggcgggagcgtacaaggtgcaatcgagcatctacttagctcataaagtcatactcttctatgtcgggtatttgtaactctatcacttcggtacggtgggacgacatgactcttactcatgaattacgattaggctcttgcttctccacaacaaccccaaagttcatgaaagattgaagaatcaaacaaactggggagaagcaaagggcaagaagcgaggacctcataatgcgcgaaggaaattcggatagcccctatcaggcttgagtccctctaacagggagagcataggacagaactagggagacatccttactaagctgcagtttaagcaggaataataaaattagccaagtagccaactatattgctgcttccatgttttacccacgcataccgcgcattgaactgatgaatttggggctttacgccgtgcgtctcttacatatgcctattgaaaactcatataagtagggatattagcggaatttagcg

SEQ ID NO: 3667 - DNA, 1608 bp, Muscodor strobelii
  misc_feature: SGI cDNA ID NO. 560887
  misc_feature: Encodes the peptide sequence at SEQ ID NO 3668
atgggtcttgatatcttaacttctgggaagcaagaacaacgcatcccctcacttcaagtcggatctcttctccagtctttacctgacaagggtacattggtgaagtcttatttattgggcgacgatgccaggaatgcaattagggttatagatgatattaggcagtcgtgccattctaaaggtatttctgcccttgccgcatattggatcgaaaaatgttcgtcacaacacgagagctgtcgtcaatcgctgcccgatccagcaaactcttccgtctgcccgtctaggctcgtagatctcgtagactacgatccagaggccagtaactcgacatcctcagtcatcaaaactgttgaaacaaatggccgacagtatccttactgcgctctaagctatcgctgggactcaacggcatctggtcggctcacagttgataacctgaaagaattttccacggctataccgctctctgcagtatgctctgcagctctggatatctgtacgctggcgaagcagctaggtatccggtatgtctgggtagatgctttgtgcattgtgcaaggtgtcggcggagactggcacttagaagccagaaaaatggcggccatctattctaacgctatttttactctagccgtcattgatggcactcgtcttgaagaaatacaggccgttcctccatttttgttaggcctcaagactctcactcacaaaggaatagattggacacatcctgataccgtgtatagtatgcttttgaagactaataactttaaagcgagaccgaatggcatccttgatatacgcggctgggcactccaggagaagttactgtcaaagagagtcataagcttgacaaggattggtatattctgggattgtctatatcattcggcgtctggcagacggccactgggcctccgtggagacttctctccatcttttagggactcggatgatcgactcttcaagcgcattctgctcgaccaggcgttttcaaacagctcccacccttatgaaatctactggcactggaggaatgcagtgcagcagtataccaaacgtcaactatctcgacgcaccgatagatttgtcgctttagatgggatcgcacaccggattggcgcaattctcgatgacagctgccaacttggtatatggaaaaaggacgcaatacggttcctgatttggtctgttgaaccaaacgtacccgacccaccgaattcacaggagccaactatgagagggccgtcatggtcctggctatcaacaaatgaccagatctcatacaggctatggcatccgtttgaaaaatactcagagagcaaatttgagcaatttgtttgtgctgccgaggtgttgcagcttgatataactgttaatgatgaaaaagcactctccaagtttgatggtcgactcgtcatctgtggcccggtcatagaagcatacgtcattggtaacgagttgatgttccagaataaaattaggagttccgattcaagcgcatcgggatttgcgcggttggtacatcgcaagcctgtttgcgaacaagagcggcatgtgaaagaagccatgatgatgaccatcagtgcttgggggaatctctaa

SEQ ID NO: 3668 - protein, 535 aa, Muscodor strobelii
  misc_feature: SGI Peptide ID NO. 560887
  misc_feature (127)..(275): Pfam Id: PF06985 Pfam Desc: Heterokaryon incompatibility protein (HET)
  misc_feature (127)..(212): Pfam Id: PF06985 Pfam Desc: Heterokaryon incompatibility protein (HET)
  misc_feature (11)..(477): NCBI GI: 256723468 Blast Desc: NECHADRAFT_81075 [Nectria haematococca mpVI 77-13-4]
  misc_feature (53)..(430): NCBI GI: 159123464 Blast Desc: HET domain protein [Aspergillus fumigatus A1163]
  misc_feature (50)..(459): NCBI GI: 256728739 Blast Desc: NECHADRAFT_85989 [Nectria haematococca mpVI 77-13-4]
  misc_feature (38)..(436): NCBI GI: 46126655 Blast Desc: FG07705.1 [Gibberella zeae PH-1]
  misc_feature (64)..(423): NCBI GI: 256732304 Blast Desc: NECHADRAFT_80764 [Nectria haematococca mpVI 77-13-4]
  misc_feature (71)..(424): NCBI GI: 169623263 Blast Desc: SNOG_14868 [Phaeosphaeria nodorum SN15] gi|111056600|gb|EAT77720.1| SNOG_14868 [Phaeosphaeria nodorum SN15]
  misc_feature (44)..(436): NCBI GI: 46127525 Blast Desc: FG08140.1 [Gibberella zeae PH-1]
  misc_feature (70)..(432): NCBI GI: 46115468 Blast Desc: FG03576.1 [Gibberella zeae PH-1]
  misc_feature (28)..(430): NCBI GI: 171677566 Blast Desc: protein product [Podospora anserina] gi|170936851|emb|CAP61509.1| protein product [Podospora anserina]
  misc_feature (65)..(429): NCBI GI: 256720581 Blast Desc: NECHADRAFT_85412 [Nectria haematococca mpVI 77-13-4]
MGLDILTSGKQEQRIPSLQVGSLLQSLPDKGTLVKSYLLGDDARNAIRVIDDIRQSCHSKGISALAAYWIEKCSSQHESCRQSLPDPANSSVCPSRLVDLVDYDPEASNSTSSVIKTVETNGRQYPYCALSYRWDSTASGRLTVDNLKEFSTAIPLSAVCSAALDICTLAKQLGIRYVWVDALCIVQGVGGDWHLEARKMAAIYSNAIFTLAVIDGTRLEEIQAVPPFLLGLKTLTHKGIDWTHPDTVYSMLLKTNNFKARPNGILDIRGWALQEKLLSKRVISLTRIGIFWDCLYHSASGRRPLGLRGDFSPSFRDSDDRLFKRILLDQAFSNSSHPYEIYWHWRNAVQQYTKRQLSRRTDRFVALDGIAHRIGAILDDSCQLGIWKKDAIRFLIWSVEPNVPDPPNSQEPTMRGPSWSWLSTNDQISYRLWHPFEKYSESKFEQFVCAAEVLQLDITVNDEKALSKFDGRLVICGPVIEAYVIGNELMFQNKIRSSDSSASGFARLVHRKPVCEQERHVKEAMMMTISAWGNL

SEQ ID NO: 3669 - DNA, 1809 bp, Muscodor strobelii
  misc_feature: SGI cDNA ID NO. 560888
  misc_feature: Encodes the peptide sequence at SEQ ID NO 3670
atggtctttgacacatggtctgattcgtcgcgggcaggacagagtcatcagtcaaatttatatccagtgccagaagaaaagggccgttcgggagactatgagagcgatcagcaaggcgaagcttcggcgtcccgtgccaggctgaacagagacaacatccgatgtctcgacgggctccgtggtatcgcgtgcttactggttttcaattaccactttctgtggccatggacaccctcgatcatgttgggctatggggcgacaccacccctagctcctgagccttatcaggcatggacctcgctgcctatcatgtgcttatggcagcgcggtcgcccgatggttgctatcttctttgcgatttccggatatgtcgttagccgccacgtcctgcgtctgatacaacagagaagactggaagcggcttatcagcgccttgcgtcaaacgtattccgacgagcgtttcgtctttacatccctcccacgatcagcatgctcatcgtagctctgttagtgcagatgggcgcgttcaagtctaacatggctatttatcagggccccgactcaatatatatcaatggaacagtcacaaccgcgttgatacgtcaccactgtgtcaagaaaaccgttcacgttaacggagtatcagggatgattgatcatatgaactggcacaacccgatatatatgggcaatgctagcaccgacttggacttgtgtctcaacgtcacgtcaagtttagcaggctcgacgagcgtttatgcacatgcatacaacttcgagaaaagatatgcgaagattttaaacgacaccacaagactgacaaagtttgaaaagcatgagtacactacgccatataacggcccagcaccattggatatcgtcaatggaaccaacggtacctacggagttcttaaggcatgggttgagcttggcgggatgtgggaagagcatcccatcatccacgacaatatcacatacgccatgcaaaacttcacacgcgtctacgctgagtgggcgaatcccttcaatttcaacccctatcacacgcggtacgacccgcatacattcactatcccaatggaattccgcgggtcgatgattgtgtatatcttcctcctaggaacagcggccttgaaagtgaaatggcggttgggcctagctggtattatatccgcctacagcatggtcttcggacgctgggacgtcgcgacgttcatgggtgggaccctcctctcggaactcgatgtcaggctcccttatagccggcacgaaggttctcacctccaaccccccgtgaccggtgccagcaatagaaacgaccatagccggtcgtcattcaaatccgttctaacatggtggataacactcatcgccgccctctacctactctcctaccctgacgctgcagcagagtacacgccaggctacatcgtcctcgcctacctaacaccccggtactacgggccaatcgcagcctgggccttctacaactctatcggggccctaatgctcctcccctgcatcctacgtagtccatttctccgcagtgccctcgaaacccggttcgcgcaatacatgggcaggatcagcttctcattttacctcatccacgggcccgtgctacatagtctcggattctggatcatgccaagactcttcgagcgatttgatagacctgttggctatctcgttggctatgctatctgtatgagcgtgtcgctttatctttcgggctggtggtacaagcacattgatcgatggagcacgactattgggaagacagtggagcagaggctcctggactcttga

SEQ ID NO: 3670 - protein, 602 aa, Muscodor strobelii
  misc_feature: SGI Peptide ID NO. 560888
  misc_feature (53)..(145): Pfam Id: PF01757 Pfam Desc: Acyltransferase family
  misc_feature (22)..(599): NCBI GI: 256721942 Blast Desc: NECHADRAFT_78305 [Nectria haematococca mpVI 77-13-4]
  misc_feature (5)..(602): NCBI GI: 46115828 Blast Desc: FG03756.1 [Gibberella zeae PH-1]
  misc_feature (34)..(601): NCBI GI: 261355028 Blast Desc: conserved [Verticillium albo-atrum VaMs.102]
  misc_feature (298)..(600): NCBI GI: 255940642 Blast Desc: Pc16g07650 [Penicillium chrysogenum Wisconsin 54-1255] gi|211585713|emb|CAP93435.1| Pc16g07650 [Penicillium chrysogenum Wisconsin 54-1255]
  misc_feature (315)..(600): NCBI GI: 67522479 Blast Desc: AN1696.2 [Aspergillus nidulans FGSC A4] gi|40745660|gb|EAA64816.1| AN1696.2 [Aspergillus nidulans FGSC A4] gi|259487037|tpe|CBF85387.1| TPA: acyltransferase, nidulans
  misc_feature (298)..(600): NCBI GI: 70994264 Blast Desc: acyltransferase [Aspergillus fumigatus Af293] gi|66849608|gb|EAL89936.1| acyltransferase, [Aspergillus fumigatus Af293] gi|159125113|gb|EDP50230.1| acyltransferase,
  misc_feature (298)..(600): NCBI GI: 115397867 Blast Desc: conserved [Aspergillus terreus NIH2624] gi|114192716|gb|EAU34416.1| conserved [Aspergillus terreus NIH2624]
  misc_feature (298)..(600): NCBI GI: 145241818 Blast Desc: An09g02410 [Aspergillus niger] gi|134078096|emb|CAK40178.1| protein product [Aspergillus niger]
  misc_feature (310)..(600): NCBI GI: 242800850 Blast Desc: acyltransferase, [Talaromyces stipitatus ATCC 10500] gi|218717009|gb|EED16430.1| acyltransferase, [Talaromyces stipitatus ATCC 10500]
  misc_feature (310)..(600): NCBI GI: 212540738 Blast Desc: acyltransferase, [Penicillium marneffei ATCC 18224] gi|210067823|gb|EEA21915.1| acyltransferase, [Penicillium marneffei ATCC 18224]
MVFDTWSDSSRAGQSHQSNLYPVPEEKGRSGDYESDQQGEASASRARLNRDNIRCLDGLRGIACLLVFNYHFLWPWTPSIMLGYGATPPLAPEPYQAWTSLPIMCLWQRGRPMVAIFFAISGYVVSRHVLRLIQQRRLEAAYQRLASNVFRRAFRLYIPPTISMLIVALLVQMGAFKSNMAIYQGPDSIYINGTVTTALIRHHCVKKTVHVNGVSGMIDHMNWHNPIYMGNASTDLDLCLNVTSSLAGSTSVYAHAYNFEKRYAKILNDTTRLTKFEKHEYTTPYNGPAPLDIVNGTNGTYGVLKAWVELGGMWEEHPIIHDNITYAMQNFTRVYAEWANPFNFNPYHTRYDPHTFTIPMEFRGSMIVYIFLLGTAALKVKWRLGLAGIISAYSMVFGRWDVATFMGGTLLSELDVRLPYSRHEGSHLQPPVTGASNRNDHSRSSFKSVLTWWITLIAALYLLSYPDAAAEYTPGYIVLAYLTPRYYGPIAAWAFYNSIGALMLLPCILRSPFLRSALETRFAQYMGRISFSFYLIHGPVLHSLGFWIMPRLFERFDRPVGYLVGYAICMSVSLYLSGWWYKHIDRWSTTIGKTVEQRLLDS

SEQ ID NO: 3671 - DNA, 2196 bp, Muscodor strobelii
  misc_feature: SGI EST ID NO. CUFF.9237.0
  misc_feature: Variant of the nucleotide sequence at SEQ ID NO 3669
gtaattctcattttcttggacgacattcaagctgattgagctgatcaatagtatcaaatttggagcggaaaataaactacgaagccttcgtttccccgagagacctcttagttctgacagcgggacttcactacgctcattatcgaacacgcattaattccgtcgcattcccattcggagccagctttcactcacttagccgcttttggagcaagcctgatgagtgctaggtgaatctcgtgtcgcccgtgatcagaatcgcatcaagacatcatggtctttgacacatggtctgattcgtcgcgggcaggacagagtcatcagtcaaatttatatccagtgccagaagaaaagggccgttcgggagactatgagagcgatcagcaaggcgaagcttcggcgtcccgtgccaggctgaacagagacaacatccgatgtctcgacgggctccgtggtatcgcgtgcttactggttttcaattaccactttctgtggccatggacaccctcgatcatgttgggctatggggcgacaccacccctagctcctgagccttatcaggcatggacctcgctgcctatcatgtgcttatggcagcgcggtcgcccgatggttgctatcttctttgcgatttccggatatgtcgttagccgccacgtcctgcgtctgatacaacagagaagactggaagcggcttatcagcgccttgcgtcaaacgtattccgacgagcgtttcgtctttacatccctcccacgatcagcatgctcatcgtagctctgttagtgcagatgggcgcgttcaagtctaacatggctatttatcagggccccgactcaatatatatcaatggaacagtcacaaccgcgttgatacgtcaccactgtgtcaagaaaaccgttcacgttaacggagtatcagggatgattgatcatatgaactggcacaacccgatatatatgggcaatgctagcaccgacttggacttgtgtctcaacgtcacgtcaagtttagcaggctcgacgagcgtttatgcacatgcatacaacttcgagaaaagatatgcgaagattttaaacgacaccacaagactgacaaagtttgaaaagcatgagtacactacgccatataacggcccagcaccattggatatcgtcaatggaaccaacggtacctacggagttcttaaggcatgggttgagcttggcgggatgtgggaagagcatcccatcatccacgacaatatcacatacgccatgcaaaacttcacacgcgtctacgctgagtgggcgaatcccttcaatttcaacccctatcacacgcggtacgacccgcatacattcactatcccaatggaattccgcgggtcgatgattgtgtatatcttcctcctaggaacagcggccttgaaagtgaaatggcggttgggcctagctggtattatatccgcctacagcatggtcttcggacgctgggacgtcgcgacgttcatgggtgggaccctcctctcggaactcgatgtcaggctcccttatagccggcacgaaggttctcacctccaaccccccgtgaccggtgccagcaatagaaacgaccatagccggtcgtcattcaaatccgttctaacatggtggataacactcatcgccgccctctacctactctcctaccctgacgctgcagcagagtacacgccaggctacatcgtcctcgcctacctaacaccccggtactacgggccaatcgcagcctgggccttctacaactctatcggggccctaatgctcctcccctgcatcctacgtagtccatttctccgcagtgccctcgaaacccggttcgcgcaatacatgggcaggatcagcttctcattttacctcatccacgggcccgtgctacatagtctcggattctggatcatgccaagactcttcgagcgatttgatagacctgttggctatctcgttggctatgctatctgtatgagcgtgtcgctttatctttcgggctggtggtacaagcacattgatcgatggagcacgactattgggaagacagtggagcagaggctcctggactcttgagcatagcggggatcttgaaagattgattggtcttgcgggtcgagacttgactgacttgcgaggcgttgtagaaatatcacttgtatagacatagacttgtatatgaaagctttc

SEQ ID NO: 3672 - DNA, 957 bp, Muscodor strobelii
  misc_feature: SGI cDNA ID NO. 560889
  misc_feature: Encodes the peptide sequence at SEQ ID NO 3673
atggacggcgacgtccttgaagacggcgaggagcgcaattcttatgatcgttgccggtcagccatccgagaaggatccatctctgccctaagagactgtctggcatatgcgaagtcaccgcttggtgtcgacgactatccgcagtttcgcttggatattttccacgaggtgctcaatcaacactcaataccactcatcttacacatgttggacgcagagggagttccagtgcaggatgtgcaccccctcgacatacacgattgggccacagaggcactcatcgatgccctgctctcgcgcgggtgggacgtcaacacacagacacccggtataggccgcggttatcgtctgattgaccatctcgtcaagctgcgactgggaaaagaggacctcgcccgttggctcattgacgagaggggcgctgccgtcaatgtcgagcacaacacacccaaccaacgcagcccgccgccaatcctggaaatctgcgctgggttcggcacgcttgcaatatttcagttcctcgaagctagaggagctttcttttcgccgcgtgtcattcatgaggccgttgagatggccgccgacacgggagtacaccccttggacgacagccgcctcccggctaccgatgcggattcgaggcgcaggcgtgcccgagccgagatgttggtttatcttattgagtaccgcggtcttgatgtgaacgtgatagatgagcacgtccccccagagagacacttgctcctaccacaggccactgccatatcctatgctgcccgctgtcccaaaggcgtcgcggttgtccgatggttacttgaacacggtgcagatcctacactgaagagcggcacgtcgagagatgctctgtatcatgcaagggaggcaagttgtaatgaggtgctcgttgttttggaagagtggttgcaagagaaaaacgtaggaccgcgctcttcttga

SEQ ID NO: 3673 - protein, 318 aa, Muscodor strobelii
  misc_feature: SGI Peptide ID NO. 560889
  misc_feature (53)..(306): NCBI GI: 242825487 Blast Desc: hspc200, [Talaromyces stipitatus ATCC 10500] gi|218712268|gb|EED11694.1| hspc200, [Talaromyces stipitatus ATCC 10500]
  misc_feature (53)..(306): NCBI GI: 242825491 Blast Desc: hspc200, [Talaromyces stipitatus ATCC 10500] gi|218712269|gb|EED11695.1| hspc200, [Talaromyces stipitatus ATCC 10500]
  misc_feature (66)..(309): NCBI GI: 255949452 Blast Desc: Pc22g15770 [Penicillium chrysogenum Wisconsin 54-1255] gi|211592510|emb|CAP98865.1| Pc22g15770 [Penicillium chrysogenum Wisconsin 54-1255]
MDGDVLEDGEERNSYDRCRSAIREGSISALRDCLAYAKSPLGVDDYPQFRLDIFHEVLNQHSIPLILHMLDAEGVPVQDVHPLDIHDWATEALIDALLSRGWDVNTQTPGIGRGYRLIDHLVKLRLGKEDLARWLIDERGAAVNVEHNTPNQRSPPPILEICAGFGTLAIFQFLEARGAFFSPRVIHEAVEMAADTGVHPLDDSRLPATDADSRRRRARAEMLVYLIEYRGLDVNVIDEHVPPERHLLLPQATAISYAARCPKGVAVVRWLLEHGADPTLKSGTSRDALYHAREASCNEVLVVLEEWLQEKNVGPRSS

SEQ ID NO: 3674 - DNA, 914 bp, Muscodor strobelii
  misc_feature: SGI EST ID NO. CUFF.9252.0
  misc_feature: Variant of the nucleotide sequence at SEQ ID NO 3672
cgcaattcttatgatcgttgccggtcagccatccgagaaggatccatctctgccctaagagactgtctggcatatgcgaagtcaccgcttggtgtcgacgactatccgcagtttcgcttggatattttccacgaggtgctcaatcaacactcaataccactcatcttacacatgttggacgcagagggagttccagtgcaggatgtgcaccccctcgacatacacgattgggccacagaggcactcatcgatgccctgctctcgcgcgggtgggacgtcaacacacagacacccggtataggccgcggttatcgtctgattgaccatctcgtcaagctgcgactgggaaaagaggacctcgcccgttggctcattgacgagaggggcgctgccgtcaatgtcgagcacaacacacccaaccaacgcagcccgccgccaatcctggaaatctgcgctgggttcggcacgcttgcaatatttcagttcctcgaagctagaggagctttcttttcgccgcgtgtcattcatgaggccgttgagatggccgccgacacgggagtacaccccttggacgacagccgcctcccggctaccgatgcggattcgaggcgcaggcgtgcccgagccgagatgttggtttatcttattgagtaccgcggtcttgatgtgaacgtgatagatgagcacgtccccccagagagacacttgctcctaccacaggccactgccatatcctatgctgcccgctgtcccaaaggcgtcgcggttgtccgatggttacttgaacacggtgcagatcctacactgaagagcggcacgtcgagagatgctctgtatcatgcaagggaggcaagttgtaatgaggtgctcgttgttttggaagagtggttgcaagagaaaaacgtaggaccgcg

SEQ ID NO: 3675 - DNA, 1425 bp, Muscodor strobelii
  misc_feature: SGI cDNA ID NO. 560890
  misc_feature: Encodes the peptide sequence at SEQ ID NO 3676
atggcttccatacctccacacggtgtctccgacaaggttgcaataacatgccaagccctccaagaccaaggcttaaacgtcacaactgtagcccaatgctcagactgcgtcgtggagcagcagacaccatggtctgaagcgtgttggctacctgccacctgttatatacgaccgcggaacgccaatgaaattgctgctactctgactacattgacgaagaatggaattgttttcgctgtcagaagcactggtcataaccctatccccaaagtcagcagtgtggatcaatatggcgttttaatagacttacagaacatcaagtctttatcattacaagaagatggaacggtacagataggtggtggtgcgaaatggggcgatatctacacattccttgagaatcgaaagcgatccattattggcgcgcgcaacttgggcgttggcgtaggaggattcacgcttgggggaggcatgccagcgtttcccaatatccacgggctacctgcagacaatgtcaaaaatttccagattgttcttggagactcttcgatcatcaacgccaatgcgaacataaacagcgacctttggaaggcactgaagggcggcggcactaacttcggtatcgtaacacgatttgatattcagacatatccactcctgtccactaaatacgcggtcaatgtatacgatcccgccgactatgtgagcattctcaaagccactgttcaagtccaagaatcgatggagactgatcccaggatcgggatattcgtaagcttccagccccaggcggtatctgttgggctgctatatgccgatacaccacgtgagatacccaaagctttcgacccttttctccaattgagcagtcttctcatggaggcggttccgtggacggacggcacgatcaaatcactagtggatagtatccaatataatgagcccagcgccagacgtacgcagtcatcgacaaccatgaaggtcgacctggatctttacataaaggcacatgagctttacgtcgaaaaaaacaagacatctgtgtccagtatcttctatacgatccagccggtctcatcacgcgccgtacagcaacgcgaagataagggcggaaatataatgggtatccctagagtatctcagaactggtgggctggggcgagttcgtggcacgatgccagtctagacgaaacggccttcagagaagttgatgagctccgaattgcggttgaagatgctgctgaatcacaggggttgaaacttgagtataatttcatgaacgatgcaagcccaattcaaacagtgttggacacatatggcgccgcgaacctgcagctgatgagagaggtatcagcgaagtacgacaccaaaaagctgtttcaaacacatcaaaatggtggttacctccttcgaaacattatgtag

SEQ ID NO: 3676 - protein, 474 aa, Muscodor strobelii
  misc_feature: SGI Peptide ID NO. 560890
  misc_feature (52)..(188): Pfam Id: PF01565 Pfam Desc: FAD binding domain
  misc_feature (43)..(472): NCBI GI: 256723541 Blast Desc: NECHADRAFT_42078 [Nectria haematococca mpVI 77-13-4]
  misc_feature (34)..(473): NCBI GI: 85090595 Blast Desc: NCU09273 [Neurospora crassa OR74A] gi|28919859|gb|EAA29256.1| conserved [Neurospora crassa OR74A]
  misc_feature (1)..(472): NCBI GI: 145254822 Blast Desc: An18g03080 [Aspergillus niger] gi|134084352|emb|CAK48692.1| protein product [Aspergillus niger]
  misc_feature (158)..(472): NCBI GI: 242764197 Blast Desc: TSTA_067660 [Talaromyces stipitatus ATCC 10500] gi|218723917|gb|EED23334.1| TSTA_067660 [Talaromyces stipitatus ATCC 10500]
  misc_feature (39)..(470): NCBI GI: 242821331 Blast Desc: 6-hydroxy-D-nicotine oxidase, [Talaromyces stipitatus ATCC 10500] gi|218712579|gb|EED12004.1| 6-hydroxy-D-nicotine oxidase, [Talaromyces stipitatus ATCC 10500]
  misc_feature (14)..(473): NCBI GI: 46138189 Blast Desc: FG10609.1 [Gibberella zeae PH-1]
  misc_feature (5)..(473): NCBI GI: 116201111 Blast Desc: CHGG_08440 [Chaetomium globosum CBS 148.51] gi|88176958|gb|EAQ84426.1| CHGG_08440 [Chaetomium globosum CBS 148.51]
  misc_feature (39)..(473): NCBI GI: 145230445 Blast Desc: An01g11180 [Aspergillus niger] gi|134055649|emb|CAK44023.1| protein product [Aspergillus niger]
  misc_feature (44)..(467): NCBI GI: 46138193 Blast Desc: FG10611.1 [Gibberella zeae PH-1]
  misc_feature (39)..(468): NCBI GI: 154296896 Blast Desc: BC1G_12537 [Botryotinia fuckeliana B05.10] gi|150843191|gb|EDN18384.1| BC1G_12537 [Botryotinia fuckeliana B05.10]
MASIPPHGVSDKVAITCQALQDQGLNVTTVAQCSDCVVEQQTPWSEACWLPATCYIRPRNANEIAATLTTLTKNGIVFAVRSTGHNPIPKVSSVDQYGVLIDLQNIKSLSLQEDGTVQIGGGAKWGDIYTFLENRKRSIIGARNLGVGVGGFTLGGGMPAFPNIHGLPADNVKNFQIVLGDSSIINANANINSDLWKALKGGGTNFGIVTRFDIQTYPLLSTKYAVNVYDPADYVSILKATVQVQESMETDPRIGIFVSFQPQAVSVGLLYADTPREIPKAFDPFLQLSSLLMEAVPWTDGTIKSLVDSIQYNEPSARRTQSSTTMKVDLDLYIKAHELYVEKNKTSVSSIFYTIQPVSSRAVQQREDKGGNIMGIPRVSQNWWAGASSWHDASLDETAFREVDELRIAVEDAAESQGLKLEYNFMNDASPIQTVLDTYGAANLQLMREVSAKYDTKKLFQTHQNGGYLLRNIM

SEQ ID NO: 3677 - DNA, 393 bp, Muscodor strobelii
  misc_feature: SGI cDNA ID NO. 560891
  misc_feature: Encodes the peptide sequence at SEQ ID NO 3678
atgcgctattctataattgctctcagcgctctcagcgcgtcgttagttgcagctgctcctgttgtcgccccagcctctgctcccatcgctcttgataagaaagaggaagccgacaccgcttactggaaggtttatcctgacaagcgtgaagaagcagatactgcatactggaaggtttaccccgacagacgcgaggaagccgacactgcgtattggaaagtctactctgataagagggaagaggcagacacggcctactggaaggtctatccagacaagcgggaggaggctgatactgcgtactggaaagtgtatcctgataagagagaggaggcagacaccgcatattggaaggtgtaccccgacaagcgagaaagcactattgccgagtag

SEQ ID NO: 3678 - protein, 130 aa, Muscodor strobelii
  misc_feature: SGI Peptide ID NO. 560891
MRYSIIALSALSASLVAAAPVVAPASAPIALDKKEEADTAYWKVYPDKREEADTAYWKVYPDRREEADTAYWKVYSDKREEADTAYWKVYPDKREEADTAYWKVYPDKREEADTAYWKVYPDKRESTIAE

SEQ ID NO: 3679 - DNA, 882 bp, Muscodor strobelii
  misc_feature: SGI cDNA ID NO. 560892
  misc_feature: Encodes the peptide sequence at SEQ ID NO 3680
atggctgagccctttggtgtagtttctggtgctttgagcattgctgctcttttcaccaagtgcgtcacatgtttcgagtacatccaacttggtcgacattttgcggaagattaccagcgatgtcagataatgctcgacactctcaatttgcgcctctgccgatggggtgatgctgtgggaatctatgagaaaaacccccgctttcttcacaatcacaccaacggaccctatgttcaacaagctcaagccatcttggcccaactagaacatctcttcgggaagttagaggaggcatctaagcagtatgcattaggcaaatcaaacgaggatcttgaggtactcaagcttgaagatctggaccttgtcaatcgcaacgtgcacaacaagctccttgacgccagcattcggtatcgacaaaaatgcactagtatggttaagaagacgaagtgggcactttacgacaataaaaacttcgagaagctcgtgcggtacgccgtggaacttacggagcaactcgaaaaggtgtggccaacagatgaacttgaaccaattttggcgggcatggcacgcatggaaattgacgacgtcactgatgcgcccagcctggaagttttgagcgaagttaccagagatacagattccattctgtcagaaactacagcgcagagattgcaatcgtttgaaacacgcaatgaagtcaacaatgcccacaccgaagagaatgctaaagttcacgttggggattgggtcgacacaagggcggcgatcaaccgaaatctggcttctcccagtgcaacatggaacactgtagggtctctcgccgccagaagagactccaaagtccaaattggcaatcgttttggaggagattctattttctga

SEQ ID NO: 3680 - protein, 293 aa, Muscodor strobelii
  misc_feature: SGI Peptide ID NO. 560892
  misc_feature (1)..(289): NCBI GI: 171676736 Blast Desc: protein product [Podospora anserina] gi|2677672|gb|AAB88771.1| big S [Podospora anserina] gi|170936435|emb|CAP61092.1| protein product [Podospora anserina]
  misc_feature (1)..(289): NCBI GI: 2739337 Blast Desc: small s protein [Podospora anserina]
  misc_feature (1)..(289): NCBI GI: 234864 Blast Desc: s gene 30 kDa polypeptide [Podospora anserina=fungus, Peptide, 289 aa]
  misc_feature (1)..(288): NCBI GI: 256733801 Blast Desc: NECHADRAFT_99486 [Nectria haematococca mpVI 77-13-4]
  misc_feature (1)..(289): NCBI GI: 228211 Blast Desc: NECHADRAFT_99486 [Nectria haematococca mpVI 77-13-4]
  misc_feature (1)..(289): NCBI GI: 228212 Blast Desc: NECHADRAFT_99486 [Nectria haematococca mpVI 77-13-4]
  misc_feature (1)..(288): NCBI GI: 256724752 Blast Desc: NECHADRAFT_48298 [Nectria haematococca mpVI 77-13-4]
  misc_feature (1)..(293): NCBI GI: 46138171 Blast Desc: FG10600.1 [Gibberella zeae PH-1]
  misc_feature (1)..(289): NCBI GI: 256728996 Blast Desc: NECHADRAFT_79833 [Nectria haematococca mpVI 77-13-4]
  misc_feature (1)..(289): NCBI GI: 238845693 Blast Desc: small s protein [Microsporum canis CBS 113480]
MAEPFGVVSGALSIAALFTKCVTCFEYIQLGRHFAEDYQRCQIMLDTLNLRLCRWGDAVGIYEKNPRFLHNHTNGPYVQQAQAILAQLEHLFGKLEEASKQYALGKSNEDLEVLKLEDLDLVNRNVHNKLLDASIRYRQKCTSMVKKTKWALYDNKNFEKLVRYAVELTEQLEKVWPTDELEPILAGMARMEIDDVTDAPSLEVLSEVTRDTDSILSETTAQRLQSFETRNEVNNAHTEENAKVHVGDWVDTRAAINRNLASPSATWNTVGSLAARRDSKVQIGNRFGGDSIF

SEQ ID NO: 3681 - DNA, 1455 bp, Muscodor strobelii
  misc_feature: SGI cDNA ID NO. 560893
  misc_feature: Encodes the peptide sequence at SEQ ID NO 3682
atggctcagtataaccaagtcggctccgttgtggcttcgcaacgaggccacgtccatattgggaataattattacacctcagatgaaataaggcatatgggtcagaagaacttcgtcatatcttatgtttggtgtactgatgtgtttaaagtgtcagactcttcgagacaaccatcggcaaatattccctacactctcgatgacgagcagtacgttgagcgcggcgatcttcttattaaaacacaggaccttctagcaaaaagaggttcttgcgctgctctctgcggtcttggtggtgtagggaagtctcaaattgctatcaaatatgccagtgatatttacaaataccacaaaaatattcctgagctaagcccaatatctgtctactggatccatgcagccacccagaaaagagttgaagagggattcaaggcaatcgcgcgtgatcacaatttacctggacgtgatgagaagggagagaaactgatggaaatggtttgccattggcttgcgaactcacgaaatggcaattggctcatagtgttggacagcgccgacgatgcgggtgtattctggggcgctggagttgatgtcgtaaagaatactaagaatcgaaagtatccaaatggtatagcaagatatctgcctcgcagtccgcatgggtcgattctcgtcactacaagagacaaaagtatcggtccgaaactagccgggtacgatcaccaggtgatccaagtcaacccaatggacagcagtcttgcattgagccttctcaaaacgaggatgcgtgttcgcttgaatgtggatctgccacatggagaagagttggtgagcgaactaaattacatcccgttagccatcagccaggcggcggcctgtctgtgtgaaaaggggtggtctgttcaagaatactgcaatcagttgagaacctggcgtcgatccaagcttctgcactacaagcaagacgagctccagcgagatccgagtgcagaaaacgcaattgcgaggacatggtacatttctttcgaacagatccgttctcaacgagagtctgcgtgtgatttgctcgcggtcatgagcttcctcaactcaaaaaatattcctgggcttctactcaatgtctgggcacgaactacaagtagggtatatggcaaagatatcgagctagtggaggacatcgaagagggtggtgatgaaattgagagccataacgacagatttgacgacgatattcgactcctgtgtagcttcggtatgatcagcgtcaacaaatcaagacgcgtcgaggggggcatcttcgagatgcacgacctagttcagtggtgtatacaaagatggctgcgaaaaaccacggaagtgtttcggttccaagccgactactatgaggatgttgccgatgctatgatgcagtcgatcctccaccctgaggttcccatggccttgcagaagaaatga

SEQ ID NO: 3682 - protein, 484 aa, Muscodor strobelii
  misc_feature: SGI Peptide ID NO. 560893
  misc_feature (58)..(472): NCBI GI: 116205301 Blast Desc: CHGG_10534 [Chaetomium globosum CBS 148.51] gi|88176662|gb|EAQ84130.1| CHGG_10534 [Chaetomium globosum CBS 148.51]
  misc_feature (58)..(472): NCBI GI: 116204683 Blast Desc: CHGG_10225 [Chaetomium globosum CBS 148.51] gi|88176353|gb|EAQ83821.1| CHGG_10225 [Chaetomium globosum CBS 148.51]
  misc_feature (57)..(465): NCBI GI: 116191323 Blast Desc: CHGG_05379 [Chaetomium globosum CBS 148.51] gi|88181292|gb|EAQ88760.1| CHGG_05379 [Chaetomium globosum CBS 148.51]
  misc_feature (58)..(472): NCBI GI: 116182196 Blast Desc: CHGG_01726 [Chaetomium globosum CBS 148.51] gi|88186023|gb|EAQ93491.1| CHGG_01726 [Chaetomium globosum CBS 148.51]
  misc_feature (58)..(464): NCBI GI: 242761252 Blast Desc: TPR domain protein [Talaromyces stipitatus ATCC 10500] gi|218723340|gb|EED22757.1| TPR domain protein [Talaromyces stipitatus ATCC 10500]
  misc_feature (58)..(472): NCBI GI: 116205095 Blast Desc: CHGG_10431 [Chaetomium globosum CBS 148.51] gi|88176559|gb|EAQ84027.1| CHGG_10431 [Chaetomium globosum CBS 148.51]
  misc_feature (50)..(464): NCBI GI: 242816761 Blast Desc: kinesin, [Talaromyces stipitatus ATCC 10500] gi|218713276|gb|EED12700.1| kinesin, [Talaromyces stipitatus ATCC 10500]
  misc_feature (50)..(464): NCBI GI: 242795697 Blast Desc: kinesin, [Talaromyces stipitatus ATCC 10500] gi|218719233|gb|EED18653.1| kinesin, [Talaromyces stipitatus ATCC 10500]
  misc_feature (49)..(458): NCBI GI: 255934897 Blast Desc: Pc13g00220 [Penicillium chrysogenum Wisconsin 54-1255] gi|211583095|emb|CAP91091.1| Pc13g00220 [Penicillium chrysogenum Wisconsin 54-1255]
  misc_feature (68)..(447): NCBI GI: 212541564 Blast Desc: TPR domain protein [Penicillium marneffei ATCC 18224] gi|210068236|gb|EEA22328.1| TPR domain protein [Penicillium marneffei ATCC 18224]
MAQYNQVGSVVASQRGHVHIGNNYYTSDEIRHMGQKNFVISYVWCTDVFKVSDSSRQPSANIPYTLDDEQYVERGDLLIKTQDLLAKRGSCAALCGLGGVGKSQIAIKYASDIYKYHKNIPELSPISVYWIHAATQKRVEEGFKAIARDHNLPGRDEKGEKLMEMVCHWLANSRNGNWLIVLDSADDAGVFWGAGVDVVKNTKNRKYPNGIARYLPRSPHGSILVTTRDKSIGPKLAGYDHQVIQVNPMDSSLALSLLKTRMRVRLNVDLPHGEELVSELNYIPLAISQAAACLCEKGWSVQEYCNQLRTWRRSKLLHYKQDELQRDPSAENAIARTWYISFEQIRSQRESACDLLAVMSFLNSKNIPGLLLNVWARTTSRVYGKDIELVEDIEEGGDEIESHNDRFDDDIRLLCSFGMISVNKSRRVEGGIFEMHDLVQWCIQRWLRKTTEVFRFQADYYEDVADAMMQSILHPEVPMALQKK

SEQ ID NO: 3683 - DNA, 335 bp, Muscodor strobelii
  misc_feature: SGI EST ID NO. CUFF.9273.0
  misc_feature: Variant of the nucleotide sequence at SEQ ID NO 3681
tcctgggcttctactcaatgtctgggcacgaactacaagtagggtatatggcaaagatatcgagctagtggaggacatcgaagagggtggtgatgaaattgagagccataacgacagatttgacgacgatattcgactcctgtgtagcttcggtatgatcagcgtcaacaaatcaagacgcgtcgaggggggcatcttcgagatgcacgacctagttcagtggtgtatacaaagatggctgcgaaaaaccacggaagtgtttcggttccaagccgactactatgaggatgttgccgatgctatgatgcagtcgatcctccaccctgaggttccca

SEQ ID NO: 3684 - DNA, 1128 bp, Muscodor strobelii
  misc_feature: SGI cDNA ID NO. 560894
  misc_feature: Elevated expression when VOC is produced
  misc_feature: Encodes the peptide sequence at SEQ ID NO 3685
atgatcggtcacatatctccgataactattctaggggcggccgtctccgttgttagtggtgtatccgccctcgccaagctctccgaagttgtcgtcttcacgccggacagtaactatacggatccgcgggtgctctatgcgcggactgcgcagcttcccaataacgacatactggcgacatgggagaactacagtcctgagcccccgcctgtgtacttccctatctacaaatcaagcgattccggtgcaacctggactgagattgcacgcgttcaagatcagggctatggctacggtctgcgctaccagcccttcctctacgtgctgccggaggccatcgccggatacgacgccggcactgtgcttctagctgggtcgtcaattccgacggatttgtcaagcacgcagctggacttgtatgcgtcgaccgatagtggcgtgacgtggacgtttgtgagccacgtagccgcgggagggaaggcggtacccgataatggattgacgcccgtatgggagccattcatgctgctacacgagggcacactcatctactactactcggaccagcgggacccggcgcacggccaaaaactcgtacaccagacctcgactgacctcgtcacctggggtgatgtcgtcgacgatgccgcgtaccctacctatacagatcgccccggcatgcccactgttgcgctgctgcccaacggcgagtacatctacacttatgagtacggtggtggtgagaacccgacgagctcggattacacgttccccgtgtactaccgcatatcgtctgaccccgaggcatttggaagtgtggaagaccatcccattcagacctctgacggcacggtcccaaacggctcgccttacgtggtgtggactccagccggcggtgacaacggtaccatcatcgtgtcttccgggtgctgctcagatgtctttattaaccaggctttgggtgcggaggatgcatgggaatcggtttccacgccggaaggaaactcatacactcggtccttactcgtcttccaagaggaccccaattactacctaatcgcgggtgggggcgttctccctcccagtacgaccaatcgagtcactgtgagcgtggtgactgtggaataa

SEQ ID NO: 3685 - protein, 375 aa, Muscodor strobelii
  misc_feature: SGI Peptide ID NO. 560894
  misc_feature (15)..(374): NCBI GI: 169595628 Blast Desc: SNOG_00558 [Phaeosphaeria nodorum SN15] gi|111070933|gb|EAT92053.1| SNOG_00558 [Phaeosphaeria nodorum SN15]
  misc_feature (10)..(374): NCBI GI: 154294331 Blast Desc: BC1G_13938 [Botryotinia fuckeliana B05.10] gi|150844777|gb|EDN19970.1| BC1G_13938 [Botryotinia fuckeliana B05.10]
  misc_feature (30)..(375): NCBI GI: 119480113 Blast Desc: BNR/Asp-box repeat protein [Neosartorya fischeri NRRL 181] gi|119408239|gb|EAW18188.1| BNR/Asp-box repeat protein [Neosartorya fischeri NRRL 181]
  misc_feature (9)..(374): NCBI GI: 189209439 Blast Desc: BNR/Asp-box repeat domain containing protein [Pyrenophora tritici-repentis Pt-1C-BFP] gi|187977145|gb|EDU43771.1| BNR/Asp-box repeat domain containing
  misc_feature (22)..(374): NCBI GI: 156039411 Blast Desc: SS1G_11842 [Sclerotinia sclerotiorum 1980] gi|154697579|gb|EDN97317.1| SS1G_11842 [Sclerotinia sclerotiorum 1980]
  misc_feature (15)..(374): NCBI GI: 116196592 Blast Desc: CHGG_04894 [Chaetomium globosum CBS 148.51] gi|88180807|gb|EAQ88275.1| CHGG_04894 [Chaetomium globosum CBS 148.51]
  misc_feature (8)..(374): NCBI GI: 256722182 Blast Desc: NECHADRAFT_52396 [Nectria haematococca mpVI 77-13-4]
  misc_feature (30)..(375): NCBI GI: 70989479 Blast Desc: BNR/Asp-box repeat domain protein [Aspergillus fumigatus Af293] gi|66847220|gb|EAL87551.1| BNR/Asp-box repeat domain protein [Aspergillus fumigatus Af293] BNR/Asp-box repeat
  misc_feature (27)..(374): NCBI GI: 220981820 Blast Desc: exo-1,5-alpha-L-arabinofuranobiosidase [Gibberella zeae]
  misc_feature (27)..(374): NCBI GI: 46114424 Blast Desc: FG03054.1 [Gibberella zeae PH-1]
  misc_feature: Useful for introducing or modulating the production of volatile compounds
MIGHISPITILGAAVSVVSGVSALAKLSEVVVFTPDSNYTDPRVLYARTAQLPNNDILATWENYSPEPPPVYFPIYKSSDSGATWTEIARVQDQGYGYGLRYQPFLYVLPEAIAGYDAGTVLLAGSSIPTDLSSTQLDLYASTDSGVTWTFVSHVAAGGKAVPDNGLTPVWEPFMLLHEGTLIYYYSDQRDPAHGQKLVHQTSTDLVTWGDVVDDAAYPTYTDRPGMPTVALLPNGEYIYTYEYGGGENPTSSDYTFPVYYRISSDPEAFGSVEDHPIQTSDGTVPNGSPYVVWTPAGGDNGTIIVSSGCCSDVFINQALGAEDAWESVSTPEGNSYTRSLLVFQEDPNYYLIAGGGVLPPSTTNRVTVSVVTVE

SEQ ID NO: 3686 - DNA, 1378 bp, Muscodor strobelii
  misc_feature: SGI EST ID NO. CUFF.9279.0
  misc_feature: Variant of the nucleotide sequence at SEQ ID NO 3684
cggcgtacgttctttcattaaaggaaccgttcgatgggatatagggctataagcgcggccacgtataaagaaaagcgtatctcacatgtgaccagcttcaattattattatgatgttacatttatttcgaattatttttctttcctcacgtggtaggtaacgtcaagtttccggaatttgagaaccctggctctcacgatgatcggtcacatatctccgataactattctaggggcggccgtctccgttgttagtggtgtatccgccctcgccaagctctccgaagttgtcgtcttcacgccggacagtaactatacggatccgcgggtgctctatgcgcggactgcgcagcttcccaataacgacatactggcgacatgggagaactacagtcctgagcccccgcctgtgtacttccctatctacaaatcaagcgattccggtgcaacctggactgagattgcacgcgttcaagatcagggctatggctacggtctgcgctaccagcccttcctctacgtgctgccggaggccatcgccggatacgacgccggcactgtgcttctagctgggtcgtcaattccgacggatttgtcaagcacgcagctggacttgtatgcgtcgaccgatagtggcgtgacgtggacgtttgtgagccacgtagccgcgggagggaaggcggtacccgataatggattgacgcccgtatgggagccattcatgctgctacacgagggcacactcatctactactactcggaccagcgggacccggcgcacggccaaaaactcgtacaccagacctcgactgacctcgtcacctggggtgatgtcgtcgacgatgccgcgtaccctacctatacagatcgccccggcatgcccactgttgcgctgctgcccaacggcgagtacatctacacttatgagtacggtggtggtgagaacccgacgagctcggattacacgttccccgtgtactaccgcatatcgtctgaccccgaggcatttggaagtgtggaagaccatcccattcagacctctgacggcacggtcccaaacggctcgccttacgtggtgtggactccagccggcggtgacaacggtaccatcatcgtgtcttccgggtgctgctcagatgtctttattaaccaggctttgggtgcggaggatgcatgggaatcggtttccacgccggaaggaaactcatacactcggtccttactcgtcttccaagaggaccccaattactacctaatcgcgggtgggggcgttctccctcccagtacgaccaatcgagtcactgtgagcgtggtgactgtggaataatgtaatttccaaaatgtactatagagcaccagtctgaactaatgaattaaac

SEQ ID NO: 3687 - DNA, 1335 bp, Muscodor strobelii
  misc_feature: SGI cDNA ID NO. 560895
  misc_feature: Encodes the peptide sequence at SEQ ID NO 3688
atgaacccatcaattcctcctgagcttgagcagcaccttggctctcaaaggcaatatgatgcccaaatgtattctcgacgtcgctacaccccgcctcaaccgcctccagcacgccctccttggcgcccaccgtcatctcctcctgctcccacgcccacgccctcgctgttgcttactccccctcgccagtcttcgccgctttctacaccgcctcgtcgccttgcccctccgacgcagcttgtctctcctccctactcaccccacacgcgacttgcacctccttcgctgccttcacggctactaccacccgccgagatcgtcaaacagttgatcgggaaggacttgaagccaggcgccccacctgaagggactgtagagcaaagcattgagaatgcgatcgacactcgtttgcggaccgatccctctatagatgccgaagaaatgtacaatcgtgttgagaagttcgccgtcgtcaaagcagatggccgtggcgtttgtcactggtacatcgttaggtgctgggactattaccgccagaaacatcatggtagttatagcaggcattctgcggccgcaagcacaccggacatcgatgatatgagatctcaagccccgtcgcgaagcggctcccaaataaccgtaccgacttcgacagaagacggacaaccgagcaccatcgctcttgatgacttcacaagtactattgaggtgatcttgccggatggtgacgtgaaggcggtgacatatgcagggaacacaggagataggagctatatctccccgcggatcgtagatcggttcaagctgaacgcagatgacccatccgacgtcaaggtcgagttgcgctggaggattgatgttgaagaccggagaaaagcctacctattagagaactgctcatttgaggttcgcaatggcttagagactgatcttgccatcgggcgcaagatctatagaaaactcaacgagcaggcaggctctactgaacagagttatagcctcgatagttcgagtgaggacgaagcgtctagaaatggccggcatgagcttgatacaccggactcggagacatcgagctacgccggacgtaacgataccagctttggaggacctgcaacatccagagactttattaatagtatcaaccgagctatggatatccgtaatagcgagggatgtgtaggtgacactaatggccacgagagacacccatattacggtgacggccaatatctattatcgcccgaacatccgggaacggcaccggatcgtagacgtcggcactcaagtggtgcgccaagggttcgtgtcgtcaagtctcccgccgctgactaa

SEQ ID NO: 3688 - protein, 444 aa, Muscodor strobelii
  misc_feature: SGI Peptide ID NO. 560895
MNPSIPPELEQHLGSQRQYDAQMYSRRRYTPPQPPPARPPWRPPSSPPAPTPTPSLLLTPPRQSSPLSTPPRRLAPPTQLVSPPYSPHTRLAPPSLPSRLLPPAEIVKQLIGKDLKPGAPPEGTVEQSIENAIDTRLRTDPSIDAEEMYNRVEKFAVVKADGRGVCHWYIVRCWDYYRQKHHGSYSRHSAAASTPDIDDMRSQAPSRSGSQITVPTSTEDGQPSTIALDDFTSTIEVILPDGDVKAVTYAGNTGDRSYISPRIVDRFKLNADDPSDVKVELRWRIDVEDRRKAYLLENCSFEVRNGLETDLAIGRKIYRKLNEQAGSTEQSYSLDSSSEDEASRNGRHELDTPDSETSSYAGRNDTSFGGPATSRDFINSINRAMDIRNSEGCVGDTNGHERHPYYGDGQYLLSPEHPGTAPDRRRRHSSGAPRVRVVKSPAAD

SEQ ID NO: 3689 - DNA, 3617 bp, Muscodor strobelii
  misc_feature: SGI EST ID NO. CUFF.9439.1
  misc_feature: Variant of the nucleotide sequence at SEQ ID NO 3687
cggggagtaaaagaacacgacgtgagggtgaaggaggacactggtacgccagtcaactggattcaccccagcgtgatcaagaggtgtgaacttagctcgctggaaaagacttgcgagccaagaaacttcgttggtatgaaagggaatttcaaggcagacagatacttgacggtgacatggctgggaaagaagagaagtacctacgaggaggttttcttcgtttcacctgaaaggtcgccaatcgaaatggttctcggcgacgagtttgtgggacgaaatggacgcatcaaggagctctgtgcagatcaacccaaggccacagacgcgcgcatgtttgtggctggaccaatgacgaaagaattgaaacgtcaaatgcaagcaaatgcgattcaacatcagaaggagtcgaccgaacttgaagtaatcaggcggagccagagccaagctgggagttcgaaagggagggataactcatcgagaaagacaggtgactcgaagcgagaaggcaagtacaggacgtcataagacctggtggcacatatgattctacaggacggtaacctgatatgcggaatgaaattaagggctctaatattggcatgacgttgcgaagactttgttttgctaccttaactactatttaactgatttgcctaagattgttgagttatttgctttaataattctcgatgaacgcacgaaagctattcccccgtcagcagatagtgtgtgaactgttttgtgtcttgtttttgtcatgtggagcatcgccgatttaaactgtattgtcaccaactgcatttactgtataagaacgaactgcatgcgagaggagggctgaatgcgcgcgcacttcgtaagcatttcagatacggaccaacacattatgaatcagtttgaacgcacaagagctacagaaagtatatttgtaagctatacgattataagtagcccccaacagggcaacgtaccattttgctaagttcgagccacggcaccgggtctgtagggatggatgcaaccagctgagccgcatcccctatgtcacatgatggggaatggtagtaccggaggtggcgatttcgagacctactttggagtctcgcgtatacggtcaaatcatctagtgaggcgttggacgatagccagaaaccaggaagcgaagaatcgcatcgatcaatatacatggcgagtggcttccaccatgttaagacgcagcagtgcaatgatacaagcgacgcccacaggaatccgaaatccaacgttgaggatccagggctaaacctaaaacatctgcttccccaagaaattggaacaggcacgcgactgtggggcagagccggggatgcacctaatgccgtcatcgtcatcgctggcgtcaacgtttcatggggctcagtttttatacttacctaccacataaacctagtatcgtgtattcgggcttaataattgaccgacgcgtgccccgcgcgcgtcgtaccggcgataagttgcgatggattcccatttcccattccgcacgcgcagccatcatcttccaccttcacagttcatctgatttccattctgtgatcgtgcgatccgagcacgacaattttccgccgacaaaatcattcacttgccaatcaaggtatcgctcctgaccgatcatgttgcgccgcttgacctatcctcatctacctcccatcgactcatcaacaagaaaacgctagacgcaactcgtgcagctgccgcccgcggggctcagcagcctacaccgatgaacccatcaattcctcctgagcttgagcagcaccttggctctcaaaggcaatatgatgcccaaatgtattctcgacgtcgctacaccccgcctcaaccgcctccagcacgccctccttggcgcccaccgtcatctcctcctgctcccacgcccacgccctcgctgttgcttactccccctcgccagtcttcgccgctttctacaccgcctcgtcgccttgcccctccgacgcagcttgtctctcctccctactcaccccacacgcgacttgcacctccttcgctgccttcacggctactaccacccgccgagatcgtcaaacagttgatcgggaaggacttgaagccaggcgccccacctgaagggactgtagagcaaagcattgagaatgcgatcgacactcgtttgcggaccgatccctctatagatgccgaagaaatgtacaatcgtgttgagaagttcgccgtcgtcaaagcagatggccgtggcgtttgtcactggtacatcgttaggtgctgggactattaccgccagaaacatcatggtagttatagcaggcattctgcggccgcaagcacaccggacatcgatgatatgagatctcaagccccgtcgcgaagcggctcccaaataaccgtaccgacttcgacagaagacggacaaccgagcaccatcgctcttgatgacttcacaagtactattgaggtgatcttgccggatggtgacgtgaaggcggtgacatatgcagggaacacaggagataggagctatatctccccgcggatcgtagatcggttcaagctgaacgcagatgacccatccgacgtcaaggtcgagttgcgctggaggattgatgttgaagaccggagaaaagcctacctattagagaactgctcatttgaggttcgcaatggcttagagactgatcttgccatcgggcgcaagatctatagaaaactcaacgagcaggcaggctctactgaacagagttatagcctcgatagttcgagtgaggacgaagcgtctagaaatggccggcatgagcttgatacaccggactcggagacatcgagctacgccggacgtaacgataccagctttggaggacctgcaacatccagagactttattaatagtatcaaccgagctatggatatccgtaatagcgagggatgtgtaggtgacactaatggccacgagagacacccatattacggtgacggccaatatctattatcgcccgaacatccgggaacggcaccggatcgtagacgtcggcactcaagtggtgatttcgaacaatcgccgcgagctaggaggctaagacacagatcattgatgacatgtgattcatgattcatgattcacgattcacgattcacgatcgataatgttcgacagagctatgaatcttttcaggtgcgccaagggttcgtgtcgtcaagtctcccgccgctgactaagttagtcttcgagtacggtgcccattcccacgctgcgccgacttcgagttgaatattatcggaatagatgtgctgaaaatacatcgggaaaccggtactagcgttcttggaaatgtcagcttggagtttggacttgatataacattggaattaaaataacgaactgggagacattcatcttatatagttgcgaggtttgcttgcttattgctttttgttgtgagcacgcgcatgtatgcttgcccaacatcgtgttgttgaggcctgaacggagttatcaatggtcgattccttcggcacgtgatatagcccactgcattatagcaatgcatcaatccaattaccaatcgtctaaaaagcattgtgactgatgcaaatattactttttg

SEQ ID NO: 3690 - DNA, 720 bp, Muscodor strobelii
  misc_feature: SGI cDNA ID NO. 560896
  misc_feature: Elevated expression when VOC is produced
  misc_feature: Encodes the peptide sequence at SEQ ID NO 3691
atggctgctgacttacctgggcaaggagcgtctgggcccaaagcggtggacattgcaccgtcaaccgaagttgcgatggactcagcacagctggcggagaaggagagcacggatgaaagtggtattgaaagcgcgagtcagaaacaatacaacggtaatgcggagtggtggctagtggttctcaccacaaacaagcggggagtaaaagaacacgacgtgagggtgaaggaggacactggtacgccagtcaactggattcaccccagcgtgatcaagaggtgtgaacttagctcgctggaaaagacttgcgagccaagaaacttcgttggtatgaaagggaatttcaaggcagacagatacttgacggtgacatggctgggaaagaagagaagtacctacgaggaggttttcttcgtttcacctgaaaggtcgccaatcgaaatggttctcggcgacgagtttgtgggacgaaatggacgcatcaaggagctctgtgcagatcaacccaaggccacagacgcgcgcatgtttgtggctggaccaatgacgaaagaattgaaacgtcaaatgcaagcaaatgcgattcaacatcagaaggagtcgaccgaacttgaagtaatcaggcggagccagagccaagctgggagttcgaaagggagggataactcatcgagaaagacaggtgactcgaagcgagaaggcaagtacaggacgtcataa

SEQ ID NO: 3691 - protein, 239 aa, Muscodor strobelii
  misc_feature: SGI Peptide ID NO. 560896
  misc_feature: Useful for introducing or modulating the production of volatile compounds
MAADLPGQGASGPKAVDIAPSTEVAMDSAQLAEKESTDESGIESASQKQYNGNAEWWLVVLTTNKRGVKEHDVRVKEDTGTPVNWIHPSVIKRCELSSLEKTCEPRNFVGMKGNFKADRYLTVTWLGKKRSTYEEVFFVSPERSPIEMVLGDEFVGRNGRIKELCADQPKATDARMFVAGPMTKELKRQMQANAIQHQKESTELEVIRRSQSQAGSSKGRDNSSRKTGDSKREGKYRTS

SEQ ID NO: 3692 - DNA, 5512 bp, Muscodor strobelii
  misc_feature: SGI EST ID NO. CUFF.9439.2
  misc_feature: Variant of the nucleotide sequence at SEQ ID NO 3690
gtgcggatggtcatcattgttcaattagagaatgccttatatctgggattggaagtcctaaattatgaacccaatcatttgacatgaacagttctgtcggcagtccttgctttcgtatgctgtacatttccacgactattagagaagagccattatcatacaacaccacatgatctcattcgactgttgggtagattgcattcgtcagaaacacaacatttaccgcggcatatctataaatgggtaaaccgaacatgtgctttcgacggggcttcttgtagttacgtacgcagaagtcgcagcaaacacttcaatcatccgagcatttgtcattaacgctaatgctaacgcaaagaatccagatgccacaatcacgaagcccaggcgtaagacattgctctgaatgaagtagagagccgtgacggaacaaaccggaaaaagggaagcgaccacggtggtaatgatgcggatggtggctgcgagtatactattctcgtaacggtatacctcttggtcgaggccgtcctcgataggagcctgtaaatgtcttcatatgccaatcgagtgacgtggaatagggggccggcatactttgaatcgtccgccaactaggttatgccaacagggaattacgtcgtacatcaaccaccgagaaaacatatctagcgcaggtcgcgaattgagtgcaacaagatcatcgttatacttatcagtatagtagtccttatcgagacccatcagcgggaagtcacccatatccggacgcttgaaccacaagcggaagaaatttctgtcataggttgcaggtgaccctagtctcgctatcttcgcttgcttcagaatggtatcacctgtagtgtctcgcaaggatcagtagacttcttggctagtcaacgaatggccgcgaacgaactatactgctctagcttctctcggatctctacgattttgtcccattgctcgatatcgcctggctcttcgctattgtatagagtccaccagtctttgttggaaattggtcggtcggcactgtttcgttgggcaaggctgaagagtttgtcctctagatgggtaagctcagcttggagaaacaaaagattctgggcattcagcatcttgaatcgtcggaaaatcgcatactcgtcctgcctgcccatgaatcgagcaactttgcaatatccttccatggcacataccgagacaaaggacagaaggggcggtagatgggtaagtgcaagatgagtcggaatgccatttcttggctctgaggctcagactatcgtcgttccggacatcaatgcagagcctgactgctaccggtgatgagttgcatgaatgcaacccagaatgtgacgctggagccaatcgggcgttgctcgcgccctccgaaataccaaaggcggcacaagagaccgcaatgactgggcaaacttgattgataatcctaacgaggcgtattatataggctgactttgtctctaatgattgggagatgggatcgtgagaagcaactattgtgcgagatagctttttgacatgatgtcaagccgcatcatgctccagtgtgtcacgcatgcccagcgcggccaggcagacttggtcttacattgcaatgtgtaaaacccgccatgctcgtcctctgtgcagcttccgacctggagttctcccgctccaccgatgcgagcgctatcaagccttcgaagctaattgagtcgcattgactagccaaatagccaattcattgatgcgatggctgctgacttacctgggcaaggagcgtctgggcccaaagcggtggacattgcaccgtcaaccgaagttgcgatggactcagcacagctggcggagaaggagagcacggatgaaagtggtattgaaagcgcgagtcagaaacaatacaacggtaatgcggagtggtggctagtggttctcaccacaaacaagcggggagtaaaagaacacgacgtgagggtgaaggaggacactggtacgccagtcaactggattcaccccagcgtgatcaagaggtgtgaacttagctcgctggaaaagacttgcgagccaagaaacttcgttggtatgaaagggaatttcaaggcagacagatacttgacggtgacatggctgggaaagaagagaagtacctacgaggaggttttcttcgtttcacctgaaaggtcgccaatcgaaatggttctcggcgacgagtttgtgggacgaaatggacgcatcaaggagctctgtgcagatcaacccaaggccacagacgcgcgcatgtttgtggctggaccaatgacgaaagaattgaaacgtcaaatgcaagcaaatgcgattcaacatcagaaggagtcgaccgaacttgaagtaatcaggcggagccagagccaagctgggagttcgaaagggagggataactcatcgagaaagacaggtgactcgaagcgagaaggcaagtacaggacgtcataagacctggtggcacatatgattctacaggacggtaacctgatatgcggaatgaaattaagggctctaatattggcatgacgttgcgaagactttgttttgctaccttaactactatttaactgatttgcctaagattgttgagttatttgctttaataattctcgatgaacgcacgaaagctattcccccgtcagcagatagtgtgtgaactgttttgtgtcttgtttttgtcatgtggagcatcgccgatttaaactgtattgtcaccaactgcatttactgtataagaacgaactgcatgcgagaggagggctgaatgcgcgcgcacttcgtaagcatttcagatacggaccaacacattatgaatcagtttgaacgcacaagagctacagaaagtatatttgtaagctatacgattataagtagcccccaacagggcaacgtaccattttgctaagttcgagccacggcaccgggtctgtagggatggatgcaaccagctgagccgcatcccctatgtcacatgatggggaatggtagtaccggaggtggcgatttcgagacctactttggagtctcgcgtatacggtcaaatcatctagtgaggcgttggacgatagccagaaaccaggaagcgaagaatcgcatcgatcaatatacatggcgagtggcttccaccatgttaagacgcagcagtgcaatgatacaagcgacgcccacaggaatccgaaatccaacgttgaggatccagggctaaacctaaaacatctgcttccccaagaaattggaacaggcacgcgactgtggggcagagccggggatgcacctaatgccgtcatcgtcatcgctggcgtcaacgtttcatggggctcagtttttatacttacctaccacataaacctagtatcgtgtattcgggcttaataattgaccgacgcgtgccccgcgcgcgtcgtaccggcgataagttgcgatggattcccatttcccattccgcacgcgcagccatcatcttccaccttcacagttcatctgatttccattctgtgatcgtgcgatccgagcacgacaattttccgccgacaaaatcattcacttgccaatcaaggtatcgctcctgaccgatcatgttgcgccgcttgacctatcctcatctacctcccatcgactcatcaacaagaaaacgctagacgcaactcgtgcagctgccgcccgcggggctcagcagcctacaccgatgaacccatcaattcctcctgagcttgagcagcaccttggctctcaaaggcaatatgatgcccaaatgtattctcgacgtcgctacaccccgcctcaaccgcctccagcacgccctccttggcgcccaccgtcatctcctcctgctcccacgcccacgccctcgctgttgcttactccccctcgccagtcttcgccgctttctacaccgcctcgtcgccttgcccctccgacgcagcttgtctctcctccctactcaccccacacgcgacttgcacctccttcgctgccttcacggctactaccacccgccgagatcgtcaaacagttgatcgggaaggacttgaagccaggcgccccacctgaagggactgtagagcaaagcattgagaatgcgatcgacactcgtttgcggaccgatccctctatagatgccgaagaaatgtacaatcgtgttgagaagttcgccgtcgtcaaagcagatggccgtggcgtttgtcactggtacatcgttaggtgctgggactattaccgccagaaacatcatggtagttatagcaggcattctgcggccgcaagcacaccggacatcgatgatatgagatctcaagccccgtcgcgaagcggctcccaaataaccgtaccgacttcgacagaagacggacaaccgagcaccatcgctcttgatgacttcacaagtactattgaggtgatcttgccggatggtgacgtgaaggcggtgacatatgcagggaacacaggagataggagctatatctccccgcggatcgtagatcggttcaagctgaacgcagatgacccatccgacgtcaaggtcgagttgcgctggaggattgatgttgaagaccggagaaaagcctacctattagagaactgctcatttgaggttcgcaatggcttagagactgatcttgccatcgggcgcaagatctatagaaaactcaacgagcaggcaggctctactgaacagagttatagcctcgatagttcgagtgaggacgaagcgtctagaaatggccggcatgagcttgatacaccggactcggagacatcgagctacgccggacgtaacgataccagctttggaggacctgcaacatccagagactttattaatagtatcaaccgagctatggatatccgtaatagcgagggatgtgtaggtgacactaatggccacgagagacacccatattacggtgacggccaatatctattatcgcccgaacatccgggaacggcaccggatcgtagacgtcggcactcaagtggtgatttcgaacaatcgccgcgagctaggaggctaagacacagatcattgatgacatgtgattcatgattcatgattcacgattcacgattcacgatcgataatgttcgacagagctatgaatcttttcagtcttcgagtacggtgcccattcccacgctgcgccgacttcgagttgaatattatcggaatagatgtgctgaaaatacatcgggaaaccggtactagcgttcttggaaatgtcagcttggagtttggacttgatataacattggaattaaaataacgaactgggagacattcatcttatatagttgcgaggtttgcttgcttattgctttttgttgtgagcacgcgcatgtatgcttgcccaacatcgtgttgttgaggcctgaacggagttatcaatggtcgattccttcggcacgtgatatagcccactgcattatagcaatgcatcaatccaattaccaatcgtctaaaaagcattgtgactgatgcaaatattactttttg

SEQ ID NO: 3693 - DNA, 852 bp, Muscodor strobelii
  misc_feature: SGI cDNA ID NO. 560897
  misc_feature: Encodes the peptide sequence at SEQ ID NO 3694
atggaaggatattgcaaagttgctcgattcatgggcaggcaggacgagtatgcgattttccgacgattcaagatgctgaatgcccagaatcttttgtttctccaagctgagcttacccatctagaggacaaactcttcagccttgcccaacgaaacagtgccgaccgaccaatttccaacaaagactggtggactctatacaatagcgaagagccaggcgatatcgagcaatgggacaaaatcgtagagatccgagagaagctagagcagtatagtgataccattctgaagcaagcgaagatagcgagactagggtcacctgcaacctatgacagaaatttcttccgcttgtggttcaagcgtccggatatgggtgacttcccgctgatgggtctcgataaggactactatactgataagtataacgatgatcttgttgcactcaattcgcgacctgcgctagatatgttttctcggtggttgatgtacgacgtaattccctgttggcataacctagttggcggacgattcaaagctcctatcgaggacggcctcgaccaagaggtataccgttacgagaatagtatactcgcagccaccatccgcatcattaccaccgtggtcgcttccctttttccggtttgttccgtcacggctctctacttcattcagagcaatgtcttacgcctgggcttcgtgattgtggcatctggattctttgcgttagcattagcgttaatgacaaatgctcggatgattgaagtgtttgctgcgacttctgcgtacgtaactacaagaagccccgtcgaaagcacatgttcggtttacccatttatagatatgccgcggtaa

SEQ ID NO: 3694 - protein, 283 aa, Muscodor strobelii
  misc_feature: SGI Peptide ID NO. 560897
  misc_feature (3)..(261): NCBI GI: 169604088 Blast Desc: SNOG_05053 [Phaeosphaeria nodorum SN15] gi|111066324|gb|EAT87444.1| SNOG_05053 [Phaeosphaeria nodorum SN15]
  misc_feature (1)..(266): NCBI GI: 67538634 Blast Desc: AN5487.2 [Aspergillus nidulans FGSC A4] gi|40743457|gb|EAA62647.1| [Aspergillus nidulans FGSC A4] gi|259485063|tpe|CBF81815.1| TPA: conserved [Aspergillus nidulans
  misc_feature (1)..(261): NCBI GI: 145247594 Blast Desc: An12g09960 [Aspergillus niger] gi|134080785|emb|CAL00899.1| protein product [Aspergillus niger]
  misc_feature (3)..(261): NCBI GI: 67524323 Blast Desc: AN2619.2 [Aspergillus nidulans FGSC A4] gi|40743780|gb|EAA62966.1| [Aspergillus nidulans FGSC A4] gi|259486481|tpe|CBF84353.1| TPA: conserved [Aspergillus nidulans
  misc_feature (2)..(178): NCBI GI: 171679068 Blast Desc: protein product [Podospora anserina] gi|170937605|emb|CAP62264.1| protein product [Podospora anserina]
  misc_feature (3)..(262): NCBI GI: 261358949 Blast Desc: VDBG_07487 [Verticillium albo-atrum VaMs.102]
  misc_feature (2)..(256): NCBI GI: 115491261 Blast Desc: [Aspergillus terreus NIH2624] gi|114197118|gb|EAU38818.1| [Aspergillus terreus NIH2624]
  misc_feature (3)..(251): NCBI GI: 256723768 Blast Desc: NECHADRAFT_8348 [Nectria haematococca mpVI 77-13-4]
  misc_feature (3)..(262): NCBI GI: 256720608 Blast Desc: NECHADRAFT_85466 [Nectria haematococca mpVI 77-13-4]
  misc_feature (3)..(255): NCBI GI: 256734893 Blast Desc: NECHADRAFT_75615 [Nectria haematococca mpVI 77-13-4]
MEGYCKVARFMGRQDEYAIFRRFKMLNAQNLLFLQAELTHLEDKLFSLAQRNSADRPISNKDWWTLYNSEEPGDIEQWDKIVEIREKLEQYSDTILKQAKIARLGSPATYDRNFFRLWFKRPDMGDFPLMGLDKDYYTDKYNDDLVALNSRPALDMFSRWLMYDVIPCWHNLVGGRFKAPIEDGLDQEVYRYENSILAATIRIITTVVASLFPVCSVTALYFIQSNVLRLGFVIVASGFFALALALMTNARMIEVFAATSAYVTTRSPVESTCSVYPFIDMPR

SEQ ID NO: 3695 - DNA, 5621 bp, Muscodor strobelii
  misc_feature: SGI EST ID NO. CUFF.9438.0
  misc_feature: Variant of the nucleotide sequence at SEQ ID NO 3693
caaaaagtaatatttgcatcagtcacaatgctttttagacgattggtaattggattgatgcattgctataatgcagtgggctatatcacgtgccgaaggaatcgaccattgataactccgttcaggcctcaacaacacgatgttgggcaagcatacatgcgcgtgctcacaacaaaaagcaataagcaagcaaacctcgcaactatataagatgaatgtctcccagttcgttattttaattccaatgttatatcaagtccaaactccaagctgacatttccaagaacgctagtaccggtttcccgatgtattttcagcacatctattccgataatattcaactcgaagtcggcgcagcgtgggaatgggcaccgtactcgaagactaacttagtcagcggcgggagacttgacgacacgaacccttggcgcacctgaaaagattcatagctctgtcgaacattatcgatcgtgaatcgtgaatcgtgaatcatgaatcatgaatcacatgtcatcaatgatctgtgtcttagcctcctagctcgcggcgattgttcgaaatcaccacttgagtgccgacgtctacgatccggtgccgttcccggatgttcgggcgataatagatattggccgtcaccgtaatatgggtgtctctcgtggccattagtgtcacctacacatccctcgctattacggatatccatagctcggttgatactattaataaagtctctggatgttgcaggtcctccaaagctggtatcgttacgtccggcgtagctcgatgtctccgagtccggtgtatcaagctcatgccggccatttctagacgctgtgtaacaagtcagtattgatgtatatgcacagaattgcgacctcggatccgccgtaccttcgtcctcactcgaactatcgaggctataactctgttcagtagagcctgcctgctcgttgagttttctatagatcttgcgcccgatggcaagatcagtctctaagccattgcgaacctcaaatgagcagttctctaataggtaggcttttctccggtcttcaacatcaatcctccagcgcaactcgaccttgacgtcggatgggtcatctgcgttcagcttgaaccgatctacgatccgcggggagatatagctcctatctcctgtgttccctgcatatgtcaccgccttcacgtcaccatccggcaagatcacctcaatagtacttgtctgcgtcgaaagttagtaagctaaaataaaaacaaaaaggcaaagacgcgaggcggacaacttacgaagtcatcaagagcgatggtgctcggttgtccgtcttctgtcgaagtcggtacggttatttgggagccgcttcgcgacggggcttgagatctcatatcatcgatgtccggtgtgcttgcggccgcagaatgcctgctataactaccatgatgtttctggcggtaatagtcccagcacctaacgatgtaccagtgacaaacgccacggccatctgctttgacgacggcgaacttctcaacacgattgtacatttcttcggcatctatagagggatcggtccgcaaacgagtgtcgatcgcattctcaatgctttgctctacagtcccttcaggtggggcgcctggcttcaagtccttcccgatcaactgtttgacgatctcggcgggtggtagtagccgtgaaggcagcgaaggaggtgcaagtcgcgtgtggggtgagtagggaggagagacaagctgcgtcggaggggcaaggcgacgaggcggtgtagaaagcggcgaagactggcgagggggagtaagcaacagcgagggcgtgggcgtgggagcaggaggagatgacggtgggcgccaaggagggcgtgctggaggcggttgaggcggggtgtagcgacgtcgagaatacatttgggcatcatattgcctttgagagccaaggtgctgctcaagctcaggaggaattgatgggttcatcggtgtaggctgctgagccccgcgggcggcagctgcacgagttgcgtctagcgttttcttgttgatgagtcgatgggaggtagatgaggataggtcaagcggcgcaacatgatcggtcaggagcgataccttgattggcaagtgaatgattttgtcggcggaaaattgtcgtgctcggatcgcacgatcacagaatggaaatcagatgaactgtgaaggtggaagatgatggctgcgcgtgcggaatgggaaatgggaatccatcgcaacttatcgccggtacgacgcgcgcggggcacgcgtcggtcaattattaagcccgaatacacgatactaggtttatgtggtaggtaagtataaaaactgagccccatgaaacgttgacgccagcgatgacgatgacggcattaggtgcatccccggctctgccccacagtcgcgtgcctgttccaatttcttggggaagcagatgttttaggtttagccctggatcctcaacgttggatttcggattcctgtgggcgtcgcttgtatcattgcactgctgcgtcttaacatggtggaagccactcgccatgtatattgatcgatgcgattcttcgcttcctggtttctggctatcgtccaacgcctcactagatgatttgaccgtatacgcgagactccaaagtaggtctcgaaatcgccacctccggtactaccattccccatcatgtgacataggggatgcggctcagctggttgcatccatccctacagacccggtgccgtggctcgaacttagcaaaatggtacgttgccctgttgggggctacttataatcgtatagcttacaaatatactttctgtagctcttgtgcgttcaaactgattcataatgtgttggtccgtatctgaaatgcttacgaagtgcgcgcgcattcagccctcctctcgcatgcagttcgttcttatacagtaaatgcagttggtgacaatacagtttaaatcggcgatgctccacatgacaaaaacaagacacaaaacagttcacacactatctgctgacgggggaatagctttcgtgcgttcatcgagaattattaaagcaaataactcaacaatcttaggcaaatcagttaaatagtagttaaggtagcaaaacaaagtcttcgcaacgtcatgccaatattagagcccttaatttcattccgcatatcaggttaccgtcctgtagaatcatatgtgccaccaggtcttatgacgtcctgtacttgccttctcgcttcgagtcacctgtctttctcgatgagttatccctccctttcgaactcccagcttggctctggctccgcctgattacttcaagttcggtcgactccttctgatgttgaatcgcatttgcttgcatttgacgtttcaattctttctattcgtccgtaagtcaaaatgctcgggttccttatgaacgattccaacttaccgtcattggtccagccacaaacatgcgcgcgtctgtggccttgggttgatctgcacagagctccttgatgcgtccatttcgtcccacaaactcgtcgccgagaaccatttcgattggcgacctttcaggtgaaacgaagaaaacctcctcgtaggtacttctcttctttcccagccatgtcaccgtcaagtatctgtctgccttgaaattccctttcataccaacgaagtttcttggctcgcaagtcttttccagcgagctaagttcacacctcttgatcacgctggggtgaatccagttgactggcgtaccagtgtcctccttcaccctcacgtcgtgttcttttactccccgcttgtttgtggtgagaaccactagccaccactccgcattaccgttgtattgtttctgactcgcgctttcaataccactttcatccgtcttagatgtacattagccattttgatcggtctacagagttggtggatacttacgctctccttctccgccagctgtgctgagtccatcgcaacttcggttgacggtgcaatgtccaccgctttgggcccagacgctccttgcccaggtaagtcagcagccatcgcatcaatgaattggctatttggctagtcaatgcgactcaattagcttcgaaggcttgatagcgctcgcatcggtggagcgggagaactccaggtcggaagctgcacagaggacgagcatggcgggttttacacattgcaatgtaagaccaagtctgcctggccgcgctgggcatgcgtgacacactggagcatgatgcggcttgacatcatgtcaaaaagctatctcgcacaatagttgcttctcacgatcccatctcccaatcattagagacaaagtcagcctatataatacgcctcgttaggattatcaatcaagtttgcccagtcattgcggtctcttgtgccgcctttggtatttcggagggcgcgagcaacgcccgattggctccagcgtcacattctgggttgcattcatgcaactcatcaccggtagcagtcaggctctgcattgatgtccggaacgacgatagtctgagcctcagagccaagaaatggcattccgactcatcttgcacttacccatctaccgccccttctgtcctttgtctcggtatgtgccatggaaggatattgcaaagttgctcgattcatgggcaggcaggacgagtatgcgattttccgacgattcaagatgctgaatgcccagaatcttttgtttctccaagctgagcttacccatctagaggacaaactcttcagccttgcccaacgaaacagtgccgaccgaccaatttccaacaaagactggtggactctatacaatagcgaagagccaggcgatatcgagcaatgggacaaaatcgtagagatccgagagaagctagagcagtatagtgataccattctgaagcaagcgaagatagcgagactagggtcacctgcaacctatgacagaaatttcttccgcttgtggttcaagcgtccggatatgggtgacttcccgctgatgggtctcgataaggactactatactgataagtataacgatgatcttgttgcactcaattcgcgacctgcgctagatatgttttctcggtggttgatgtacgacgtaattccctgttggcataacctagttggcggacgattcaaagctcctatcgaggacggcctcgaccaagaggtataccgttacgagaatagtatactcgcagccaccatccgcatcattaccaccgtggtcgcttccctttttccggtttgttccgtcacggctctctacttcattcagagcaatgtcttacgcctgggcttcgtgattgtggcatctggattctttgcgttagcattagcgttaatgacaaatgctcggatgattgaagtgtttgctgcgacttctgcatatgccgcggtaaatgttgtgtttctgacgaatgcaatctacccaacagtcgaatgagatcatgtggtgttgtatgataatggctcttctctaatagtcgtggaaatgtacagcatacgaaagcaaggactgccgacagaactgttcatgtcaaatgattgggttcataatttaggacttccaatcccagatataaggcattctctaattgaacaatgatgaccatccgcac

SEQ ID NO: 3696 - DNA, 780 bp, Muscodor strobelii
  misc_feature: SGI cDNA ID NO. 560898
  misc_feature: Elevated expression when VOC is produced
  misc_feature: Encodes the peptide sequence at SEQ ID NO 3697
atgctgaatgcccagaatcttttgtttctccaagctgagcttacccatctagaggacaaactcttcagccttgcccaacgaaacagtgccgaccgaccaatttccaacaaagactggtggactctatacaatagcgaagagccaggcgatatcgagcaatgggacaaaatcgtagagatccgagagaagctagagcagtatagtgataccattctgaagcaagcgaagatagcgagactagggtcacctgcaacctatgacagaaatttcttccgcttgtggttcaagcgtccggatatgggtgacttcccgctgatgggtctcgataaggactactatactgataagtataacgatgatcttgttgcactcaattcgcgacctgcgctagatatgttttctcggtggttgatgtacgacgtaattccctgttggcataacctagttggcggacgattcaaagctcctatcgaggacggcctcgaccaagaggtataccgttacgagaatagtatactcgcagccaccatccgcatcattaccaccgtggtcgcttccctttttccggtttgttccgtcacggctctctacttcattcagagcaatgtcttacgcctgggcttcgtgattgtggcatctggattctttgcgttagcattagcgttaatgacaaatgctcggatgattgaagtgtttgctgcgacttctgcgtacgtaactacaagaagccccgtcgaaagcacatgttcggtttacccatttatagatatgccgcggtaa

SEQ ID NO: 3697 - protein, 259 aa, Muscodor strobelii
  misc_feature: SGI Peptide ID NO. 560898
  misc_feature (2)..(237): NCBI GI: 169604088 Blast Desc: SNOG_05053 [Phaeosphaeria nodorum SN15] gi|111066324|gb|EAT87444.1| SNOG_05053 [Phaeosphaeria nodorum SN15]
  misc_feature (2)..(237): NCBI GI: 145247594 Blast Desc: An12g09960 [Aspergillus niger] gi|134080785|emb|CAL00899.1| protein product [Aspergillus niger]
  misc_feature (1)..(242): NCBI GI: 67538634 Blast Desc: AN5487.2 [Aspergillus nidulans FGSC A4] gi|40743457|gb|EAA62647.1| [Aspergillus nidulans FGSC A4] gi|259485063|tpe|CBF81815.1| TPA: conserved [Aspergillus nidulans
  misc_feature (2)..(237): NCBI GI: 67524323 Blast Desc: AN2619.2 [Aspergillus nidulans FGSC A4] gi|40743780|gb|EAA62966.1| [Aspergillus nidulans FGSC A4] gi|259486481|tpe|CBF84353.1| TPA: conserved [Aspergillus nidulans
  misc_feature (2)..(232): NCBI GI: 115491261 Blast Desc: [Aspergillus terreus NIH2624] gi|114197118|gb|EAU38818.1| [Aspergillus terreus NIH2624]
  misc_feature (2)..(238): NCBI GI: 261358949 Blast Desc: VDBG_07487 [Verticillium albo-atrum VaMs.102]
  misc_feature (2)..(231): NCBI GI: 256734893 Blast Desc: NECHADRAFT_75615 [Nectria haematococca mpVI 77-13-4]
  misc_feature (2)..(154): NCBI GI: 171679068 Blast Desc: protein product [Podospora anserina] gi|170937605|emb|CAP62264.1| protein product [Podospora anserina]
  misc_feature (2)..(238): NCBI GI: 256720608 Blast Desc: NECHADRAFT_85466 [Nectria haematococca mpVI 77-13-4]
  misc_feature (2)..(227): NCBI GI: 256723768 Blast Desc: NECHADRAFT_8348 [Nectria haematococca mpVI 77-13-4]
  misc_feature: Useful for introducing or modulating the production of volatile compounds
MLNAQNLLFLQAELTHLEDKLFSLAQRNSADRPISNKDWWTLYNSEEPGDIEQWDKIVEIREKLEQYSDTILKQAKIARLGSPATYDRNFFRLWFKRPDMGDFPLMGLDKDYYTDKYNDDLVALNSRPALDMFSRWLMYDVIPCWHNLVGGRFKAPIEDGLDQEVYRYENSILAATIRIITTVVASLFPVCSVTALYFIQSNVLRLGFVIVASGFFALALALMTNARMIEVFAATSAYVTTRSPVESTCSVYPFIDMPR

SEQ ID NO: 3698 - DNA, 5621 bp, Muscodor strobelii; identical to SEQ ID NO: 3695
  misc_feature: SGI EST ID NO. CUFF.9438.0
  misc_feature: Variant of the nucleotide sequence at SEQ ID NO 3696

SEQ ID NO: 3699 - DNA, 945 bp, Muscodor strobelii
  misc_feature: SGI cDNA ID NO. 560899
  misc_feature: Encodes the peptide sequence at SEQ ID NO 3700
atggcagacacccaaccagcgccttcccttggttcttggcatagcctacctcccgagatccaggtcgccattctagaaacgttacttcaggatggctgcagcatcgcagcgtccgctgccgtgtcgcgagagtggcagagcgtcattgagcaacgcaactttgctcgtatcagagtgactccatcacgtgtcgcagccttcaaatccatgactcgtcgcaatcgggcattggtgaaatatatatggttttgcatcgagctcgaagattatgaatgcgagtggtgcgacataaccgcccatagcaatgacttgacgagtatcatgagtgtcaaagactacacgcggattctcaaagcatttaccggtctctttagagctctgtcgaaatggataccgcagggcgacttgacactcgatatcagcgttcactctcctagcgacccgcatcatttcttcagataccttactttcgagcccgatgaacccaatctttcgataagcgactgctccaagttttctttgcctgctatagaagactgcccttcgcacggctggaaaaatgggcatcaaaaggcgtcttgcgtgggattcagcaatttccaaagaatatttcagtcaatcgaaaaaccacagcagtttacgtacccaggtcaggaagctcaatattggaaggagttgccgaaggtcccagcgataaccgccgcgtttttccgccaacagactcgacgaagatggtcccctgaaactttgtcctacatgctttcgcgtctacctgcagtgcaagaaatcaattacgagccttggagaggatggatggattacgaaatggatgcgtacgataaaggcaagtacttgtccatctcttccctcgtcagtgcgactgctaacttacgaggaataagcctatccatcatttttctcgtcgctcactcttctgcgatatag

SEQ ID NO: 3700 - protein, 314 aa, Muscodor strobelii
  misc_feature: SGI Peptide ID NO. 560899
  misc_feature (12)..(283): NCBI GI: 154297056 Blast Desc: BC1G_12187 [Botryotinia fuckeliana B05.10] gi|150843016|gb|EDN18209.1| BC1G_12187 [Botryotinia fuckeliana B05.10]
  misc_feature (7)..(269): NCBI GI: 46114758 Blast Desc: FG03221.1 [Gibberella zeae PH-1]
  misc_feature (102)..(269): NCBI GI: 261355290 Blast Desc: conserved [Verticillium albo-atrum VaMs.102]
  misc_feature (26)..(163): NCBI GI: 145239425 Blast Desc: An08g02430 [Aspergillus niger] gi|134076870|emb|CAK45279.1| [Aspergillus niger]
  misc_feature (11)..(277): NCBI GI: 46107260 Blast Desc: FG00513.1 [Gibberella zeae PH-1]
  misc_feature (10)..(283): NCBI GI: 256724033 Blast Desc: NECHADRAFT_86390 [Nectria haematococca mpVI 77-13-4]
  misc_feature (12)..(269): NCBI GI: 171696214 Blast Desc: protein product [Podospora anserina] gi|170948349|emb|CAP60513.1| protein product [Podospora anserina]
  misc_feature (13)..(274): NCBI GI: 169610786 Blast Desc: SNOG_08501 [Phaeosphaeria nodorum SN15] gi|111062549|gb|EAT83669.1| SNOG_08501 [Phaeosphaeria nodorum SN15]
  misc_feature (4)..(282): NCBI GI: 256732368 Blast Desc: NECHADRAFT_40508 [Nectria haematococca mpVI 77-13-4]
  misc_feature (117)..(269): NCBI GI: 46134135 Blast Desc: FG09207.1 [Gibberella zeae PH-1]
MADTQPAPSLGSWHSLPPEIQVAILETLLQDGCSIAASAAVSREWQSVIEQRNFARIRVTPSRVAAFKSMTRRNRALVKYIWFCIELEDYECEWCDITAHSNDLTSIMSVKDYTRILKAFTGLFRALSKWIPQGDLTLDISVHSPSDPHHFFRYLTFEPDEPNLSISDCSKFSLPAIEDCPSHGWKNGHQKASCVGFSNFQRIFQSIEKPQQFTYPGQEAQYWKELPKVPAITAAFFRQQTRRRWSPETLSYMLSRLPAVQEINYEPWRGWMDYEMDAYDKGKYLSISSLVSATANLRGISLSIIFLVAHSSAI

SEQ ID NO: 3701 - DNA, 441 bp, Muscodor strobelii
  misc_feature: SGI EST ID NO. CUFF.9297.0
  misc_feature: Variant of the nucleotide sequence at SEQ ID NO 3699
ttgagcattatttgttgacgaccactgacaaacttccctgaatatagccgatgtaactcgaactccgtcatggcagacacccaaccagcgccttcccttggttcttggcatagcctacctcccgagatccaggtcgccattctagaaacgttacttcaggatggctgcagcatcgcagcgtccgctgccgtgtcgcgagagtggcagagcgtcattgagcaacgcaactttgctcgtatcagagtgactccatcacgtgtcgcagccttcaaatccatgactcgtcgcaatcgggcattggtgaaatatatatggttttgcatcgagctcgaagattatgaatgcgagtggtgcgacataaccgcccatagcaatgacttgacgagtatcatgagtgtcaaagactacacgcggattctcaaagcatttaccggtctcttt

SEQ ID NO: 3702 - DNA, 1080 bp, Muscodor strobelii
  misc_feature: SGI cDNA ID NO. 560900
  misc_feature: Encodes the peptide sequence at SEQ ID NO 3703
atgttcctgatctcacgcatccgcacacaatacctgtcatggtcaagagacactccacttccgagtctgtccgacgcaactgtcgagtttcagtcgtggtacaagttcgacagctccacatcgtcatgggttaggactaaacgggagaatccagcctatggcgcccaggaagcgtctgcagaaacacataccgctgaggcaccgttggtcctcgtgacatggaatattgatgcaacctcagaatggcctgagcttcgcaccggcgctatcttgtcacagatctcttccctccagcctatgccagacattgttttcctacaagaggtcccccgggcttctcttcatttcttgatgaaagactctcgtgcacgaaagaattggttcctcagtgaagctaatgagaatgcctggaacactcagtcgttcgcaaatgtcacactcctatcaaaattcaggtttggtgacggaagcagcggtccgaatcaggcaatacttgggccggtattgagagtgcggttccccagccgatttggccgggacgcgctttgttgcgatgtgttcattcctgatgcgaaggcatcttcgacacagggggtggcgcggcatatcaggattcggcttatcaatgttcacctggattctcttccgatccagccctctcttcggccccggcaggtagcgatcgtggcatccctgcttcattgcgccgaccgtggtataatcgccggcgacttcaaccctgtgcttcccgaggatgatggtcttgtgaaaaagaacgggcttctggacgcctgggctgagatacgaggcgacgagccaggcttcacctggggtgccgacggcaaacaacccttcccaccaaatcggatggacaaggttgccatgcttggccttcaagcaagtagcattggcatcattgttccgggtatcatcaaggagaattcactaggcgaaaagcagagtgatcacaatactactcatgtggacgactctaacgagactcaacaagacataaagcccgaggacaatagtatagaatggagcgaccactcgggtctagtctgttgctttggaacataa

SEQ ID NO: 3703 - protein, 359 aa, Muscodor strobelii
  misc_feature: SGI Peptide ID NO. 560900
  misc_feature (69)..(357): Pfam Id: PF03372 Pfam Desc: Endonuclease/Exonuclease/phosphatase family
  misc_feature (1)..(358): NCBI GI: 119173435 Blast Desc: CIMG_10190 [Coccidioides immitis RS]
  misc_feature (1)..(358): NCBI GI: 240111828 Blast Desc: Endonuclease/Exonuclease/phosphatase family protein [Coccidioides posadasii C735 delta SOWgp]
  misc_feature (19)..(357): NCBI GI: 145230966 Blast Desc: An01g13470 [Aspergillus niger] gi|134055872|emb|CAK44133.1| protein product [Aspergillus niger]
  misc_feature (1)..(358): NCBI GI: 145246800 Blast Desc: An12g05840 [Aspergillus niger] gi|134080370|emb|CAK46292.1| protein product [Aspergillus niger]
  misc_feature (31)..(357): NCBI GI: 256734214 Blast Desc: NECHADRAFT_35874 [Nectria haematococca mpVI 77-13-4]
  misc_feature (1)..(358): NCBI GI: 169767270 Blast Desc: [Aspergillus oryzae RIB40] gi|83765961|dbj|BAE56104.1| protein product [Aspergillus oryzae]
  misc_feature (1)..(358): NCBI GI: 238484113 Blast Desc: conserved [Aspergillus flavus NRRL3357] gi|220701345|gb|EED57683.1| conserved [Aspergillus flavus NRRL3357]
  misc_feature (1)..(358): NCBI GI: 255932429 Blast Desc: Pc12g09440 [Penicillium chrysogenum Wisconsin 54-1255] gi|211582390|emb|CAP80571.1| Pc12g09440 [Penicillium chrysogenum Wisconsin 54-1255]
  misc_feature (86)..(357): NCBI GI: 116201479 Blast Desc: CHGG_08624 [Chaetomium globosum CBS 148.51] gi|88177142|gb|EAQ84610.1| CHGG_08624 [Chaetomium globosum CBS 148.51]
  misc_feature (1)..(275): NCBI GI: 242818240 Blast Desc: endonuclease/exonuclease/phosphatase family protein [Talaromyces stipitatus ATCC 10500] gi|218713542|gb|EED12966.1| endonuclease/exonuclease/phosphatase family protein [Talaromyces
MFLISRIRTQYLSWSRDTPLPSLSDATVEFQSWYKFDSSTSSWVRTKRENPAYGAQEASAETHTAEAPLVLVTWNIDATSEWPELRTGAILSQISSLQPMPDIVFLQEVPRASLHFLMKDSRARKNWFLSEANENAWNTQSFANVTLLSKFRFGDGSSGPNQAILGPVLRVRFPSRFGRDALCCDVFIPDAKASSTQGVARHIRIRLINVHLDSLPIQPSLRPRQVAIVASLLHCADRGIIAGDFNPVLPEDDGLVKKNGLLDAWAEIRGDEPGFTWGADGKQPFPPNRMDKVAMLGLQASSIGIIVPGIIKENSLGEKQSDHNTTHVDDSNETQQDIKPEDNSIEWSDHSGLVCCFGT

SEQ ID NO: 3704 - DNA, 1516 bp, Muscodor strobelii
  misc_feature: SGI EST ID NO. CUFF.9300.0
  misc_feature: Variant of the nucleotide sequence at SEQ ID NO 3702
gctcctacatctttctcattttcatctgcctaggctggatgtcttccagacggcacacctcatgccctcgagcctgtgtagcgagagacataaactctgggccttgtgagaaatcgaccatttgaccattgatcggcgcccatctattctgtctcaggaaatctacgactgcgccatacgcaaatgtctacattccgtcacggatagcgcaatgttcctgatctcacgcatccgcacacaatacctgtcatggtcaagagacactccacttccgagtctgtccgacgcaactgtcgagtttcagtcgtggtacaagttcgacagctccacatcgtcatgggttaggactaaacgggagaatccagcctatggcgcccaggaagcgtctgcagaaacacataccgctgaggcaccgttggtcctcgtgacatggaatattgatgcaacctcagaatggcctgagcttcgcaccggcgctatcttgtcacagatctcttccctccagcctatgccagacattgttttcctacaagaggtcccccgggcttctcttcatttcttgatgaaagactctcgtgcacgaaagaattggttcctcagtgaagctaatgagaatgcctggaacactcagtcgttcgcaaatgtcacactcctatcaaaattcaggtttggtgacggaagcagcggtccgaatcaggcaatacttgggccggtattgagagtgcggttccccagccgatttggccgggacgcgctttgttgcgatgtgttcattcctgatgcgaaggcatcttcgacacagggggtggcgcggcatatcaggattcggcttatcaatgttcacctggattctcttccgatccagccctctcttcggccccggcaggtagcgatcgtggcatccctgcttcattgcgccgaccgtggtataatcgccggcgacttcaaccctgtgcttcccgaggatgatggtcttgtgaaaaagaacgggcttctggacgcctgggctgagatacgaggcgacgagccaggcttcacctggggtgccgacggcaaacaacccttcccaccaaatcggatggacaaggttgccatgcttggccttcaagcaagtagcattggcatcattgttccgggtatcatcaaggagaattcactaggcgaaaagcagagtgatcacaatactactcatgtggacgactctaacgagactcaacaagacataaagcccgaggacaatagtatagaatggagcgaccactcgggtctagtctgttgctttggaacataaatccgacaactacgattatattttatcagcacaaatatcccacatggggaatgtttcgactgtacaaattcacctgagctttagatccagtttctgccacgtttttaagtccttaaactctttcacccattcccgcagacccttagccatatcactctgtagactagctaaatccatctgtacgccgttactaatcagcaaatcgcgaatggaagtgatgtccaa

SEQ ID NO: 3705 - DNA, 666 bp, Muscodor strobelii
  misc_feature: SGI cDNA ID NO. 560901
  misc_feature: Encodes the peptide sequence at SEQ ID NO 3706
atgggtaaggatttctgtgcgaatggacttcgaataggagcgctgtacacccaaaatgagggtctcctgacagcaatctctaacacatgtctcacaaattgggtacattaccttgcccaggatgcctgggcaaaaatgctcgaggatcggaagtttatgcatcaggcggtcgctcacatcaggatagcgaagatgaatgaggcgttcaggaagctgacgacctggttgaagtcctctacggcgaagggcaaacaacctaccattccgcaactatcccagcgagatctatatttctgtgccatgtacttacacacgcagctcacggcacggaaagtgaactattacttctgtggcgggttagcatgtatcaacgttggcatgacgccccacacgacatcgggtattgatatcgtcgttccatatggaagtcatggctacggtactctgctcgagatcctttcccggtatcctttcatccaggacaagactgacgttctgcctccgggttcgcactacttcttcgtagagtcaacggaaaactttgtgaaatcgacggtgctatcgctggcttcatggctttcccgacctatgaaccgtcttgggtcatcaaggttggcggccaaatgcaactcagttttctcgaacccaagggtttactacggttaa

SEQ ID NO: 3706 - protein, 221 aa, Muscodor strobelii
  misc_feature: SGI Peptide ID NO. 560901
  misc_feature (3)..(78): NCBI GI: 171691142 Blast Desc: protein product [Podospora anserina] gi|170945519|emb|CAP71631.1| protein product [Podospora anserina]
  misc_feature (3)..(79): NCBI GI: 256727229 Blast Desc: NECHADRAFT_33099 [Nectria haematococca mpVI 77-13-4]
  misc_feature (3)..(52): NCBI GI: 242812364 Blast Desc: acc synthase, [Talaromyces stipitatus ATCC 10500] gi|218714281|gb|EED13704.1| acc synthase, [Talaromyces stipitatus ATCC 10500]
  misc_feature (3)..(51): NCBI GI: 169765412 Blast Desc: [Aspergillus oryzae RIB40] gi|83765032|dbj|BAE55175.1| protein product [Aspergillus oryzae]
  misc_feature (3)..(61): NCBI GI: 259488977 Blast Desc: TPA: conserved [Aspergillus nidulans FGSC A4]
  misc_feature (3)..(61): NCBI GI: 67516925 Blast Desc: AN0744.2 [Aspergillus nidulans FGSC A4] gi|40746230|gb|EAA65386.1| AN0744.2 [Aspergillus nidulans FGSC A4]
  misc_feature (1)..(78): NCBI GI: 115401450 Blast Desc: [Aspergillus terreus NIH2624] gi|114190254|gb|EAU31954.1| [Aspergillus terreus NIH2624]
  misc_feature (1)..(78): NCBI GI: 226460290 Blast Desc: [Micromonas pusilla CCMP1545]
  misc_feature (1)..(59): NCBI GI: 255076457 Blast Desc: 1-aminocyclopropane-1-carboxylate synthase [Micromonas sp. RCC299] gi|226517167|gb|ACO63161.1| 1-aminocyclopropane-1-carboxylate synthase [Micromonas sp.
MGKDFCANGLRIGALYTQNEGLLTAISNTCLTNWVHYLAQDAWAKMLEDRKFMHQAVAHIRIAKMNEAFRKLTTWLKSSTAKGKQPTIPQLSQRDLYFCAMYLHTQLTARKVNYYFCGGLACINVGMTPHTTSGIDIVVPYGSHGYGTLLEILSRYPFIQDKTDVLPPGSHYFFVESTENFVKSTVLSLASWLSRPMNRLGSSRLAAKCNSVFSNPRVYYG

SEQ ID NO: 3707 - DNA, 819 bp, Muscodor strobelii
  misc_feature: SGI cDNA ID NO. 560902
  misc_feature: Encodes the peptide sequence at SEQ ID NO 3708
atgggtaaggatttctgtgcgaatggacttcgaataggagcgctgtacacccaaaatgagggtctcctgacagcaatctctaacacatgtctcacaaattgggtacattaccttgcccaggatgcctgggcaaaaatgctcgaggatcggaagtttatgcatcaggcggtcgctcacatcaggatagcgaagatgaatgaggcgttcaggaagctgacgacctggttgaagtcctctacggcgaagggcaaacaacctaccattccgcaactatcccagcgagatctatatttctgtgccatgtacttacacacgcagctcacggcacggaaagtgaactattacttctgtggcgggttagcatgtatcaacgttggcatgacgccccacacgacatcgggtattgatatcgtcgttccatatggaagtcatggctacggtactctgctcgagatcctttcccgagtcaacggaaaactttgtgaaatcgacggtgctatcgctggcttcatggctttcccgacctatgaaccgtcttgggtcatcaaggttggcggccaaatgcaactcagttttctcgaacccaagggtttactacggttaaagttaagcagctgggcgaatgagactcgtcgcaacggagctaagagaaaaaggaattggttggacatcacttccattcgcgatttgctgattagtaacggcgtacagatggatttagctagtctacagagtgatatggctaagggtctgcgggaatgggtgaaagagtttaaggacttaaaaacgtggcagaaactggatctaaagctcaggtga

SEQ ID NO: 3708 - protein, 272 aa, Muscodor strobelii
  misc_feature: SGI Peptide ID NO. 560902
  misc_feature (157)..(268): NCBI GI: 242818245 Blast Desc: TSTA_054770 [Talaromyces stipitatus ATCC 10500] gi|218713543|gb|EED12967.1| TSTA_054770 [Talaromyces stipitatus ATCC 10500]
  misc_feature (3)..(78): NCBI GI: 171691142 Blast Desc: protein product [Podospora anserina] gi|170945519|emb|CAP71631.1| protein product [Podospora anserina]
  misc_feature (3)..(77): NCBI GI: 256727229 Blast Desc: NECHADRAFT_33099 [Nectria haematococca mpVI 77-13-4]
  misc_feature (3)..(51): NCBI GI: 242812364 Blast Desc: acc synthase, [Talaromyces stipitatus ATCC 10500] gi|218714281|gb|EED13704.1| acc synthase, [Talaromyces stipitatus ATCC 10500]
  misc_feature (110)..(267): NCBI GI: 189194932 Blast Desc: conserved [Pyrenophora tritici-repentis Pt-1C-BFP] gi|187979683|gb|EDU46309.1| conserved [Pyrenophora tritici-repentis Pt-1C-BFP]
  misc_feature (3)..(51): NCBI GI: 169765412 Blast Desc: [Aspergillus oryzae RIB40] gi|83765032|dbj|BAE55175.1| protein product [Aspergillus oryzae]
  misc_feature (3)..(61): NCBI GI: 259488977 Blast Desc: TPA: conserved [Aspergillus nidulans FGSC A4]
  misc_feature (3)..(61): NCBI GI: 67516925 Blast Desc: AN0744.2 [Aspergillus nidulans FGSC A4] gi|40746230|gb|EAA65386.1| AN0744.2 [Aspergillus nidulans FGSC A4]
  misc_feature (1)..(78): NCBI GI: 115401450 Blast Desc: [Aspergillus terreus NIH2624] gi|114190254|gb|EAU31954.1| [Aspergillus terreus NIH2624]
  misc_feature (1)..(78): NCBI GI: 226460290 Blast Desc: [Micromonas pusilla CCMP1545]
MGKDFCANGLRIGALYTQNEGLLTAISNTCLTNWVHYLAQDAWAKMLEDRKFMHQAVAHIRIAKMNEAFRKLTTWLKSSTAKGKQPTIPQLSQRDLYFCAMYLHTQLTARKVNYYFCGGLACINVGMTPHTTSGIDIVVPYGSHGYGTLLEILSRVNGKLCEIDGAIAGFMAFPTYEPSWVIKVGGQMQLSFLEPKGLLRLKLSSWANETRRNGAKRKRNWLDITSIRDLLISNGVQMDLASLQSDMAKGLREWVKEFKDLKTWQKLDLKLR

SEQ ID NO: 3709 - DNA, 1605 bp, Muscodor strobelii
  misc_feature: SGI cDNA ID NO. 560903
  misc_feature: Encodes the peptide sequence at SEQ ID NO 3710
atggagctctttagcacttcattatcatggaaacattttaccgtgactatcattttgtactttatctctattgcgatctatcggctttcctggcatcctttagctagatttcccggatctaaacttgcagccgtgactcgcttcgtcgaggggtattacgacgtcttccgcaatggccagtatactttcaaaattgctgaaatgcacaaaaaatatggtatctcatcttctatgatatttgatcatcatggtggtctcatcagactgaccgcttcagggccaataattcgcatcagtccacacgagcttcatgttatcgacccaaacttcttcgaaactctatactcacgagacggccgatgggataagtacggctggagctatgacgcattcggcgccgattattccacaatctgcgctttagatcaccatgtccacagacgtcggcgagctccccttggcacatttctgtctaagagtaacgtatccaacaagcaagatattataaccaggtccgtggcaaaactatgtcatcgactcgacgattttgcagaatccgatcatggaaaaggcgcaggcagtctcaagctcagcccagccatcagttccttcacaagagacgtggcaaccgagttcttacttggagagtctcacaacaatcttgatgacccatatttcaatcctggtttgacgaccgttcttcaagcttcgggcgctatttggcgcatatcaaaacatgtgcgatggtatggccgagctatgaaatcgcttcccttatcggttgttgacaagttgagcgatgaaaacggcaaagcattcctgatctttttgaaggacatgatccgggttaccttgaacacccactccgcctggaccaacaagacactgagtgttgattcgccgcgtacgcttgtgagtgaaatactcgattcagacctaccactgtccgataaatcttttgagcgatgctttgacgaaatagctaccgtttctggtgcagcttttgaaactactgcgcactctctacgagtgatactctattttgtatacagcgaccgatacattcttcaacatcttcgagacgaactagcatctgtcaaagcaaagagcggcggacagagcctcaaactagcagagctcgagcagctaccttatcttactgctgtacttatggagggacttcgtctcgctcccgcgcttgcaacacgacaagctcggatagcaccagatcgtgatttgatttataaatcatggacaattcctgcaggaacgccagtaggtatgacgaccattttgatgcatcaggacccagatatcttcccagacccagcgaaattcaatcccgagcgatgggtagatattaatgaacggaggaaggcagaaaaggcgtttgcacccttctctagaggcacaagaatatgtgttggaatgcacctcgcttgggcggagctctatatgttcatagctgggattgtcccgcactacgatcttaattttgacaatgcggccgttgatgacattaaatggactagcgatcagttcattattggcactagcgggaaaggtgggctttccgcaactgtcaagaaggttgagggcgattag

SEQ ID NO: 3710 - protein, 534 aa, Muscodor strobelii
  misc_feature: SGI Peptide ID NO. 560903
  misc_feature (38)..(528): Pfam Id: PF00067 Pfam Desc: Cytochrome P450
  misc_feature (332)..(497): Pfam Id: PF00067 Pfam Desc: Cytochrome P450
  misc_feature (1)..(528): NCBI GI: 171683471 Blast Desc: protein product [Podospora anserina] gi|170941695|emb|CAP67349.1| protein product [Podospora anserina]
  misc_feature (1)..(533): NCBI GI: 238841488 Blast Desc: cytochrome P450 [Microsporum canis CBS 113480]
  misc_feature (8)..(478): NCBI GI: 116206024 Blast Desc: CHGG_02305 [Chaetomium globosum CBS 148.51] gi|88182902|gb|EAQ90370.1| CHGG_02305 [Chaetomium globosum CBS 148.51]
  misc_feature (7)..(533): NCBI GI: 238839890 Blast Desc: cytochrome P450 [Microsporum canis CBS 113480]
  misc_feature (18)..(533): NCBI GI: 255938474 Blast Desc: Pc14g00120 [Penicillium chrysogenum Wisconsin 54-1255] gi|211584628|emb|CAP74153.1| Pc14g00120 [Penicillium chrysogenum Wisconsin 54-1255]
  misc_feature (15)..(530): NCBI GI: 242795016 Blast Desc: cytochrome P450, [Talaromyces stipitatus ATCC 10500] gi|218719081|gb|EED18501.1| cytochrome P450, [Talaromyces stipitatus ATCC 10500]
  misc_feature (17)..(515): NCBI GI: 259480381 Blast Desc: TPA: cytochrome P450, (Eurofung) [Aspergillus nidulans FGSC A4]
  misc_feature (15)..(528): NCBI GI: 258572987 Blast Desc: conserved [Uncinocarpus reesii 1704] gi|237900941|gb|EEP75342.1| conserved [Uncinocarpus reesii 1704]
  misc_feature (14)..(520): NCBI GI: 240106487 Blast Desc: Cytochrome P450 family protein [Coccidioides posadasii C735 delta SOWgp]
  misc_feature (14)..(520): NCBI GI: 119191412 Blast Desc: CIMG_00083 [Coccidioides immitis RS]
MELFSTSLSWKHFTVTIILYFISIAIYRLSWHPLARFPGSKLAAVTRFVEGYYDVFRNGQYTFKIAEMHKKYGISSSMIFDHHGGLIRLTASGPIIRISPHELHVIDPNFFETLYSRDGRWDKYGWSYDAFGADYSTICALDHHVHRRRRAPLGTFLSKSNVSNKQDIITRSVAKLCHRLDDFAESDHGKGAGSLKLSPAISSFTRDVATEFLLGESHNNLDDPYFNPGLTTVLQASGAIWRISKHVRWYGRAMKSLPLSVVDKLSDENGKAFLIFLKDMIRVTLNTHSAWTNKTLSVDSPRTLVSEILDSDLPLSDKSFERCFDEIATVSGAAFETTAHSLRVILYFVYSDRYILQHLRDELASVKAKSGGQSLKLAELEQLPYLTAVLMEGLRLAPALATRQARIAPDRDLIYKSWTIPAGTPVGMTTILMHQDPDIFPDPAKFNPERWVDINERRKAEKAFAPFSRGTRICVGMHLAWAELYMFIAGIVPHYDLNFDNAAVDDIKWTSDQFIIGTSGKGGLSATVKKVEGD

SEQ ID NO: 3711 - DNA, 2148 bp, Muscodor strobelii
  misc_feature: SGI cDNA ID NO. 560904
  misc_feature: Encodes the peptide sequence at SEQ ID NO 3712
atgcatcgtcttccaacgcttctccctaggcccagctccagtagcccaggtcaagatcccgttgaggagccggatcccggacagaaaacgagagccgtcgctgcttgcgatacttgtcaaaaacggaaaatcaaatgtgatgctaaaagaccgatatgttctccttgcggctctcgtaggcgcgattgtcaatacagtacgaatcccgccgaatcaagagtcttagcaaggaagcgcaagtacaaagagctcgagcaggtcgtggatgagtcaagaaacgcggagtccaagttggaaaggtttcttggcgctatcagatcccataacgcagaggacgttgctgctattgttcagcgggtccaacaaggcgaagatatcgactccttgttacggtccatttcaacagccgacgcacttttccagctccatgtcacaccggaaaccagatatcgcttccagtgccctcttaatatagatatgcccacctatctgcgtcgcaccggcaacccttacctagtgtctttgctctatgagacaacattcgttttaccggaaaaaggtgtcacaacagtagcacagagaaatgacaccatgtacaaatcaccctacctcaagccgtatattgctgcccatatggtagatccaagacttgacgcggtaaagccgtctaattggacgctggtcacgagcgacaatgacttgatgaggagattgcttcgttccttcttcttacacgaatatcacttctttgccatgttccaaaaggaccacttcctcgacgatatgatttcgggatctcagcgcttttgctcctctttactcgtaaacgtaatcttggcccaagcatatgtaggcccactcctctatcgcaacgaacattggaatccacaaacactaggctataggttcttcgcggaggctaaaagactttgggaactcgagcgaaaccgactatctcttacgaccgtccaagctggcctaatgattaacattctctacaacatgtattccatggacaaactaggtttacactttgcccttcaatctgcagccatggcaagtaagatgggcctcttctcgtcgacgacagatatcgtggacaagcggcagaaacactcatatgacttcacagcttggtgcttgtactcctggttaagcctagaatgctaccatttcatgattccgccagtgcatcaagaaccgccgaaaactccgcttcctgacccgagtcaggatcttgcgtggtatggtgagacatgggttcagtaccctctgagtaataccacttaccccctccacgatggctatctcttttcctggaaggcgaagttgatgcacatcatcaatcgcgttgctgattcgttgtatgggaaacgtgaagaagggcagagcgcagaactgccttcagtccaagcgatcaggggtttcatcaaggacatggtctcctggtattcttctttgccgagctgcttgtcgccgactgagatcgtatatccttcgcagctcaagctacacttgctttatcacaaccttctcatggatttgtatgcactgcttggccgtcatgtagacgtcgaagggacctcaatcagccccgaggctattgaaaaaggcatcgacgattcccaaaggtgttttgaaacaatcctcagactgtactacctccggcacggcttcgcgggcgcagacacgtatgcgacccacgatctacaaatactggccttcatggccctcgaccgagtaaagcggctcgcaagcacttccagcgatgagacaacagctccatccagtccagacgcattgaccgctatcgcaaaaaccgaggcccgtagtgcgttgcttctcgctatgaaaggcctccacgaccaaggtaggaactactacaccccacaacttattttcagcatcgcccggcagaggatggagttggaggacgtcaacgtactttgtcgactcgtcgacatgggacttgagcggaaggcgcagacggcggggatgcatcaagcgcagcatgtccaggcgcagtatcctgtcaacatcgtcgatctggcggaggacccagagtcgcgccgtctggaggtccttgtgagcgaatatgaaaacttggcacttgaggcggcggggtcgcctgctcgggctgatgactag

SEQ ID NO: 3712 - protein, 715 aa, Muscodor strobelii
  misc_feature: SGI Peptide ID NO. 560904
  misc_feature (34)..(72): Pfam Id: PF00172 Pfam Desc: Fungal Zn(2)-Cys(6) binuclear cluster domain
  misc_feature (29)..(699): NCBI GI: 256729348 Blast Desc: NECHADRAFT_47693 [Nectria haematococca mpVI 77-13-4]
  misc_feature (9)..(661): NCBI GI: 171687643 Blast Desc: protein product [Podospora anserina] gi|170943783|emb|CAP69435.1| protein product [Podospora anserina]
  misc_feature (28)..(709): NCBI GI: 85116020 Blast Desc: NCU03120 [Neurospora crassa OR74A] gi|28926778|gb|EAA35743.1| [Neurospora crassa OR74A]
  misc_feature (24)..(686): NCBI GI: 256726683 Blast Desc: NECHADRAFT_11983 [Nectria haematococca mpVI 77-13-4]
  misc_feature (7)..(706): NCBI GI: 46115064 Blast Desc: FG03374.1 [Gibberella zeae PH-1]
  misc_feature (27)..(711): NCBI GI: 116180470 Blast Desc: CHGG_00863 [Chaetomium globosum CBS 148.51] gi|88185160|gb|EAQ92628.1| CHGG_00863 [Chaetomium globosum CBS 148.51]
  misc_feature (32)..(711): NCBI GI: 189192160 Blast Desc: conserved [Pyrenophora tritici-repentis Pt-1C-BFP] gi|187974025|gb|EDU41524.1| conserved [Pyrenophora tritici-repentis Pt-1C-BFP]
  misc_feature (26)..(711): NCBI GI: 256731197 Blast Desc: NECHADRAFT_85205 [Nectria haematococca mpVI 77-13-4]
  misc_feature (76)..(668): NCBI GI: 171685204 Blast Desc: protein product [Podospora anserina] gi|170942563|emb|CAP68215.1| protein product [Podospora anserina]
  misc_feature (33)..(703): NCBI GI: 169600825 Blast Desc: SNOG_03265 [Phaeosphaeria nodorum SN15] gi|160705524|gb|EAT89996.2| SNOG_03265 [Phaeosphaeria nodorum SN15]
MHRLPTLLPRPSSSSPGQDPVEEPDPGQKTRAVAACDTCQKRKIKCDAKRPICSPCGSRRRDCQYSTNPAESRVLARKRKYKELEQVVDESRNAESKLERFLGAIRSHNAEDVAAIVQRVQQGEDIDSLLRSISTADALFQLHVTPETRYRFQCPLNIDMPTYLRRTGNPYLVSLLYETTFVLPEKGVTTVAQRNDTMYKSPYLKPYIAAHMVDPRLDAVKPSNWTLVTSDNDLMRRLLRSFFLHEYHFFAMFQKDHFLDDMISGSQRFCSSLLVNVILAQAYVGPLLYRNEHWNPQTLGYRFFAEAKRLWELERNRLSLTTVQAGLMINILYNMYSMDKLGLHFALQSAAMASKMGLFSSTTDIVDKRQKHSYDFTAWCLYSWLSLECYHFMIPPVHQEPPKTPLPDPSQDLAWYGETWVQYPLSNTTYPLHDGYLFSWKAKLMHIINRVADSLYGKREEGQSAELPSVQAIRGFIKDMVSWYSSLPSCLSPTEIVYPSQLKLHLLYHNLLMDLYALLGRHVDVEGTSISPEAIEKGIDDSQRCFETILRLYYLRHGFAGADTYATHDLQILAFMALDRVKRLASTSSDETTAPSSPDALTAIAKTEARSALLLAMKGLHDQGRNYYTPQLIFSIARQRMELEDVNVLCRLVDMGLERKAQTAGMHQAQHVQAQYPVNIVDLAEDPESRRLEVLVSEYENLALEAAGSPARADD

SEQ ID NO: 3713 - DNA, 2455 bp, Muscodor strobelii
  misc_feature: SGI EST ID NO. CUFF.9329.1
  misc_feature: Variant of the nucleotide sequence at SEQ ID NO 3711
ggaatccacaaacactaggctataggttcttcgcggaggctaaaagactttgggaactcgagcgaaaccgactatctcttacgaccgtccaagctggcctaatgattaacattctctacaacatgtattccatggacaaactaggtttacactttgcccttcaatctgcagccatggcaagtaagatgggcctcttctcgtcgacgacagatatcgtggacaagcggcagaaacactcatatgacttcacagcttggtgcttgtactcctggttaagcctagaatgctaccatttcatgattccgccagtgcatcaagaaccgccgaaaactccgcttcctgacccgagtcaggatcttgcgtggtatggtgagacatgggttcagtaccctctgagtaataccacttaccccctccacgatggctatctcttttcctggaaggcgaagttgatgcacatcatcaatcgcgttgctgattcgttgtatgggaaacgtgaagaagggcagagcgcagaactgccttcagtccaagcgatcaggggtttcatcaaggacatggtctcctggtattcttctttgccgagctgcttgtcgccgactgagatcgtatatccttcgcagctcaagctacacttgctttatcacaaccttctcatggatttgtatgcactgcttggccgtcatgtagacgtcgaagggacctcaatcagccccgaggctattgaaaaaggcatcgacgattcccaaaggtgttttgaaacaatcctcagactgtactacctccggcacggcttcgcgggcgcagacacgtatgcgacccacgatctacaaatactggccttcatggccctcgaccgagtaaagcggctcgcaagcacttccagcgatgagacaacagctccatccagtccagacgcattgaccgctatcgcaaaaaccgaggcccgtagtgcgttgcttctcgctatgaaaggcctccacgaccaaggtaggaactactacaccccacaacttattttcagcatcgcccggcagaggatggagttggaggacgtcaacgtactttgtcgactcgtcgacatgggacttgagcggaaggcgcagacggcggggatgcatcaagcgcagcatgtccaggcgcagtatcctgtcaacatcgtcgatctggcggaggacccagagtcgcgccgtctggaggtccttgtgagcgaatatgaaaacttggcacttgaggcggcggggtcgcctgctcgggctgatgactaggcgatgagacgagggtgggtgtttggtttggacgaaggttttgttgtgatccttggaacgctgacagcgtcagggaagaattttcactgttggttaagcaccagaggtgtcgaaaatatatgaaaggatgagggcggtatctagcacgatggcgatcgcgagacgcctccggcatcatgtctgagatgaccatttcaccagcgttattgcaagctcacttcctgcgaagctagcggccacgtcgtgataaagacatcaatgacaggggccgaaagtccgaggcggagcgacatggtggtgatgcggtcttgggggattagcccactctctgtcgctttggtttcgagtatgtgggatcatgactaccccgtcacctgctagttcatggtcaagtttcgtaccctgaagctctgtcacaggagcttctagctcattgattggtatgctctcgattttactcggccgttcttcggcagacatgtccatctcgcctttctcagatttcgagcgttgcgcttcgcgatttttacggtaacgcaaccaaagcacgaatgatatcaacgatatcaacgcaataattattgccgatgctgatcctgccacgattccagttatttgaacagttgatgaatgtgaggtcgacgccgcgtctatgggcgctgacgaagtttgatccggactcgaagttgtcctctttattgttggtgttgaatgcactagtatacgcctatatcagcggcagaatttaatgagattatttgtgacgcttcataccctgggtcgatggagtaaaagcattcgcactccagccattcaccggtatcgcaaagatggacaaagtttctgactccgaagctgtagtcgtgattgcatcggtacttatcggatcattgatatggtgtgtcagaatgccgcccggtgggacagtggacaagcattgacttgggaaaaagtgtctttggtttggcccgggataggtcaatagttcagtgagaggtgataccaataagtattgtctacattcatgattgcgaggatatgttatcaaaaaaggtgcccagtcgaatcaaatatcagatgatgcaagttcacttacgaagggcagcagaaaatttgcgtactcgttccacttatgacggacgtcgtcgccgtgtaatatgcagcaggacacacgaactcaaatccaa

SEQ ID NO: 3714 - DNA, 2403 bp, Muscodor strobelii
  misc_feature: SGI cDNA ID NO. 560905
  misc_feature: Encodes the peptide sequence at SEQ ID NO 3715
atgtgggttctcgagagcgagggcgatggcctcgaaggcaaacgactatggcttcgacccggaaaacgctatgttttcggtcgcaccgttgccgaacctggtcagatcgctgttcatggcccgggttctgaaaaggtctcccgcaagcatatggccatccgagtcgatgccgttgaagatggacatgcacttgtcatggatagccgatccaagatcactatcgaggatcttgggtctaaatcaggcaccaaggtcaatggcaccaaatacaagggcgagtcttgtacattgtcgcaagagtctagtgtcatctacattggccccttgaaatccatgtttcgcatcacgtggtttcccgtcgttctaagtttttcctacaccaacgctgagctccgtaccaacccccttacccgactgcgagcgtctcttgagcaactagacaccaaacttttatccgaatacgataccaaacggactacacatgtcgtctccaagaaacgaaatacaccaaagtgcttacaagctttgatatctggccgcttcatcgttaatgacggatttgtcaatgccgtggtcaacgctgccgcgccatctgaacaaaccgaggatggtgtctccatcagcaagctcgagcaagattttgatgccaattggcctgatgcgaagtcttttactcccgcagctggcgatgagcctgtcccgagacaaccagaagcctttatccccaactctgcacgagcagatatctttgacggctacactttcatcttctacgatgagaaacagttcaagaacttgctggcaccaatcaccgatggcaaaggcaaggctctttttcatcccgtcgtggcggaacagacaagaatcgatgatttcgttcggtacgtgaaaggagttgccggcgagaaaggcttaggtgagttcgaagatggaagcgaaggcaaaggcgtagttgtcgtcaaatggatgccttcgtcgccagatcatgagatttggtacgagaacttcataaagactgtatctttgaggctggatcatcgtctggtcaaccagaaggattttctcgatgccatattgaacaatgacgcaagtgaactacgacggcctcttgaattcgagtcacagccgacatcctcagaacagcataacttgacgacgtctgctgcagcagaagctatggcagttgacgagccagagccaccagctccaccatcacctcccaaagcagcacccagacgccgtgctcgagaaccaacaaagagccggtttagaggacttgctttatcgcttgttgacaacgatgaggcagaagagaaacatgttcctgctcctgcccccgaagtcgcgcctatcgctgaagaagcctcgcaagaagggctcttcgtgtcacaagaccccgcagcgtccgaggcagagagcactaccatgtcacaggaacgaccaaccagatcacagcgaaagagagcggcttcgcccgacgccgatgatttgatgaaccagattgcgccctcggcggctcaagccaaacgtcggcggatcgcagcaggcgaagatcccctcccgactatacccaaatcaccaaccccaaaacccgagccaacacctaagaagcctacagcccgcgtcaagaaggaaatggacgttctcgaacaggcacgtaaaaaccgtgaagaagcggacaggcgtgcacgagaagaccgcgaagagcccaaaaccgaattaggagacgcagagatggagcagatccgtcgcatgcatatcatggaacccatggctctacgtcaggctccaccgatcagatcccgacagcaggatatcgccgacggtagatgggatccgaaatggaacggccggaagaacttcaagagattccagcagcgtggtgcagttcagggacgacgcgtggacagaatcattgtcccgctcgagccggtgcgaaccaagagattcggcattggtgatgacttctgggttgaggacgagagcagttcccgacgagcagagaaggagaaggaaaaggagagacaagatgcaagtttgagaagccaacaggagagcgagaggagtgagagaaataggaggaatgttagacgggttgtgggaccgattgattctagtgatgaggatgaggataatgggacaggggtgcaggtggatgataatgaagaggaggatgacgaagcagttgttttgacgcgcaatactggccgatcacagaaaggaagagccgcaacatcatcgagaggtaccacacagacgcagagtcaaaggagcagtgggaaacgtgccgcggccccggcggcgagagagccagcggccaagagaacgaaagtcatgactatcgccgatagtgatgaagacagcgacgaggatgggctgagatttcgcttcaggaagcgctag

SEQ ID NO: 3715 - protein, 800 aa, Muscodor strobelii
  misc_feature: SGI Peptide ID NO. 560905
  misc_feature (24)..(107): Pfam Id: PF00498 Pfam Desc: FHA domain
  misc_feature (24)..(89): Pfam Id: PF00498 Pfam Desc: FHA domain
  misc_feature (1)..(800): NCBI GI: 256734827 Blast Desc: NECHADRAFT_57691 [Nectria haematococca mpVI 77-13-4]
  misc_feature (1)..(666): NCBI GI: 171680827 Blast Desc: protein product [Podospora anserina] gi|27764306|emb|CAD60586.1| protein product [Podospora anserina] gi|170940041|emb|CAP65267.1| protein product [Podospora anserina]
  misc_feature (1)..(595): NCBI GI: 261358761 Blast Desc: DNA damage response protein RcaA [Verticillium albo-atrum VaMs.102]
  misc_feature (1)..(800): NCBI GI: 46135723 Blast Desc: FG09377.1 [Gibberella zeae PH-1]
  misc_feature (1)..(672): NCBI GI: 145605509 Blast Desc: MGG_11757 [Magnaporthe grisea 70-15] gi|145013322|gb|EDJ97963.1| MGG_11757 [Magnaporthe grisea 70-15]
  misc_feature (31)..(673): NCBI GI: 156061027 Blast Desc: SS1G_02656 [Sclerotinia sclerotiorum 1980] gi|154700060|gb|EDN99798.1| SS1G_02656 [Sclerotinia sclerotiorum 1980]
  misc_feature (1)..(710): NCBI GI: 116200632 Blast Desc: CHGG_10861 [Chaetomium globosum CBS 148.51] gi|88175575|gb|EAQ83043.1| CHGG_10861 [Chaetomium globosum CBS 148.51]
  misc_feature (1)..(689): NCBI GI: 121709432 Blast Desc: DNA damage response protein RcaA [Aspergillus clavatus NRRL 1] gi|119400567|gb|EAW10992.1| DNA damage response protein RcaA [Aspergillus clavatus NRRL 1]
  misc_feature (1)..(675): NCBI GI: 119488630 Blast Desc: DNA damage response protein RcaA [Neosartorya fischeri NRRL 181] gi|119410923|gb|EAW20868.1| DNA damage response protein RcaA [Neosartorya fischeri NRRL 181]
  misc_feature (27)..(711): NCBI GI: 154321908 Blast Desc: BC1G_01101 [Botryotinia fuckeliana B05.10] gi|150850348|gb|EDN25541.1| BC1G_01101 [Botryotinia fuckeliana B05.10]
MWVLESEGDGLEGKRLWLRPGKRYVFGRTVAEPGQIAVHGPGSEKVSRKHMAIRVDAVEDGHALVMDSRSKITIEDLGSKSGTKVNGTKYKGESCTLSQESSVIYIGPLKSMFRITWFPVVLSFSYTNAELRTNPLTRLRASLEQLDTKLLSEYDTKRTTHVVSKKRNTPKCLQALISGRFIVNDGFVNAVVNAAAPSEQTEDGVSISKLEQDFDANWPDAKSFTPAAGDEPVPRQPEAFIPNSARADIFDGYTFIFYDEKQFKNLLAPITDGKGKALFHPVVAEQTRIDDFVRYVKGVAGEKGLGEFEDGSEGKGVVVVKWMPSSPDHEIWYENFIKTVSLRLDHRLVNQKDFLDAILNNDASELRRPLEFESQPTSSEQHNLTTSAAAEAMAVDEPEPPAPPSPPKAAPRRRAREPTKSRFRGLALSLVDNDEAEEKHVPAPAPEVAPIAEEASQEGLFVSQDPAASEAESTTMSQERPTRSQRKRAASPDADDLMNQIAPSAAQAKRRRIAAGEDPLPTIPKSPTPKPEPTPKKPTARVKKEMDVLEQARKNREEADRRAREDREEPKTELGDAEMEQIRRMHIMEPMALRQAPPIRSRQQDIADGRWDPKWNGRKNFKRFQQRGAVQGRRVDRIIVPLEPVRTKRFGIGDDFWVEDESSSRRAEKEKEKERQDASLRSQQESERSERNRRNVRRVVGPIDSSDEDEDNGTGVQVDDNEEEDDEAVVLTRNTGRSQKGRAATSSRGTTQTQSQRSSGKRAAAPAAREPAAKRTKVMTIADSDEDSDEDGLRFRFRKR

SEQ ID NO: 3716 - DNA, 567 bp, Muscodor strobelii
  misc_feature: SGI cDNA ID NO. 560906
  misc_feature: Reduced expression when VOC is produced
  misc_feature: Encodes the peptide sequence at SEQ ID NO 3717
atgcacaccccttctctcctactgccagctctgctgtctctttccctaacctccgtctccgcaaaacctctccctcttccccgacaaagcagcccaaccttcacaataacagacctctcagcaacatatccctaccccttcccaccctacggggtcgacgaagtagactcacacctcactctctccgtctcttacccatctgcctccgactcttccgtcacatcagacacaacctgcaccataaactggcccaagggcacaccgcccgctggaagtaatacctggacaacctgtgcggacggagacttggaatttagattaccggtcgatggatggacggccgatacgcattttgaagttgagttttgggtgggtgcggggagtgatggaaccggtctcgacggctctgcaaccctgacttctggtcctgcggaccctagcggaaagatgttctgcatacagatgggcaagttccaacctttgagttgttcgttcaggggtccgtacggatcgacgcagaatactgaggttattcctgctgttgaggagagttcacgacctgcttga

SEQ ID NO: 3717 - protein, 188 aa, Muscodor strobelii
  misc_feature: SGI Peptide ID NO. 560906
  misc_feature: Useful for introducing or modulating the production of volatile compounds
MHTPSLLLPALLSLSLTSVSAKPLPLPRQSSPTFTITDLSATYPYPFPPYGVDEVDSHLTLSVSYPSASDSSVTSDTTCTINWPKGTPPAGSNTWTTCADGDLEFRLPVDGWTADTHFEVEFWVGAGSDGTGLDGSATLTSGPADPSGKMFCIQMGKFQPLSCSFRGPYGSTQNTEVIPAVEESSRPA

SEQ ID NO: 3718 - DNA, 2175 bp, Muscodor strobelii
  misc_feature: SGI EST ID NO. CUFF.9804.0
  misc_feature: Variant of the nucleotide sequence at SEQ ID NO 3716
tgaacatcaatacctatacaaattttgatattggagccctcgatgagcctcaggcctaagtgatcgattatataaagtctcatcataccttcaaatctcaatatcctcacgctcatcaaacacttcagactctcactcacgagatcaacaacccttccatacacaccacttctatcacttcccaagttatcaacaaacaaacaacatccaaaatgcacaccccttctctcctactgccagctctgctgtctctttccctaacctccgtctccgcaaaacctctccctcttccccgacaaagcagcccaaccttcacaataacagacctctcagcaacatatccctaccccttcccaccctacggggtcgacgaagtagactcacacctcactctctccgtctcttacccatctgcctccgactcttccgtcacatcagacacaacctgcaccataaactggcccaagggcacaccgcccgctggaagtaatacctggacaacctgtgcggacggagacttggaatttagattaccggtcgatggatggacggccgatacgcattttgaagttgagttttgggtgggtgcggggagtgatggaaccggtctcgacggctctgcaaccctgacttctggtcctgcggaccctagcggaaagatgttctgcatacagatgggcaagttccaacctttgagttgttcgttcaggggtccgtacggatcgacgcagaatactgaggttattcctgctgttgaggagagttcacgacctgcttgagcgtggcgtgtaagtggaaagaagaagaactgttgtgataggatgagtgaggggagggaatggggttgagtgatgaaagtatataatgcgcgatgtttttttggaatggatatgagaattttggataggcttttggaatagaataatgtgtcatgatgggaatggatgatttagagtataacaatattccagtcgtacggtcatgaactagactagtcgaatatctactcgattgatcactctattagataatccatccatcgattattacgtcgattatgggggttcagtgtcaatttcagcataggctacgtagatacctagcgcttcctgaagcgaaatctcagcccatcctcgtcgctgtcttcatcactatcggcgatagtcatgactttcgttctcttggccgctggctctctcgccgccggggccgcggcacgtttcccactgctcctttgactctgcgtctgtgtggtacctctcgatgatgttgcggctcttcctttctgtgatcggccagtattgcgcgtcaaaacaactgcttcgtcatcctcctcttcattatcatccacctgcacccctgtcccattatcctcatcctcatcactagaatcaatcggtcccacaacccgtctaacattcctcctatttctctcactcctctcgctctcctgttggcttctcaaacttgcatcttgtctctccttttccttctccttctctgctcgtcgggaactgctctcgtcctcaacccagaagtcatcaccaatgccgaatctcttggttcgcaccggctcgagcgggacaatgattctgtccacgcgtcgtccctgaactgcaccacgctgctggaatctcttgaagttcttccggccgttccatttcggatcccatctaccgtcggcgatatcctgctgtcgggatctgatcggtggagcctgacgtagagccatgggttccatgatatgcatgcgacggatctgctccatctctgcgtctcctaattcggttttgggctcttcgcggtcttctcgtgcacgcctgtccgcttcttcacggtttttacgtgcctgttcgagaacgtccatttccttcttgacgcgggctgtaggcttcttaggtgttggctcgggttttggggttggtgatttgggtatagtcgggaggggatcttcgcctgctgcgatccgccgacgtttggcttgagccgccgagggcgcaatctggttcatcaaatcatcggcgtcgggcgaagccgctctctttcgctgtgatctggttggtcgttcctgtgacatggtagtgctctctgcctcggacgctgcggggtcttgtgacacgaagagcccttcttgcgaggcttcttcagcgataggcgcgacttcgggggcaggag

SEQ ID NO: 3719 - DNA, 2580 bp, Muscodor strobelii
  misc_feature: SGI cDNA ID NO. 560907
  misc_feature: Encodes the peptide sequence at SEQ ID NO 3720
atgggctcggtacacccgcttggcaacccacacgcgacaaatgcgtctcaggtcctcgacagctcgaactcaaacaaaacaaaacacccagctagcagagctcaagcttcgacttccccaaacccaattaattcctcacagctacagaaacagcaacagcaccaacaggagctgtatcgatctgcctccgttgacacattgacagttccgtccagcttcaagtcggcctggacaacgacgaaagagcggggacaggcaatcatccactgtcggccactggccagtgccaagaaaccccccattacctcaatttcaacgacccgtaatagtgctgccgccgtctcccgtgccactattggcactggtgctagtacttacaaggcatcaccactgacaacaataacaacaccgcccactaccactaccaccacaaatcgcgctgcaggtgcaacagctagtcagacgacagcaaaacagcaaccaccaccgcaatctgcgcagtcttttgctagacgcaccgctctccaactacgagaccaaaatgtggcacctcggtcggcgcccgtcttgaaggatcacagaaagatgggctacgacagcgcaaacaacacgaccgcccgccccccgatgccacatctcagtgcctccgccgctcggggcatcaaccgcacgcccctgacaccaaagatagcttccaccgcagccaggacacccaagaccccgagtgctgtctctgctcccactgtcacaacgccattgcctcgtcggacacaggcatcgcactattctactaccgccaccccttcttctactcgcactcaatacgacgattcgattactgtctcgcctgctcccgcctttgggtcgcatctcagcagcaacatcacccctcgctcaggttccagacagaacagggtcgacagcgcgaatagtaccccaaatggcacacctacggccagccgcactgcagaggtctgggacaccaagtctgcattttcgatatcgagtccggcgctggaattagaaacagccaagagacccatggtgaccttcagcgctgtcaatcctgagaggaatgccggcatgaatcaagatgcgcctggtactcaagactccaagttctttcatgcgagcgatatcaaaacgtcacggccgacaagctcttctaagacagctcccctgaagagtccaccgacctttttctatgccagcaacagcagcatacctaccaggccggtcagccctggaactctgtcgcccgccttgtcatctacatccagcttcaatcagagtcaggagaatctatcgacaaagtttatgtatgcaaatggtacaccagagatacggccaactcctccgcctctggtctcccgtggctcgggatcggcggtatccacggcctccaagggtcctcctattgcccgctctgctgtaggcttgtcaaggcctgtctcaccgaccaagttaccttcgcagtcacaggcacccgttagaaacagtgcaaaccttgcgaccgctgcgcctcgctcgcaagtggcatctcctccgtcaggcccatcgccccctgcacttcgcagaccgggaacggccacgtcacggtcaagcggccattctcggtcgggcagtcttgtgcaaggcgatagtccagcagatgcaaccaaaccagtaatatcaataccacccgcaaatgctctctttcctccagcaagcctgtcacccggcaagcctccgccactaacactggcgtcgatcatccaagcggcagaagaatttggtgagagtgagatcattgatacgccatctgaggaaatcccactcgggctacaaagcccggctaagtcgactcactcatcatcagatctgatcaccgatttagtagcgaatgctcgcaaagaacggaaaattcaggacttgcagatcagaaacggctctctcgaagccatcaacaggacactagaacggcaacttcgaaagcagacagccgagctccggaggtatcgccgcttatcgcgttctggccgtctatcgctagcatcaacgactgcatctagtcgcgtgtcatctgatacattctctgagataccaatcgataccctcggtttatcggatctcagcgaagaagaatcagacatcgatgccacagaagatgaatcattttcggactcggattcgacgtcatccaacatgagtccgagtgttattgcggctaaagaagcaaaacgtaatcgacaagacgaagatcgattggcgcttgacttatcaaagcaccagcagctgcttattgactcgcaaaaaatcaatcagagcataaaacggtgcttagactggacggaagaactcatcaaagacgggaggaaagctcttgaataccaggtccgagtgagcgacgtaaaactcggcgggagggttctagacccgctcgatgaagaggacgacacctgcagacttctacccagcgatgatactctcatggtcgataccaaaattacagtggaaccggacaccataaccggctgggctgtcgagccacaagacagagacagtggcatcgagttagccaaagaggaggataggatataa

SEQ ID NO: 3720 - protein, 859 aa, Muscodor strobelii
  misc_feature: SGI Peptide ID NO. 560907
  misc_feature (216)..(845): NCBI GI: 171680823 Blast Desc: protein product [Podospora anserina] gi|27764304|emb|CAD60584.1| protein product [Podospora anserina] gi|170940039|emb|CAP65265.1| protein product [Podospora anserina]
  misc_feature (184)..(852): NCBI GI: 39958199 Blast Desc: MGG_09236 [Magnaporthe grisea 70-15] gi|145013324|gb|EDJ97965.1| MGG_09236 [Magnaporthe grisea 70-15]
  misc_feature (195)..(852): NCBI GI: 85094065 Blast Desc: NCU06050 [Neurospora crassa OR74A] gi|28921268|gb|EAA30577.1| [Neurospora crassa OR74A]
  misc_feature (211)..(852): NCBI GI: 46135727 Blast Desc: FG09379.1 [Gibberella zeae PH-1]
  misc_feature (206)..(855): NCBI GI: 256734828 Blast Desc: NECHADRAFT_99001 [Nectria haematococca mpVI 77-13-4]
  misc_feature (198)..(812): NCBI GI: 154321910 Blast Desc: BC1G_01102 [Botryotinia fuckeliana B05.10] gi|150850349|gb|EDN25542.1| BC1G_01102 [Botryotinia fuckeliana B05.10]
  misc_feature (571)..(852): NCBI GI: 116200636 Blast Desc: CHGG_10863 [Chaetomium globosum CBS 148.51] gi|88175577|gb|EAQ83045.1| CHGG_10863 [Chaetomium globosum CBS 148.51]
  misc_feature (221)..(852): NCBI GI: 169596116 Blast Desc: SNOG_00810 [Phaeosphaeria nodorum SN15] gi|111071185|gb|EAT92305.1| SNOG_00810 [Phaeosphaeria nodorum SN15]
  misc_feature (196)..(811): NCBI GI: 115402399 Blast Desc: conserved [Aspergillus terreus NIH2624] gi|114189122|gb|EAU30822.1| conserved [Aspergillus terreus NIH2624]
  misc_feature (498)..(856): NCBI GI: 261358763 Blast Desc: conserved [Verticillium albo-atrum VaMs.102]
MGSVHPLGNPHATNASQVLDSSNSNKTKHPASRAQASTSPNPINSSQLQKQQQHQQELYRSASVDTLTVPSSFKSAWTTTKERGQAIIHCRPLASAKKPPITSISTTRNSAAAVSRATIGTGASTYKASPLTTITTPPTTTTTTNRAAGATASQTTAKQQPPPQSAQSFARRTALQLRDQNVAPRSAPVLKDHRKMGYDSANNTTARPPMPHLSASAARGINRTPLTPKIASTAARTPKTPSAVSAPTVTTPLPRRTQASHYSTTATPSSTRTQYDDSITVSPAPAFGSHLSSNITPRSGSRQNRVDSANSTPNGTPTASRTAEVWDTKSAFSISSPALELETAKRPMVTFSAVNPERNAGMNQDAPGTQDSKFFHASDIKTSRPTSSSKTAPLKSPPTFFYASNSSIPTRPVSPGTLSPALSSTSSFNQSQENLSTKFMYANGTPEIRPTPPPLVSRGSGSAVSTASKGPPIARSAVGLSRPVSPTKLPSQSQAPVRNSANLATAAPRSQVASPPSGPSPPALRRPGTATSRSSGHSRSGSLVQGDSPADATKPVISIPPANALFPPASLSPGKPPPLTLASIIQAAEEFGESEIIDTPSEEIPLGLQSPAKSTHSSSDLITDLVANARKERKIQDLQIRNGSLEAINRTLERQLRKQTAELRRYRRLSRSGRLSLASTTASSRVSSDTFSEIPIDTLGLSDLSEEESDIDATEDESFSDSDSTSSNMSPSVIAAKEAKRNRQDEDRLALDLSKHQQLLIDSQKINQSIKRCLDWTEELIKDGRKALEYQVRVSDVKLGGRVLDPLDEEDDTCRLLPSDDTLMVDTKITVEPDTITGWAVEPQDRDSGIELAKEEDRI

SEQ ID NO: 3721 - DNA, 3431 bp, Muscodor strobelii
  misc_feature: SGI EST ID NO. CUFF.9827.0
  misc_feature: Variant of the nucleotide sequence at SEQ ID NO 3719
tccgaggggaggtacatgatcccgccagtcaactgtaggcaattcccatacaaaacagcaatgggctcggtacacccgcttggcaacccacacgcgacaaatgcgtctcaggtcctcgacagctcgaactcaaacaaaacaaaacacccagctagcagagctcaagcttcgacttccccaaacccaattaattcctcacagctacagaaacagcaacagcaccaacaggagctgtatcgatctgcctccgttgacacattgacagttccgtccagcttcaagtcggcctggacaacgacgaaagagcggggacaggcaatcatccactgtcggccactggccagtgccaagaaaccccccattacctcaatttcaacgacccgtaatagtgctgccgccgtctcccgtgccactattggcactggtgctagtacttacaaggcatcaccactgacaacaataacaacaccgcccactaccactaccaccacaaatcgcgctgcaggtgcaacagctagtcagacgacagcaaaacagcaaccaccaccgcaatctgcgcagtcttttgctagacgcaccgctctccaactacgagaccaaaatgtggcacctcggtcggcgcccgtcttgaaggatcacagaaagatgggctacgacagcgcaaacaacacgaccgcccgccccccgatgccacatctcagtgcctccgccgctcggggcatcaaccgcacgcccctgacaccaaagatagcttccaccgcagccaggacacccaagaccccgagtgctgtctctgctcccactgtcacaacgccattgcctcgtcggacacaggcatcgcactattctactaccgccaccccttcttctactcgcactcaatacgacgattcgattactgtctcgcctgctcccgcctttgggtcgcatctcagcagcaacatcacccctcgctcaggttccagacagaacagggtcgacagcgcgaatagtaccccaaatggcacacctacggccagccgcactgcagaggtctgggacaccaagtctgcattttcgatatcgagtccggcgctggaattagaaacagccaagagacccatggtgaccttcagcgctgtcaatcctgagaggaatgccggcatgaatcaagatgcgcctggtactcaagactccaagttctttcatgcgagcgatatcaaaacgtcacggccgacaagctcttctaagacagctcccctgaagagtccaccgacctttttctatgccagcaacagcagcatacctaccaggccggtcagccctggaactctgtcgcccgccttgtcatctacatccagcttcaatcagagtcaggagaatctatcgacaaagtttatgtatgcaaatggtacaccagagatacggccaactcctccgcctctggtctcccgtggctcgggatcggcggtatccacggcctccaagggtcctcctattgcccgctctgctgtaggcttgtcaaggcctgtctcaccgaccaagttaccttcgcagtcacaggcacccgttagaaacagtgcaaaccttgcgaccgctgcgcctcgctcgcaagtggcatctcctccgtcaggcccatcgccccctgcacttcgcagaccgggaacggccacgtcacggtcaagcggccattctcggtcgggcagtcttgtgcaaggcgatagtccagcagatgcaaccaaaccagtaatatcaataccacccgcaaatgctctctttcctccagcaagcctgtcacccggcaagcctccgccactaacactggcgtcgatcatccaagcggcagaagaatttggtgagagtgagatcattgatacgccatctgaggaaatcccactcgggctacaaagcccggctaagtcgactcactcatcatcagatctgatcaccgatttagtagcgaatgctcgcaaagaacggaaaattcaggacttgcagatcagaaacggctctctcgaagccatcaacaggacactagaacggcaacttcgaaagcagacagccgagctccggaggtatcgccgcttatcgcgttctggccgtctatcgctagcatcaacgactgcatctagtcgcgtgtcatctgatacattctctgagataccaatcgataccctcggtttatcggatctcagcgaagaagaatcagacatcgatgccacagaagatgaatcattttcggactcggattcgacgtcatccaacatgagtccgagtgttattgcggctaaagaagcaaaacgtaatcgacaagacgaagatcgattggcgcttgacttatcaaagcaccagcagctgcttattgactcgcaaaaaatcaatcagagcataaaacggtgcttagactggacggaagaactcatcaaagacgggaggaaagctcttgaataccaggtccgagtgagcgacgtaaaactcggcgggagggttctagacccgctcgatgaagaggacgacacctgcagacttctacccagcgatgatactctcatggtcgataccaaaattacagtggaaccggacaccataaccggctgggctgtcgagccacaagacagagacagtggcatcgagttagccaaagaggaggataggatataatccggtaaatcgctctacagcacgaaatcaccactcacactgtttatttcctttacgcattcggaccggcgcaaggtgggatgtacgacaggcagcgagggcgttctacaatcaaattgggaggcaaacttgcgcacttcaggcgcacgttgcctgtatcaccttcgacattcagaccgtgtctttctttcactcatcttcctttgtttactcttctaaatgtaccaccaccactacggaatacccaaggaacggaggcagtagcagcagcagcaaacagcatcaggccagcccatccacctcactcgactaatcattttctttgatttgttcttttctgtcttttcgttttgtattacaatgatacccataaccccccatgccagcccccgtcaaagtaaagcgacgaggaggctatatacaaaagagtggaagaaagataaattggcgatgatgcctaggagttgaacagagcttaggacaggcatatgagatgaattggcggtggaggaagatgagatgtgtatgtatgcatatatgtacattggcctgatagttacataatgtaatcttggtcccttctatcatatgcttaaatttcgtgaacaatgtgctatggtgaatataacccatgaagtacccacgcctggaaacagctcacattctagtctgcatgcaatcttgaaaactctgcatcctcgtgcccacttgcaaacctgaattgtccatgtcatctgcagcgagaaaaccgaatatccgatcccaagaccaaggactgcgatacggcgtga

SEQ ID NO: 3722 - DNA, 1188 bp, Muscodor strobelii
  misc_feature: SGI cDNA ID NO. 560908
  misc_feature: Encodes the peptide sequence at SEQ ID NO 3723
atgtttgatatacagagcgatggcaatgacaatgaattgttacaggatatctaccagcacggcatacgaacctccgacaactccaagaaacatcccgaacccatcaattcgctcgtttcaagcccctcattctttacggcgcaacttcgcgcagccttctttaagatgggctggatcggtatcggcgtcttgatcgcatcactggcgttctttgtctcgcgcaaacccataacagagaccctgatcgcactatggcaaggccagcctaggatcgagcaaccgccgtccacacgccgcccaccccttgatgcccctccgcgtccggaccaaggccggtctagcgccgtgtcggtcaccaacaacggcgcaacacggcgggatgacaaggctcacgacatacagcctcctccttctatatctataccaaccataaatccacccaccgactcccaagcggacgccgaatcaccacaaaccacacccaaagcaactgcatccacaaccccagcaatcgcagtcccctcgttctccctctctcccgaaccgccagcctcagcagcagctgtcgcacgcgcagcagcaaccacgatgggaccaccctccctcccatcactcaactccccatcgatgggaatggcaccgcctccacgccctccgagattaaacggcctgagcaacacgtcctccctctcaccacccacccgcggtcccttaccaaaccgcagcacgccctacgaccgccaaccgggctcctcaaccctcgcaccactgcccacacacagcagcaaacccaccaagccctcccgaaaagtaactctagagcccggccactcccccctagactgggcgcgtctagccaaccatccaacatctgaccttcgaaatctcggtcccaacgcctcatacctccgcgtaacaccgtcaatgctgaaagcgcagacggggcgaaggggcaaagatgcctggacggcgttgggaggaagagtgtacaacatcacgccgtatttaccgtttcatcctggtggggagccggagttacttagggctgctggtagagatgggacgaagttgtttgcggaaatacatgggtgggttaattatgagactatgcttcagagttgtatgattgggctgttggttgaggaaggggagggggagagtaatggtgggatggatgatatggattag

SEQ ID NO: 3723 - protein, 395 aa, Muscodor strobelii
  misc_feature: SGI Peptide ID NO. 560908
  misc_feature (304)..(380): Pfam Id: PF00173 Pfam Desc: Cytochrome b5-like Heme/Steroid binding domain
  misc_feature (56)..(395): NCBI GI: 46135725 Blast Desc: FG09378.1 [Gibberella zeae PH-1]
  misc_feature (56)..(395): NCBI GI: 156061025 Blast Desc: SS1G_02655 [Sclerotinia sclerotiorum 1980] gi|154700059|gb|EDN99797.1| SS1G_02655 [Sclerotinia sclerotiorum 1980]
  misc_feature (56)..(395): NCBI GI: 171680825 Blast Desc: protein product [Podospora anserina] gi|27764305|emb|CAD60585.1| protein product [Podospora anserina] gi|170940040|emb|CAP65266.1| protein product [Podospora anserina]
  misc_feature (56)..(395): NCBI GI: 39958213 Blast Desc: MGG_09237 [Magnaporthe grisea 70-15] gi|145013323|gb|EDJ97964.1| MGG_09237 [Magnaporthe grisea 70-15]
  misc_feature (254)..(386): NCBI GI: 85094069 Blast Desc: NCU06051 [Neurospora crassa OR74A] gi|28921269|gb|EAA30578.1| conserved [Neurospora crassa OR74A]
  misc_feature (56)..(395): NCBI GI: 239615289 Blast Desc: heme/steroid binding protein [Ajellomyces dermatitidis ER-3]
  misc_feature (43)..(395): NCBI GI: 258577317 Blast Desc: potential heme/steroid binding protein [Uncinocarpus reesii 1704] gi|237903106|gb|EEP77507.1| potential heme/steroid binding protein [Uncinocarpus reesii 1704]
  misc_feature (1)..(395): NCBI GI: 169767920 Blast Desc: [Aspergillus oryzae RIB40] gi|83766286|dbj|BAE56429.1| protein product [Aspergillus oryzae]
  misc_feature (56)..(395): NCBI GI: 238484847 Blast Desc: heme/steroid binding protein, [Aspergillus flavus NRRL3357] gi|220701712|gb|EED58050.1| heme/steroid binding protein, [Aspergillus flavus NRRL3357]
  misc_feature (54)..(395): NCBI GI: 225680309 Blast Desc: conserved [Paracoccidioides brasiliensis Pb03]
MFDIQSDGNDNELLQDIYQHGIRTSDNSKKHPEPINSLVSSPSFFTAQLRAAFFKMGWIGIGVLIASLAFFVSRKPITETLIALWQGQPRIEQPPSTRRPPLDAPPRPDQGRSSAVSVTNNGATRRDDKAHDIQPPPSISIPTINPPTDSQADAESPQTTPKATASTTPAIAVPSFSLSPEPPASAAAVARAAATTMGPPSLPSLNSPSMGMAPPPRPPRLNGLSNTSSLSPPTRGPLPNRSTPYDRQPGSSTLAPLPTHSSKPTKPSRKVTLEPGHSPLDWARLANHPTSDLRNLGPNASYLRVTPSMLKAQTGRRGKDAWTALGGRVYNITPYLPFHPGGEPELLRAAGRDGTKLFAEIHGWVNYETMLQSCMIGLLVEEGEGESNGGMDDMD

SEQ ID NO: 3724 - DNA, 2089 bp, Muscodor strobelii
  misc_feature: SGI EST ID NO. CUFF.9466.0
  misc_feature: Variant of the nucleotide sequence at SEQ ID NO 3722
ccgcggcaagtgccacacacgctcacgaaagaaatgcccaaaggtataaatgtttctgacgacaataaacaaagctcgtcccgcgtcaccatgtcatacggcactgcagcagaaacacgtgtgagctgtacagctggcacagatcttttccgttgtcgccctgatctggcaaattggttgattcatgcgtgaagtctgcacgcaggtaccatctagtggggtagagatacacgtctgtggcggtgaagacggtggcccgccttgtacagggacacgatgctgctctgtgctgcatctgtcgagctgggcaagggattgccaatctgagtcgtgcaattgtccaatcttccccgcagcacacaacccatttggagtccatcccactccaacggcccaagcgcccggcagcgcgtttgttaccctggaagtcttacaagtgaagccctcaccgaagatgtttgatatacagagcgatggcaatgacaatgaattgttacaggatatctaccagcacggcatacgtacgaactcaccgagaaaagatttggcatttagatgcaattgttctcaagagaaatgactttgatagacttgtatgcattgtatataaaagtctcttactccaacttttggtccatctatttgaaccaggaacctccgacaactccaagaaacatcccgaacccatcaattcgctcgtttcaagcccctcattctttacggcgcaacttcgcgcagccttctttaagatgggctggatcggtatcggcgtcttgatcgcatcactggcgttctttgtctcgcgcaaacccataacagagaccctgatcgcactatggcaaggccagcctaggatcgagcaaccgccgtccacacgccgcccaccccttgatgcccctccgcgtccggaccaaggccggtctagcgccgtgtcggtcaccaacaacggcgcaacacggcgggatgacaaggctcacgacatacagcctcctccttctatatctataccaaccataaatccacccaccgactcccaagcggacgccgaatcaccacaaaccacacccaaagcaactgcatccacaaccccagcaatcgcagtcccctcgttctccctctctcccgaaccgccagcctcagcagcagctgtcgcacgcgcagcagcaaccacgatgggaccaccctccctcccatcactcaactccccatcgatgggaatggcaccgcctccacgccctccgagattaaacggcctgagcaacacgtcctccctctcaccacccacccgcggtcccttaccaaaccgcagcacgccctacgaccgccaaccgggctcctcaaccctcgcaccactgcccacacacagcagcaaacccaccaagccctcccgaaaagtaactctagagcccggccactcccccctagactgggcgcgtctagccaaccatccaacatctgaccttcgaaatctcggtcccaacgcctcatacctccgcgtaacaccgtcaatgctgaaagcgcagacggggcgaaggggcaaagatgcctggacggcgttgggaggaagagtgtacaacatcacgccgtatttaccgtttcatcctggtggggagccggagttacttagggctgctggtagagatgggacgaagttgtttgcggaaatacatgggtgggttaattatgagactatgcttcagagttgtatgattgggctgttggttgaggaaggggagggggagagtaatggtgggatggatgatatggattaggcgtccacgtctcctccggagtagaggtttgatgacgggttgaaatacggatttcgcatagagcttttaaacattgttggcaggattgggtatcatgagataggagtcttttttcttacacatgggtacggagagagaatgtcttcatgcatagcggtgcgcgggtactcatagaacggacattgatattcagggagaaggggtttgctgtttttcatgtactatcttatatatcggattgttatatgatcaatgaagcttgaactggaaagaagtatttgtgagtcatatttctcatctatggactatgactacct

SEQ ID NO: 3725 - DNA, 1422 bp, Muscodor strobelii
  misc_feature: SGI cDNA ID NO. 560909
  misc_feature: Encodes the peptide sequence at SEQ ID NO 3726
atgggtggtctcaaggaagtcatgtactacatgttccacccgaaccagcttcggtccatcatccaatggaaggtatggcacgagcctgtacacgtccgcgacccctccaaggagtccgcgaccctgaagtcatgcttccacttcctcaacatgacaagccggagtttcgcagccgttatccaagagctgaaccacgagatgctcgtccccattgcccttttctatctcgtccttcgcggtctcgacacgattgaggacgacatgaccatctccgccaaggttaaggagcccatgttgcgagatttctacaagaacatgaagaaggacggctggacctttgatggcaacggtcctgacgaaaaggaccgtgagctcctggtccacttcgacgacgttgtcgccgagctgaagaagctaaagaagaactactacgacatcattgaggatatcaccatcaagatgggcaatggcatggccgactatgccctcaacgccgagttccagaccggtgtgcaaacagtcccacaatacgaggagtactgccactacgtagctggtctcgttggcgaaggtttgacccgtctctttgtagagggcaactacgccaaccccgctttgctcgagcgcatggaacttaccgaaagcatgggccagttccttcagaaagtcaacattatccgcgacgtccacgaggacttcgaggactcccgccgattctggccccaggatatctggagcaagtatgtcgacaactgggaggacatgttcgatcccaagtaccgcacccaggccgtacactgcagctctgaaatggttcttaacgccttgaaacatgccgatgagtgcttgttctacatggccggtatcaaagagcagagtgtattcaacttcgtcgccatcccccagtctatggccattgccaccctcgacctcgtcttccagaaccccagaatcttcgacagccacctcaagatcaccaagggtgatgcttgccatctgatgatgcagtcgacccagaacctacgcgttgtatgcgacgtattcaagacctataccaagaggatcgccagaaagaacgaccccagagatccccatttccttgagattagcatggcattgggcaagatcgagcagttcattgagacattattccctacacaggatgccaagcgcatccagcaagtcaacgctaaacaaaccaagtccagcagcggcgaggacgacgtcaactggaaagagtccatgctgcttgtccttgcagttgttgctttctttttattaatatctctccttatgttcggcattgcctggttctttggagccagatgggaattcctcgagacaacgccccgctcgaccgtcgagaacatttactccaagataacacagtcgatagcctcgccaggccattcggaattataa

SEQ ID NO: 3726 - protein, 473 aa, Muscodor strobelii
  misc_feature: SGI Peptide ID NO. 560909
  misc_feature (49)..(343): Pfam Id: PF00494 Pfam Desc: Squalene/phytoene synthase
  misc_feature (1)..(473): NCBI GI: 171680817 Blast Desc: protein product [Podospora anserina] gi|170940036|emb|CAP65262.1| protein product [Podospora anserina]
  misc_feature (1)..(444): NCBI GI: 85094080 Blast Desc: squalene synthetase [Neurospora crassa OR74A] gi|51701416|sp|Q7S4Z6.1|FDFT_NEUCR RecName: Full= squalene synthetase; Short=SQS; Short=SS; AltName: farnesyltransferase;
  misc_feature (1)..(461): NCBI GI: 27764301 Blast Desc: protein product [Podospora anserina]
  misc_feature (1)..(473): NCBI GI: 116200642 Blast Desc: CHGG_10866 [Chaetomium globosum CBS 148.51] gi|88175580|gb|EAQ83048.1| CHGG_10866 [Chaetomium globosum CBS 148.51]
  misc_feature (1)..(444): NCBI GI: 154322252 Blast Desc: BC1G_01273 [Botryotinia fuckeliana B05.10] gi|150850520|gb|EDN25713.1| BC1G_01273 [Botryotinia fuckeliana B05.10]
  misc_feature (7)..(444): NCBI GI: 256734829 Blast Desc: [Nectria haematococca mpVI 77-13-4]
  misc_feature (1)..(473): NCBI GI: 39958237 Blast Desc: MGG_09239 [Magnaporthe grisea 70-15] gi|145013320|gb|EDJ97961.1| MGG_09239 [Magnaporthe grisea 70-15]
  misc_feature (8)..(444): NCBI GI: 239909605 Blast Desc: squalene synthase [Gibberella fujikuroi]
  misc_feature (8)..(446): NCBI GI: 46135731 Blast Desc: FG09381.1 [Gibberella zeae PH-1]
  misc_feature (1)..(473): NCBI GI: 156060769 Blast Desc: SS1G_02527 [Sclerotinia sclerotiorum 1980] gi|154699931|gb|EDN99669.1| SS1G_02527 [Sclerotinia sclerotiorum 1980]
  misc_feature (1)..(444): SWISSPROT Homolog: EC 2.5.1.21 Squalene synthase
  misc_feature: Useful for fungicidal and/or biocontrol applications
MGGLKEVMYYMFHPNQLRSIIQWKVWHEPVHVRDPSKESATLKSCFHFLNMTSRSFAAVIQELNHEMLVPIALFYLVLRGLDTIEDDMTISAKVKEPMLRDFYKNMKKDGWTFDGNGPDEKDRELLVHFDDVVAELKKLKKNYYDIIEDITIKMGNGMADYALNAEFQTGVQTVPQYEEYCHYVAGLVGEGLTRLFVEGNYANPALLERMELTESMGQFLQKVNIIRDVHEDFEDSRRFWPQDIWSKYVDNWEDMFDPKYRTQAVHCSSEMVLNALKHADECLFYMAGIKEQSVFNFVAIPQSMAIATLDLVFQNPRIFDSHLKITKGDACHLMMQSTQNLRVVCDVFKTYTKRIARKNDPRDPHFLEISMALGKIEQFIETLFPTQDAKRIQQVNAKQTKSSSGEDDVNWKESMLLVLAVVAFFLLISLLMFGIAWFFGARWEFLETTPRSTVENIYSKITQSIASPGHSEL

SEQ ID NO: 3727 - DNA, 2546 bp, Muscodor strobelii
  misc_feature: SGI EST ID NO. CUFF.9470.0
  misc_feature: Variant of the nucleotide sequence at SEQ ID NO 3725
tcgcaaccaacgtgctggacaatacaccggtcaatctagcatcccgtccgctgtcagccgtcgttcgcagtatgatttaataggagaacggatctaggtgtttgggaatgccactcctctcagacctgctcctctctcctcttaactttatttctcctccgtggattcttatcttcaacacttgttgttacgattcacgactttaacttgaacgagatacccaatccaggagcacaccgcctgtagcaccaagcctgcagattcaattgttgcgcgtgcccctcttctttcaacgcctcacttgccgttatcacgtccagactccggcttctggcatcagttcattccaacttcgctcacacccacacattctttcaaacgacgccaagatgggtggtctcaaggaagtcatgtactacatgttccacccgaaccagcttcggtccatcatccaatggaaggtatggcacgagcctgtacacgtccgcgacccctccaaggagtccgcgaccctgaagtcatgcttccacttcctcaacatgacaagccggagtttcgcagccgttatccaagagctgaaccacgagatgctcgtccccattgcccttttctatctcgtccttcgcggtctcgacacgattgaggacgacatgaccatctccgccaaggttaaggagcccatgttgcgagatttctacaagaacatgaagaaggacggctggacctttgatggcaacggtcctgacgaaaaggaccgtgagctcctggtccacttcgacgacgttgtcgccgagctgaagaagctaaagaagaactactacgacatcattgaggatatcaccatcaagatgggcaatggcatggccgactatgccctcaacgccgagttccagaccggtgtgcaaacagtcccacaatacgaggagtactgccactacgtagctggtctcgttggcgaaggtttgacccgtctctttgtagagggcaactacgccaaccccgctttgctcgagcgcatggaacttaccgaaagcatgggccagttccttcagaaagtcaacattatccgcgacgtccacgaggacttcgaggactcccgccgattctggccccaggatatctggagcaagtatgtcgacaactgggaggacatgttcgatcccaagtaccgcacccaggccgtacactgcagctctgaaatggttcttaacgccttgaaacatgccgatgagtgcttgttctacatggccggtatcaaagagcagagtgtattcaacttcgtcgccatcccccagtctatggccattgccaccctcgacctcgtcttccagaaccccagaatcttcgacagccacctcaagatcaccaagggtgatgcttgccatctgatgatgcagtcgacccagaacctacgcgttgtatgcgacgtattcaagacctataccaagaggatcgccagaaagaacgaccccagagatccccatttccttgagattagcatggcattgggcaagatcgagcagttcattgagacattattccctacacaggatgccaagcgcatccagcaagtcaacgctaaacaaaccaagtccagcagcggcgaggacgacgtcaactggaaagagtccatgctgcttgtccttgcagttgttgctttctttttattaatatctctccttatgttcggcattgcctggttctttggagccagatgggaattcctcgagacaacgccccgctcgaccgtcgagaacatttactccaagataacacagtcgatagcctcgccaggccattcggaattataatcaacccccaacctttgtatatttaggggaatgtcaatagccccttgttgatgatgagatgatgaaaccctattaagtatataatcaaagcatatgatcacggcggagcggccgtgtgatccaaatcggactttacgcgcaacaaggtcatcggagtcacgggagcacttatgtaatgaaggcaggaatttggagcaagtgcgggaatggaaatgcataggatgaatatggaaatatcacaacggaaaggtctgttttgatatcagaccaaatatccgccactaattgatgcttgctactgcttcgcagagcacatttctgattttattgcttcccatgttctgctgttgctcgtttccttcatttgcggcactgacaaatgagtatatgatttcacactgggtgattggaaaacaagcacggatgtcaaattacagttcaagtctcttttcaatgactgcgactgtgccgagaagtgctgatagtaatgggaaaccccccatggcgaggagtaccaggcttatggagcttgtaggcacttggtggttctaggctgagtcttgtacttggctgctactgaggatcgctaacatttatacattgaacctggctgtcagtcgtatgccttaatgactgtcaaggcgaaggcggtacacactctcaagcttatgattgccatttcagaaggacttatcaacgcgtaagcccgcaaaagtactcaccacgctcgattcg

SEQ ID NO: 3728 - DNA, 984 bp, Muscodor strobelii
  misc_feature: SGI cDNA ID NO. 560910
  misc_feature: Encodes the peptide sequence at SEQ ID NO 3729
atggactctcgacaggtcgccgaaatgacaggcgtaacgctcaacctcaatgatgaggctaagttccccaaacttgcagacaaaccccaaatcgaaaccaatggcgtaggacccgaaatctttctcatctggggtgctcgtgggtggatagctggtatgctggaaatgctactcaaagagcagggcgaaatagtctatgtcacaaccgtacggatggaggaccgccaagcggtagacgctgaactccagagatattctcctacacatgtcatcaactgcgcaggatgtaccggccgaccgaatgtggactggtgtgaggaccacatcgaagataccatccgatctaacgtcattggcactctcaatataactgactgctgttaccttcgcaatattcattgcactgttctcgcaaccggttgtatctaccaatacgacgaaaatcatcctattggggggcttgggtacaacgagcacgatccgcccaactttacggacagcttctattctgagagcaaaggccatgttgagcaagtcatgaagtactacagtaactgcttgattctacgcttacgcatgcccgtctcggatgatctgcaccagcgcagcttcgtgaccaagatcagcaaatatgaacacgtagtcgacatacccaacagcaactcgatcttgtacgacctccttcccgccatagtcctcctggcaaaacacaaggagacgggtgtatacaacttcaccaaccccggcgctataagccacaacgaagtcctcagcctattcaaggagatcgtccgtcccgactttacctggaagaacttctcgattgaagaccaggcgaaagtgatcaaagccggccgaagcaactgcaagcttgacacgaagaagcttgaggacaagctgaaggagtatgactatcacctacctgagatccacgatgcctaccgaaagtgttttgagcggatgaaaggacacggattcgattga

SEQ ID NO: 3729 - protein, 327 aa, Muscodor strobelii
  misc_feature: SGI Peptide ID NO. 560910
  misc_feature (41)..(246): Pfam Id: PF01370 Pfam Desc: NAD dependent epimerase/dehydratase family
  misc_feature (39)..(316): Pfam Id: PF04321 Pfam Desc: RmlD substrate binding domain
  misc_feature (41)..(143): Pfam Id: PF01370 Pfam Desc: NAD dependent epimerase/dehydratase family
  misc_feature (33)..(327): NCBI GI: 261358765 Blast Desc: NRS/ER [Verticillium albo-atrum VaMs.102]
  misc_feature (33)..(325): NCBI GI: 171680815 Blast Desc: protein product [Podospora anserina] gi|27764300|emb|CAD60580.1| protein product [Podospora anserina] gi|170940035|emb|CAP65261.1| protein product [Podospora anserina]
  misc_feature (33)..(326): NCBI GI: 116200640 Blast Desc: CHGG_10865 [Chaetomium globosum CBS 148.51] gi|88175579|gb|EAQ83047.1| CHGG_10865 [Chaetomium globosum CBS 148.51]
  misc_feature (33)..(326): NCBI GI: 164425639 Blast Desc: NCU10683 [Neurospora crassa OR74A] gi|157071005|gb|EDO65162.1| conserved [Neurospora crassa OR74A]
  misc_feature (41)..(325): NCBI GI: 154322248 Blast Desc: conserved [Botryotinia fuckeliana B05.10] gi|150850518|gb|EDN25711.1| conserved [Botryotinia fuckeliana B05.10]
  misc_feature (38)..(325): NCBI GI: 156060773 Blast Desc: SS1G_02529 [Sclerotinia sclerotiorum 1980] gi|154699933|gb|EDN99671.1| SS1G_02529 [Sclerotinia sclerotiorum 1980]
  misc_feature (41)..(325): NCBI GI: 39958226 Blast Desc: MGG_09238 [Magnaporthe grisea 70-15] gi|59803144|gb|AAX07722.1| [Magnaporthe grisea] gi|145013321|gb|EDJ97962.1| MGG_09238 [Magnaporthe grisea 70-15]
  misc_feature (33)..(305): NCBI GI: 256725313 Blast Desc: NECHADRAFT_45826 [Nectria haematococca mpVI 77-13-4]
  misc_feature (38)..(288): NCBI GI: 46127727 Blast Desc: FG08241.1 [Gibberella zeae PH-1]
  misc_feature (40)..(322): NCBI GI: 219127859 Blast Desc: [Phaeodactylum tricornutum CCAP 1055/1] gi|217404375|gb|EEC44322.1| [Phaeodactylum tricornutum CCAP 1055/1]
MDSRQVAEMTGVTLNLNDEAKFPKLADKPQIETNGVGPEIFLIWGARGWIAGMLEMLLKEQGEIVYVTTVRMEDRQAVDAELQRYSPTHVINCAGCTGRPNVDWCEDHIEDTIRSNVIGTLNITDCCYLRNIHCTVLATGCIYQYDENHPIGGLGYNEHDPPNFTDSFYSESKGHVEQVMKYYSNCLILRLRMPVSDDLHQRSFVTKISKYEHVVDIPNSNSILYDLLPAIVLLAKHKETGVYNFTNPGAISHNEVLSLFKEIVRPDFTWKNFSIEDQAKVIKAGRSNCKLDTKKLEDKLKEYDYHLPEIHDAYRKCFERMKGHGFD

SEQ ID NO: 3730 - DNA, 1893 bp, Muscodor strobelii
  misc_feature: SGI EST ID NO. CUFF.9350.0
  misc_feature: Variant of the nucleotide sequence at SEQ ID NO 3728
caaacgtgcaacgatgtgtacacgtgtatgattgtatagttgcgttcatgttggagaagccacacatgttcgcggaatctggccaaaatggaagacaatgaagcgtgacatgcaagattgtgtgttgcgcatcgtattgcagttacaactcatttgtgccccacgtagcttcccagatcgtagggacgtcaggtacaaccagactaggcaaactgccacctcaacattcgaatttatggcattctgactttaaaaacttcttatgattttcccagttactatccaactgttccatcatattgacactacaacattctagttacattgttcatcagtgcctattgtatttggcatttcacataccccgctacggtaaatcggtttgtcgcaggccgtatcatcagtagaccacacgatggactctcgacaggtcgccgaaatgacaggcgtaacgctcaacctcaatgatgaggctaagttccccaaacttgcagacaaaccccaaatcgaaaccaatggcgtaggacccgaaatctttctcatctggggtgctcgtgggtggatagctggtatgctggaaatgctactcaaagagcagggcgaaatagtctatgtcacaaccgtacggatggaggaccgccaagcggtagacgctgaactccagagatattctcctacacatgtcatcaactgcgcaggatgtaccggccgaccgaatgtggactggtgtgaggaccacatcgaagataccatccgatctaacgtcattggcactctcaatataactgactgctgttaccttcgcaatattcattgcactgttctcgcaaccggttgtatctaccaatacgacgaaaatcatcctattggggggcttgggtacaacgagcacgatccgcccaactttacggacagcttctattctgagagcaaaggccatgttgagcaagtcatgaagtactacagtaactgcttgattctacgcttacgcatgcccgtctcggatgatctgcaccagcgcagcttcgtgaccaagatcagcaaatatgaacacgtagtcgacatacccaacagcaactcgatcttgtacgacctccttcccgccatagtcctcctggcaaaacacaaggagacgggtgtatacaacttcaccaaccccggcgctataagccacaacgaagtcctcagcctattcaaggagatcgtccgtcccgactttacctggaagaacttctcgattgaagaccaggcgaaagtgatcaaagccggccgaagcaactgcaagcttgacacgaagaagcttgaggacaagctgaaggagtatgactatcacctacctgagatccacgatgcctaccgaaagtgttttgagcggatgaaaggacacggattcgattgattgccagcagccaacttgtatgagtacttgtaacatcaacggggatggccgacagagcttcgggaaggattttccttgggacgcgaagaatatgccaaaacagaatgcgaaaagcgacggacagactggctaaaagaagagagagtttcgaggctagcagacccctttatgcactgctcacgactgaaactaacattgagatggctgatagacagagcgcagtatggagaagataaatcacaattgccgtagtaagtctagaacagcatatggtagctcctggggtattgttatgttgcaaatagtttatagcagcataatcttgatagctccgaaatttgtccgtttcgctttttaaagctgctcgtaacataaagtcgacgatggttatcattcatatacgagacatcaattccccactggtctcgttgcatgtgcgcacacttctttcactggcaacttatcaccttatttccacgtgggcgacatgtccc

SEQ ID NO: 3731 - DNA, 1491 bp, Muscodor strobelii
  misc_feature: SGI cDNA ID NO. 560911
  misc_feature: Reduced expression when VOC is produced
  misc_feature: Encodes the peptide sequence at SEQ ID NO 3732
atggtcgttgacacgacctactacgatgccttgggtgtccaacccacggccaccgagatagagataaaaaaggcataccgcaagcttgccatcgtccaccacccggacaagaatcccaatgatcctaccgcacacgagaagttccagaccatcggcgaagcctaccaagtgctatcagatacacaactgcgcgctgcctatgacaagttcggcaaggatagcgccaaaccgggcgagggctttgtcgacccagccgagttcttcagcagcatctttggcggtgaggccttcgtcgactggatcggcgagatcagccttatgaaggatcttaacagtgccatggaaatcagcgccgaagaccaggaggccgaaggagccgcagaggcatccaaggaggtccccaaggaggacgcaacggaaaaagaggactcgactcctatcccagagggtcccaaggtcaccgtcgaggatgattcatcaagtcagccgggcccggccgctgcaaccgaatccaaagtgcacccggaagtgaaagtaccgtctcgccaaccctcaccttctcctagtgcttctggcacgtccactccatctagacacgctatacccatccgacccgctcttatggatcgcccgtcggacgaggttgagccggaaggtcagaccgaggaagagaaggatctgcggaagaaagagaagaagaagggcggtctgaccaaggagcagcgcgagaagttagccgccctcgaagcagagcgaacccgggttcgtgaggaacgagtcgagacgcttgcccgcaagcttgtcgaccgtgtatcggtatggacagagaccgataaggggcctgacgtcaccaaggcctttcaggacaagacggcgcttgaggtcgagaacctcaaaatggagtcattcggcctcgacattcttcacgccattggcgccgtatacttcagcaaagcaacagccttgctcaagagtcagaaattcctcggtatcagcggcttttttagtcgtgtgaaagacaaggggacgttcttcaaggagacttggaacacaatttcgtctgccattgacgctcaacatactatggaggagatggcacgcatggaagagcaaggtggagacgactggacggacgagaagaaaatggagtacgagcgcaaggttacgggcaagatcttgaacgctgcctggcggggtagcaagtacgagatccagggcgtgttgagggaggtctgcgacagtgtgctttacgacaagaaggtcccgcttaacaagcgtttagagcgcgcacaggcactcgtactaattgcagatatcctttctaaggccaagagatctcctgaagaagagggtgactatatggcttttgaacaactcgttgccgaagccgccatgaagaaggaaaaagataaggatgcgaaaaagaaggataagaagaagggtagcgaggcttcggccgaatcgtcgaacctgcccaaggagaaggcatag

SEQ ID NO: 3732 - protein, 496 aa, Muscodor strobelii
  misc_feature: SGI Peptide ID NO. 560911
  misc_feature (6)..(68): Pfam Id: PF00226 Pfam Desc: DnaJ domain
  misc_feature (1)..(465): NCBI GI: 171680813 Blast Desc: protein product [Podospora anserina] gi|27764299|emb|CAD60579.1| protein product [Podospora anserina] gi|170940034|emb|CAP65260.1| protein product [Podospora anserina]
  misc_feature (1)..(465): NCBI GI: 46135729 Blast Desc: FG09380.1 [Gibberella zeae PH-1]
  misc_feature (1)..(465): NCBI GI: 116200638 Blast Desc: CHGG_10864 [Chaetomium globosum CBS 148.51] gi|88175578|gb|EAQ83046.1| CHGG_10864 [Chaetomium globosum CBS 148.51]
  misc_feature (1)..(465): NCBI GI: 85094073 Blast Desc: NCU06052 [Neurospora crassa OR74A] gi|28921270|gb|EAA30579.1| NCU06052 [Neurospora crassa OR74A]
  misc_feature (1)..(465): NCBI GI: 256735544 Blast Desc: NECHADRAFT_75491 [Nectria haematococca mpVI 77-13-4]
  misc_feature (1)..(460): NCBI GI: 156060771 Blast Desc: SS1G_02528 [Sclerotinia sclerotiorum 1980] gi|154699932|gb|EDN99670.1| SS1G_02528 [Sclerotinia sclerotiorum 1980]
  misc_feature (1)..(460): NCBI GI: 154322250 Blast Desc: BC1G_01272 [Botryotinia fuckeliana B05.10] gi|150850519|gb|EDN25712.1| BC1G_01272 [Botryotinia fuckeliana B05.10]
  misc_feature (1)..(461): NCBI GI: 238840054 Blast Desc: DnaJ domain-containing protein [Microsporum canis CBS 113480]
  misc_feature (1)..(463): NCBI GI: 145246054 Blast Desc: An12g01900 [Aspergillus niger] gi|134079988|emb|CAK48472.1| protein product [Aspergillus niger]
  misc_feature (1)..(463): NCBI GI: 119178585 Blast Desc: CIMG_08117 [Coccidioides immitis RS]
  misc_feature: Useful for introducing or modulating the production of volatile compounds
MVVDTTYYDALGVQPTATEIEIKKAYRKLAIVHHPDKNPNDPTAHEKFQTIGEAYQVLSDTQLRAAYDKFGKDSAKPGEGFVDPAEFFSSIFGGEAFVDWIGEISLMKDLNSAMEISAEDQEAEGAAEASKEVPKEDATEKEDSTPIPEGPKVTVEDDSSSQPGPAAATESKVHPEVKVPSRQPSPSPSASGTSTPSRHAIPIRPALMDRPSDEVEPEGQTEEEKDLRKKEKKKGGLTKEQREKLAALEAERTRVREERVETLARKLVDRVSVWTETDKGPDVTKAFQDKTALEVENLKMESFGLDILHAIGAVYFSKATALLKSQKFLGISGFFSRVKDKGTFFKETWNTISSAIDAQHTMEEMARMEEQGGDDWTDEKKMEYERKVTGKILNAAWRGSKYEIQGVLREVCDSVLYDKKVPLNKRLERAQALVLIADILSKAKRSPEEEGDYMAFEQLVAEAAMKKEKDKDAKKKDKKKGSEASAESSNLPKEKA

SEQ ID NO: 3733 - DNA, 2000 bp, Muscodor strobelii
  misc_feature: SGI EST ID NO. CUFF.9353.0
  misc_feature: Variant of the nucleotide sequence at SEQ ID NO 3731
ttcatactgtttcattcattcaatacctttaggtagtctaccgtcgctcttattccatcgtttcgactgttagatcccttctcattacatccatcatcccaaacactaggtactggtatcacttccaagttccaccgcttcccgtgtagccccatccgtcattagtgaggtgacctgcacagccgtcattccaccgccgaacaacccccaccatcgccaacaaaacatttgccgcctcagctagcttctccagcctcattattcctactgcttcccatctagatcgccatcatggtcgttgacacgacctactacgatgccttgggtgtccaacccacggccaccgagatagagataaaaaaggcataccgcaagcttgccatcgtccaccacccggacaagaatcccaatgatcctaccgcacacgagaagttccagaccatcggcgaagcctaccaagtgctatcagatacacaactgcgcgctgcctatgacaagttcggcaaggatagcgccaaaccgggcgagggctttgtcgacccagccgagttcttcagcagcatctttggcggtgaggccttcgtcgactggatcggcgagatcagccttatgaaggatcttaacagtgccatggaaatcagcgccgaagaccaggaggccgaaggagccgcagaggcatccaaggaggtccccaaggaggacgcaacggaaaaagaggactcgactcctatcccagagggtcccaaggtcaccgtcgaggatgattcatcaagtcagccgggcccggccgctgcaaccgaatccaaagtgcacccggaagtgaaagtaccgtctcgccaaccctcaccttctcctagtgcttctggcacgtccactccatctagacacgctatacccatccgacccgctcttatggatcgcccgtcggacgaggttgagccggaaggtcagaccgaggaagagaaggatctgcggaagaaagagaagaagaagggcggtctgaccaaggagcagcgcgagaagttagccgccctcgaagcagagcgaacccgggttcgtgaggaacgagtcgagacgcttgcccgcaagcttgtcgaccgtgtatcggtatggacagagaccgataaggggcctgacgtcaccaaggcctttcaggacaagacggcgcttgaggtcgagaacctcaaaatggagtcattcggcctcgacattcttcacgccattggcgccgtatacttcagcaaagcaacagccttgctcaagagtcagaaattcctcggtatcagcggcttttttagtcgtgtgaaagacaaggggacgttcttcaaggagacttggaacacaatttcgtctgccattgacgctcaacatactatggaggagatggcacgcatggaagagcaaggtggagacgactggacggacgagaagaaaatggagtacgagcgcaaggttacgggcaagatcttgaacgctgcctggcggggtagcaagtacgagatccagggcgtgttgagggaggtctgcgacagtgtgctttacgacaagaaggtcccgcttaacaagcgtttagagcgcgcacaggcactcgtactaattgcagatatcctttctaaggccaagagatctcctgaagaagagggtgactatatggcttttgaacaactcgttgccgaagccgccatgaagaaggaaaaagataaggatgcgaaaaagaaggataagaagaagggtagcgaggcttcggccgaatcgtcgaacctgcccaaggagaaggcatagattacttgtcgtttgtggaaatggggatgacagcaaggtgtcaaaatgaatactacagcgaatacatcaatgtatacacttccgaatagaccagcgactaatattccgatagccattcgacgtcttgacgtaattgatttcggaagttttatagaattgaaaacagcagtccgcgagatttgttgtagttgtagttatgagtacattgtcccccatca

SEQ ID NO: 3734 - DNA, 1170 bp, Muscodor strobelii
  misc_feature: SGI cDNA ID NO. 560912
  misc_feature: Encodes the peptide sequence at SEQ ID NO 3735
atgggataccagcgccctcggcgaacgcggcatatcacggggagcaaagaagacgaatcgattgttggaggtgtagtaggctctcaaaaagcaaaggaatccaagaaagatgactcggactcaaacacctcgccgccaccgccaggaaacacgccaaataagaatattctcaccgagtccagattatcggcatcaaattggacagatacaaatgggaataaccatcgtttcgttttcttccaggatacttacaactcgatcatcgtacgtaggtgggatccgcagaataagacatggagcacggacaacatcacggacaaactcgcctcatcaggtgcacccgtgaaccctcagacaccatacacacctctatcgagcgccgcatgctatgaaggagaaggtggtaataacgcggttcacctatacttcctagcacgcgacagcaccataaccggcgtcggcgcagatgatctcattaatgacccctcagactggacctatttgaagttcatcggggggaagaaattccaaacaaaccccggatcgcaactagccacagtctggaaccggtgtctgggcgattgtactgcacacttcgcgattgcgtttcagaatgtctcgggcggagtctatgttgccaacgctagcgacggctggtcatcgacgcttgctatcaatcccaggagtgtcgttctgaactccagcctaggcttgatatcggagcgggacttcatcggcaattctataaccagactcagcctcatgagcgagactctcaagtcttcgacgatagggacggcgcaaaaaacgtcgtactcgttaggaacatgggaattctccgatggactcttctttgacgcggcgatccccaccccctcatccacacttcagttcgcaatgagcacgctatccaacttctctgagcccgtattcctcgccttgttaccaaatggttctgtgacaggtgactactattctacctcagtcgccaacttcaccgaactctcaaccccccagttcaaaggcgggcctgatgatctcaacttcacggcaatcgcagcaaccgaagaatctatgttttacggcgtttctaatgacacgatactgcagtattccattagcgaaacctatccatttgaatttgagtttgtaggcgttgtttacccttga

SEQ ID NO: 3735 - protein, 389 aa, Muscodor strobelii
  misc_feature: SGI Peptide ID NO. 560912
MGYQRPRRTRHITGSKEDESIVGGVVGSQKAKESKKDDSDSNTSPPPPGNTPNKNILTESRLSASNWTDTNGNNHRFVFFQDTYNSIIVRRWDPQNKTWSTDNITDKLASSGAPVNPQTPYTPLSSAACYEGEGGNNAVHLYFLARDSTITGVGADDLINDPSDWTYLKFIGGKKFQTNPGSQLATVWNRCLGDCTAHFAIAFQNVSGGVYVANASDGWSSTLAINPRSVVLNSSLGLISERDFIGNSITRLSLMSETLKSSTIGTAQKTSYSLGTWEFSDGLFFDAAIPTPSSTLQFAMSTLSNFSEPVFLALLPNGSVTGDYYSTSVANFTELSTPQFKGGPDDLNFTAIAATEESMFYGVSNDTILQYSISETYPFEFEFVGVVYP

SEQ ID NO: 3736 - DNA, 1873 bp, Muscodor strobelii
  misc_feature: SGI EST ID NO. CUFF.9360.0
  misc_feature: Variant of the nucleotide sequence at SEQ ID NO 3734
gtcgaagcctaacgtatcaacctacagatcacgaagaacaacagatacttgcaaatgattgacgaaatcaacgttatcacaaacgccgattcttaggcatggaacggcatagcgatttggaagtcgtagaaaacgataggcatagacttgacgaggagcacaatgtgtatcgcgagagactccccgaggataatcttccggagacagtcccgatagaatacaaaccatacgggattgagagtaccccgcagggttacaatgggataccagcgccctcggcgaacgcggcatatcacggggagcaaagaagacgaatgtgcggcatccccatacgggtattctacacgggttgcgcaatattaatattaataatcatcggagcgattgttggaggtgtagtaggctctcaaaaagcaaaggaatccaagaaagatgactcggactcaaacacctcgccgccaccgccaggaaacacgccaaataagaatattctcaccgagtccagattatcggcatcaaattggacagatacaaatgggaataaccatcgtttcgttttcttccaggatacttacaactcgatcatcgtacgtaggtgggatccgcagaataagacatggagcacggacaacatcacggacaaactcgcctcatcaggtgcacccgtgaaccctcagacaccatacacacctctatcgagcgccgcatgctatgaaggagaaggtggtaataacgcggttcacctatacttcctagcacgcgacagcaccataaccggcgtcggcgcagatgatctcattaatgacccctcagactggacctatttgaagttcatcggggggaagaaattccaaacaaaccccggatcgcaactagccacagtctggaaccggtgtctgggcgattgtactgcacacttcgcgattgcgtttcagaatgtctcgggcggagtctatgttgccaacgctagcgacggctggtcatcgacgcttgctatcaatcccaggagtgtcgttctgaactccagcctaggcttgatatcggagcgggacttcatcggcaattctataaccagactcagcctcatgagcgagactctcaagtcttcgacgatagggacggcgcaaaaaacgtcgtactcgttaggaacatgggaattctccgatggactcttctttgacgcggcgatccccaccccctcatccacacttcagttcgcaatgagcacgctatccaacttctctgagcccgtattcctcgccttgttaccaaatggttctgtgacaggtgactactattctacctcagtcgccaacttcaccgaactctcaaccccccagttcaaaggcgggcctgatgatctcaacttcacggcaatcgcagcaaccgaagaatctatgttttacggcgtttctaatgacacgatactgcagtattccattagcgaaacctatccatttgaatttgagtttgtaggcgttgtttacccttgaatttagatcatgtctggaagcgctattcctgtacaaaatatctatactggtcattattcattgtacatctctatgctccgccggaaatgcagagaaattctttataagagtgaaattgataaacaacagattcgatcagaaatcgctctgcaatttcacaaacttacgattgcggaggatgatcacggtcatcgtgtgcgattgtgcaataatcctctcttgaccaacagcactgatgattgagactaaaagcctaggtacctgtggttctagtcaaaagatgactagcgacagcggtataagcaagacataggtgacatcgttagtgtatgcagtcgttgtttatatggtgatgccaggtccatatgcgactccagatc

SEQ ID NO: 3737 - DNA, 1440 bp, Muscodor strobelii
  misc_feature: SGI cDNA ID NO. 560913
  misc_feature: Encodes the peptide sequence at SEQ ID NO 3738
atggagaacgaagatttaagccaattcagcagcaatttcgaatcagaaagcggccggaacgttgagggcgcaagtcctagtctatacccatcatcgtatactaattccgaactccacgcttcccacaatggacactcccatgaagatgaccaggactacgtggctcagacaaaaatctcgaatacgacacaccagacctcggcgtcctattggttcttcgatgctgaagagctgcaatcatatcaagagtccaagatctactggctgcatagtccgatatggcttttgtatggagtggacgaaaacacaatgctattagcagcacaggctggccaaacagaacattatcctcaggcacatgaacgcaaggcaggcaaggacgtcgaaaaagaacggcatatccccgcatgtaaatggatacttatactgctcatatcgggtttcatcgagtatttcttatcgctccgggaaattataacacatgccagagggccgaaacacgccttatgtacaacaatgccgtggacaatacggtcagcgcttgtcgttctatggggtgtatgctggatgttttacaactcacccccgtgggcagtacaagattctgatttgaatgccgaaagcacagtcgacgtcccggttgtgccatgggattatttttatgatccgaactccccgttcaatttcgatttcggtttcgatatcgacaatgacccacaaagctctaacttcagacatactacgcagaatgatgtcgtttattcttcgcacaacacaataacttctatggtactgcatggacatgccacagacgagcatgtcccgacgactgccaatgccgaaacttcggggtcgttgatgcagacgctaccatcacaaggcgaacccccagctctgcagcagatatcatttgagacagaaccagttcccccacaaccacggcctgcgaagccattccaatgccccgaatctgggtgcaatgcggagttcggccgaattcaggatgtcgagcgccaccgggtctctattcacggggcggcggcattcccgtgtcgaaaagccggatgcaaacgtgggccggacaagccctttaataggcgagagaatctgcagcgtcacgagaggctgcagcatggcaatgacagtagtgaggatggcgaggtggtgacctcacaggcgcgaaaccgaaggcgccgcgttcggtcaccagatacgcagactgaacccgatgcacttagaggcaagcgcccgcgtgtggaggtcgttgaagacggcgagtctgatctagaccgcagcaccgactctcaattagttatcaaactacggcgacagcttgtggaagtgacagctcagcgagaccgcattcaggaggagctcattcaagttttaaggagtcgggttagggacttggagaaagacagggctagcttgcccaagtag

SEQ ID NO: 3738 - protein, 479 aa, Muscodor strobelii
  misc_feature: SGI Peptide ID NO. 560913
  misc_feature (169)..(229): NCBI GI: 169600970 Blast Desc: SNOG_03339 [Phaeosphaeria nodorum SN15] gi|111067424|gb|EAT88544.1| SNOG_03339 [Phaeosphaeria nodorum SN15]
  misc_feature (173)..(458): NCBI GI: 256727281 Blast Desc: NECHADRAFT_75990 [Nectria haematococca mpVI 77-13-4]
  misc_feature (317)..(375): NCBI GI: 195388958 Blast Desc: GJ23725 [Drosophila virilis] gi|194151231|gb|EDW66665.1| GJ23725 [Drosophila virilis]
  misc_feature (317)..(375): NCBI GI: 195110199 Blast Desc: GI22947 [Drosophila mojavensis] gi|193916263|gb|EDW15130.1| GI22947 [Drosophila mojavensis]
  misc_feature (317)..(384): NCBI GI: 281361910 Blast Desc: poils au dos [Drosophila melanogaster] gi|66571268|gb|AAY51599.1| IP01015p [Drosophila melanogaster] gi|272477013|gb|AAF55301.2| poils au dos [Drosophila
  misc_feature (317)..(375): NCBI GI: 195038649 Blast Desc: GH19547 [Drosophila grimshawi] gi|193894965|gb|EDV93831.1| GH19547 [Drosophila grimshawi]
  misc_feature (317)..(384): NCBI GI: 195349402 Blast Desc: GM15150 [Drosophila sechellia] gi|194122839|gb|EDW44882.1| GM15150 [Drosophila sechellia]
  misc_feature (317)..(384): NCBI GI: 195570408 Blast Desc: GD19092 [Drosophila simulans] gi|194199126|gb|EDX12702.1| GD19092 [Drosophila simulans]
  misc_feature (317)..(384): NCBI GI: 195501012 Blast Desc: GE24391 [Drosophila yakuba] gi|194183720|gb|EDW97331.1| GE24391 [Drosophila yakuba]
  misc_feature (138)..(423): NCBI GI: 169624130 Blast Desc: SNOG_15317 [Phaeosphaeria nodorum SN15] gi|111056130|gb|EAT77250.1| SNOG_15317 [Phaeosphaeria nodorum SN15]
MENEDLSQFSSNFESESGRNVEGASPSLYPSSYTNSELHASHNGHSHEDDQDYVAQTKISNTTHQTSASYWFFDAEELQSYQESKIYWLHSPIWLLYGVDENTMLLAAQAGQTEHYPQAHERKAGKDVEKERHIPACKWILILLISGFIEYFLSLREIITHARGPKHALCTTMPWTIRSALVVLWGVCWMFYNSPPWAVQDSDLNAESTVDVPVVPWDYFYDPNSPFNFDFGFDIDNDPQSSNFRHTTQNDVVYSSHNTITSMVLHGHATDEHVPTTANAETSGSLMQTLPSQGEPPALQQISFETEPVPPQPRPAKPFQCPESGCNAEFGRIQDVERHRVSIHGAAAFPCRKAGCKRGPDKPFNRRENLQRHERLQHGNDSSEDGEVVTSQARNRRRRVRSPDTQTEPDALRGKRPRVEVVEDGESDLDRSTDSQLVIKLRRQLVEVTAQRDRIQEELIQVLRSRVRDLEKDRASLPK

SEQ ID NO: 3739 - DNA, 4462 bp, Muscodor strobelii
  misc_feature: SGI EST ID NO. CUFF.9372.0
  misc_feature: Variant of the nucleotide sequence at SEQ ID NO 3737
caatagacctgatgaaattgagtggggacaacctctcctgtaggaatggtccaggcagccaagtaaacacggcaatgtcaacattgacaaaagaccatcaatcacctacaaaagtatctatgagcccgatgtagatattatggatgctgcctacgtataatgacgtcttgcatacagctcgcgccgcagtggtcactcttcaaatttcttacgcgtacgcgattttcatgaccagtagctccgacgactcaacagttctcgacaacagttcctagactcaataattggtcatggagcaatttcttctcaagaacattgatctatatcagagcttagtgaaatctgtcaagcccgcgcgcgtgcctcctcagaatggacagacgagcccagcaatactcgtcagcgccaggatcaggcctctggtggatgaggatacagactttccttgtgcgatcttcccacgctccactacgaacggcgttgtggacgtccacgagctctacaaccatcctaggggccgcccaatactcaaagtacttatgcatagtccatcaacccggcagcctactccccatggttagcctcttatcggctcggcaacgatgctaatcaaaaggactcgcagtcattcaactaccaggtagacaggcttttcggccctgaggcaactaccgaggagatctatgaaatcctggtggcagacttgatcccctatgcatggaatggcggcatcgggacggtctttgcttatggccagactggttccggaaaaacgttcacagtcagccgcctggaggaactggttgcagaagcgttgatgaatagagatgcggaggatcaaaaaaaggtgtatatgaccatcgtcgatcttgctggtaattcggcttacgacttgttgagcgagcgagcaccgattatgatcctcgaggatgcattcggcaacacgcagctatctggcgcgagagaactcctagttaaagaccaagctgagatgacagagctcattctacaggcagcatcgttccgatcaactgcatcaacgttcaaaaatgatgcctcgtcgcgatcccacgccatatgtcgcatcagaatcaatgatcctacgtctgattcagatgggttcttgtatctcgtcgacctagcagggtctgaggcagctcgagatcgggcggtccacggcgccgataggatgcgcgaaacaaaggagatcaacatcagtctgtcggtactcaaagactgcattcgcggcaaggcgcaggcaacaagtggcccgaaatcaaagaaaccgcacgttccttttagatcgagtgcgcttaccaaggtcttaaagcacgtatttgatccagccggcacccggacttgccaaacggtcgtcatagcctgtgtgaatcccagtcttgcagacacgggacccagcaagaatacattgcgatacgccgagatgctgcgagtccaagttccggccgcaactaaacccgcgtccgctgcgacagcgccgatgacatggacgaatgtgcagcttcaggactggatcaccaagaactcaggaactcccgcgatctcggccgcgaaactggccgcgaatgagtccggcgctcaactcctacgtctatcagcaaacgagtttgaggatcgctgccagaaaactccgcacgtcagcttggaacaagccaaggcattcagatctaagctgtggcaactacatattgattcaacaagctccagtggtgctgcgacgacgcgtaactcatcgagccgcaacttagaccctgatgctgcatcgattccgtttaaggagcgcattcgcccggggatggtggtcagccgcagccagacagccacaaccggatctgcttcgggcacgaaggaaagccccaatctagtccttgtgctttccccaactactacagatccccaagcgaatggagatttgaccgaacgcgtgaatactaccaagcatagtgatcaagatgaggcacaggacaagaggacattagcgaacgcgcgctacatctgtgctcgggtgacgccaagcctcatggctggagcttacgagctgaacgtctggtcccaagttgttatcgatgttgaacaaatggaacgggagatctaccttgaatacgatgctagcactcgatactattacgtcaccatctgatagccattgctggtctgcatcgataaatcatattcaaaccggttgctgagataatgaggcacataatgagtgcctcactttgcatgaggcgtgctgtgcaactgcagtactgattggttcaggtaggggttgcttggtgccggcgcctccttatgccgcatgatgaaatgcccggcctccgcttgttgcctcaatttgggtgcctcaatttgggtgtctcataaactatgagctcctggtagatatcatacgcaagtacctagttcactgtacaatacgaccttgataaatatcgtccgaaatcctcagacaatttctgaaattcgagctcccttgaagtaacatcatacgtttaatctattctttccctaaattcgatcttcagctggtcacatatatggtcggcgactcacgcgcccgatgagcctacgtatggatactagtacggacggcgtattgggccaccttcatcatctccttatactttcgacgtatcgacacaggcccgcatgtattaaaagcccgtttgatttggagcttttttaactactcattgtatcaggttcaggactagcacctccttgcatcattgggttacaaaaacgggttgcctctcaccgttagcaaacatggagaacgaagatttaagccaattcagcagcaatttcgaatcagaaagcggccggaacgttgagggcgcaagtcctagtctatacccatcatcgtatactaattccgaactccacgcttcccacaatggacactcccatgaagatgaccaggactacgtggctcagacaaaaatctcgaatacgacacaccagacctcggcgtcctattggttcttcgatgctgaagagctgcaatcatatcaagagtccaagatctactggctgcatagtccgatatggcttttgtatggagtggacgaaaacacaatgctattagcagcacaggctggccaaacagaacattatcctcaggcacatgaacgcaaggcaggcaaggacgtcgaaaaagaacggcatatccccgcatgtaaatggatacttatactgctcatatcgggtttcatcgagtatttcttatcgctccgggaaattataacacatgccagagggccgaaacacgccttatgtacaacaatgccgtggacaatacggtcagcgcttgtcgttctatggggtgtatgctggatgttttacaactcacccccgtgggcagtacaagattctgatttgaatgccgaaagcacagtcgacgtcccggttgtgccatgggattatttttatgatccgaactccccgttcaatttcgatttcggtttcgatatcgacaatgacccacaaagctctaacttcagacatactacgcagaatgatgtcgtttattcttcgcacaacacaataacttctatggtactgcatggacatgccacagacgagcatgtcccgacgactgccaatgccgaaacttcggggtcgttgatgcagacgctaccatcacaaggcgaacccccagctctgcagcagatatcatttgagacagaaccagttcccccacaaccacggcctgcgaagccattccaatgccccgaatctgggtgcaatgcggagttcggccgaattcaggatgtcgagcgccaccgggtctctattcacggggcggcggcattcccgtgtcgaaaagccggatgcaaacgtgggccggacaagccctttaataggcgagagaatctgcagcgtcacgagaggctgcagcatggcaatgacagtagtgaggatggcgaggtggtgacctcacaggcgcgaaaccgaaggcgccgcgttcggtcaccagatacgcagactgaacccgatgcacttagaggcaagcgcccgcgtgtggaggtcgttgaagacggcgagtctgatctagaccgcagcaccgactctcaattagttatcaaactacggcgacagcttgtggaagtgacagctcagcgagaccgcattcaggaggagctcattcaagttttaaggagtcgggttagggacttggagaaagacagggctagcttgcccaagtagggtgaatggacgaggcgtaaaacaggcaggatattcccttttgatgactgattacgacgttgattcttcagtacgatggcagtttcctcatcggttgagtatctcttataaattggacaattcctacttttagtttaagggttcgagttatgctgtctttcaaacacggctaagaaagacaatccacaataggtttcattaccaatatattacacgtcaattcttcacattcgta

SEQ ID NO: 3740 - DNA, 1776 bp, Muscodor strobelii
  misc_feature: SGI cDNA ID NO. 560914
  misc_feature: Encodes the peptide sequence at SEQ ID NO 3741
atggagcaatttcttctcaagaacattgatctatatcagagcttagtgaaatctgtcaagcccgcgcgcgtgcctcctcagaatggacagacgagcccagcaatactcgtcagcgccaggatcaggcctctggtggatgaggatacagactttccttgtgcgatcttcccacgctccactacgaacggcgttgtggacgtccacgagctctacaaccatcctaggggccgcccaatactcaaatcattcaactaccaggtagacaggcttttcggccctgaggcaactaccgaggagatctatgaaatcctggtggcagacttgatcccctatgcatggaatggcggcatcgggacggtctttgcttatggccagactggttccggaaaaacgttcacagtcagccgcctggaggaactggttgcagaagcgttgatgaatagagatgcggaggatcaaaaaaaggtgtatatgaccatcgtcgatcttgctggtaattcggcttacgacttgttgagcgagcgagcaccgattatgatcctcgaggatgcattcggcaacacgcagctatctggcgcgagagaactcctagttaaagaccaagctgagatgacagagctcattctacaggcagcatcgttccgatcaactgcatcaacgttcaaaaatgatgcctcgtcgcgatcccacgccatatgtcgcatcagaatcaatgatcctacgtctgattcagatgggttcttgtatctcgtcgacctagcagggtctgaggcagctcgagatcgggcggtccacggcgccgataggatgcgcgaaacaaaggagatcaacatcagtctgtcggtactcaaagactgcattcgcggcaaggcgcaggcaacaagtggcccgaaatcaaagaaaccgcacgttccttttagatcgagtgcgcttaccaaggtcttaaagcacgtatttgatccagccggcacccggacttgccaaacggtcgtcatagcctgtgtgaatcccagtcttgcagacacgggacccagcaagaatacattgcgatacgccgagatgctgcgagtccaagttccggccgcaactaaacccgcgtccgctgcgacagcgccgatgacatggacgaatgtgcagcttcaggactggatcaccaagaactcaggaactcccgcgatctcggccgcgaaactggccgcgaatgagtccggcgctcaactcctacgtctatcagcaaacgagtttgaggatcgctgccagaaaactccgcacgtcagcttggaacaagccaaggcattcagatctaagctgtggcaactacatattgattcaacaagctccagtggtgctgcgacgacgcgtaactcatcgagccgcaacttagaccctgatgctgcatcgattccgtttaaggagcgcattcgcccggggatggtggtcagccgcagccagacagccacaaccggatctgcttcgggcacgaaggaaagccccaatctagtccttgtgctttccccaactactacagatccccaagcgaatggagatttgaccgaacgcgtgaatactaccaagcatagtgatcaagatgaggcacaggacaagaggacattagcgaacgcgcgctacatctgtgctcgggtgacgccaagcctcatggctggagcttacgagctgaacgtctggtcccaagttgttatcgatgttgaacaaatggaacgggagatctaccttgaatacgatgctagcactcgatactattacgtcaccatctga

SEQ ID NO: 3741 - protein, 591 aa, Muscodor strobelii
  misc_feature: SGI Peptide ID NO. 560914
  misc_feature (40)..(359): Pfam Id: PF00225 Pfam Desc: Kinesin motor domain
  misc_feature (169)..(359): Pfam Id: PF00225 Pfam Desc: Kinesin motor domain
  misc_feature (40)..(133): Pfam Id: PF00225 Pfam Desc: Kinesin motor domain
  misc_feature (1)..(442): NCBI GI: 169618742 Blast Desc: SNOG_12563 [Phaeosphaeria nodorum SN15] gi|111058741|gb|EAT79861.1| SNOG_12563 [Phaeosphaeria nodorum SN15]
  misc_feature (1)..(591): NCBI GI: 256731059 Blast Desc: NECHADRAFT_48605 [Nectria haematococca mpVI 77-13-4]
  misc_feature (1)..(591): NCBI GI: 171678479 Blast Desc: protein product [Podospora anserina] gi|170937309|emb|CAP61966.1| protein product [Podospora anserina]
  misc_feature (1)..(591): NCBI GI: 46123543 Blast Desc: FG06149.1 [Gibberella zeae PH-1]
  misc_feature (1)..(591): NCBI GI: 116204325 Blast Desc: CHGG_10046 [Chaetomium globosum CBS 148.51] gi|88176174|gb|EAQ83642.1| CHGG_10046 [Chaetomium globosum CBS 148.51]
  misc_feature (5)..(591): NCBI GI: 238842382 Blast Desc: kinesin motor domain containing protein [Microsporum canis CBS 113480]
  misc_feature (12)..(591): NCBI GI: 261357162 Blast Desc: conserved [Verticillium albo-atrum VaMs.102]
  misc_feature (35)..(356): NCBI GI: 145485400 Blast Desc: [Paramecium tetraurelia strain d4-2] gi|124395796|emb|CAK61310.1| protein product [Paramecium tetraurelia]
  misc_feature (3)..(356): NCBI GI: 145548686 Blast Desc: [Paramecium tetraurelia strain d4-2] gi|124427851|emb|CAK92626.1| protein product [Paramecium tetraurelia]
  misc_feature (3)..(356): NCBI GI: 145521160 Blast Desc: [Paramecium tetraurelia strain d4-2] gi|124413913|emb|CAK79038.1| protein product [Paramecium tetraurelia]
MEQFLLKNIDLYQSLVKSVKPARVPPQNGQTSPAILVSARIRPLVDEDTDFPCAIFPRSTTNGVVDVHELYNHPRGRPILKSFNYQVDRLFGPEATTEEIYEILVADLIPYAWNGGIGTVFAYGQTGSGKTFTVSRLEELVAEALMNRDAEDQKKVYMTIVDLAGNSAYDLLSERAPIMILEDAFGNTQLSGARELLVKDQAEMTELILQAASFRSTASTFKNDASSRSHAICRIRINDPTSDSDGFLYLVDLAGSEAARDRAVHGADRMRETKEINISLSVLKDCIRGKAQATSGPKSKKPHVPFRSSALTKVLKHVFDPAGTRTCQTVVIACVNPSLADTGPSKNTLRYAEMLRVQVPAATKPASAATAPMTWTNVQLQDWITKNSGTPAISAAKLAANESGAQLLRLSANEFEDRCQKTPHVSLEQAKAFRSKLWQLHIDSTSSSGAATTRNSSSRNLDPDAASIPFKERIRPGMVVSRSQTATTGSASGTKESPNLVLVLSPTTTDPQANGDLTERVNTTKHSDQDEAQDKRTLANARYICARVTPSLMAGAYELNVWSQVVIDVEQMEREIYLEYDASTRYYYVTI

SEQ ID NO: 3742 - DNA, 4462 bp, Muscodor strobelii; identical to SEQ ID NO: 3739
  misc_feature: SGI EST ID NO. CUFF.9372.0
  misc_feature: Variant of the nucleotide sequence at SEQ ID NO 3740

SEQ ID NO: 3743 - DNA, 1809 bp, Muscodor strobelii
  misc_feature: SGI cDNA ID NO. 560915
  misc_feature: Encodes the peptide sequence at SEQ ID NO 3744
atggagcaatttcttctcaagaacattgatctatatcagagcttagtgaaatctgtcaagcccgcgcgcgtgcctcctcagaatggacagacgagcccagcaatactcgtcagcgccaggatcaggcctctggtggatgaggatacagactttccttgtgcgatcttcccacgctccactacgaacggcgttgtggactccatcaacccggcagcctactccccatggttagcctcttatcggctcggcaacgatgctaatcaaaaggactcgcagtcattcaactaccaggtagacaggcttttcggccctgaggcaactaccgaggagatctatgaaatcctggtggcagacttgatcccctatgcatggaatggcggcatcgggacggtctttgcttatggccagactggttccggaaaaacgttcacagtcagccgcctggaggaactggttgcagaagcgttgatgaatagagatgcggaggatcaaaaaaaggtgtatatgaccatcgtcgatcttgctggtaattcggcttacgacttgttgagcgagcgagcaccgattatgatcctcgaggatgcattcggcaacacgcagctatctggcgcgagagaactcctagttaaagaccaagctgagatgacagagctcattctacaggcagcatcgttccgatcaactgcatcaacgttcaaaaatgatgcctcgtcgcgatcccacgccatatgtcgcatcagaatcaatgatcctacgtctgattcagatgggttcttgtatctcgtcgacctagcagggtctgaggcagctcgagatcgggcggtccacggcgccgataggatgcgcgaaacaaaggagatcaacatcagtctgtcggtactcaaagactgcattcgcggcaaggcgcaggcaacaagtggcccgaaatcaaagaaaccgcacgttccttttagatcgagtgcgcttaccaaggtcttaaagcacgtatttgatccagccggcacccggacttgccaaacggtcgtcatagcctgtgtgaatcccagtcttgcagacacgggacccagcaagaatacattgcgatacgccgagatgctgcgagtccaagttccggccgcaactaaacccgcgtccgctgcgacagcgccgatgacatggacgaatgtgcagcttcaggactggatcaccaagaactcaggaactcccgcgatctcggccgcgaaactggccgcgaatgagtccggcgctcaactcctacgtctatcagcaaacgagtttgaggatcgctgccagaaaactccgcacgtcagcttggaacaagccaaggcattcagatctaagctgtggcaactacatattgattcaacaagctccagtggtgctgcgacgacgcgtaactcatcgagccgcaacttagaccctgatgctgcatcgattccgtttaaggagcgcattcgcccggggatggtggtcagccgcagccagacagccacaaccggatctgcttcgggcacgaaggaaagccccaatctagtccttgtgctttccccaactactacagatccccaagcgaatggagatttgaccgaacgcgtgaatactaccaagcatagtgatcaagatgaggcacaggacaagaggacattagcgaacgcgcgctacatctgtgctcgggtgacgccaagcctcatggctggagcttacgagctgaacgtctggtcccaagttgttatcgatgttgaacaaatggaacgggagatctaccttgaatacgatgctagcactcgatactattacgtcaccatctga

SEQ ID NO: 3744 - protein, 602 aa, Muscodor strobelii
  misc_feature: SGI Peptide ID NO. 560915
  misc_feature (40)..(370): Pfam Id: PF00225 Pfam Desc: Kinesin motor domain
  misc_feature (180)..(370): Pfam Id: PF00225 Pfam Desc: Kinesin motor domain
  misc_feature (40)..(144): Pfam Id: PF00225 Pfam Desc: Kinesin motor domain
  misc_feature (1)..(602): NCBI GI: 256731059 Blast Desc: NECHADRAFT_48605 [Nectria haematococca mpVI 77-13-4]
  misc_feature (1)..(602): NCBI GI: 46123543 Blast Desc: FG06149.1 [Gibberella zeae PH-1]
  misc_feature (1)..(602): NCBI GI: 171678479 Blast Desc: protein product [Podospora anserina] gi|170937309|emb|CAP61966.1| protein product [Podospora anserina]
  misc_feature (1)..(453): NCBI GI: 169618742 Blast Desc: SNOG_12563 [Phaeosphaeria nodorum SN15] gi|111058741|gb|EAT79861.1| SNOG_12563 [Phaeosphaeria nodorum SN15]
  misc_feature (1)..(602): NCBI GI: 116204325 Blast Desc: CHGG_10046 [Chaetomium globosum CBS 148.51] gi|88176174|gb|EAQ83642.1| CHGG_10046 [Chaetomium globosum CBS 148.51]
  misc_feature (5)..(602): NCBI GI: 238842382 Blast Desc: kinesin motor domain containing protein [Microsporum canis CBS 113480]
  misc_feature (35)..(367): NCBI GI: 145485400 Blast Desc: [Paramecium tetraurelia strain d4-2] gi|124395796|emb|CAK61310.1| protein product [Paramecium tetraurelia]
  misc_feature (3)..(367): NCBI GI: 145548686 Blast Desc: [Paramecium tetraurelia strain d4-2] gi|124427851|emb|CAK92626.1| protein product [Paramecium tetraurelia]
  misc_feature (3)..(367): NCBI GI: 145521160 Blast Desc: [Paramecium tetraurelia strain d4-2] gi|124413913|emb|CAK79038.1| protein product [Paramecium tetraurelia]
  misc_feature (3)..(367): NCBI GI: 145476571 Blast Desc: [Paramecium tetraurelia strain d4-2] gi|124391372|emb|CAK56910.1| protein product [Paramecium tetraurelia]
MEQFLLKNIDLYQSLVKSVKPARVPPQNGQTSPAILVSARIRPLVDEDTDFPCAIFPRSTTNGVVDSINPAAYSPWLASYRLGNDANQKDSQSFNYQVDRLFGPEATTEEIYEILVADLIPYAWNGGIGTVFAYGQTGSGKTFTVSRLEELVAEALMNRDAEDQKKVYMTIVDLAGNSAYDLLSERAPIMILEDAFGNTQLSGARELLVKDQAEMTELILQAASFRSTASTFKNDASSRSHAICRIRINDPTSDSDGFLYLVDLAGSEAARDRAVHGADRMRETKEINISLSVLKDCIRGKAQATSGPKSKKPHVPFRSSALTKVLKHVFDPAGTRTCQTVVIACVNPSLADTGPSKNTLRYAEMLRVQVPAATKPASAATAPMTWTNVQLQDWITKNSGTPAISAAKLAANESGAQLLRLSANEFEDRCQKTPHVSLEQAKAFRSKLWQLHIDSTSSSGAATTRNSSSRNLDPDAASIPFKERIRPGMVVSRSQTATTGSASGTKESPNLVLVLSPTTTDPQANGDLTERVNTTKHSDQDEAQDKRTLANARYICARVTPSLMAGAYELNVWSQVVIDVEQMEREIYLEYDASTRYYYVTI

SEQ ID NO: 3745 - DNA, 4462 bp, Muscodor strobelii; identical to SEQ ID NO: 3739
  misc_feature: SGI EST ID NO. CUFF.9372.0
  misc_feature: Variant of the nucleotide sequence at SEQ ID NO 3743

SEQ ID NO: 3746 - DNA, 1290 bp, Muscodor strobelii
  misc_feature: SGI cDNA ID NO. 560916
  misc_feature: Encodes the peptide sequence at SEQ ID NO 3747
atggcacccggattcacaactctcttcacctccttccttgcccttacgggcgtcctggcaactcccatcgtcaacaccaacaacctcgtgtctgacgttgtccctgccatcaactccttcctcgtcaatgctggcgccaagaacatcgtgcccaactcgtacatcgttgtgtacgatcatgacaacttcaccagcgccgagatcgacgagcatgaagctcacgtcacctctaccgtccacaagcgcaatctagctcgccgcgatctcacgggccaggtattgtcccctcgtgtccgcaagttcgccatggccaatggttggcgcgctacggcactggagagtgatgacctgaccatgtctgagatcaacaacatggcccaggtcaagtacgtcgaggctaaccagtacgtcaacgcttccgctttgattgagcaaagtaatgctcccctcggtcttcagcgactctctcatgccgcagctggggaaacccgtggttacgttttcgacgagtcagctggtcagggcatcacggcctacgttgtggacactggtattcgcacgactcatgagcagtttcaaggacgtgccgagatggttttcaatgctatcgagggctctcctaataccgatgagaacggccatggttctcatgtctccggcaccatcggcggtgccaccttcggtgtagccaagaatgttcagctgaagggtgtcaaggtcctcggcgctgatggtggcggtaccaacaccgatgttctcgacggcatcaacttcgtcgaaactgacgtcggccaaaagaaattagctggaaaggttgttatgaacatgtctctcggcggcggtttctccaaatcacttaacgctgctatcgaggctcttgcagcagctggtatcgtccccgtcgtcgcagccggaaacgagaaccaagacgcggccaacgacagccctgcttcgtctcccaatgccatcaccgttggcgctatcgatgcatcagacgatacgaaagcctcgttctctaactttggagatctcgtcgacatctttgcccccggtgttgatgttctgagcgttggcatcacttccgataccgccacggagactctgagcggtacttcgatggcttcaccccatgtctgcggtcttgccgcttacctcatgagcttggagagcatcacggacgtcacggctgtttccaaccgtatcaagaccctcgcgaagggtacgacccaagttcagaacaacgtcggcggtactacaaatgccatcgcgaataacggccaagtcttttga

SEQ ID NO: 3747 - protein, 429 aa, Muscodor strobelii
  misc_feature: SGI Peptide ID NO. 560916
  misc_feature (157)..(416): Pfam Id: PF00082 Pfam Desc: Subtilase family
  misc_feature (1)..(428): NCBI GI: 118161442 Blast Desc: subtilisin-like serine protease [Hypocrea lixii]
  misc_feature (1)..(428): NCBI GI: 145583129 Blast Desc: serine endopeptidase [Hypocrea lixii]
  misc_feature (37)..(426): NCBI GI: 46135733 Blast Desc: FG09382.1 [Gibberella zeae PH-1]
  misc_feature (41)..(428): NCBI GI: 85094084 Blast Desc: NCU06055 [Neurospora crassa OR74A] gi|28921273|gb|EAA30582.1| conserved [Neurospora crassa OR74A]
  misc_feature (4)..(427): NCBI GI: 223954277 Blast Desc: subtilisin-like protease [Epichloe festucae]
  misc_feature (43)..(426): NCBI GI: 256735545 Blast Desc: NECHADRAFT_31736 [Nectria haematococca mpVI 77-13-4]
  misc_feature (41)..(426): NCBI GI: 171680819 Blast Desc: protein product [Podospora anserina] gi|27764302|emb|CAD60582.1| protein product [Podospora anserina] gi|170940037|emb|CAP65263.1| protein product [Podospora anserina]
  misc_feature (1)..(426): NCBI GI: 116200644 Blast Desc: CHGG_10867 [Chaetomium globosum CBS 148.51] gi|88175581|gb|EAQ83049.1| CHGG_10867 [Chaetomium globosum CBS 148.51]
  misc_feature (42)..(426): NCBI GI: 15182970 Blast Desc: extracellular alkaline protease [Blumeria graminis]
  misc_feature (114)..(405): NCBI GI: 38050303 Blast Desc: subtilisin-like protease [Verticillium dahliae]
  misc_feature (29)..(426): SWISSPROT Homolog: EC 3.4.21.63 Oryzin
MAPGFTTLFTSFLALTGVLATPIVNTNNLVSDVVPAINSFLVNAGAKNIVPNSYIVVYDHDNFTSAEIDEHEAHVTSTVHKRNLARRDLTGQVLSPRVRKFAMANGWRATALESDDLTMSEINNMAQVKYVEANQYVNASALIEQSNAPLGLQRLSHAAAGETRGYVFDESAGQGITAYVVDTGIRTTHEQFQGRAEMVFNAIEGSPNTDENGHGSHVSGTIGGATFGVAKNVQLKGVKVLGADGGGTNTDVLDGINFVETDVGQKKLAGKVVMNMSLGGGFSKSLNAAIEALAAAGIVPVVAAGNENQDAANDSPASSPNAITVGAIDASDDTKASFSNFGDLVDIFAPGVDVLSVGITSDTATETLSGTSMASPHVCGLAAYLMSLESITDVTAVSNRIKTLAKGTTQVQNNVGGTTNAIANNGQVF

SEQ ID NO: 3748 - DNA, 2434 bp, Muscodor strobelii
  misc_feature: SGI EST ID NO. CUFF.9378.0
  misc_feature: Variant of the nucleotide sequence at SEQ ID NO 3746
gttttaataggagtggaaacgttttggtagatgtatcgcttggcgttaaaagacggggttcgcatatatgtacgccatgaggatcgtagccatttgttaaggaggatcatttccctttgttgacatcttaaagattccgtcttttagatctcactcttcccatcgctaaattctacttgtacatctttttttcctttgggccctttttcttcctcgagtctcttcccgcgtcgttgcgtctttgttcgcccaagcacaaccaggggtctttgatagacgccagccaactcgatcttgtgtgctcgatatcatcgccgtagtccaccaccataatttactcgcggctgagtgactgacacacactcacattctctacctcaccttcctgaacaaccatcgttgtgtgttgggcgcattccttcttgactcgcaggtcgacgctttttcttcatccacaactcgtcaaccagacgacatcatttgatccgacgcggctacgctctcttcgtttccttcaaactacgagtcagcttttgcctcgacagtttgtttaccttcagattcaaccaagtcaagtactcctgatctctcgcatcaggttcgtatatatctttctgtcaacactctcttgacgcactcgagttacactcgctttcgttcttctcaccctattaccttgttgaacctcggtcaaaatggcacccggattcacaactctcttcacctccttccttgcccttacgggcgtcctggcaactcccatcgtcaacaccaacaacctcgtgtctgacgttgtccctgccatcaactccttcctcgtcaatgctggcgccaagaacatcgtgcccaactcgtacatcgttgtgtacgatcatgacaacttcaccagcgccgagatcgacgagcatgaagctcacgtcacctctaccgtccacaagcgcaatctagctcgccgcgatctcacgggccaggtattgtcccctcgtgtccgcaagttcgccatggccaatggttggcgcgctacggcactggagagtgatgacctgaccatgtctgagatcaacaacatggcccaggtcaagtacgtcgaggctaaccagtacgtcaacgcttccgctttgattgagcaaagtaatgctcccctcggtcttcagcgactctctcatgccgcagctggggaaacccgtggttacgttttcgacgagtcagctggtcagggcatcacggcctacgttgtggacactggtattcgcacgactcatgagcagtttcaaggacgtgccgagatggttttcaatgctatcgagggctctcctaataccgatgagaacggccatggttctcatgtctccggcaccatcggcggtgccaccttcggtgtagccaagaatgttcagctgaagggtgtcaaggtcctcggcgctgatggtggcggtaccaacaccgatgttctcgacggcatcaacttcgtcgaaactgacgtcggccaaaagaaattagctggaaaggttgttatgaacatgtctctcggcggcggtttctccaaatcacttaacgctgctatcgaggctcttgcagcagctggtatcgtccccgtcgtcgcagccggaaacgagaaccaagacgcggccaacgacagccctgcttcgtctcccaatgccatcaccgttggcgctatcgatgcatcagacgatacgaaagcctcgttctctaactttggagatctcgtcgacatctttgcccccggtgttgatgttctgagcgttggcatcacttccgataccgccacggagactctgagcggtacttcgatggcttcaccccatgtctgcggtcttgccgcttacctcatgagcttggagagcatcacggacgtcacggctgtttccaaccgtatcaagaccctcgcgaagggtacgacccaagttcagaacaacgtcggcggtactacaaatgccatcgcgaataacggccaagtcttttgagaggccctctaaggatcaacgatccttcgcataagccacctctgcatactcgccctcattctgtatatcgctatcaccgaatacatagctgccaaacagcgatttcgagtttggtctggacttttgattcacgaggcacggcccagggattggacggtatataatggcaagcgataggcgaaagaactgtcattggcattgacgcaggatattgcggatgattcgtgatagtgcaagtgcatttagatgatgaacaagcataagatgataccttaatgaagagatgatgatcacagcattgcgttggtggcgttcggatttttccccgttagatttgtgacacggaaattaagatcagaccaaaccttctccgttgtcctgtatatcatcaactccgtcagcttattaagcatgtatatactgccttgatgaaatgaccataaaaacta

SEQ ID NO: 3749 - DNA, 1677 bp, Muscodor strobelii
  misc_feature: SGI cDNA ID NO. 560917
  misc_feature: Reduced expression when VOC is produced
  misc_feature: Encodes the peptide sequence at SEQ ID NO 3750
atggcggtggccgtgagggagtaccctggctaccagactgaggatgccgttagtcgtgatacactcgacctgcccggcccattcagcagagagtcttatgtgccacaaaagcgggcgctggacaacaagagcgacggcggccacgacactagcgacgaggagagcaccacggcatcccacgagctggcggccatcatgactgccacctcgacgccggtcacaccaggcccctccagcccgcccctcgacacccccagatcctccgacttcgtcccgcccacgcgccccagcagcacgcccttccccaacgcccagcagggcaagacagacatccgctgtctgacctgccagcccgacgggctcgaccccgacttcatctcgcccgagcacgagcacgagcatgcacatcaacacttattgccctacgccaccgacgataagccgtcgccgacgtccatcgcccagctgcctgccgagatccacgagtgcatcctagaccatctcttcggctaccgcgtgtccacgacgtctcccagctccctgagcataccgagcgtcaacgcccgcagctggaacacagcactgcgacattcacggcggaaggaactgtccaacctcgcgctcgtcacgccattatggcgagatctcatccaggagagattgttccgccacatcaaggtcaaggccaccatatctgccgttcaagatgtcatgtcgttcttcgtcgcgcgcaagcacctcagcgattatgtcaagcacatcgagatctggttccccgtcttccagcccaacttccacgcatcggccttcgaggacggctctctctcgttacccaccgtatcccccgagggcattgcgagcgctacttacggtctgcccaccgataacgcggccatggacgagatcttctatctagtcaccaagacttttgactttgtccgagtcatgacgctcgagggaggggagaggaagaaggcgccccgcgtgcgcttcaatgctcccaggcccctgcatgagaacggagatctgccccagattccttccatccgaaccctgatcgtgaaaggacaatggaacatcattcgccagcccaaggattgggagaccatctccaaggcactgccgaatctggaggaatggcatggcacgtatgctaaaccaaaatctaagagttaccttagcatggccagcactctggatgttttagatcgcaagatcaccaagctcaacttgtgtctcgagagcgactatcgtagagagatcacgtgtccaccctactatctcaaagtatgtgagcaggttcattggtgcgagaagctggccagggctgccaaccgcctcgagcatctgtcttacactggccgcgtgtgtcattgtttcttcgacatcctctccaagtgcacggatccacgaacaactcgactcaagaccatcgatgttaccgtcaagaactgctgcaggaaggatgcacagtggaacgagtccggctcgggtattaccgacatccactttatcaaagcgtttgcccagttagtactgagcggcattcgtgcactcgagcatctcaagatggtgcagctattacggattcgttacgtcgatcttgattcgccatctccacccctaaatcctttttttcatggtccgagacgggtggtgctccggggtttggaatga

SEQ ID NO: 3750 - protein, 558 aa, Muscodor strobelii
  misc_feature: SGI Peptide ID NO. 560917
  misc_feature (53)..(546): NCBI GI: 116200650 Blast Desc: CHGG_10870 [Chaetomium globosum CBS 148.51] gi|88175584|gb|EAQ83052.1| CHGG_10870 [Chaetomium globosum CBS 148.51]
  misc_feature (48)..(546): NCBI GI: 171680821 Blast Desc: protein product [Podospora anserina] gi|27764303|emb|CAD60583.1| protein product [Podospora anserina] gi|170940038|emb|CAP65264.1| protein product [Podospora anserina]
  misc_feature (43)..(547): NCBI GI: 85094089 Blast Desc: NCU06056 [Neurospora crassa OR74A] gi|28921274|gb|EAA30583.1| conserved [Neurospora crassa OR74A]
  misc_feature (62)..(546): NCBI GI: 256734832 Blast Desc: NECHADRAFT_57694 [Nectria haematococca mpVI 77-13-4]
  misc_feature (72)..(556): NCBI GI: 261358768 Blast Desc: conserved [Verticillium albo-atrum VaMs.102]
  misc_feature (83)..(546): NCBI GI: 46135737 Blast Desc: FG09384.1 [Gibberella zeae PH-1]
  misc_feature (156)..(546): NCBI GI: 145605497 Blast Desc: MGG_09244 [Magnaporthe grisea 70-15] gi|145013312|gb|EDJ97953.1| MGG_09244 [Magnaporthe grisea 70-15]
  misc_feature (66)..(547): NCBI GI: 154323314 Blast Desc: BC1G_00056 [Botryotinia fuckeliana B05.10] gi|150842285|gb|EDN17478.1| BC1G_00056 [Botryotinia fuckeliana B05.10]
  misc_feature (66)..(547): NCBI GI: 156057937 Blast Desc: SS1G_04700 [Sclerotinia sclerotiorum 1980] gi|154702485|gb|EDO02224.1| SS1G_04700 [Sclerotinia sclerotiorum 1980]
  misc_feature (149)..(546): NCBI GI: 145246064 Blast Desc: An12g01950 [Aspergillus niger] gi|134079993|emb|CAK48477.1| protein product [Aspergillus niger]
  misc_feature: Useful for introducing or modulating the production of volatile compounds
MAVAVREYPGYQTEDAVSRDTLDLPGPFSRESYVPQKRALDNKSDGGHDTSDEESTTASHELAAIMTATSTPVTPGPSSPPLDTPRSSDFVPPTRPSSTPFPNAQQGKTDIRCLTCQPDGLDPDFISPEHEHEHAHQHLLPYATDDKPSPTSIAQLPAEIHECILDHLFGYRVSTTSPSSLSIPSVNARSWNTALRHSRRKELSNLALVTPLWRDLIQERLFRHIKVKATISAVQDVMSFFVARKHLSDYVKHIEIWFPVFQPNFHASAFEDGSLSLPTVSPEGIASATYGLPTDNAAMDEIFYLVTKTFDFVRVMTLEGGERKKAPRVRFNAPRPLHENGDLPQIPSIRTLIVKGQWNIIRQPKDWETISKALPNLEEWHGTYAKPKSKSYLSMASTLDVLDRKITKLNLCLESDYRREITCPPYYLKVCEQVHWCEKLARAANRLEHLSYTGRVCHCFFDILSKCTDPRTTRLKTIDVTVKNCCRKDAQWNESGSGITDIHFIKAFAQLVLSGIRALEHLKMVQLLRIRYVDLDSPSPPLNPFFHGPRRVVLRGLE

SEQ ID NO: 3751 - DNA, 3501 bp, Muscodor strobelii
  misc_feature: SGI EST ID NO. CUFF.9668.0
  misc_feature: Variant of the nucleotide sequence at SEQ ID NO 3749
cttgatttggctatgggaaattaaacattgactggtccacgttcatctcgacctcgacaggctcacgtgcactcctgtccataactctgccgtctgttgtttctttttattcctcacaatctcaacaatctcatgccacacttgtcctgcgtgagtgttacggcgcaacgacatttatttcgaccacccccgggcttcagacttcagtgcagactgcagattgaaccctgtggtatcctccctctggacaccctgcactttaacctcatccccctcccctccccttacaactaagttgcagccagagtgtgtcatcatctcgtacgcgaccgctcggcctctcactgccccaatctcaacgcctgcgaaacctgcgaaacctgcaaattttccattttgcagattacccaaatcttcagcaagcagtactcggtacctgacaaacttccttcgtgcgacccagacatccatctttccttctctctccatcgtgacagtcctctctgcaccctagtcggcgatctgcaatatcacattcgatctagtccctgcctccccagtcctcacctacctacctcgtagtgacacctcaggtctgtatctgtacatttgtactgtcatgaccaccatctcgtcgtagtcttgacggaacccagcaagaccagacacagacaagacacagacaagacacctgccagatgcggcctgacacgatggcggtggccgtgagggagtaccctggctaccagactgaggatgccgttagtcgtgatacactcgacctgcccggcccattcagcagagagtcttatgtgccacaaaagcgggcgctggacaacaagagcgacggcggccacgacactagcgacgaggagagcaccacggcatcccacgagctggcggccatcatgactgccacctcgacgccggtcacaccaggcccctccagcccgcccctcgacacccccagatcctccgacttcgtcccgcccacgcgccccagcagcacgcccttccccaacgcccagcagggcaagacagacatccgctgtctgacctgccagcccgacgggctcgaccccgacttcatctcgcccgagcacgagcacgagcatgcacatcaacacttattgccctacgccaccgacgataagccgtcgccgacgtccatcgcccagctgcctgccgagatccacgagtgcatcctagaccatctcttcggctaccgcgtgtccacgacgtctcccagctccctgagcataccgagcgtcaacgcccgcagctggaacacagcactgcgacattcacggcggaaggaactgtccaacctcgcgctcgtcacgccattatggcgagatctcatccaggagagattgttccgccacatcaaggtcaaggccaccatatctgccgttcaagatgtcatgtcgttcttcgtcgcgcgcaagcacctcagcgattatgtcaagcacatcgagatctggttccccgtcttccagcccaacttccacgcatcggccttcgaggacggctctctctcgttacccaccgtatcccccgagggcattgcgagcgctacttacggtctgcccaccgataacgcggccatggacgagatcttctatctagtcaccaagacttttgactttgtccgagtcatgacgctcgagggaggggagaggaagaaggcgccccgcgtgcgcttcaatgctcccaggcccctgcatgagaacggagatctgccccagattccttccatccgaaccctgatcgtgaaaggacaatggaacatcattcgccagcccaaggattgggagaccatctccaaggcactgccgaatctggaggaatggcatggcacgtatgctaaaccaaaatctaagagttaccttagcatggccagcactctggatgttttagatcgcaagatcaccaagctcaacttgtgtctcgagagcgactatcgtagagagatcacgtgtccaccctactatctcaaagtatgtgagcaggttcattggtgcgagaagctggccagggctgccaaccgcctcgagcatctgtcttacactggccgcgtgtgtcattgtttcttcgacatcctctccaagtgcacggatccacgaacaactcgactcaagaccatcgatgttaccgtcaagaactgctgcaggaaggatgcacagtggaacgagtccggctcgggtattaccgacatccactttatcaaagcgtttgcccagttagtactgagcggcattcgtgcactcgagcatctcaagatggtgcagctattacggattcgttacgtcgatcttgattcgccatctccacccctaaatcctttttttcatggtccgagacgggtggtgctccggggtttggaatgaggagatcatcgaagaaattcaccgtgttcgacccgatctccgattcgaaggtgtggtcgataattgggatgaccattacgaccataccatgggcggcatgaatcgtgccttcaatccggcactgcccaaatctcgtatactctctctcaagctgactaattacgaacgtctcgctccggcaagtctctcgccaggaatgactatcctatgagctggatcagacgatcgacaatacccatcgaatcctggcaggacccctaggcgattctcaataacaataacaacccctgtttgatggtggacactccaatgccaccactttgaacacccatcgatacccttgcggctattacgaagctgcaccttcgcgcttccacatcagagcctcagtttggttctacaagagagagaagaacttttgccttttgcatttggagtttggcggcgtctcgagcgatgctgtgcaaacttcaccaggacatgaataccccactacttctacgacgatacgtttccaggcgttacaaggttgcccctctaaaaggaaaattgcggtgtttgccatagacgtcccgttgggcttttgctacgtttgcgttatcggcacgggcacgggctaggtactgcgccgggctgggacttttgctctttttgtcgtcgtgtcttgggggacatgacatgtgtaatgatgggaaactgaactgggctgatagacgatgcatatgatcaaaacgcagatgatcttcattcacaaaattagtattggacctttgcttgtgtgatatgtgctttgcattatcgtaaagagaccctagggagaaatcccgaagtcttctactatgacacctaatatgaaacagttcgctgcgtagaatgctagagatgataaccagagacctgggacgaatgtgcttagaccgagaaactcgaggttgtagccttgttgaagccagagaccttgacctaacacccagagtgcgagggcagagaccccgaggacggggttttgaaggagagaggagcgggggaggtagagtggtaggaagaccatgtaccagaggaagtactgtgatgcggattagttatagacatcaaatgaggtgagtttggg

SEQ ID NO: 3752 - DNA, 1296 bp, Muscodor strobelii
  misc_feature: SGI cDNA ID NO. 560918
  misc_feature: Encodes the peptide sequence at SEQ ID NO 3753
atggcgctcaaaatatcctccctgatatcctctcccctccccctattcacatgctccgctgctctccgaacaatcatgcttctctacggtctctggcaagacgcgcactcccctctaaaatacacagacatagactacctagtcttcacagacgcagcgcgcttcacattctcatcagcctcacgctcaccctacacgcgagagacataccgctacacgcctctactcgcgtggctactctacacgacaacatggggaggagcgttttggttctcaaccggcaaagtgatgttcgctatcgctgatttggtggctggatactatatcattaggatcttgagaactcatcacggcatgtccgtggatcgtgcttgtcgattcagtagtatttggttgctcaaccctatggtagctactatcagtactcgaggcagttccgagggtttgctaggagctctcgtcacggctttactctgggccgtgttacaacgccgtgtagtgacagctggtttcttgttgggacttggagtgcatttcaagatctacccatttatatacgcacctgcgataatatggtggatggactccgaacacatggactcacccaccacgaaaccgaaaagcgactcccaaacgacactcgttactagaataacatctttcataacaccctcgcgcataaccctaaccctcaccagcctctccacattcctgctcctaaacatagcaatgtacacaatctacgggatgcccttcataacgcacacatacctccaccacataacccgtatcgaccaccgtcacaacttcagtccctacaacgtcctgctatacctcacgtcttcacaagccacaacaccccagactatatcaatatcatcgtcagctggaagtctaaacatcgagtccgtcgcattcctaccacagctattactctcaacaatcttgatccccttcgtaggcgcgaagaaagacctagctaccactatgctcgctcagacttttgcttttgttactttcaataaagtttgtaccagccagtacttcctctggtacatggtcttcctaccactctacctcccccgctcctctctccttcaaaaccccgtcctcggggtctctgccctcgcactctgggtgttaggtcaaggtctctggcttcaacaaggctacaacctcgagtttctcggtctaagcacattcgtcccaggtctctggttatcatctctagcattctacgcagcgaactgtttcatattaggtgtcatagtagaagacttcgggatttctccctag

SEQ ID NO: 3753 - protein, 431 aa, Muscodor strobelii
  misc_feature: SGI Peptide ID NO. 560918
  misc_feature (140)..(424): Pfam Id: PF05007 Pfam Desc: Mannosyltransferase (PIG-M)
  misc_feature (3)..(426): NCBI GI: 169595988 Blast Desc: SNOG_00741 [Phaeosphaeria nodorum SN15] gi|111071116|gb|EAT92236.1| SNOG_00741 [Phaeosphaeria nodorum SN15]
  misc_feature (7)..(430): NCBI GI: 154271933 Blast Desc: [Ajellomyces capsulatus NAm1] gi|150408806|gb|EDN04262.1| [Ajellomyces capsulatus NAm1]
  misc_feature (12)..(401): NCBI GI: 261358760 Blast Desc: GPI mannosyltransferase [Verticillium albo-atrum VaMs.102]
  misc_feature (7)..(430): NCBI GI: 225556394 Blast Desc: GPI mannosyltransferase [Ajellomyces capsulatus G186AR]
  misc_feature (7)..(428): NCBI GI: 226284534 Blast Desc: GPI mannosyltransferase [Paracoccidioides brasiliensis Pb01]
  misc_feature (5)..(426): NCBI GI: 171680811 Blast Desc: protein product [Podospora anserina] gi|27764298|emb|CAD60578.1| protein product [Podospora anserina] gi|170940033|emb|CAP65259.1| protein product [Podospora anserina]
  misc_feature (5)..(428): NCBI GI: 239615340 Blast Desc: GPI mannosyltransferase 1 [Ajellomyces dermatitidis ER-3]
  misc_feature (7)..(430): NCBI GI: 225680377 Blast Desc: GPI mannosyltransferase [Paracoccidioides brasiliensis Pb03]
  misc_feature (7)..(430): NCBI GI: 226289421 Blast Desc: GPI mannosyltransferase [Paracoccidioides brasiliensis Pb18]
  misc_feature (3)..(426): NCBI GI: 189202000 Blast Desc: GPI mannosyltransferase 1 [Pyrenophora tritici-repentis Pt-1C-BFP] gi|187984435|gb|EDU49923.1| GPI mannosyltransferase 1 [Pyrenophora tritici-repentis Pt-1C-BFP]
MALKISSLISSPLPLFTCSAALRTIMLLYGLWQDAHSPLKYTDIDYLVFTDAARFTFSSASRSPYTRETYRYTPLLAWLLYTTTWGGAFWFSTGKVMFAIADLVAGYYIIRILRTHHGMSVDRACRFSSIWLLNPMVATISTRGSSEGLLGALVTALLWAVLQRRVVTAGFLLGLGVHFKIYPFIYAPAIIWWMDSEHMDSPTTKPKSDSQTTLVTRITSFITPSRITLTLTSLSTFLLLNIAMYTIYGMPFITHTYLHHITRIDHRHNFSPYNVLLYLTSSQATTPQTISISSSAGSLNIESVAFLPQLLLSTILIPFVGAKKDLATTMLAQTFAFVTFNKVCTSQYFLWYMVFLPLYLPRSSLLQNPVLGVSALALWVLGQGLWLQQGYNLEFLGLSTFVPGLWLSSLAFYAANCFILGVIVEDFGISP

SEQ ID NO: 3754 - DNA, 4954 bp, Muscodor strobelii
  misc_feature: SGI EST ID NO. CUFF.9669.1
  misc_feature: Variant of the nucleotide sequence at SEQ ID NO 3752
gagaacatgaaaacacaacctctctgaagctcttcatttcaattcgccctgggtttctcgaattgagagccgaactgagcttcatcttatacggcttgttttctatcatgcaaatgatcaaattagaagcggatccatcagtaccgagtccagagtagagtagttgtgctggttaccacccgtgtcctcacccctatacctcagaatccggacgatatagagcgtcgtcgaccgcccggccgattgcattcaacatcgctctatcgccaactacataggagtttcgggcccagcatactttgaggagaaaacaccgggtttacacagatctgatattgctcacagcaattctatcgtcaaggcttcccagcccaacctaaacagaacgcccttcaccatggcgctcaaaatatcctccctgatatcctctcccctccccctattcacatgctccgctgctctccgaacaatcatgcttctctacggtctctggcaagacgcgcactcccctctaaaatacacagacatagactacctagtcttcacagacgcagcgcgcttcacattctcatcagcctcacgctcaccctacacgcgagagacataccgctacacgcctctactcgcgtggctactctacacgacaacatggggaggagcgttttggttctcaaccggcaaagtgatgttcgctatcgctgatttggtggctggatactatatcattaggatcttgagaactcatcacggcatgtccgtggatcgtgcttgtcgattcagtagtatttggttgctcaaccctatggtagctactatcagtactcgaggcagttccgagggtttgctaggagctctcgtcacggctttactctgggccgtgttacaacgccgtgtagtgacagctggtttcttgttgggacttggagtgcatttcaagatctacccatttatatacgcacctgcgataatatggtggatggactccgaacacatggactcacccaccacgaaaccgaaaagcgactcccaaacgacactcgttactagaataacatctttcataacaccctcgcgcataaccctaaccctcaccagcctctccacattcctgctcctaaacatagcaatgtacacaatctacgggatgcccttcataacgcacacatacctccaccacataacccgtatcgaccaccgtcacaacttcagtccctacaacgtcctgctatacctcacgtcttcacaagccacaacaccccagactatatcaatatcatcgtcagctggaagtctaaacatcgagtccgtcgcattcctaccacagctattactctcaacaatcttgatccccttcgtaggcgcgaagaaagacctagctaccactatgctcgctcagacttttgcttttgttactttcaataaagtttgtaccagccagtacttcctctggtacatggtcttcctaccactctacctcccccgctcctctctccttcaaaaccccgtcctcggggtctctgccctcgcactctgggtgttaggtcaaggtctctggcttcaacaaggctacaacctcgagtttctcggtctaagcacattcgtcccaggtctctggttatcatctctagcattctacgcagcgaactgtttcatattaggtgtcatagtagaagacttcgggatttctccctagggtctctttacgataatgcaaagcacatatcacacaagcaaaggtccaatactaattttgtgaatgaagatcatctgcgttttgatcatatgcatcgtctatcagcccagttcagtttcccatcattacacatgtcatgtcccccaagacacgacgacaaaaagagcaaaagtcccagcccggcgcagtacctagcccgtgcccgtgccgataacgcaaacgtagcaaaagcccaacgggacgtctatggcaaacaccgcaattttccttttagaggggcaaccttgtaacgcctggaaacgtatcgtcgtagaagtagtggggtattcatgtcctggtgaagtttgcacagcatcgctcgagacgccgccaaactccaaatgcaaaaggcaaaagttcttctctctcttgtagaaccaaactgaggctctgatgtggaagcgcgaaggtgcagcttcgtaatagccgcaagggtatcgatgggtgttcaaagtggtggcattggagtgtccaccatcaaacaggggttgttattgttattgagaatcgcctaggggtcctgccaggattcgatgggtattgtcgatcgtctgatccagctcataggatagtcattcctggcgagagacttgccggagcgagacgttcgtaattagtcagcttgagagagagtatacgagatttgggcagtgccggattgaaggcacgattcatgccgcccatggtatggtcgtaatggtcatcccaattatcgaccacaccttcgaatcggagatcgggtcgaacacggtgaatttcttcgatgatctcctcattccaaaccccggagcaccacccgtctcggaccatgaaaaaaaggatttaggggtggagatggcgaatctagcaagagtgaattagtatgcatggcagtgacatgatacgtgggcgattgatacataccaagatcgacgtaacgaatccgtaatagctgcaccatcttgagatgctcgagtgcacgaatgccgctcagtactaactgggcaaacgctttgataaagtggatgtcggtaatacccgagccggactcgttccactgtgcatccttcctgcagcagttcttgacggtaacatcgatggtcttgagtcgagttgttcgtggatccgtgcacttggagaggatgtcgaagaaacaatgacacacgcggccagtgtaagacagatgctcgaggcggttggcagccctggccagcttctcgcaccaatgaacctgctcacatactttgagatagtagggtggacacgtgatctctctacgatagtcgctctcgagacacaagttgagcttggtgatcttgcgatctaaaacatccagagtgctggccatgctaaggtaactcttagattttggtttagcatacgtgccatgccattcctccagattcggcagtgccttggagatggtctcccaatccttgggctggcgaatgatgttccattgtcctttcacgatcagggttcggatggaaggaatctggggcagatctccgttctcatgcaggggcctgggagcattgaagcgcacgcggggcgccttcttcctctcccctccctcgagcgtcatgactcggacaaagtcaaaagtcttggtgactagatagaagatctcgtccatggccgcgttatcggtgggcagaccgtaagtagcgctcgcaatgccctcgggggatacggtgggtaacgagagagagccgtcctcgaaggccgatgcgtggaagttgggctggaagacggggaaccagatctcgatgtgcttgacataatcgctgaggtgcttgcgcgcgacgaagaacgacatgacatcttgaacggcagatatggtggccttgaccttgatgtggcggaacaatctctcctggatgagatctcgccataatggcgtgacgagcgcgaggttggacagttccttccgccgtgaatgtcgcagtgctgtgttccagctgcgggcgttgacgctcggtatgctcagggagctgggagacgtcgtggacacgcggtagccgaagagatggtctaggatgcactcgtggatctcggcaggcagctgggcgatggacgtcggcgacggcttatcgtcggtggcgtagggcaataagtgttgatgtgcatgctcgtgctcgtgctcgggcgagatgaagtcggggtcgagcccgtcgggctggcaggtcagacagcggatgtctgtcttgccctgctgggcgttggggaagggcgtgctgctggggcgcgtgggcgggacgaagtcggaggatctgggggtgtcgaggggcgggctggaggggcctggtgtgaccggcgtcgaggtggcagtcatgatggccgccagctcgtgggatgccgtggtgctctcctcgtcgctagtgtcgtggccgccgtcgctcttgttgtccagcgcccgcttttgtggcacataagactctctgctgaatgggccgggcaggtcgagtgtatcacgactaacggcatcctcagtctggtagccagggtactccctcacggccaccgccatcgtgtcaggccgcatctggcaggtgtcttgtctgtgtcttgtctgtgtctggtcttgctgggttccgtcaagactacgacgagatggtggtcatgacagtacaaatgtacagatacagacctgaggtgtcactacgaggtaggtaggtgaggactggggaggcagggactagatcgaatgtgatattgcagatcgccgactagggtgcagagaggactgtcacgatggagagagaaggaaagatggatgtctgggtcgcacgaaggaagtttgtcaggtaccgagtactgcttgctgaagatttgggtaatctgcaaaatggaaaatttgcaggtttcgcaggtttcgcaggcgttgagattggggcagtgagaggccgagcggtcgcgtacgagatgatgacacactctggctgcaacttagttgtaaggggaggggagggggatgaggttaaagtgcagggtgtccagagggaggataccacagggttcaatctgcagtctgcactgaagtctgaagcccgggggtggtcgaaataaatgtcgttgcgccgtaacactcacgcaggacaagtgtggcatgagattgttgagattgtgaggaataaaaagaaacaacagacggcagagttatggacaggagtgcacgtgagcctgtcgaggtcgagatgaacgtggaccagtcaatgtttaatttcccatagccaaatcaag

SEQ ID NO: 3755 - DNA, 852 bp, Muscodor strobelii
  misc_feature: SGI cDNA ID NO. 560919
  misc_feature: Encodes the peptide sequence at SEQ ID NO 3756
atggccgaagtcatcgttcctaagaagcgggaccgtccgaatggtggcgttaagagggactacaagggcaaggagaagaagcgtgaggtgcccacagaccaccctcgaaatgcctatacctctatgtttgagtctttccgtgatgagcttgatgagcatcatgaccgacgcatgagaattggcaacgtgtcacgcgatgttacagcgcttagcaagaagataatattttcactacaacgtgtccgcaaactcaatcagccaatcccagagaacattcaatccgagaacgatgcgcgtctcaaagagatcgccgatcatctctctaccattcaagcagatgtacaggggatgaatcgctatcgctatcaactatactgcaacgaggaatttatcgaagcaatgtcattcgcacactatctcagccacgggagactcataacgccgtctgaagcacaggccgcactgccagtcgacattccgttcactgttggagattatgtcggcgggatcttcgacctgacaggcgagatgatgcgcatcgctactgctgttactgcactgactggctcgatgcctgctagctctggagagaaaggggatgagatgactgatgcggggactgatgagagaaccatcttgacggatatgcaggacgttagctcgatgatgcagatttgtcctccgagtggtggaaagccgagtaattatcagaagaagatggatattatgattgagcaggttcgcaaggttgagcgacttgggtatggcgttaccgttcgtggaactgagcggccgaagggctggatgccaaatttggaggagagtggtggtggagatgttgatatggagtga

SEQ ID NO: 3756 - protein, 283 aa, Muscodor strobelii
  misc_feature: SGI Peptide ID NO. 560919
  misc_feature (54)..(262): Pfam Id: PF01997 Pfam Desc: Translin family
  misc_feature (54)..(181): Pfam Id: PF01997 Pfam Desc: Translin family
  misc_feature (14)..(274): NCBI GI: 46135741 Blast Desc: FG09386.1 [Gibberella zeae PH-1]
  misc_feature (14)..(276): NCBI GI: 256734833 Blast Desc: [Nectria haematococca mpVI 77-13-4]
  misc_feature (15)..(283): NCBI GI: 171680809 Blast Desc: protein product [Podospora anserina] gi|27764297|emb|CAD60577.1| protein product [Podospora anserina] gi|170940032|emb|CAP65258.1| protein product [Podospora anserina]
  misc_feature (15)..(277): NCBI GI: 240104900 Blast Desc: Translin family protein [Coccidioides posadasii C735 delta SOWgp]
  misc_feature (15)..(277): NCBI GI: 119178558 Blast Desc: CIMG_08106 [Coccidioides immitis RS]
  misc_feature (15)..(279): NCBI GI: 238506579 Blast Desc: translin-associated factor TraX, [Aspergillus flavus NRRL3357] gi|220689204|gb|EED45555.1| translin-associated factor TraX, [Aspergillus flavus NRRL3357]
  misc_feature (6)..(281): NCBI GI: 145605499 Blast Desc: MGG_09242 [Magnaporthe grisea 70-15] gi|145013314|gb|EDJ97955.1| MGG_09242 [Magnaporthe grisea 70-15]
  misc_feature (39)..(276): NCBI GI: 261358759 Blast Desc: translin associated factor X [Verticillium albo-atrum VaMs.102]
  misc_feature (41)..(278): NCBI GI: 212526202 Blast Desc: translin-associated factor TraX, [Penicillium marneffei ATCC 18224] gi|210072656|gb|EEA26743.1| translin-associated factor TraX, [Penicillium marneffei ATCC
  misc_feature (15)..(272): NCBI GI: 240276607 Blast Desc: translation associated protein [Ajellomyces capsulatus H143]
MAEVIVPKKRDRPNGGVKRDYKGKEKKREVPTDHPRNAYTSMFESFRDELDEHHDRRMRIGNVSRDVTALSKKIIFSLQRVRKLNQPIPENIQSENDARLKEIADHLSTIQADVQGMNRYRYQLYCNEEFIEAMSFAHYLSHGRLITPSEAQAALPVDIPFTVGDYVGGIFDLTGEMMRIATAVTALTGSMPASSGEKGDEMTDAGTDERTILTDMQDVSSMMQICPPSGGKPSNYQKKMDIMIEQVRKVERLGYGVTVRGTERPKGWMPNLEESGGGDVDME

SEQ ID NO: 3757 - DNA, 1243 bp, Muscodor strobelii
  misc_feature: SGI EST ID NO. CUFF.9402.0
  misc_feature: Variant of the nucleotide sequence at SEQ ID NO 3755
ttgtactccaggatctctccccatgtatcacgtcaagtctatccaacttcacaactctcccgaatacttgtaataacacaaaatacggcacttgaccagtcctcccgacttatgcgataatcatggccgaagtcatcgttcctaagaagcgggaccgtccgaatggtggcgttaagagggactacaagggcaaggagaagaagcgtgaggtgcccacagaccaccctcgaaatgcctatacctctatgtttgagtctttccgtgatgagcttgatgagcatcatgaccgacgcatgagaattggcaacgtgtcacgcgatgttacagcgcttagcaagaagataatattttcactacaacgtgtccgcaaactcaatcagccaatcccagagaacattcaatccgagaacgatgcgcgtctcaaagagatcgccgatcatctctctaccattcaagcagatgtacaggggatgaatcgctatcgctatcaactatactgcaacgaggaatttatcgaagcaatgtcattcgcacactatctcagccacgggagactcataacgccgtctgaagcacaggccgcactgccagtcgacattccgttcactgttggagattatgtcggcgggatcttcgacctgacaggcgagatgatgcgcatcgctactgctgttactgcactgactggctcgatgcctgctagctctggagagaaaggggatgagatgactgatgcggggactgatgagagaaccatcttgacggatatgcaggacgttagctcgatgatgcagatttgtcctccgagtggtggaaagccgagtaattatcagaagaagatggatattatgattgagcaggttcgcaaggttgagcgacttgggtatggcgttaccgttcgtggaactgagcggccgaagggctggatgccaaatttggaggagagtggtggtggagatgttgatatggagtgagatgtgagaacttgtatcgtgttgaaggagtgtgaagcgcgtggtatgagacaacgtgctgctgttggttttcatgttgtatctgattgcacattgcagatgctgaacaaacatagggtcatgttatgttcacgggaaaagagcatggtgtcggactgagttgaaccggtcattgctacggtgtctctagaaaagaataatgttgctatatgtgtcaacgtcttcagatagattgatgatgcttatgacaacataatagaaggatcgct

SEQ ID NO: 3758 - DNA, 390 bp, Muscodor strobelii
  misc_feature: SGI cDNA ID NO. 560920
  misc_feature: Encodes the peptide sequence at SEQ ID NO 3759
atgcctcaattgaacatcaagaatatatccggatctcttacacttgaagttgaagacaacatggcgtccgcagataacactgttgtttttcagcagaacgtcctgaacggacagcagatcagtagactttacacccattggcagttgattcccaacggtgagaaatacccggtaaaagaaggcgactccatcgctgtcagtttgcaagcaacggctcttcagtgctggactcaagatcagaactccaaaattttcaagcccgataaaaatgcaatctatgccatcaacgcaaaggtgacctttaaatccgaaaacttcgctatcaagtcaacatcggatagcgtaaacgcgatggaggtgacttggacgcacatcgggggctccaattaa

SEQ ID NO: 3759 - protein, 129 aa, Muscodor strobelii
  misc_feature: SGI Peptide ID NO. 560920
MPQLNIKNISGSLTLEVEDNMASADNTVVFQQNVLNGQQISRLYTHWQLIPNGEKYPVKEGDSIAVSLQATALQCWTQDQNSKIFKPDKNAIYAINAKVTFKSENFAIKSTSDSVNAMEVTWTHIGGSN

SEQ ID NO: 3760 - DNA, 858 bp, Muscodor strobelii
  misc_feature: SGI cDNA ID NO. 560921
  misc_feature: Elevated expression when VOC is produced
  misc_feature: Encodes the peptide sequence at SEQ ID NO 3761
atggcatcgactgaaggccacgtccaccctcacaccgacaaggaggtcggtgtccacgactctaccactggttctgagttcaataatggccaccccactactaagcgatatgactatggaggaaacccacttgctcatgctcactctggccccgatgagcgtctcgctgccttcggtggtgagttccagcctggtttgtacaggtctgttgagaacaggaagttcgccaacccagcgcccttgggtctctcggcttttgccctcaccaccttcgtcctttccctgatcaacctcaatacccgaggtgtcacggccaacaccattgtggtgtctgttgccttcggttacggcggtcttgtgcagcttctggctggcatgtgggagatggccgtcggaaacacgttcggtgctactgctctgtcttcgtacggtggattctggatctctttcgccatcatcttgacacccggctttgccgcaactgccggatacgagggaaatgaggcagatgtgtcatcagttcttggtttcttcttggctggatggttcattttcaccaccattctcttcatctgcacgttgcgatcgaccgtcatgttctgtgcacttttcggcaccctggacttggccttcctcttcctcttctctgctgaattcgccaaggccaatggttcgggcgccgccctcggcctccaaaagactggtggcgttttcggtcttctagctgctttcctggcatggtacaacgcgttcgctggtattgctgattctagcaactccttcttcctcattcctgtcttccacttcccctggtctgagaagggtcgtgccgccaagactgagcgtgagactgtttaa

SEQ ID NO: 3761 - protein, 285 aa, Muscodor strobelii
  misc_feature: SGI Peptide ID NO. 560921
  misc_feature (58)..(275): Pfam Id: PF01184 Pfam Desc: GPR1/FUN34/yaaH family
  misc_feature (21)..(282): NCBI GI: 116200624 Blast Desc: CHGG_10857 [Chaetomium globosum CBS 148.51] gi|88175571|gb|EAQ83039.1| CHGG_10857 [Chaetomium globosum CBS 148.51]
  misc_feature (42)..(283): NCBI GI: 164425633 Blast Desc: NCU06043 [Neurospora crassa OR74A] gi|157071003|gb|EAA30570.2| NCU06043 [Neurospora crassa OR74A]
  misc_feature (28)..(285): NCBI GI: 225556299 Blast Desc: GPR/FUN34 family protein [Ajellomyces capsulatus G186AR] gi|240276558|gb|EER40069.1| GPR/FUN34 family protein [Ajellomyces capsulatus H143]
  misc_feature (10)..(283): NCBI GI: 189202114 Blast Desc: glyoxylate pathway regulator [Pyrenophora tritici-repentis Pt-1C-BFP] gi|187984492|gb|EDU49980.1| glyoxylate pathway regulator [Pyrenophora tritici-repentis
  misc_feature (39)..(285): NCBI GI: 154272053 Blast Desc: [Ajellomyces capsulatus NAm1] gi|150408866|gb|EDN04322.1| [Ajellomyces capsulatus NAm1]
  misc_feature (12)..(285): NCBI GI: 154293573 Blast Desc: BC1G_13914 [Botryotinia fuckeliana B05.10] gi|150845295|gb|EDN20488.1| BC1G_13914 [Botryotinia fuckeliana B05.10]
  misc_feature (5)..(285): NCBI GI: 156057227 Blast Desc: SS1G_04344 [Sclerotinia sclerotiorum 1980] gi|154702130|gb|EDO01869.1| SS1G_04344 [Sclerotinia sclerotiorum 1980]
  misc_feature (12)..(282): NCBI GI: 171680837 Blast Desc: protein product [Podospora anserina] gi|27764313|emb|CAD60593.1| protein product [Podospora anserina] gi|170940046|emb|CAP65273.1| protein product [Podospora anserina]
  misc_feature (36)..(285): NCBI GI: 261187546 Blast Desc: GPR/FUN34 family protein [Ajellomyces dermatitidis SLH14081] gi|239594156|gb|EEQ76737.1| GPR/FUN34 family protein [Ajellomyces dermatitidis SLH14081]
  misc_feature (36)..(285): NCBI GI: 239615282 Blast Desc: GPR/FUN34 family protein [Ajellomyces dermatitidis ER-3]
  misc_feature: Useful for introducing or modulating the production of volatile compounds
MASTEGHVHPHTDKEVGVHDSTTGSEFNNGHPTTKRYDYGGNPLAHAHSGPDERLAAFGGEFQPGLYRSVENRKFANPAPLGLSAFALTTFVLSLINLNTRGVTANTIVVSVAFGYGGLVQLLAGMWEMAVGNTFGATALSSYGGFWISFAIILTPGFAATAGYEGNEADVSSVLGFFLAGWFIFTTILFICTLRSTVMFCALFGTLDLAFLFLFSAEFAKANGSGAALGLQKTGGVFGLLAAFLAWYNAFAGIADSSNSFFLIPVFHFPWSEKGRAAKTERETV

SEQ ID NO: 3762 - DNA, 1623 bp, Muscodor strobelii
  misc_feature: SGI EST ID NO. CUFF.9426.0
  misc_feature: Variant of the nucleotide sequence at SEQ ID NO 3760
gcgatgagtgatcgattgaggcaaatccgagaatactgtatgcacgttatgtgttcccaacggaccttgtgcgcaagggttgtgttgcccattgctccagtccacggccttcgtcctcgctttgcatcctgatgattggacctgtactcgtatacacacgaatactgtagacattaataacccccttccaccctcgacccttagctttccattgttccttccctttcctgtgtgttgtggaacagttgccgtgcttaccttctttaaagtaccacttttggtaactctttttttatattcattgcacccacccgaccactatacgaccgtgtcgttgagctgcacctcaccactacaaaccacaccttcacggccaaagagtgacaagatcacggccaaacacaatggcatcgactgaaggccacgtccaccctcacaccgacaaggaggtcggtgtccacgactctaccactggttctgagttcaataatggccaccccactactaagcgatatgactatggaggaaacccacttgctcatgctcactctggccccgatgagcgtctcgctgccttcggtggtgagttccagcctggtttgtacaggtctgttgagaacaggaagttcgccaacccagcgcccttgggtctctcggcttttgccctcaccaccttcgtcctttccctgatcaacctcaatacccgaggtgtcacggccaacaccattgtggtgtctgttgccttcggttacggcggtcttgtgcagcttctggctggcatgtgggagatggccgtcggaaacacgttcggtgctactgctctgtcttcgtacggtggattctggatctctttcgccatcatcttgacacccggctttgccgcaactgccggatacgagggaaatgaggcagatgtgtcatcagttcttggtttcttcttggctggatggttcattttcaccaccattctcttcatctgcacgttgcgatcgaccgtcatgttctgtgcacttttcggcaccctggacttggccttcctcttcctcttctctgctgaattcgccaaggccaatggttcgggcgccgccctcggcctccaaaagactggtggcgttttcggtcttctagctgctttcctggcatggtacaacgcgttcgctggtattgctgattctagcaactccttcttcctcattcctgtcttccacttcccctggtctgagaagggtcgtgccgccaagactgagcgtgagactgtttaaatagaagtctgagcataacccactgtctccatttattgggcgactggccctcctgcgatgatacccctttccacactgctcttcgatgcttcgacaacacaatgcattgcgagaagagctaaggacgaagtgctttggaaagacaaaatgaagaatgtggtgaaggacctataggtttctttcgatgtagatggcgcaaaatgaaatgactgtacccttcaactatcagggtgtcagtttaatacatactattaatatcatttttccttcgtagagtcttgttctattgtgcgacgaccgtcgacacataatttacccgtgacagaatagtccacgaataaattgtctcgttaccttcacc

SEQ ID NO: 3763 - DNA, 2466 bp, Muscodor strobelii
  misc_feature: SGI cDNA ID NO. 560922
  misc_feature: Elevated expression when VOC is produced
  misc_feature: Encodes the peptide sequence at SEQ ID NO 3764
atgtcggatactgagtcaaacgcaagttttgaggatatccatccctccaacattgccagtcactacaatacggtcaaaactgttgctaagtttcccggtgagagcgatagtgataaggttgaggactacgcagaagacactccggacgtgctttatgtgctccaatataaggaatttggaaacaacatcgaagttcgtcgcagccatgaacccattgatgtggatctcgggcgcgcgccgaagggaaaatcaacacccaagggaaaggcacctgtgatcgagatagtgactgtggtgtcgacatccttggtcactaagcagccaagaatgcatcatccttatcatccgcgccctccgcccatgtatccggtctttggaggtcaagatgaccaatcccatgggggagagctgaaaatcacgaaggtcgagaacacagttatgaagattcattcctctcacctaaagaacgctttgagagcagtagttggctactatccgggtacttcgtttgtgggtgacgaggtacagattgaggctccttactatcctctgtttcatcataaggatgctctcgctcgctacaagttcaatcaacccccaagccatgatgctgagtatgcctcgaccactgccaagcatatcgacactcttctcgagtttctcgacaagacatatggccaccagatcgaggaagaggagaaccgtcacaatcgcgccatcccaacggcaacctttgactatctgtggctcctcttgcgaccgggcgaggtcatctataccaaccatgatcaaacatggactcccttcgtgatttcgcgtgtcttcaagaaaacttctgccagtcctgatggccagtatggatataatatcgactgttggagtttcaagtattcagaccggcttctgatgcgttgtatgcactcattcgatatcgcacctttctcaggcgaggaagcgatcaacaacctttgcgctatccctgctcgcttcttcaccggaggcgatggagacaagacgccacaagaggtgaccgccgaacatattcgccaaggcaaagccgtttgggagttctgcaagaagcccagctactacgcctatgatggcgagatggctaagaagactcctttccttggatgggattactctgtctgcccgactggctatatgagcggacgtgtcatcatcgacccggaaggctatgagcgttactcggaatcttgccctctaggtcggaatcgtaacaactttggacacccacccccaaatcgacctgcagttccacatgatcaactgccacacttcgagccccgttgcggttgtgcggtgtgccaacaggaggatcaaacaatcctgagctcctggacagcattcacgaacttggatccgcatactgatcctgcgcccaagaatgacctctactaccatgttatgcagaaggtggttgctggctttgtgctcggtgatcgtcgttggggccatttccatatcgacaacctcagggacatcaagtttgataaggaagcgttcaagtaccttgtccttgaagatgatatcaagatgactctcagagcacttatcgggaaattctccagcaaagacggccatgtttctgcctggccgaatgactttgtcaagaataagggccaaggtcgcatcttcctgctccatggctcaccaggagtcggcaagacatgtacagcggaatgcgttgcagagcttacgcatcgtcctctcctatctctgacaagtggagatctcagtactcattcttcacaagtcgagcggaacctcgagtacttccttcaactcggcgagcgcttcggagccatggtgttgcttgatgaagcggacgtctatctcgagacgcgccgtgctaaagacattgcgcgaaatggtctcgtgtctgtgttcctccgtgcgcttgaatactaccgcggagtgttgttcttgacgacgaaccgagtgcagacttttgatgcggctttcacgtcacgtatccatgttgctcttcattatggtccattgaccgacaccgaccgcgagcgtatctggactaattcctttcagcgtcttgagaaagacgcgggcggtcgtgtccaagtcactgtcaccgcacgtgagtacgcttggggaagcgcagatgtgcgatctctccgatggaatggtcgagagatccgcaatgcccttcagactgctgtcgcgctcgctgagagcgaggctcttgatgatggaagcgagactgtcatcgttgctgacacgcatctccgtgctgttgtccgcatgagcaggggcttcaagaatttcctgcgtcgaaagatcagggatgatgaaagtgaagggggtgatataatcgttgatgatgttgttgatgacgacgatgatgatgacggagttgaggatgaagaggccgcgtattcggattccagtcagccttataacagtcctcgtcgatatcctgttgcttaa

SEQ ID NO: 3764 - protein, 821 aa, Muscodor strobelii
  misc_feature: SGI Peptide ID NO. 560922
  misc_feature (552)..(738): Pfam Id: PF00004 Pfam Desc: ATPase family associated with various cellular activities (AAA)
  misc_feature (47)..(786): NCBI GI: 46107594 Blast Desc: FG00680.1 [Gibberella zeae PH-1]
  misc_feature (45)..(779): NCBI GI: 85116024 Blast Desc: NCU03121 [Neurospora crassa OR74A] gi|28926779|gb|EAA35744.1| NCU03121 [Neurospora crassa OR74A]
  misc_feature (32)..(798): NCBI GI: 156033037 Blast Desc: SS1G_13594 [Sclerotinia sclerotiorum 1980] gi|154698997|gb|EDN98735.1| SS1G_13594 [Sclerotinia sclerotiorum 1980]
  misc_feature (144)..(779): NCBI GI: 169617698 Blast Desc: SNOG_12031 [Phaeosphaeria nodorum SN15] gi|160703459|gb|EAT80443.2| SNOG_12031 [Phaeosphaeria nodorum SN15]
  misc_feature (139)..(779): NCBI GI: 145604080 Blast Desc: MGG_14098 [Magnaporthe grisea 70-15] gi|145012164|gb|EDJ96820.1| MGG_14098 [Magnaporthe grisea 70-15]
  misc_feature (50)..(769): NCBI GI: 145244845 Blast Desc: An11g07150 [Aspergillus niger] gi|134079383|emb|CAK40765.1| protein product [Aspergillus niger]
  misc_feature (139)..(769): NCBI GI: 189192951 Blast Desc: conserved [Pyrenophora tritici-repentis Pt-1C-BFP] gi|187978378|gb|EDU45004.1| conserved [Pyrenophora tritici-repentis Pt-1C-BFP]
  misc_feature (248)..(798): NCBI GI: 154301437 Blast Desc: BC1G_10388 [Botryotinia fuckeliana B05.10] gi|150856128|gb|EDN31320.1| BC1G_10388 [Botryotinia fuckeliana B05.10]
  misc_feature (141)..(769): NCBI GI: 46111087 Blast Desc: FG02425.1 [Gibberella zeae PH-1]
  misc_feature (136)..(767): NCBI GI: 256733807 Blast Desc: NECHADRAFT_77327 [Nectria haematococca mpVI 77-13-4]
  misc_feature: Useful for introducing or modulating the production of volatile compounds
MSDTESNASFEDIHPSNIASHYNTVKTVAKFPGESDSDKVEDYAEDTPDVLYVLQYKEFGNNIEVRRSHEPIDVDLGRAPKGKSTPKGKAPVIEIVTVVSTSLVTKQPRMHHPYHPRPPPMYPVFGGQDDQSHGGELKITKVENTVMKIHSSHLKNALRAVVGYYPGTSFVGDEVQIEAPYYPLFHHKDALARYKFNQPPSHDAEYASTTAKHIDTLLEFLDKTYGHQIEEEENRHNRAIPTATFDYLWLLLRPGEVIYTNHDQTWTPFVISRVFKKTSASPDGQYGYNIDCWSFKYSDRLLMRCMHSFDIAPFSGEEAINNLCAIPARFFTGGDGDKTPQEVTAEHIRQGKAVWEFCKKPSYYAYDGEMAKKTPFLGWDYSVCPTGYMSGRVIIDPEGYERYSESCPLGRNRNNFGHPPPNRPAVPHDQLPHFEPRCGCAVCQQEDQTILSSWTAFTNLDPHTDPAPKNDLYYHVMQKVVAGFVLGDRRWGHFHIDNLRDIKFDKEAFKYLVLEDDIKMTLRALIGKFSSKDGHVSAWPNDFVKNKGQGRIFLLHGSPGVGKTCTAECVAELTHRPLLSLTSGDLSTHSSQVERNLEYFLQLGERFGAMVLLDEADVYLETRRAKDIARNGLVSVFLRALEYYRGVLFLTTNRVQTFDAAFTSRIHVALHYGPLTDTDRERIWTNSFQRLEKDAGGRVQVTVTAREYAWGSADVRSLRWNGREIRNALQTAVALAESEALDDGSETVIVADTHLRAVVRMSRGFKNFLRRKIRDDESEGGDIIVDDVVDDDDDDDGVEDEEAAYSDSSQPYNSPRRYPVA

SEQ ID NO: 3765 - DNA, 2799 bp, Muscodor strobelii
  misc_feature: SGI EST ID NO. CUFF.9443.0
  misc_feature: Variant of the nucleotide sequence at SEQ ID NO 3763
caagagcctcgattgtaagtttaagttgaactcgataatcgttcgttattaaatgcgttgtctccccgcgttggaaattggaaattcccaaagatctatcaccagtgtcaaggatcttatcaatttgtagactatactgccaagatgtcggatactgagtcaaacgcaagttttgaggatatccatccctccaacattgccagtcactacaatacggtcaaaactgttgctaagtttcccggtgagagcgatagtgataaggttgaggactacgcagaagacactccggacgtgctttatgtgctccaatataaggaatttggaaacaacatcgaagttcgtcgcagccatgaacccattgatgtggatctcgggcgcgcgccgaagggaaaatcaacacccaagggaaaggcacctgtgatcgagatagtgactgtggtgtcgacatccttggtcactaagcagccaagaatgcatcatccttatcatccgcgccctccgcccatgtatccggtctttggaggtcaagatgaccaatcccatgggggagagctgaaaatcacgaaggtcgagaacacagttatgaagattcattcctctcacctaaagaacgctttgagagcagtagttggctactatccgggtacttcgtttgtgggtgacgaggtacagattgaggctccttactatcctctgtttcatcataaggatgctctcgctcgctacaagttcaatcaacccccaagccatgatgctgagtatgcctcgaccactgccaagcatatcgacactcttctcgagtttctcgacaagacatatggccaccagatcgaggaagaggagaaccgtcacaatcgcgccatcccaacggcaacctttgactatctgtggctcctcttgcgaccgggcgaggtcatctataccaaccatgatcaaacatggactcccttcgtgatttcgcgtgtcttcaagaaaacttctgccagtcctgatggccagtatggatataatatcgactgttggagtttcaagtattcagaccggcttctgatgcgttgtatgcactcattcgatatcgcacctttctcaggcgaggaagcgatcaacaacctttgcgctatccctgctcgcttcttcaccggaggcgatggagacaagacgccacaagaggtgaccgccgaacatattcgccaaggcaaagccgtttgggagttctgcaagaagcccagctactacgcctatgatggcgagatggctaagaagactcctttccttggatgggattactctgtctgcccgactggctatatgagcggacgtgtcatcatcgacccggaaggctatgagcgttactcggaatcttgccctctaggtcggaatcgtaacaactttggacacccacccccaaatcgacctgcagttccacatgatcaactgccacacttcgagccccgttgcggttgtgcggtgtgccaacaggaggatcaaacaatcctgagctcctggacagcattcacgaacttggatccgcatactgatcctgcgcccaagaatgacctctactaccatgttatgcagaaggtggttgctggctttgtgctcggtgatcgtcgttggggccatttccatatcgacaacctcagggacatcaagtttgataaggaagcgttcaagtaccttgtccttgaagatgatatcaagatgactctcagagcacttatcgggaaattctccagcaaagacggccatgtttctgcctggccgaatgactttgtcaagaataagggccaaggtcgcatcttcctgctccatggctcaccaggagtcggcaagacatgtacagcggaatgcgttgcagagcttacgcatcgtcctctcctatctctgacaagtggagatctcagtactcattcttcacaagtcgagcggaacctcgagtacttccttcaactcggcgagcgcttcggagccatggtgttgcttgatgaagcggacgtctatctcgagacgcgccgtgctaaagacattgcgcgaaatggtctcgtgtctgtgttcctccgtgcgcttgaatactaccgcggagtgttgttcttgacgacgaaccgagtgcagacttttgatgcggctttcacgtcacgtatccatgttgctcttcattatggtccattgaccgacaccgaccgcgagcgtatctggactaattcctttcagcgtcttgagaaagacgcgggcggtcgtgtccaagtcactgtcaccgcacgtgagtacgcttggggaagcgcagatgtgcgatctctccgatggaatggtcgagagatccgcaatgcccttcagactgctgtcgcgctcgctgagagcgaggctcttgatgatggaagcgagactgtcatcgttgctgacacgcatctccgtgctgttgtccgcatgagcaggggcttcaagaatttcctgcgtcgaaagatcagggatgatgaaagtgaagggggtgatataatcgttgatgatgttgttgatgacgacgatgatgatgacggagttgaggatgaagaggccgcgtattcggattccagtcagccttataacagtcctcgtcgatatcctgttgcttaaggataaaagagatgacatgatgttatgatgagacgcagattgttggtgttagttattcgtcggaattatactgttcaattacgaagtcatgaccccttttacaaaaaaacaaatctctgtctatcaaacttcctgcatagtacattaataccactcaaatcgactgctatgttcacagtcattcgcaag

SEQ ID NO: 3766 - DNA, 2379 bp, Muscodor strobelii
  misc_feature: SGI cDNA ID NO. 560923
  misc_feature: Encodes the peptide sequence at SEQ ID NO 3767
atgtccagcgaacggactccgttaataactaccgtagtcgttgcgccccctcggcagcggtatccccatcagacgttaaggcggttctgcacaattgcattagcatcctcgttaatagctctactgataacgttcctcactacaaccgtcttcggacctgagcctcatcatgagcctcacaaatggcccggacatgggaagaagcatgtaacatacgagcaactccaggctatcttattagaaacacccgatgcggagaaggcttcagaatggagcaagtattacacagctgggccgcacttagccggtcagaatctttcgcaagccgaatggacgagcgaccgatggaacgaatggggaatcaagtctgaggttgtcgcctacgagacttatatcaactatccccttggacaccgattagccttgctggagaagactagtaagaaatctacagaaggtgctgaaggctggaaggtagctttcgaagctacgttagaggaggatgtcatcgaagaagatcctacgactcagctagacaatagggtgcccacgttccacggttattctgctagtggaaatgttacgggatcctacgtctacgtaaactacggaacatggtgggacttcgaggatctcagacgcgccaatgttagcctggaaggcaagattgccctagcacgttacggaggaaacttccgtggtctcaaagttaagagagcacaggaattgggtatgataggtatcgtcatctacaccgatccaggtgacgatgacggaatgacggaagagaacggccatgctgcctatcctaacggccctgctcgtaacccaagcagcgtgcagcgaggaagcgttcagtttcttagcactcgaccaggcgatccgaccacacctggatatccttcgaagccaggtgtgcctcgtgtccctgccgaggagagcactcctagtatcccgtctttgcctatctcatgggctgaagcgttgcctattttgaaagcgctcaatggccatggtcttcgcgcaaaagatatgaatgagttttggacaaaatctactggtcttgggtacaaaggcgttcattataacatcggcccaacgcccgacgacgttgtcttgaaccttgtcaatgaacagaactatacaatcacaccaatgtgggatgtgattggaataatcaatggcactattccggacgaagtcattgtagtagggaaccatcgcgatgcgtggattgcaggcggtgctggtgatcctaacagtggttccgctgttttgaacgaagtcattcgcagcttcggcaaagctctggaccaaggttggaaacctcttcgtaccatcgtcttcggcagttgggacggtgaagagtatggccttgtgggatcaaccgaatgggttgaagagtatctcccgtgggtttcagccacgaatgtagcttacatcaatctcgatgtcggcgttcgcagtaagaccttcacggcatctgcagcaccattgttgcataatctactctacgaatccacagcgttggtccaatcaccgaatcagaccgtcaaaggacagactgttcgcgatgtttgggatggtcgtatccggacaatgggtagtggaagcgatttcacggctttccaagattatgccggtgtcccgtctctcgatatgggcttcggcggcgcgcctgatggaggtccagtctatcaatatcacagcaattacgacagttactactggatgagcgaatttggagatccaggtttcgtttaccacaaaaccatggcgcagttactgggcgtgacggttgcgaagatagttgatacacccgtcgtagcactcaacgccacgtcttatgcagttgcattgaagagctacgtggagaaggtcgaggagaagcttgaaaactcacaactgggacttcccagcgttgttgaccctcttgaataccgtgcgcaagacactaccgcagaggcaaagggagacattggggcctttaaagtgtctctcagcattctttacgatgccgtgcacgagtttaagaaggccgctgctgaactcgatactaaagcggcgaagctggccgagcaagcaaacgagcatattccttggtggcgctggatcaagaagatcagactacttcatcaaattcgatccgtaaacacgaagtacaagaacattgaacgtgccttcttgtatccgggtgggcttgatggtcgcgattggtttaagcacgttgtgtttgctccgggtatctggaccggctatgcaggagctgtgttccccggcttagtcgaaagcattgacgacaaagactttgacaatgcgatcaagtgggttagtataattgaaacttgtatcaaaactgccacgaagactgtagaataa

SEQ ID NO: 3767 - protein, 792 aa, Muscodor strobelii
  misc_feature: SGI Peptide ID NO. 560923
  misc_feature (189)..(272): Pfam Id: PF02225 Pfam Desc: PA domain
  misc_feature (400)..(583): Pfam Id: PF04389 Pfam Desc: Peptidase family M28
  misc_feature (647)..(791): Pfam Id: PF04253 Pfam Desc: Transferrin receptor-like dimerisation domain
  misc_feature (189)..(261): Pfam Id: PF02225 Pfam Desc: PA domain
  misc_feature (713)..(774): Pfam Id: PF04253 Pfam Desc: Transferrin receptor-like dimerisation domain
  misc_feature (1)..(787): NCBI GI: 116180460 Blast Desc: CHGG_00858 [Chaetomium globosum CBS 148.51] gi|88185155|gb|EAQ92623.1| CHGG_00858 [Chaetomium globosum CBS 148.51]
  misc_feature (2)..(789): NCBI GI: 156039928 Blast Desc: SS1G_12100 [Sclerotinia sclerotiorum 1980] gi|154696157|gb|EDN95895.1| SS1G_12100 [Sclerotinia sclerotiorum 1980]
  misc_feature (2)..(789): NCBI GI: 154300559 Blast Desc: BC1G_11103 [Botryotinia fuckeliana B05.10] gi|150856628|gb|EDN31820.1| BC1G_11103 [Botryotinia fuckeliana B05.10]
  misc_feature (1)..(791): NCBI GI: 256734701 Blast Desc: [Nectria haematococca mpVI 77-13-4]
  misc_feature (1)..(791): NCBI GI: 46108086 Blast Desc: FG00925.1 [Gibberella zeae PH-1]
  misc_feature (25)..(792): NCBI GI: 171687665 Blast Desc: protein product [Podospora anserina] gi|170943794|emb|CAP69446.1| protein product [Podospora anserina]
  misc_feature (1)..(787): NCBI GI: 145615916 Blast Desc: MGG_13478 [Magnaporthe grisea 70-15] gi|145009702|gb|EDJ94358.1| MGG_13478 [Magnaporthe grisea 70-15]
  misc_feature (1)..(792): NCBI GI: 145255083 Blast Desc: An18g03980 [Aspergillus niger] gi|134084443|emb|CAK97435.1| protein product [Aspergillus niger]
  misc_feature (92)..(791): NCBI GI: 164427298 Blast Desc: NCU03108 [Neurospora crassa OR74A] gi|157071686|gb|EAA35731.2| NCU03108 [Neurospora crassa OR74A]
  misc_feature (3)..(792): NCBI GI: 115391019 Blast Desc: conserved [Aspergillus terreus NIH2624] gi|114193938|gb|EAU35638.1| conserved [Aspergillus terreus NIH2624]
  misc_feature (72)..(791): SWISSPROT Homolog: EC 3.4.17.21 Glutamate carboxypeptidase II
MSSERTPLITTVVVAPPRQRYPHQTLRRFCTIALASSLIALLITFLTTTVFGPEPHHEPHKWPGHGKKHVTYEQLQAILLETPDAEKASEWSKYYTAGPHLAGQNLSQAEWTSDRWNEWGIKSEVVAYETYINYPLGHRLALLEKTSKKSTEGAEGWKVAFEATLEEDVIEEDPTTQLDNRVPTFHGYSASGNVTGSYVYVNYGTWWDFEDLRRANVSLEGKIALARYGGNFRGLKVKRAQELGMIGIVIYTDPGDDDGMTEENGHAAYPNGPARNPSSVQRGSVQFLSTRPGDPTTPGYPSKPGVPRVPAEESTPSIPSLPISWAEALPILKALNGHGLRAKDMNEFWTKSTGLGYKGVHYNIGPTPDDVVLNLVNEQNYTITPMWDVIGIINGTIPDEVIVVGNHRDAWIAGGAGDPNSGSAVLNEVIRSFGKALDQGWKPLRTIVFGSWDGEEYGLVGSTEWVEEYLPWVSATNVAYINLDVGVRSKTFTASAAPLLHNLLYESTALVQSPNQTVKGQTVRDVWDGRIRTMGSGSDFTAFQDYAGVPSLDMGFGGAPDGGPVYQYHSNYDSYYWMSEFGDPGFVYHKTMAQLLGVTVAKIVDTPVVALNATSYAVALKSYVEKVEEKLENSQLGLPSVVDPLEYRAQDTTAEAKGDIGAFKVSLSILYDAVHEFKKAAAELDTKAAKLAEQANEHIPWWRWIKKIRLLHQIRSVNTKYKNIERAFLYPGGLDGRDWFKHVVFAPGIWTGYAGAVFPGLVESIDDKDFDNAIKWVSIIETCIKTATKTVE

SEQ ID NO: 3768 - DNA, 2748 bp, Muscodor strobelii
  misc_feature: SGI EST ID NO. CUFF.9452.0
  misc_feature: Variant of the nucleotide sequence at SEQ ID NO 3766
caaagcctcaatcagcttctcataccaatgaagcaaccaaggtaactcaatgtcaccgccgaccagtatccgtgtcacgcgagcttgagtaggacatgaccgacgtcaagatgtccagcgaacggactccgttaataactaccgtagtcgttgcgccccctcggcagcggtatccccatcagacgttaaggcggttctgcacaattgcattagcatcctcgttaatagctctactgataacgttcctcactacaaccgtcttcggacctgagcctcatcatgagcctcacaaatggcccggacatgggaagaagcatgtaacatacgagcaactccaggctatcttattagaaacacccgatgcggagaaggcttcagaatggagcaagtattacacagctgggccgcacttagccggtcagaatctttcgcaagccgaatggacgagcgaccgatggaacgaatggggaatcaagtctgaggttgtcgcctacgagacttatatcaactatccccttggacaccgattagccttgctggagaagactagtaagaaatctacagaaggtgctgaaggctggaaggtagctttcgaagctacgttagaggaggatgtcatcgaagaagatcctacgactcagctagacaatagggtgcccacgttccacggttattctgctagtggaaatgttacgggatcctacgtctacgtaaactacggaacatggtgggacttcgaggatctcagacgcgccaatgttagcctggaaggcaagattgccctagcacgttacggaggaaacttccgtggtctcaaagttaagagagcacaggaattgggtatgataggtatcgtcatctacaccgatccaggtgacgatgacggaatgacggaagagaacggccatgctgcctatcctaacggccctgctcgtaacccaagcagcgtgcagcgaggaagcgttcagtttcttagcactcgaccaggcgatccgaccacacctggatatccttcgaagccaggtgtgcctcgtgtccctgccgaggagagcactcctagtatcccgtctttgcctatctcatgggctgaagcgttgcctattttgaaagcgctcaatggccatggtcttcgcgcaaaagatatgaatgagttttggacaaaatctactggtcttgggtacaaaggcgttcattataacatcggcccaacgcccgacgacgttgtcttgaaccttgtcaatgaacagaactatacaatcacaccaatgtgggatgtgattggaataatcaatggcactattccggacgaagtcattgtagtagggaaccatcgcgatgcgtggattgcaggcggtgctggtgatcctaacagtggttccgctgttttgaacgaagtcattcgcagcttcggcaaagctctggaccaaggttggaaacctcttcgtaccatcgtcttcggcagttgggacggtgaagagtatggccttgtgggatcaaccgaatgggttgaagagtatctcccgtgggtttcagccacgaatgtagcttacatcaatctcgatgtcggcgttcgcagtaagaccttcacggcatctgcagcaccattgttgcataatctactctacgaatccacagcgttggtccaatcaccgaatcagaccgtcaaaggacagactgttcgcgatgtttgggatggtcgtatccggacaatgggtagtggaagcgatttcacggctttccaagattatgccggtgtcccgtctctcgatatgggcttcggcggcgcgcctgatggaggtccagtctatcaatatcacagcaattacgacagttactactggatgagcgaatttggagatccaggtttcgtttaccacaaaaccatggcgcagttactgggcgtgacggttgcgaagatagttgatacacccgtcgtagcactcaacgccacgtcttatgcagttgcattgaagagctacgtggagaaggtcgaggagaagcttgaaaactcacaactgggacttcccagcgttgttgaccctcttgaataccgtgcgcaagacactaccgcagaggcaaagggagacattggggcctttaaagtgtctctcagcattctttacgatgccgtgcacgagtttaagaaggccgctgctgaactcgatactaaagcggcgaagctggccgagcaagcaaacgagcatattccttggtggcgctggatcaagaagatcagactacttcatcaaattcgatccgtaaacacgaagtacaagaacattgaacgtgccttcttgtatccgggtgggcttgatggtcgcgattggtttaagcacgttgtgtttgctccgggtatctggaccggctatgcaggagctgtgttccccggcttagtcgaaagcattgacgacaaagactttgacaatgcgatcaagtgggttagtataattgaaacttgtatcaaaactgccacgaagactgtagaataaacagcaccataaacggttatcgtttgagtgtatgggaggatacaaacatgtcttgaaatcgatccagttgaacattcaagttaagatcgcaactgctttagccgcatgccccatgtcacctcaggtacctcaccaacctagtaatgcgttcacccgcgggcaaacaggacttacctattgattgatcatacaagcgtagatagttcacgaagtaactcaaatattacaattgatacacaaggtgatgtgcactttttac

SEQ ID NO: 3769 - DNA, 1695 bp, Muscodor strobelii
  misc_feature: SGI cDNA ID NO. 560924
  misc_feature: Reduced expression when VOC is produced
  misc_feature: Encodes the peptide sequence at SEQ ID NO 3770
atggcgacaactcatcagaagccaaagctaccggctcagcaactggccattctggccgttgcacggttcgccgagccacttgccatgacatccgtctacccatacttgcccgagatgatagcaagcttcggtatagagcaaaaagacatcgcaaaatgggctggcgctacaagtgccgtcttttcagtttcccaaagtcttacagctgtggcatggggtcgagcatcagataaattcggtagaaaaccagtcatcatgtgcggtctattctgcaccatgacactgtttctcgtatggggtgtatcgtctacactcacgatggctataatcgttcgtgcatttcaaggagcttgtaatggaaatgtcggaataatccgaacaatggtagcagaaatggtaccagagcgagaactgcagcccaaagcattctccatcatgccactagtctggtcaataggttcagtcttcggcccagcattcggtggtctcttcgcgaaacccgcagagcaatttccaggactcttcggcaacagtcatttcttcagatcatatccattcgccctgccaaacttactaggcggcatcgtgttcctcatctctctcacgaccgcagcgttgttcttgaaggagacactacagagcaagagacactccagagactggggtttgattttaggacaacggattacggaagctttccaggatcatcctctgaggagacaacataaactccgccggtactcaatccaagacgccgaggcctcggctcctcttctccaacctaatacaaaatcccaatcctcaacaaccacgaaggtcgaaaagccctccgcgtcaacaacggttttcacgcgccaaacatgcataaacctaatatcctacacattcctcgccctacactccgtagcattcgaccaagtcctaccggttttcctcaactaccccatccgctctccttcctcctcaacctcacccccattcttcttcagcggcgggttcggtctagaatctgggcgcatcggcacaatcttcacgctctacggaataatctgcggcgccatccaattcgtcctcttcccacccctctgcgcaacattcggcgttctaaactgttttcgaatcactgctctcgtgttcccagctgtatacttgatactgccctttaccgtgctgatcgaggagatccatgttagatatgctgcgctttttgtgctgcttgtgtgtaaagcgtttgctgttatcgtcgggttcccatgttcgactattttactcaccaattccgcgtcgagcttatctatccttggtacattgaacggctgggcaacgacgtttagtgcgctgggaagggcgagcggaccggcattggcgggcgtggcgtttagttggggcgtgaagaacaatatgattggagcaccctggtggattctcgccagcatcgcgatggttggtgcgatcccgacgtacatgattgtcgagggtaatggaccgagtggacctacggagagtcagagcgggagtggaagtgacagcgagacacaggtcgaagatgatggagacgctctcgcttttgaagaggatagtgatgatgaggttttgctgagacacgaagatgtggacagcctcacaggagaggatgcagatcggctgttgcgtggtggtggtaataagaagggcaaggggtatggaacgttatag

SEQ ID NO: 3770 - protein, 564 aa, Muscodor strobelii
  misc_feature: SGI Peptide ID NO. 560924
  misc_feature (18)..(453): Pfam Id: PF07690 Pfam Desc: Major Facilitator Superfamily
  misc_feature (5)..(497): NCBI GI: 116180462 Blast Desc: CHGG_00859 [Chaetomium globosum CBS 148.51] gi|88185156|gb|EAQ92624.1| CHGG_00859 [Chaetomium globosum CBS 148.51]
  misc_feature (1)..(497): NCBI GI: 85115967 Blast Desc: NCU03107 [Neurospora crassa OR74A] gi|28926765|gb|EAA35730.1| conserved [Neurospora crassa OR74A]
  misc_feature (5)..(537): NCBI GI: 261355249 Blast Desc: conserved [Verticillium albo-atrum VaMs.102]
  misc_feature (3)..(513): NCBI GI: 171687667 Blast Desc: protein product [Podospora anserina] gi|170943795|emb|CAP69447.1| protein product [Podospora anserina]
  misc_feature (9)..(552): NCBI GI: 156039930 Blast Desc: SS1G_12101 [Sclerotinia sclerotiorum 1980] gi|154696158|gb|EDN95896.1| SS1G_12101 [Sclerotinia sclerotiorum 1980]
  misc_feature (7)..(527): NCBI GI: 39943242 Blast Desc: MGG_03701 [Magnaporthe grisea 70-15] gi|145009704|gb|EDJ94360.1| MGG_03701 [Magnaporthe grisea 70-15]
  misc_feature (3)..(509): NCBI GI: 256735404 Blast Desc: NECHADRAFT_13627 [Nectria haematococca mpVI 77-13-4]
  misc_feature (9)..(552): NCBI GI: 154300561 Blast Desc: BC1G_11104 [Botryotinia fuckeliana B05.10] gi|150856629|gb|EDN31821.1| BC1G_11104 [Botryotinia fuckeliana B05.10]
  misc_feature (6)..(509): NCBI GI: 121703033 Blast Desc: MFS transporter, [Aspergillus clavatus NRRL 1] gi|119397924|gb|EAW08355.1| MFS transporter, [Aspergillus clavatus NRRL 1]
  misc_feature (1)..(550): NCBI GI: 226279145 Blast Desc: conserved [Paracoccidioides brasiliensis Pb01]
  misc_feature: Useful for introducing or modulating the production of volatile compounds
MATTHQKPKLPAQQLAILAVARFAEPLAMTSVYPYLPEMIASFGIEQKDIAKWAGATSAVFSVSQSLTAVAWGRASDKFGRKPVIMCGLFCTMTLFLVWGVSSTLTMAIIVRAFQGACNGNVGIIRTMVAEMVPERELQPKAFSIMPLVWSIGSVFGPAFGGLFAKPAEQFPGLFGNSHFFRSYPFALPNLLGGIVFLISLTTAALFLKETLQSKRHSRDWGLILGQRITEAFQDHPLRRQHKLRRYSIQDAEASAPLLQPNTKSQSSTTTKVEKPSASTTVFTRQTCINLISYTFLALHSVAFDQVLPVFLNYPIRSPSSSTSPPFFFSGGFGLESGRIGTIFTLYGIICGAIQFVLFPPLCATFGVLNCFRITALVFPAVYLILPFTVLIEEIHVRYAALFVLLVCKAFAVIVGFPCSTILLTNSASSLSILGTLNGWATTFSALGRASGPALAGVAFSWGVKNNMIGAPWWILASIAMVGAIPTYMIVEGNGPSGPTESQSGSGSDSETQVEDDGDALAFEEDSDDEVLLRHEDVDSLTGEDADRLLRGGGNKKGKGYGTL

SEQ ID NO: 3771 - DNA, 2451 bp, Muscodor strobelii
  misc_feature: SGI EST ID NO. CUFF.10089.0
  misc_feature: Variant of the nucleotide sequence at SEQ ID NO 3769
cacagtcctgcgctttcggatatgaaattcctcgctcgtcaaccttcaggttttcgacagaaccacgaaaactctcgagtcttgtagccactttcaacatggcgacaactcatcagaagccaaagctaccggctcagcaactggccattctgggtaagcatacctagcatttcctattcacttcagttcaccttttccccccttttgccatgatccacaccaaaatacttttatgagacatactactctagaaaacaatccaatatcatattacatgaatccaattcttgtcaatgtcgttttcaggctgttagagtattcggggtcgttataagagaattgggtcgtggcatgggttatttgtacaaatgagaaagaaaaacaaaggattcgaacgttcctggtcccctgcatcgctgttcgttccgtgacttgttgttgaaaagttggtgtcgaagtcgtctcatcaaaacttcaagcagatccttagacgaaacgtcagcatggcggaaaattacagccaagaagaaaatatagtgacataaaccaggtcctccctccctactattcaatcccgctaacatcttctgtagccgttgcacggttcgccgagccacttgccatgacatccgtctacccatacttgcccgagatgatagcaagcttcggtatagagcaaaaagacatcgcaaaatgggctggcgctacaagtgccgtcttttcagtttcccaaagtcttacagctgtggcatggggtcgagcatcagataaattcggtagaaaaccagtcatcatgtgcggtctattctgcaccatgacactgtttctcgtatggggtgtatcgtctacactcacgatggctataatcgttcgtgcatttcaaggagcttgtaatggaaatgtcggaataatccgaacaatggtagcagaaatggtaccagagcgagaactgcagcccaaagcattctccatcatgccactagtctggtcaataggttcagtcttcggcccagcattcggtggtctcttcgcgaaacccgcagagcaatttccaggactcttcggcaacagtcatttcttcagatcatatccattcgccctgccaaacttactaggcggcatcgtgttcctcatctctctcacgaccgcagcgttgttcttgaaggagacactacagagcaagagacactccagagactggggtttgattttaggacaacggattacggaagctttccaggatcatcctctgaggagacaacataaactccgccggtactcaatccaagacgccgaggcctcggctcctcttctccaacctaatacaaaatcccaatcctcaacaaccacgaaggtcgaaaagccctccgcgtcaacaacggttttcacgcgccaaacatgcataaacctaatatcctacacattcctcgccctacactccgtagcattcgaccaagtcctaccggttttcctcaactaccccatccgctctccttcctcctcaacctcacccccattcttcttcagcggcgggttcggtctagaatctgggcgcatcggcacaatcttcacgctctacggaataatctgcggcgccatccaattcgtcctcttcccacccctctgcgcaacattcggcgttctaaactgttttcgaatcactgctctcgtgttcccagctgtatacttgatactgccctttaccgtgctgatcgaggagatccatgttagatatgctgcgctttttgtgctgcttgtgtgtaaagcgtttgctgttatcgtcgggttcccatgttcgactattttactcaccaattccgcgtcgagcttatctatccttggtacattgaacggctgggcaacgacgtttagtgcgctgggaagggcgagcggaccggcattggcgggcgtggcgtttagttggggcgtgaagaacaatatgattggagcaccctggtggattctcgccagcatcgcgatggttggtgcgatcccgacgtacatgattgtcgagggtaatggaccgagtggacctacggagagtcagagcgggagtggaagtgacagcgagacacaggtcgaagatgatggagacgctctcgcttttgaagaggatagtgatgatgaggttttgctgagacacgaagatgtggacagcctcacaggagaggatgcagatcggctgttgcgtggtggtggtaataagaagggcaaggggtatggaacgttatagaggttggtaatacacggcataaatgtttggatctcgagatgaaggtgagggaacagattgcatgactggtttttattggcgtatatatcattgtgtatggcgttgggattagaaaagggcctttgcttttatatcagaccttagcacaacgccacattggcttaattgaacgaactacgcaaattttcacaaagaaaaagagtgtgagcacagttgag

SEQ ID NO: 3772 - DNA, 1272 bp, Muscodor strobelii
  misc_feature: SGI cDNA ID NO. 560925
  misc_feature: Encodes the peptide sequence at SEQ ID NO 3773
atgagactcataaacactcgaacattacgtctccaggaattttcaggaagaccgcccccttatgcgatattatcgcacacatgggggccgaacgagatcaccataaacgacttccgggcgcaccagcgcttgcgtcctcggaggacgagacccgcgttccagaagattgaggcgacgtgcagaactgccagagaccatggtctcgactacgcctgggtcgactcatgctgcattgactcctctagtagcgcagaacttagtgaggctatcaactcaatgttcaattggtatcaaaggtcggcagtttgttacgcctttctggaagatttcaaaaaaccggaccgtgatatatcgaatcctggcgtatccagtgtttggcttagtttcgaacattgccgttggtttacgcgaggctggacactgcaggaactcctcgcgccgaaaacagtgtatttcttcgaccaggactggcagaaggttgccgacaaagctacgcgcgttacggagctgcaagctataaccggtatcgataggtctgtactcgcaggcggtcccttatatgatgctagcgttggacaacggatggcttgggctgcaggccgaaggacgacgcgtatagaagatgttgcgtatagcttgctcggtatctttgatgtcaacatgccacttctctacggcgaaggttccaaggcgtttattcgcctacaagaacaaatattgacgcgatcggacgaccataccctcttcgcgtggcgagcgctgtcgccttcgggtagcaataggccaaccggtctgttggcttcatccccgaatgacttccgaaatttctctgataagtatagcaatcaaaacgccgataacttggtgcgtatatgggactctaaagcaccgcgcgaaccgatcaccataaacaaccgagggatccaaatgacagcccgcgtccaggatttgcgcgctgcttgggcgcccgacgagctcctcatcctcgttctgaattgcgcgtacagcggcgatacgctgcaatctgcaggtatatatatccagggtcaggcggaggatagatacgtgcgaattcgtactcatgaacttgccaacgttgaatcacggggccggcatctcgccatccgatcactccatgggctgcgaaccatcacagaagccgataatttacagcatgatgaaccctggattacctcttacaaactacgaagtctagttatggaagaacgtagccctttccagacgacacaagcgcccgtcccgctctactaa

SEQ ID NO: 3773 - protein, 423 aa, Muscodor strobelii
  misc_feature: SGI Peptide ID NO. 560925
  misc_feature (21)..(143): Pfam Id: PF06985 Pfam Desc: Heterokaryon incompatibility protein (HET)
  misc_feature (1)..(369): NCBI GI: 115397489 Blast Desc: conserved [Aspergillus terreus NIH2624] gi|114192527|gb|EAU34227.1| conserved [Aspergillus terreus NIH2624]
  misc_feature (1)..(330): NCBI GI: 156035539 Blast Desc: SS1G_12973 [Sclerotinia sclerotiorum 1980] gi|154698378|gb|EDN98116.1| SS1G_12973 [Sclerotinia sclerotiorum 1980]
  misc_feature (1)..(333): NCBI GI: 164425178 Blast Desc: NCU06304 [Neurospora crassa OR74A] gi|157070820|gb|EAA33330.2| conserved [Neurospora crassa OR74A]
  misc_feature (1)..(369): NCBI GI: 238493477 Blast Desc: conserved [Aspergillus flavus NRRL3357] gi|220696469|gb|EED52811.1| conserved [Aspergillus flavus NRRL3357]
  misc_feature (1)..(333): NCBI GI: 145608538 Blast Desc: MGG_06555 [Magnaporthe grisea 70-15] gi|145016004|gb|EDK00494.1| MGG_06555 [Magnaporthe grisea 70-15]
  misc_feature (1)..(273): NCBI GI: 256722053 Blast Desc: NECHADRAFT_16940 [Nectria haematococca mpVI 77-13-4]
  misc_feature (1)..(251): NCBI GI: 256729385 Blast Desc: NECHADRAFT_28110 [Nectria haematococca mpVI 77-13-4]
  misc_feature (1)..(369): NCBI GI: 154318644 Blast Desc: BC1G_02711 [Botryotinia fuckeliana B05.10] gi|150857841|gb|EDN33033.1| BC1G_02711 [Botryotinia fuckeliana B05.10]
  misc_feature (1)..(386): NCBI GI: 119481395 Blast Desc: HET domain protein [Neosartorya fischeri NRRL 181] gi|119408880|gb|EAW18829.1| HET domain protein [Neosartorya fischeri NRRL 181]
  misc_feature (1)..(279): NCBI GI: 169595686 Blast Desc: SNOG_00587 [Phaeosphaeria nodorum SN15] gi|111070962|gb|EAT92082.1| SNOG_00587 [Phaeosphaeria nodorum SN15]
MRLINTRTLRLQEFSGRPPPYAILSHTWGPNEITINDFRAHQRLRPRRTRPAFQKIEATCRTARDHGLDYAWVDSCCIDSSSSAELSEAINSMFNWYQRSAVCYAFLEDFKKPDRDISNPGVSSVWLSFEHCRWFTRGWTLQELLAPKTVYFFDQDWQKVADKATRVTELQAITGIDRSVLAGGPLYDASVGQRMAWAAGRRTTRIEDVAYSLLGIFDVNMPLLYGEGSKAFIRLQEQILTRSDDHTLFAWRALSPSGSNRPTGLLASSPNDFRNFSDKYSNQNADNLVRIWDSKAPREPITINNRGIQMTARVQDLRAAWAPDELLILVLNCAYSGDTLQSAGIYIQGQAEDRYVRIRTHELANVESRGRHLAIRSLHGLRTITEADNLQHDEPWITSYKLRSLVMEERSPFQTTQAPVPLY

SEQ ID NO: 3774 - DNA, 1294 bp, Muscodor strobelii
  misc_feature: SGI EST ID NO. CUFF.9460.0
  misc_feature: Variant of the nucleotide sequence at SEQ ID NO 3772
cgcctttctggaagatttcaaaaaaccggaccgtgatatatcgaatcctggcgtatccagtgtttggcttagtttcgaacattgccgttggtttacgcgaggctggacactgcaggaactcctcgcgccgaaaacagtgtatttcttcgaccaggactggcagaaggttgccgacaaagctacgcgcgttacggagctgcaagctataaccggtatcgataggtctgtactcgcaggcggtcccttatatgatgctagcgttggacaacggatggcttgggctgcaggccgaaggacgacgcgtatagaagatgttgcgtatagcttgctcggtatctttgatgtcaacatgccacttctctacggcgaaggttccaaggcgtttattcgcctacaagaacaaatattgacgcgatcggacgaccataccctcttcgcgtggcgagcgctgtcgccttcgggtagcaataggccaaccggtctgttggcttcatccccgaatgacttccgaaatttctctgataagtatagcaatcaaaacgccgataacttggtgcgtatatgggactctaaagcaccgcgcgaaccgatcaccataaacaaccgagggatccaaatgacagcccgcgtccaggatttgcgcgctgcttgggcgcccgacgagctcctcatcctcgttctgaattgcgcgtacagcggcgatacgctgcaatctgcaggtatatatatccagggtcaggcggaggatagatacgtgcgaattcgtactcatgaacttgccaacgttgaatcacggggccggcatctcgccatccgatcactccatgggctgcgaaccatcacagaagccgataatttacagcatgatgaaccctggattacctcttacaaactacgaagtctagttatggaagaacgtagccctttccagacgacacaagcgcccgtcccgctctactaacatgcatttcatcttagctcaagatcagttaatgctcgaacgctattcgggcactgtttcgtgcacggggtcttgatggtagaaacaggcacgaagaaagtgagatccttccgattcgatccatccagcgagacaaaaccagatttgatattgcagacagcatcaggcttcagcggcgctattgtgatgaagtctgcgcagtcaactgacaatctacttatcgtattgcatgcctcaacccggccaaaagaagcaggtggcatctctagagaatacatgtttgatgtcttctgcctgtctcgcgcacagatacagaaacacctacagcaagac

SEQ ID NO: 3775 - DNA, 1632 bp, Muscodor strobelii
  misc_feature: SGI cDNA ID NO. 560926
  misc_feature: Encodes the peptide sequence at SEQ ID NO 3776
atgccgtctaccaatggccaccacgccgtcaacgggcagtctgcctttgccgaccacagcaaggcgctcgaggtgctgaaggagtacgagtccagagatggcctcgctatccacgacctcatcgacaccaagactcggggcggcctgacctacaacgacttccttgtcctgccgggctacattggcttccccgcctccgaggtctcgttagactcgcccgtcaccaagaagatcaccctcaagacgcccttcgtctcctcccccatggacaccgtcaccgagcacgagatggccatccacatggccctgcagggcggcttgggcgtcatccaccacaactgctcgcccgacgcgcaggccgagatggtccgcaaggtcaagcgctacgagaacggcttcatcaacgaccccatcgtcatcagcccccagaccaccatccgagagaccaaggatctgaaggagaaatggggtttcgggggctaccccgtgactgagtctggcaagcttggctccaaacttctcggcatcgtcaccaaccgcgacctccagttcgaagacgacgttgagcagaccgtcgacaaggtcatggtcaccgaccttgtcactgcccagtctggcgtcaccctccgcgaagccaaccagatcctcgccaagtcgaggaagggcaagctgcccatcgtcgacaaggacggcaacctcgtctctatgatctcccgctccgatctcaccaagaacctccacttccctctcgcttccaagctgcccgactccaagcagcttctctgcgccgccgcgatcggcactcgccccgaggacgagggtcgtcttcagaagctggttgacgctggactcgacatcgtcatcctcgacagcagccagggaaacagcatgtaccaggtcaacatgatcaagtgggtcaagcagaagttccccgacctcgaggtcatcggcggaaacgtcgtgactcgcgagcaggctgccactctaattgctgccggagtagacggtctgcgtatcggcatgggcagcggaagcgcttgtatcacccaggaagtcatggctgtcggtcgtcctcaggctgctgccgtgtatgctgtgtctgccttcgctgctcgctttggtgttccttgcatcgctgacggaggtatccaaaacgtcggccacattgtcaaaggtcttgcccttggcgcttccactatcatgatgggcggtctgctcgctggcaccactgagtctcccggcacgtcgttcgtgtcgcgtgaaggcaagcttgtcaaggcttaccgtggcatgggcagtatcgacgccatgcaagacaagaaggctggcgctggcagcaagaacagccaggccagcaacgctggtaccgctcgttacttcagtgaaggcgacagcgttcttgtcgcccagggtgtggccggctctgtcgcccaccgtggttccgtcaacaagtttgtcccctacctcgctgctggcctcaagcactcgatgcaagactgtggtcagaagagcttgaaggagctgcacgagagtgctgctgatggcacccttcggtttgaaatccgaactgccagtgcccagctcgagggcaacgtcaacatggagagctacgagaagaagctctacgcgtaa

SEQ ID NO: 3776 - protein, 543 aa, Muscodor strobelii
  misc_feature: SGI Peptide ID NO. 560926
  misc_feature (131)..(247): Pfam Id: PF00571 Pfam Desc: CBS domain pair
  misc_feature (47)..(533): Pfam Id: PF00478 Pfam Desc: IMP dehydrogenase / GMP reductase domain
  misc_feature (18)..(542): NCBI GI: 254579120 Blast Desc: ZYRO0B13904p [Zygosaccharomyces rouxii] gi|238938436|emb|CAR26613.1| ZYRO0B13904p [Zygosaccharomyces rouxii]
  misc_feature (18)..(542): NCBI GI: 6323585 Blast Desc: Imd4p [Saccharomyces cerevisiae] gi|1708478|sp|P50094.1|IMDH4_YEAST RecName: Full= inosine-5'-monophosphate dehydrogenase IMD4; Short=IMP Short=IMPD
  misc_feature (18)..(542): NCBI GI: 259148522 Blast Desc: Imd4p [Saccharomyces cerevisiae EC1118]
  misc_feature (18)..(542): NCBI GI: 50292505 Blast Desc: protein product [Candida glabrata] gi|49527997|emb|CAG61648.1| protein product [Candida glabrata]
  misc_feature (18)..(542): NCBI GI: 151946109 Blast Desc: IMP dehydrogenase [Saccharomyces cerevisiae YJM789]
  misc_feature (18)..(542): NCBI GI: 190408188 Blast Desc: inosine-5'-monophosphate dehydrogenase IMD2 [Saccharomyces cerevisiae RM11-1a]
  misc_feature (18)..(542): NCBI GI: 190347778 Blast Desc: PGUG_04215 [Pichia guilliermondii ATCC 6260]
  misc_feature (20)..(542): NCBI GI: 2497357 Blast Desc: IMDH3_CANAL RecName: Full= inosine-5'-monophosphate dehydrogenase; Short=IMP dehydrogenase; Short=IMPDH; Short=IMPD gi|1930016|gb|AAB51509.1| inosine-5'-monophosphate dehydrogenase
  misc_feature (20)..(542): NCBI GI: 238882400 Blast Desc: inosine-5'-monophosphate dehydrogenase IMD2 [Candida albicans WO-1]
  misc_feature (18)..(542): NCBI GI: 146415032 Blast Desc: PGUG_04215 [Pichia guilliermondii ATCC 6260]
  misc_feature (18)..(542): SWISSPROT Homolog: EC 1.1.1.205 IMP dehydrogenase
MPSTNGHHAVNGQSAFADHSKALEVLKEYESRDGLAIHDLIDTKTRGGLTYNDFLVLPGYIGFPASEVSLDSPVTKKITLKTPFVSSPMDTVTEHEMAIHMALQGGLGVIHHNCSPDAQAEMVRKVKRYENGFINDPIVISPQTTIRETKDLKEKWGFGGYPVTESGKLGSKLLGIVTNRDLQFEDDVEQTVDKVMVTDLVTAQSGVTLREANQILAKSRKGKLPIVDKDGNLVSMISRSDLTKNLHFPLASKLPDSKQLLCAAAIGTRPEDEGRLQKLVDAGLDIVILDSSQGNSMYQVNMIKWVKQKFPDLEVIGGNVVTREQAATLIAAGVDGLRIGMGSGSACITQEVMAVGRPQAAAVYAVSAFAARFGVPCIADGGIQNVGHIVKGLALGASTIMMGGLLAGTTESPGTSFVSREGKLVKAYRGMGSIDAMQDKKAGAGSKNSQASNAGTARYFSEGDSVLVAQGVAGSVAHRGSVNKFVPYLAAGLKHSMQDCGQKSLKELHESAADGTLRFEIRTASAQLEGNVNMESYEKKLYA

SEQ ID NO: 3777 - DNA, 2076 bp, Muscodor strobelii
  misc_feature: SGI EST ID NO. CUFF.9497.0
  misc_feature: Variant of the nucleotide sequence at SEQ ID NO 3775
cggtagcttcgctcttctttcctctctttttctcttgggaagaagatcgcctctgacaccgccgacctggtctgttgtacatagcatacacgcctcgtcgtcttcgctgtccatcttcgactccgctgcttaattgcttctatttcccgtttctgtctagccaagatgccgtctaccaatggccaccacgccgtcaacgggcagtctgcctttgccgaccacagcaaggcgctcgaggtgctgaaggagtacgagtccagagatggcctcgctatccacgacctcatcgacaccaagactcggggcggcctgacctacaacgacttccttgtcctgccgggctacattggcttccccgcctccgaggtctcgttagactcgcccgtcaccaagaagatcaccctcaagacgcccttcgtctcctcccccatggacaccgtcaccgagcacgagatggccatccacatggccctgcagggcggcttgggcgtcatccaccacaactgctcgcccgacgcgcaggccgagatggtccgcaaggtcaagcgctacgagaacggcttcatcaacgaccccatcgtcatcagcccccagaccaccatccgagagaccaaggatctgaaggagaaatggggtttcgggggctaccccgtgactgagtctggcaagcttggctccaaacttctcggcatcgtcaccaaccgcgacctccagttcgaagacgacgttgagcagaccgtcgacaaggtcatggtcaccgaccttgtcactgcccagtctggcgtcaccctccgcgaagccaaccagatcctcgccaagtcgaggaagggcaagctgcccatcgtcgacaaggacggcaacctcgtctctatgatctcccgctccgatctcaccaagaacctccacttccctctcgcttccaagctgcccgactccaagcagcttctctgcgccgccgcgatcggcactcgccccgaggacgagggtcgtcttcagaagctggttgacgctggactcgacatcgtcatcctcgacagcagccagggaaacagcatgtaccaggtcaacatgatcaagtgggtcaagcagaagttccccgacctcgaggtcatcggcggaaacgtcgtgactcgcgagcaggctgccactctaattgctgccggagtagacggtctgcgtatcggcatgggcagcggaagcgcttgtatcacccaggaagtcatggctgtcggtcgtcctcaggctgctgccgtgtatgctgtgtctgccttcgctgctcgctttggtgttccttgcatcgctgacggaggtatccaaaacgtcggccacattgtcaaaggtcttgcccttggcgcttccactatcatgatgggcggtctgctcgctggcaccactgagtctcccggcacgtcgttcgtgtcgcgtgaaggcaagcttgtcaaggcttaccgtggcatgggcagtatcgacgccatgcaagacaagaaggctggcgctggcagcaagaacagccaggccagcaacgctggtaccgctcgttacttcagtgaaggcgacagcgttcttgtcgcccagggtgtggccggctctgtcgcccaccgtggttccgtcaacaagtttgtcccctacctcgctgctggcctcaagcactcgatgcaagactgtggtcagaagagcttgaaggagctgcacgagagtgctgctgatggcacccttcggtttgaaatccgaactgccagtgcccagctcgagggcaacgtcaacatggagagctacgagaagaagctctacgcgtaagaaatttcgccatggtgactatacacgggccggttacgacggtttggggcatgtgatacctgatgaatgtgacctgatggctgacgatggacatggatattaacatctataatggcgttttgggatggtgactgggatttgagcgtatgaggataggaaaagtgatagcatttacaagtctaattcaatacagaaacaacgtataagttggcatctcactgttcacaccgcaatatttccgtgctggcttcaacttcggtacagttttgtcgtgtttcc

SEQ ID NO: 3778 - DNA, 744 bp, Muscodor strobelii
  misc_feature: SGI cDNA ID NO. 560927
  misc_feature: Encodes the peptide sequence at SEQ ID NO 3779
atggcaccgcgtcgacgttatagcaaggaagagggtatgaagctcaagccagtcacacgtgcgttgggcatagacggtaacaaacggtacagcaaagccagaggttacccagttgaggatggacgattccgctgtaagctccccaaggacgatggcgagatctgcgacctcactatcgtggatacttacaacagtctgtgcaatcatgtcttcaagagcaagacccacaagggcgtcctaagggccagtggcgatggagacgatgacggagatggagacgatgacggagatggagctttgttgggcaacccggcgcagacacagcagtatcccttagcgcagcagcagccgcagcaacagcattcggcccagctcccaattcacaatcccatggcccaggtacctgccgtcagccatggcatcgtcggctcacagcctcttgcctatggccagcagcagcttgcggccggagtctcggctcaggatcccgtggctcgagtccctcccgttggaccgaacatacaagtcgacaacaacagcgggcttagcagtggcggagtcggcggcaatggaggctccaacgagagtttcgatgagcgctttatcaacttcggtcttgagaacttcgaccttggaaacttcgactttgccaacatcgactgggacagcctcaactttgtcaacgacggcgagtcgagcaacaacaacggactcaacggtggcggtggatccaacgacaactag

SEQ ID NO: 3779 - protein, 247 aa, Muscodor strobelii
  misc_feature: SGI Peptide ID NO. 560927
MAPRRRYSKEEGMKLKPVTRALGIDGNKRYSKARGYPVEDGRFRCKLPKDDGEICDLTIVDTYNSLCNHVFKSKTHKGVLRASGDGDDDGDGDDDGDGALLGNPAQTQQYPLAQQQPQQQHSAQLPIHNPMAQVPAVSHGIVGSQPLAYGQQQLAAGVSAQDPVARVPPVGPNIQVDNNSGLSSGGVGGNGGSNESFDERFINFGLENFDLGNFDFANIDWDSLNFVNDGESSNNNGLNGGGGSNDN

SEQ ID NO: 3780 - DNA, 795 bp, Muscodor strobelii
  misc_feature: SGI cDNA ID NO. 560928
  misc_feature: Encodes the peptide sequence at SEQ ID NO 3781
atggagtgcagtctgaccagccttggaatgctcaataagcttcctcccgagatccgccagatggtgtatgaccattgtcacgaaggcaaagaatacgagatccatacctggagctattttccagatggaagatggaccatgcctcagagatactcattcggtctccctgcggtcgcgtatgcctgccgtgctacttaccatgagtcccgagggagctatatgcagctcgcatttctctgggacgccggtccccgtcgcagactcggaaaccccaagacatggaaagtcggcttcgtccacaagaagctagattctttcgtcatggttttcagtgacagccacgtgtggtggaatcacggagccaacagagacgatgtctaccactgcatgcccaaagagaactcgctgtacggctctttgcagcatccatcagtagagatctacaaggcaactttccttcgcgctgagcgcagccaggagacggagactattcaacttcccatgctgcgcaaggctcctgagatcaacattgtctacacgagacgtggcttccacgttcattttgacatcatggcaaagtccaagacctatcaacagagtgatgttaagaaggaagaacgaagggaggctcgagacatagcgcgcgaaaccaagttccaacgactgctagaggccgaagagaagaggaagcatgtggaggagtacgagcaggagcaagagcgaatggatgacgacaatggagttcctcccactccagttctgaccatacgcaagattcgtaaaaacaagggatga

SEQ ID NO: 3781 - protein, 264 aa, Muscodor strobelii
  misc_feature: SGI Peptide ID NO. 560928
MECSLTSLGMLNKLPPEIRQMVYDHCHEGKEYEIHTWSYFPDGRWTMPQRYSFGLPAVAYACRATYHESRGSYMQLAFLWDAGPRRRLGNPKTWKVGFVHKKLDSFVMVFSDSHVWWNHGANRDDVYHCMPKENSLYGSLQHPSVEIYKATFLRAERSQETETIQLPMLRKAPEINIVYTRRGFHVHFDIMAKSKTYQQSDVKKEERREARDIARETKFQRLLEAEEKRKHVEEYEQEQERMDDDNGVPPTPVLTIRKIRKNKG

SEQ ID NO: 3782 - DNA, 5016 bp, Muscodor strobelii
  misc_feature: SGI cDNA ID NO. 560929
  misc_feature: Encodes the peptide sequence at SEQ ID NO 3783
atgtcgcaccgaccacaccctctccgccagtccttcacggttgactatcctatcaaccgccaaccgtcaacaacatcgtcatcggcctcatccggctactcctacaactcggatcagtacgtcgccagcaacgccagcaccgcaacctcggtcgtctctaatggacccggcacaaatatgattggccacaaacgaggcaagagcgaggctgccgtgcgccatcacccccaacgatcacttacttcctatgacgagcccgtcaagagcccagagagtatgtacagcatggcgagacaatcgctacggccgcttccacagcctccggcatccggtcagccttcgcctccagcgcattcgccccgaacccctcccaagcaggatcgtcatgcgcgaggccagagtgtcgacatcggcaaactttctctacgcgacaacagaacgtctccatcgccaacaccgacgccactttctccgctctcacgctcaacaaactctcggcccaactccatgctcctcacgaggtcagactccgtacgccaagatcccactagaccagtctcgaacacccatcatggcgttgttcattctcccttcgtcacccccaaccttcaacaactaggccgctcatccaccagtcagttgcgaaccctctcaacattagctcaggatggttctggcgaagagttttccattacttctccaacgcaggaagtagtaggcctacggggtcgacgcagactgcagcgcgcaagcacggcagatgccggtaagataggatcgcgaaccgacagatacggcttcgggggccggaactggatggaccagcaacggaaattcctccaagcttacgagtatctctgtcacatcggtgaagccaaagagtggatcgaggacattatcaaccgccagattccccccattgtggaactggaagaggccctcagagatggtgtcaccctcgctgagatcgtggaggcgctgaaccctcatcgccgagagcgtatcttccggaatccgcgcctgcaggccaggcattgggaaaacgtgcacaccttttttcgatatctcgacgaagtagagatgcccgaccttttccgattcgagctgatagacctgtacgaaaagaagaacatccccaaagttatatactgcatacatgccctcagctggcttctcttcagaaaaggcatcgtggacttcaggatcggcaatctggtcggccagttggaattcgagcaccacgaacttgaagcaacccaaaagggcctcgataagcttggtattaatatgcccagctttggaaacatgggtgcaggttttggtgtcgaagagcctccccaagagccggaggaaactgaagaggagcgtatcgacagagaactcggcgagagtgagcagtccatcgttgatctccaagcacagatgcgaggtgccatgcttcgtatgcagttaggcaatgtcatgcagcagctttggaactcagaagattggctcgtcgagcttcaatctcgcatacgaggagactggacacgccaggttatagactatcgacttcagatgcgcaaatttgccgtcaatctccagagtgctgctcgcgggtttttggttcgacaaaggatgacacatagggagcaagtctggaaggccaaggagaaggacattgtgaagctgcagagtatgctgcgagctatcaatgtccgtaacgaggtacgcgagacacgatctcaattatcacaggaggatgggccagtgcacagtatccaggcgatgcttagggggcatcttgcacggaagcggttctcttctcagcagcaagaaacgagtcgcatgacgggccctgtactgaagctccagtctgcgattcgaggaatgctagctagagaaagggtagaccaaacactctgttctttagcggaagaggcccaggctgttacgagccttcaggctaacatccgggcaatgctgacaagaaaccagatacatgtccagcgagaggcgctccaaaattttgggccgaaatggacagctattcaaggtatctgtcgcggcaacctcctccgacaccagcttgccgcgaccaaaactgagctaaaagagcacaatctgcagattggggctttgcaagctcacgtccgcgcggcagcagtccgtcgacatgttactgaaacgaacgacgccttacacaccaatgagaactccgttctcgagctacaatcacgcattcggggtatgcttgagcgccaacggttagccgcccttctcgattccttggatacgcattcaacagccgtgacagagcttcaagctagagcccgcggatctctgtttagaaaacgacataattcattcctcaaagagttggaatctcatgactccgaagtcaccgagttacaagcactaggtagagctatgcttctacggatgaggattggagaccttctaggtgagcttgacgagcatgaagacgcgattgctgaactgcaatccctggctcagggctttttggtgagacaacgttttgaggccaagagaaaacatttcaatgagaatatgaagaaggtggttcagatccagagctttgttcgagctaaactccagggcgaggcatacaagagtctcaccacgggcaagaatcctcccgtcggcgctgtcaagaactttgtccatctgctcaacgacagcgacttcgacttcaatgaagagatcgagtttgagagattacgaaagacggtagtgcaacaagtcagacaaaacgagatgcttgagcagtatatcgatcaacttgacatcaagattgctctcttggtgaagaacaaaattacactcgacgaggttgtcaaacaccagaacaactacggtggccatactacaagcctgcttgccaatacctccttgacatctgccaatcagttcgacctcaaagcactcaacaaaagctcaaggaaaaagcttgactcataccagcaactgttcttcaacctacaaactcagccgcagtatcttgcgcgtctgttcagacgtatacgcgaaaacggcactagtgaggccgagtcgaaacgcgtcgagcatttggtcatgggcttgtttggatatgctcaaaaatctcgagaagaatactacctgctcaaactcatttcaagatccatccgcgaagaggttgataactgccaatcaatccaagactacctccggggcagctttttctggtcgaagctgttaggcaattacactaggtctcctcgcgacaggaaatatctccgagagctccttgggcccctcatccgggacaatatcattgaggaccctgagctagacctggagagtgaccctatgcagatctaccgttcagctatcagtaatgaggaattgcgcaccggacagcctagcagacgccccttagatatccctcgcgatcttgccatcaaagacaaggagactcgcgagctctttatcgaccatcttcgtgatctccgggagatttgcgaccaattcttgaccgccttggacttcctcctacctaagatgccctatggactacgcttcatctgccagcaaattttcgaggcattgtgcgatcggttcaagcgcgagcctcaacaccacatacttcaaatagtgagcaactgggtctggcggttttatttccagcctgccgttgtcaatccagagcaagttggcgtcattgaaaagagcctgagcccgctacagaagcgcaatctcggtgaagttgccaaggttctcagccaaattgcgtcaggccgcccatttggtggtgaaaatatttacctccaacctctgaacgccttcatgggtgaatctattgagcgacttaccaatactgtacacggactcatctcagttaatgacgccgagcataccttcggagtagatgagttcaatgacctttatgccaagaaccgcccaaccttatacatcaagatgggcgatatctttgccattcataacctagtagcccaggagctcgctagcatctcgcctagccgcaatgatgttatccatgagatcctccaagatctcggcagcgctaaaaacaacgagaacgaaatgcatgccgctgggtcttccgatatccagatgttcctgacacctaagctccatgatgtcaatgaccctgaggcagacgtcaaagcgctattcatggagaccaagcggtgcattctgtacatcatacgagtccagacgggtgccaacctactcgagatccttgtccgcccgccgagtcaagaagatgagcaaaaatggcagacactactacgagacgacttctcctctggcaacaacacgaagggggcctactctgacgcaaacatggtcgacgtaacccggatgtcatattacgatatgaaacgcaacgccctagagaacatcatgcgtctggagcgcatggggcgagtctcaaagcacaacttctatcaagacgttttgaatgcgatcgcgctagatatccgaaccaagagccgacgcagggtacagagacaacgggagttagagggagtccgattgacgctcggtaacctccacgagaaggccaagtatctcgaacaacaacggaagagctacgatgactacattgagcaagccatggctactctgcaaagaaatcaaggtcgtcgtcatttcttccccttcaccaagcaatacaaccaccagcgagaactcgaacgttccggccgagtcccgaagttcggctcctacaagtattctgtccgcgcgctccatagcaagggcgtgatcgtctcttggaatggtgttcccgagcgcgattggagtagtgttaacattactattgcatgcgacgaggtcggtgtcttcaatatcgaggccagcagaggtcacatacaaatccctggagccagcgccgtgatacctatcgagaacttgctacaggcgcaattcgaagccagacagttcatggatttcttcgagggcaatttgaggttgaatgttaatattctgctgcataccttgtacagaaaattctaccgtacgcagtag

SEQ ID NO: 3783 - protein, 1671 aa, Muscodor strobelii
  misc_feature: SGI Peptide ID NO. 560929
  misc_feature (287)..(393): Pfam Id: PF00307 Pfam Desc: Calponin homology (CH) domain
  misc_feature (1044)..(1252): Pfam Id: PF00616 Pfam Desc: GTPase-activator protein for Ras-like GTPase
  misc_feature (1451)..(1594): Pfam Id: PF03836 Pfam Desc: RasGAP C-terminus
  misc_feature (1)..(1671): NCBI GI: 39943240 Blast Desc: MGG_03700 [Magnaporthe grisea 70-15] gi|145009705|gb|EDJ94361.1| MGG_03700 [Magnaporthe grisea 70-15]
  misc_feature (1)..(1671): NCBI GI: 261355247 Blast Desc: RasGAP-like protein [Verticillium albo-atrum VaMs.102]
  misc_feature (8)..(1671): NCBI GI: 256730810 Blast Desc: NECHADRAFT_98573 [Nectria haematococca mpVI 77-13-4]
  misc_feature (5)..(1671): NCBI GI: 46109230 Blast Desc: FG01497.1 [Gibberella zeae PH-1]
  misc_feature (2)..(1670): NCBI GI: 85116004 Blast Desc: NCU03116 [Neurospora crassa OR74A] gi|28926774|gb|EAA35739.1| NCU03116 [Neurospora crassa OR74A]
  misc_feature (2)..(1671): NCBI GI: 171687637 Blast Desc: protein product [Podospora anserina] gi|170943780|emb|CAP69432.1| protein product [Podospora anserina]
  misc_feature (6)..(1667): NCBI GI: 239609722 Blast Desc: ras GTPase activating protein [Ajellomyces dermatitidis ER-3]
  misc_feature (94)..(1668): NCBI GI: 225562688 Blast Desc: ras GTPase-activating-like protein rng2 [Ajellomyces capsulatus G186AR]
  misc_feature (6)..(1667): NCBI GI: 261196976 Blast Desc: ras GTPase activating protein [Ajellomyces dermatitidis SLH14081] gi|239596136|gb|EEQ78717.1| ras GTPase activating protein [Ajellomyces dermatitidis SLH14081]
  misc_feature (94)..(1668): NCBI GI: 240279495 Blast Desc: ras GTPase-activating-like protein rng2 [Ajellomyces capsulatus H143]
MSHRPHPLRQSFTVDYPINRQPSTTSSSASSGYSYNSDQYVASNASTATSVVSNGPGTNMIGHKRGKSEAAVRHHPQRSLTSYDEPVKSPESMYSMARQSLRPLPQPPASGQPSPPAHSPRTPPKQDRHARGQSVDIGKLSLRDNRTSPSPTPTPLSPLSRSTNSRPNSMLLTRSDSVRQDPTRPVSNTHHGVVHSPFVTPNLQQLGRSSTSQLRTLSTLAQDGSGEEFSITSPTQEVVGLRGRRRLQRASTADAGKIGSRTDRYGFGGRNWMDQQRKFLQAYEYLCHIGEAKEWIEDIINRQIPPIVELEEALRDGVTLAEIVEALNPHRRERIFRNPRLQARHWENVHTFFRYLDEVEMPDLFRFELIDLYEKKNIPKVIYCIHALSWLLFRKGIVDFRIGNLVGQLEFEHHELEATQKGLDKLGINMPSFGNMGAGFGVEEPPQEPEETEEERIDRELGESEQSIVDLQAQMRGAMLRMQLGNVMQQLWNSEDWLVELQSRIRGDWTRQVIDYRLQMRKFAVNLQSAARGFLVRQRMTHREQVWKAKEKDIVKLQSMLRAINVRNEVRETRSQLSQEDGPVHSIQAMLRGHLARKRFSSQQQETSRMTGPVLKLQSAIRGMLARERVDQTLCSLAEEAQAVTSLQANIRAMLTRNQIHVQREALQNFGPKWTAIQGICRGNLLRHQLAATKTELKEHNLQIGALQAHVRAAAVRRHVTETNDALHTNENSVLELQSRIRGMLERQRLAALLDSLDTHSTAVTELQARARGSLFRKRHNSFLKELESHDSEVTELQALGRAMLLRMRIGDLLGELDEHEDAIAELQSLAQGFLVRQRFEAKRKHFNENMKKVVQIQSFVRAKLQGEAYKSLTTGKNPPVGAVKNFVHLLNDSDFDFNEEIEFERLRKTVVQQVRQNEMLEQYIDQLDIKIALLVKNKITLDEVVKHQNNYGGHTTSLLANTSLTSANQFDLKALNKSSRKKLDSYQQLFFNLQTQPQYLARLFRRIRENGTSEAESKRVEHLVMGLFGYAQKSREEYYLLKLISRSIREEVDNCQSIQDYLRGSFFWSKLLGNYTRSPRDRKYLRELLGPLIRDNIIEDPELDLESDPMQIYRSAISNEELRTGQPSRRPLDIPRDLAIKDKETRELFIDHLRDLREICDQFLTALDFLLPKMPYGLRFICQQIFEALCDRFKREPQHHILQIVSNWVWRFYFQPAVVNPEQVGVIEKSLSPLQKRNLGEVAKVLSQIASGRPFGGENIYLQPLNAFMGESIERLTNTVHGLISVNDAEHTFGVDEFNDLYAKNRPTLYIKMGDIFAIHNLVAQELASISPSRNDVIHEILQDLGSAKNNENEMHAAGSSDIQMFLTPKLHDVNDPEADVKALFMETKRCILYIIRVQTGANLLEILVRPPSQEDEQKWQTLLRDDFSSGNNTKGAYSDANMVDVTRMSYYDMKRNALENIMRLERMGRVSKHNFYQDVLNAIALDIRTKSRRRVQRQRELEGVRLTLGNLHEKAKYLEQQRKSYDDYIEQAMATLQRNQGRRHFFPFTKQYNHQRELERSGRVPKFGSYKYSVRALHSKGVIVSWNGVPERDWSSVNITIACDEVGVFNIEASRGHIQIPGASAVIPIENLLQAQFEARQFMDFFEGNLRLNVNILLHTLYRKFYRTQ

SEQ ID NO: 3784 - DNA, 5983 bp, Muscodor strobelii
  misc_feature: SGI EST ID NO. CUFF.9493.0
  misc_feature: Variant of the nucleotide sequence at SEQ ID NO 3782
caaactgccatttcaggtaaactatgatgcccgacgtcttcaccaaatcacatcgctacgaccaacagtcgacggccagggcccttggttttcaacacagccgcctgtcaaagctggaatgcaatctctgtatagtggccttaatcattgtcgctaaacatttcagtcatccctaagtaacatcgcatctacaatcaattgtcccgaatctcttctatgggtgcgcagactgcgcgcgttgaacctatcccccctccgcatatccggcgccgcaagcaccgtttctaaaactttaccctcaaacaacaacgcccgccatcaacatcctcaacggcggtagcaatcctcctataccgttccatatatcttcttcttcttcacaaacgtcttgtaatattgctctcaccacattgttttgcgcacgctcgcaccttggccgacatctgcgcaaagtaaatacccgaatgataccctagactcgctgtgatgcaggctttaatagtactgaataacgacacacatcaacttgaagacgtggacatcttggaccagtactaatcctcgacatgtcgcaccgaccacaccctctccgccagtccttcacggttgactatcctatcaaccgccaaccgtcaacaacatcgtcatcggcctcatccggctactcctacaactcggatcagtacgtcgccagcaacgccagcaccgcaacctcggtcgtctctaatggacccggcacaaatatgattggccacaaacgaggcaagagcgaggctgccgtgcgccatcacccccaacgatcacttacttcctatgacgagcccgtcaagagcccagagagtatgtacagcatggcgagacaatcgctacggccgcttccacagcctccggcatccggtcagccttcgcctccagcgcattcgccccgaacccctcccaagcaggatcgtcatgcgcgaggccagagtgtcgacatcggcaaactttctctacgcgacaacagaacgtctccatcgccaacaccgacgccactttctccgctctcacgctcaacaaactctcggcccaactccatgctcctcacgaggtcagactccgtacgccaagatcccactagaccagtctcgaacacccatcatggcgttgttcattctcccttcgtcacccccaaccttcaacaactaggccgctcatccaccagtcagttgcgaaccctctcaacattagctcaggatggttctggcgaagagttttccattacttctccaacgcaggaagtagtaggcctacggggtcgacgcagactgcagcgcgcaagcacggcagatgccggtaagataggatcgcgaaccgacagatacggcttcgggggccggaactggatggaccagcaacggaaattcctccaagcttacgagtatctctgtcacatcggtgaagccaaagagtggatcgaggacattatcaaccgccagattccccccattgtggaactggaagaggccctcagagatggtgtcaccctcgctgagatcgtggaggcgctgaaccctcatcgccgagagcgtatcttccggaatccgcgcctgcaggccaggcattgggaaaacgtgcacaccttttttcgatatctcgacgaagtagagatgcccgaccttttccgattcgagctgatagacctgtacgaaaagaagaacatccccaaagttatatactgcatacatgccctcagctggcttctcttcagaaaaggcatcgtggacttcaggatcggcaatctggtcggccagttggaattcgagcaccacgaacttgaagcaacccaaaagggcctcgataagcttggtattaatatgcccagctttggaaacatgggtgcaggttttggtgtcgaagagcctccccaagagccggaggaaactgaagaggagcgtatcgacagagaactcggcgagagtgagcagtccatcgttgatctccaagcacagatgcgaggtgccatgcttcgtatgcagttaggcaatgtcatgcagcagctttggaactcagaagattggctcgtcgagcttcaatctcgcatacgaggagactggacacgccaggttatagactatcgacttcagatgcgcaaatttgccgtcaatctccagagtgctgctcgcgggtttttggttcgacaaaggatgacacatagggagcaagtctggaaggccaaggagaaggacattgtgaagctgcagagtatgctgcgagctatcaatgtccgtaacgaggtacgcgagacacgatctcaattatcacaggaggatgggccagtgcacagtatccaggcgatgcttagggggcatcttgcacggaagcggttctcttctcagcagcaagaaacgagtcgcatgacgggccctgtactgaagctccagtctgcgattcgaggaatgctagctagagaaagggtagaccaaacactctgttctttagcggaagaggcccaggctgttacgagccttcaggctaacatccgggcaatgctgacaagaaaccagatacatgtccagcgagaggcgctccaaaattttgggccgaaatggacagctattcaaggtatctgtcgcggcaacctcctccgacaccagcttgccgcgaccaaaactgagctaaaagagcacaatctgcagattggggctttgcaagctcacgtccgcgcggcagcagtccgtcgacatgttactgaaacgaacgacgccttacacaccaatgagaactccgttctcgagctacaatcacgcattcggggtatgcttgagcgccaacggttagccgcccttctcgattccttggatacgcattcaacagccgtgacagagcttcaagctagagcccgcggatctctgtttagaaaacgacataattcattcctcaaagagttggaatctcatgactccgaagtcaccgagttacaagcactaggtagagctatgcttctacggatgaggattggagaccttctaggtgagcttgacgagcatgaagacgcgattgctgaactgcaatccctggctcagggctttttggtgagacaacgttttgaggccaagagaaaacatttcaatgagaatatgaagaaggtggttcagatccagagctttgttcgagctaaactccagggcgaggcatacaagagtctcaccacgggcaagaatcctcccgtcggcgctgtcaagaactttgtccatctgctcaacgacagcgacttcgacttcaatgaagagatcgagtttgagagattacgaaagacggtagtgcaacaagtcagacaaaacgagatgcttgagcagtatatcgatcaacttgacatcaagattgctctcttggtgaagaacaaaattacactcgacgaggttgtcaaacaccagaacaactacggtggccatactacaagcctgcttgccaatacctccttgacatctgccaatcagttcgacctcaaagcactcaacaaaagctcaaggaaaaagcttgactcataccagcaactgttcttcaacctacaaactcagccgcagtatcttgcgcgtctgttcagacgtatacgcgaaaacggcactagtgaggccgagtcgaaacgcgtcgagcatttggtcatgggcttgtttggatatgctcaaaaatctcgagaagaatactacctgctcaaactcatttcaagatccatccgcgaagaggttgataactgccaatcaatccaagactacctccggggcagctttttctggtcgaagctgttaggcaattacactaggtctcctcgcgacaggaaatatctccgagagctccttgggcccctcatccgggacaatatcattgaggaccctgagctagacctggagagtgaccctatgcagatctaccgttcagctatcagtaatgaggaattgcgcaccggacagcctagcagacgccccttagatatccctcgcgatcttgccatcaaagacaaggagactcgcgagctctttatcgaccatcttcgtgatctccgggagatttgcgaccaattcttgaccgccttggacttcctcctacctaagatgccctatggactacgcttcatctgccagcaaattttcgaggcattgtgcgatcggttcaagcgcgagcctcaacaccacatacttcaaatagtgagcaactgggtctggcggttttatttccagcctgccgttgtcaatccagagcaagttggcgtcattgaaaagagcctgagcccgctacagaagcgcaatctcggtgaagttgccaaggttctcagccaaattgcgtcaggccgcccatttggtggtgaaaatatttacctccaacctctgaacgccttcatgggtgaatctattgagcgacttaccaatactgtacacggactcatctcagttaatgacgccgagcataccttcggagtagatgagttcaatgacctttatgccaagaaccgcccaaccttatacatcaagatgggcgatatctttgccattcataacctagtagcccaggagctcgctagcatctcgcctagccgcaatgatgttatccatgagatcctccaagatctcggcagcgctaaaaacaacgagaacgaaatgcatgccgctgggtcttccgatatccagatgttcctgacacctaagctccatgatgtcaatgaccctgaggcagacgtcaaagcgctattcatggagaccaagcggtgcattctgtacatcatacgagtccagacgggtgccaacctactcgagatccttgtccgcccgccgagtcaagaagatgagcaaaaatggcagacactactacgagacgacttctcctctggcaacaacacgaagggggcctactctgacgcaaacatggtcgacgtaacccggatgtcatattacgatatgaaacgcaacgccctagagaacatcatgcgtctggagcgcatggggcgagtctcaaagcacaacttctatcaagacgttttgaatgcgatcgcgctagatatccgaaccaagagccgacgcagggtacagagacaacgggagttagagggagtccgattgacgctcggtaacctccacgagaaggccaagtatctcgaacaacaacggaagagctacgatgactacattgagcaagccatggctactctgcaaagaaatcaaggtcgtcgtcatttcttccccttcaccaagcaatacaaccaccagcgagaactcgaacgttccggccgagtcccgaagttcggctcctacaagtattctgtccgcgcgctccatagcaagggcgtgatcgtctcttggaatggtgttcccgagcgcgattggagtagtgttaacattactattgcatgcgacgaggtcggtgtcttcaatatcgaggccagcagaggtcacatacaaatccctggagccagcgccgtgatacctatcgagaacttgctacaggcgcaattcgaagccagacagttcatggatttcttcgagggcaatttgaggttgaatgttaatattctgctgcataccttgtacagaaaattctaccgtacgcagtagtggtacgcagcagtggcttaaaatgttatcgagtaatacgcgaacttgcgaggatatacggagttcgaataaggcagtcaaatgaaaggaaagggctggaagtttaagcgggctcatggtctcggttgcattgttttgttccggtgttttgtgcttgccatcgcgtcggtgttttgtgtattggctggctggttggttgctgtatgtaggattggttgtagcatggttcgcaggatggcgtggtaggatgggaaaaaacaagatgagagtcacctcttgcatgagaccgcatgtcggtgggagtcctgtcaccctgaagccttctgttagggttgagaataaataggttcatgatgtaatggcgactatgaatcaaatatcattacttacctgcctacccc

SEQ ID NO: 3785 - DNA, 1281 bp, Muscodor strobelii
  misc_feature: SGI cDNA ID NO. 560930
  misc_feature: Encodes the peptide sequence at SEQ ID NO 3786
atgaagtcgtctattcagaacgttgtagcagcgctggcgctcacccaagccgcccaagccgtgacgcttaacacagcatcaacaatatcgatcaagaaggctgccaagacgatatcgaagaacctatatgcctaccacaatgccagtgcaacgaccggccagttcaaccaaccacagccttggttttggtggaggagtggtgctgcatggacggccctgatggattatcagcattataccaacgatacgacataccacgcagacctcgttacctctttgaaggcgaatctcggacctaaatatgactttgcagatgctagtcagtccgggtgggaagccaacgacgaccaggcctactggctatacaacgccctaacaggaatggagtacggcttcgctcccatcgacgccacccactcctgggaagccatcgcccaaaacgtattcgccgagtacgcatcccgctggacgcacgacgaaacaacctgcaacggcggtctaaaatggcagtacaaccccaagctgaacgggtacacctacaaaaacaccgtctccaacagcggcttcttccagaccgcggcccgcctagcccgatacacggggaaccagacgtacgccgactgggcgaacaaaatctgggactggtcgcaaggcgtcgggttcgtgacggcagactaccacgtctacgacggcgcgggcgaggaccagaactgcaccgcgatcgacaagtcagagtggtcgtacaacattgcctcgtacatgcacggcgccgcgcacatgtataacctgacgtctgacgccacgtgggagacgcgcgtcaagggcctcgtgaagactgcgtccgaggtgttcttccaggatggcatcatgtacgagcagaagtgcgagcctgataattcttgctcgatcgataatacggggttcaagtcttcgcttgctaggtggatgggtaagacggctgttcttgtgccgagtcagaagaatactatcatggcgcttctgaagacttctgctgggggcgcggcgaagagctgttcgggacaaagtaacgcttgtggtattaagtggaccactggtgattttgataatcagactgatttcggtacgacgctatctgctttcgaggtcatccagagtctgcttgttttcgagggtgcggcgcctctcactgctgatacggccgctggctcgaatggaacgacgaggactgttgatgagccagagccgtccacgacacctgggtcgacgacgaagaagacttgtgggcgcaagaggtcgtaa

SEQ ID NO: 3786 - protein, 426 aa, Muscodor strobelii
  misc_feature: SGI Peptide ID NO. 560930
  misc_feature (22)..(393): Pfam Id: PF03663 Pfam Desc: Glycosyl hydrolase family 76
  misc_feature (5)..(389): NCBI GI: 156030546 Blast Desc: SS1G_14497 [Sclerotinia sclerotiorum 1980] gi|154700888|gb|EDO00627.1| SS1G_14497 [Sclerotinia sclerotiorum 1980]
  misc_feature (10)..(399): NCBI GI: 238485402 Blast Desc: cell wall glycosyl hydrolase Dfg5, [Aspergillus flavus NRRL3357] gi|220698818|gb|EED55157.1| cell wall glycosyl hydrolase Dfg5, [Aspergillus flavus NRRL3357]
  misc_feature (10)..(399): NCBI GI: 169771989 Blast Desc: [Aspergillus oryzae RIB40] gi|83768323|dbj|BAE58462.1| protein product [Aspergillus oryzae]
  misc_feature (8)..(424): NCBI GI: 255933544 Blast Desc: Pc12g13430 [Penicillium chrysogenum Wisconsin 54-1255] gi|211582770|emb|CAP80970.1| Pc12g13430 [Penicillium chrysogenum Wisconsin 54-1255]
  misc_feature (12)..(426): NCBI GI: 115386964 Blast Desc: conserved [Aspergillus terreus NIH2624] gi|114191021|gb|EAU32721.1| conserved [Aspergillus terreus NIH2624]
  misc_feature (10)..(399): NCBI GI: 154310531 Blast Desc: BC1G_07186 [Botryotinia fuckeliana B05.10] gi|150851517|gb|EDN26710.1| BC1G_07186 [Botryotinia fuckeliana B05.10]
  misc_feature (10)..(399): NCBI GI: 156055516 Blast Desc: SS1G_05110 [Sclerotinia sclerotiorum 1980] gi|154702894|gb|EDO02633.1| SS1G_05110 [Sclerotinia sclerotiorum 1980]
  misc_feature (10)..(411): NCBI GI: 169606548 Blast Desc: SNOG_06317 [Phaeosphaeria nodorum SN15] gi|160707023|gb|EAT86148.2| SNOG_06317 [Phaeosphaeria nodorum SN15]
  misc_feature (8)..(388): NCBI GI: 226277918 Blast Desc: mannan endo-1,6-alpha-mannosidase DCW1 [Paracoccidioides brasiliensis Pb01]
  misc_feature (8)..(394): NCBI GI: 226293194 Blast Desc: mannan endo-1,6-alpha-mannosidase DCW1 [Paracoccidioides brasiliensis Pb18]
  misc_feature (51)..(399): SWISSPROT Homolog: EC 3.2.1.101 Mannan endo-1,6-alpha-mannosidase
MKSSIQNVVAALALTQAAQAVTLNTASTISIKKAAKTISKNLYAYHNASATTGQFNQPQPWFWWRSGAAWTALMDYQHYTNDTTYHADLVTSLKANLGPKYDFADASQSGWEANDDQAYWLYNALTGMEYGFAPIDATHSWEAIAQNVFAEYASRWTHDETTCNGGLKWQYNPKLNGYTYKNTVSNSGFFQTAARLARYTGNQTYADWANKIWDWSQGVGFVTADYHVYDGAGEDQNCTAIDKSEWSYNIASYMHGAAHMYNLTSDATWETRVKGLVKTASEVFFQDGIMYEQKCEPDNSCSIDNTGFKSSLARWMGKTAVLVPSQKNTIMALLKTSAGGAAKSCSGQSNACGIKWTTGDFDNQTDFGTTLSAFEVIQSLLVFEGAAPLTADTAAGSNGTTRTVDEPEPSTTPGSTTKKTCGRKRS

SEQ ID NO: 3787 - DNA, 1550 bp, Muscodor strobelii
  misc_feature: SGI EST ID NO. CUFF.9506.0
  misc_feature: Variant of the nucleotide sequence at SEQ ID NO 3785
tatatatcttccgcactggtccgcttctttggtgttgtttccgtaatctgtagatctgtttcctttcgttaccggggtattgcattccaagatgaagtcgtctattcagaacgttgtagcagcgctggcgctcacccaagccgcccaagccgtgacgcttaacacagcatcaacaatatcgatcaagaaggctgccaagacgatatcgaagaacctatatgcctaccacaatgccagtgcaacgaccggccagttcaaccaaccacagccttggttttggtggaggagtggtgctgcatggacggccctgatggattatcagcattataccaacgatacgacataccacgcagacctcgttacctctttgaaggcgaatctcggacctaaatatgactttgcagatgctagtcagtccgggtgggaagccaacgacgaccaggcctactggctatacaacgccctaacaggaatggagtacggcttcgctcccatcgacgccacccactcctgggaagccatcgcccaaaacgtattcgccgagtacgcatcccgctggacgcacgacgaaacaacctgcaacggcggtctaaaatggcagtacaaccccaagctgaacgggtacacctacaaaaacaccgtctccaacagcggcttcttccagaccgcggcccgcctagcccgatacacggggaaccagacgtacgccgactgggcgaacaaaatctgggactggtcgcaaggcgtcgggttcgtgacggcagactaccacgtctacgacggcgcgggcgaggaccagaactgcaccgcgatcgacaagtcagagtggtcgtacaacattgcctcgtacatgcacggcgccgcgcacatgtataacctgacgtctgacgccacgtgggagacgcgcgtcaagggcctcgtgaagactgcgtccgaggtgttcttccaggatggcatcatgtacgagcagaagtgcgagcctgataattcttgctcgatcgataatacggggttcaagtcttcgcttgctaggtggatgggtaagacggctgttcttgtgccgagtcagaagaatactatcatggcgcttctgaagacttctgctgggggcgcggcgaagagctgttcgggacaaagtaacgcttgtggtattaagtggaccactggtgattttgataatcagactgatttcggtacgacgctatctgctttcgaggtcatccagagtctgcttgttttcgagggtgcggcgcctctcactgctgatacggccgctggctcgaatggaacgacgaggactgttgatgagccagagccgtccacgacacctgggtcgacgacgaagaagacttgtgggcgcaagaggtcgtaattggatacactgaagtgttgttggagaacaaaaattggaataacctgtacataaagttcgaaaattgcccgccatttcggcatgtatatatgaagcactcaggcatagcgaacgggattttgggtaggtactaggtaatcatcaccatcattacaaaatagaaaatttcattttgtcg

SEQ ID NO: 3788 - DNA, 1119 bp, Muscodor strobelii
  misc_feature: SGI cDNA ID NO. 560931
  misc_feature: Encodes the peptide sequence at SEQ ID NO 3789
atgtccgaactaccagaaaatatgcgctcgctcgtagccttgaagtactgcaaaccttctgagatggaggtcgtagacatgccactaccaagaattgagaagccggaccaggtgttgatcagaatgcatgcatgcgctctattgactggcgatatgcaccgaatgaagggagacatggcaatgcttctcccggtgaagcagaagtttcccatgaaaattggggctgaaggctctggtgttatagtggcagtcggagcagaagtgaagcgcttcagacccggtgacgaagtgtacgctatggatgtcggcggtcggccattcgacttgactcacaatccaggtctcggttcacaatacgctgtctgttccgagaacatagttgtctctaaaccaagtcacatatcatttgaagacgccgcatcgcttcctggatgcacagtaacagcgtaccaatgcatcgagcgcggacttgaactcttgcgcgaaaacggagtgacagacggattaagagggaagaccgttttcgtcccgggcgcactcagcagcacaggctcgatcataattcagctactcaagaatgagtacggcgtcaaacgtatcatatctacagtatcaacagccaagattccgctcgttgagcagtatcttcccggatatgtcgatcaagttgtggattacacgatccataagcagttgacggatgtgatccccgccggaagcgtcgatgtcgtcgtgaacacacagtgggatctattcaagacattcccgctagtgaacccgaaaaagggcgtggtgatttccatttccagcttaccgcacccagctctcatgcgcgaaatgctgcctaatctgccatttttcgtattttggctcctgagtgctgctcaatggtattacgctttcaagctgcgcggcaccaatgtcaaatacgaatttgtgtcggggaattttggtccaagggagactgtggataagattgcagagttcattgccctaggtaaggtcaaggccgtcatacggactgtgaatctcgaagagattgaggctgtgaggaatgcttgcgatcaggtcgccaaaggaaaagggggcattggaaagcttgtcataaagattccataa

SEQ ID NO: 3789 - protein, 372 aa, Muscodor strobelii
  misc_feature: SGI Peptide ID NO. 560931
  misc_feature (35)..(130): Pfam Id: PF08240 Pfam Desc: Alcohol dehydrogenase GroES-like domain
  misc_feature (35)..(100): Pfam Id: PF08240 Pfam Desc: Alcohol dehydrogenase GroES-like domain
  misc_feature (1)..(371): NCBI GI: 256735537 Blast Desc: NECHADRAFT_98997 [Nectria haematococca mpVI 77-13-4]
  misc_feature (5)..(371): NCBI GI: 39971847 Blast Desc: MGG_07239 [Magnaporthe grisea 70-15] gi|145019737|gb|EDK03965.1| MGG_07239 [Magnaporthe grisea 70-15]
  misc_feature (1)..(370): NCBI GI: 169248011 Blast Desc: Zbd1 [Fusarium oxysporum]
  misc_feature (1)..(370): NCBI GI: 167613933 Blast Desc: Zbd1p [Gibberella moniliformis]
  misc_feature (1)..(371): NCBI GI: 261358662 Blast Desc: Zbd1p [Verticillium albo-atrum VaMs.102]
  misc_feature (1)..(339): NCBI GI: 46105290 Blast Desc: FG00273.1 [Gibberella zeae PH-1]
  misc_feature (8)..(369): NCBI GI: 170093934 Blast Desc: [Laccaria bicolor S238N-H82] gi|164646642|gb|EDR10887.1| [Laccaria bicolor S238N-H82]
  misc_feature (8)..(371): NCBI GI: 238495272 Blast Desc: alcohol dehydrogenase, [Aspergillus flavus NRRL3357] gi|220695522|gb|EED51865.1| alcohol dehydrogenase, [Aspergillus flavus NRRL3357]
  misc_feature (8)..(369): NCBI GI: 242774028 Blast Desc: alcohol dehydrogenase, [Talaromyces stipitatus ATCC 10500] gi|218721979|gb|EED21397.1| alcohol dehydrogenase, [Talaromyces stipitatus ATCC 10500]
  misc_feature (8)..(369): NCBI GI: 212531819 Blast Desc: alcohol dehydrogenase, [Penicillium marneffei ATCC 18224] gi|210071430|gb|EEA25519.1| alcohol dehydrogenase, [Penicillium marneffei ATCC 18224]
  misc_feature (2)..(356): SWISSPROT Homolog: EC 1.1.1.1 Alcohol dehydrogenase
MSELPENMRSLVALKYCKPSEMEVVDMPLPRIEKPDQVLIRMHACALLTGDMHRMKGDMAMLLPVKQKFPMKIGAEGSGVIVAVGAEVKRFRPGDEVYAMDVGGRPFDLTHNPGLGSQYAVCSENIVVSKPSHISFEDAASLPGCTVTAYQCIERGLELLRENGVTDGLRGKTVFVPGALSSTGSIIIQLLKNEYGVKRIISTVSTAKIPLVEQYLPGYVDQVVDYTIHKQLTDVIPAGSVDVVVNTQWDLFKTFPLVNPKKGVVISISSLPHPALMREMLPNLPFFVFWLLSAAQWYYAFKLRGTNVKYEFVSGNFGPRETVDKIAEFIALGKVKAVIRTVNLEEIEAVRNACDQVAKGKGGIGKLVIKIP

SEQ ID NO: 3790 - DNA, 4821 bp, Muscodor strobelii
  misc_feature: SGI cDNA ID NO. 560932
  misc_feature: Encodes the peptide sequence at SEQ ID NO 3791
atggcggccacaactcatcacggtcatcatcgtccagcgcaaagacaaggtaaggacgcggccgatccgccgagccttcatgaaactttagatgaggtctataagggcgatttcgattacgcagacgaagaacaacatgacgaatacgaccgttggtccacagcccgccaacaccacaagaagagattgccaattcccgctcaacgggcagctgatatcaacctcaaagttggcatagggaagcacgatccaagcatcattattcatcaaatcattgcctacctacgagacaatgacaaaggcagagatgtcaactgggagcagaggtttggggcgatggtggtgtaccttgaggaggcaaaacggcagatgacaaccggcgagctgggctacgaggatcctgatctacgtgcagctttgtatgatgcattcgttatggtgaagacgcatctccacttcgagaaacgcgcactggaccagacgccctggacagatgaaataatgaaggggcagtcggtacaaaaacgtcttctcacatatccacatgcgtttcctcagcccgaatcaagccgtgccccgagtcaatatcgaccagtcaagcccaagccaaatccttcgagcagctcagttatatgggatacgacgctaaagcttgtctatccggacatgcctagtaaggccctccagggcaagccgaccgctgatccatgggacccaactagcgacaaagctagatcctaccctcctgtcgatcagttacaccctctaactgaggttgataattttgtacaaagcgagaacaaattcttccaaataatccaagaagctgctaccgtaggtagcaagaaggacgatacactttggtccaatatcaggttcgacgttgagaatgcggtctatgagcagtgtattggactcggagtgggagagacatgtacagttgcgcctcctccgccatccatcggtccaaatggtatcagaggaccaaacaacccagatggtcacaaaggaccatcattctacaacaggcgagggtggcagcgcgcagccctccaacaatgtttgaacctgttcactagtcatgagaatcgcgttatcaatactccgtggcgtcggcttgttctcccttttgaacaaccggttaagctaccaaaagacattgcgtacattccacgtgttttggagccttctcaagtgcctgaagaagctaaagatccctttgcctggctccaaggatctcttcaatatgctcaaactctcaattttatggcagcttaccagcgcaagagctatatgaacgagcattgggccaacttctctacaccagctttgcccgtaaacttccgtggaccgcgcatctacaggggcttggctgtttatgatcagcactggctttcaatcggtgactatctcgagcagctggaaagcagactcaatgatgcctgggcagttgctcctcggccttttctgagagccatccttcgagacattgatgccggcagacaggaaaacaccggcgactttatcttcgatcgtgaatcgttttctccgtttgatgatgaagatgaccgtgagaagaagagattttggcgccgggatatcaagcgtcgtgagggaatcgataatcaggagaagccacataacggggcgcatatccaaaagaagagtcaagaaaaacacgacgacagtgactataaactgttggacgagtttgatattggttggcttcggtttcttgcggagccttcacgtacgttggagatgtgcgatgcgtctcaggtgccagaagacaatctcgttctcatctttgatgccaagcttcagtcctacttcagaagcttggaatattccggccaccctgactgggccgcactcgatatctggaacgaaacgtccgttgatgtcgaggataagatgcgtgatttcaaaccgcacacattaaagcacgtattggcgtacatcaatggatgtggcgagcaagaagtgtcatactccggtaacctatgtccagtaccggggcatcccaacgcctcctatcaattctctgaagaagaagccgagtttttgtgtatacggcttcagcagatgggcagatgcacgtacattccgggcagaagaagttgggctggcaagaaaggcgaatccgcaaggatagaccgaccaagctacatggtccacccggaagaccgtgttcgttggcggtaccacgactctgttgattttcttcagaatagagatatcttcgtagacgagatgttggaacattatgaccaaaattacggccagtggtccacatatcttcggaataaagtcaaatataccggcgaagatatcaccaagcatacaagtaaagaaagagtcaactacactagcgagttggagtggatgattgatcacgccgggcccgactttccctacgagttggttgcaaaagaaattgaagacgtcgataaccatgtcaaggacgataaactccaaaggaaacaattcatcaagaagcatatcataccagaagttatgtacgcggttggaaatattgacacggacgactctgaattcgaaaaagcctcgccctactgggaggatttggccacgtgggaactcacaggggaattcgtaacagcatgggagaaagctataacggcaaaccgacctcgtcgaatgaacgaaccttttcatcctaaaactccggagaaaacagtacaattctttagaaatctggcgtaccgcatgggtaggactctgagacatgcgaaacagattaaagacaggcttcagtatcttgtgcaagatccgcccgagctaaaaccaacacgacacttagatctatcgctcaaacccatacatcccaggcctatgaagactctgccttcgtttgaggaatcaccagtcatagcgagaaaatggtggcatgcgatttcatttgacgactacgaactggctgtcgaccgatgggacgacgctgtacgggatggtcacggcgaggtggcactattgcctcctaaaattgaagatatcatcgagcacgcggatcctacttcgtcatttcgaaaaacgctaagcagtagtggggatccctttaccataattcgagaggggatcatccacgactgcgtccaaaaccggccgacgcgctacccaagccggatgattggtttcaaagacaaccaagacaaagaattccaagggtatcaaagacctggtctctttgagtgggcaacaaaggaacagagacgcttccaggcaccccacacccgacgcaacttttttaacatgcaacgctggccgtctaatcgtatgcttccacatagactcgaggcaatccggcatcgcaaagacgaagtccttagacaagacccgtctcagaaggaccaggcctatggtatactaacccaccgcgtgcccattggcaacgaaaagccattgtacgcccatcctatcatcgatcatcatcatcatcgtcatcgcgacgggttggatcccgacgacgacgacgacgacgacttgtggcgtggcatccgcaaagatcctgatcatcctgatagtatcgctagcgttgacgacgacgacaaagttggcgagagcgacaaggaagtaaaacacatacctctacctccagatcctatttcaagcggtcaacccgaaacaagcaccaatcaatcaaattccgacaacatgaatcatcaccacggacgccgccagcatggtcagagacctcaaccgcctcaaccgccgcaagctccacgagctccaggaacagggatgcggcaggacaaaaagtctgtcactaccatgacaaaagacaagagtggtgctacatcccaagctcttggtcgccagcttattccattccaacattcgcagaataaattccatcccggtgtcgccgcgcttgtccatggtgataccttactgcagagagttgcattatcccaaagcattgatggcatgttacacggttctccatggtggtggcaaacccggtgggcgggtattccaaagctttggaagaccgtgtctggctcgaagcttccattgatcccactcgtgccgacatctcgtcgagccaacatcccccgcagcaatccatataagcggaaaatgcctatcgaatacttgaattccgagcaacctgtcatgaagaagatcaagtttgatactaatcacacggttcatttgaagccggggggacttggtggccaatttggcgctgccttcgagcccgagaagcctgtcataactgagaaaaaggcggagaaggaacagcactttcccatgaagatctcgccggataacaaggaagccgacaagcagttcaaaaaatctttccctcagggatgggatgtgaggaatgtgtgggaccacaacaagccagatgatatgtttggcgctgctctgcgatcactcagaggaagcatcaaccgccaattgcacggacacaaagtcgagcgagaggaacttatggagcttctgcacaaagatgagaagtgcaaagtgatcatgcaattttggaatcctcgcgataaggctcaaaaggtgttctatgttgaattcctagcctacctgcttaaggtgtggggagagaagaaaaatctaaaacttcatcttggtatcgttcaagaagatccaaacaaggcgaatacggaccctcgttacccaaagacgttcgtgccttaccttgtaggcgagagtcaaaatccggatttcagcggtattccgatttgggtccgattggcctacgaccagaagaacccggcggttgccatagttggaccggccacctcgtacaacagttacaacgccgtgcgcctggttaagtaa

SEQ ID NO: 3791 - protein, 1606 aa, Muscodor strobelii
  misc_feature: SGI Peptide ID NO. 560932
  misc_feature (289)..(509): NCBI GI: 256730817 Blast Desc: NECHADRAFT_74275 [Nectria haematococca mpVI 77-13-4]
  misc_feature (294)..(517): NCBI GI: 46109202 Blast Desc: FG01483.1 [Gibberella zeae PH-1]
MAATTHHGHHRPAQRQGKDAADPPSLHETLDEVYKGDFDYADEEQHDEYDRWSTARQHHKKRLPIPAQRAADINLKVGIGKHDPSIIIHQIIAYLRDNDKGRDVNWEQRFGAMVVYLEEAKRQMTTGELGYEDPDLRAALYDAFVMVKTHLHFEKRALDQTPWTDEIMKGQSVQKRLLTYPHAFPQPESSRAPSQYRPVKPKPNPSSSSVIWDTTLKLVYPDMPSKALQGKPTADPWDPTSDKARSYPPVDQLHPLTEVDNFVQSENKFFQIIQEAATVGSKKDDTLWSNIRFDVENAVYEQCIGLGVGETCTVAPPPPSIGPNGIRGPNNPDGHKGPSFYNRRGWQRAALQQCLNLFTSHENRVINTPWRRLVLPFEQPVKLPKDIAYIPRVLEPSQVPEEAKDPFAWLQGSLQYAQTLNFMAAYQRKSYMNEHWANFSTPALPVNFRGPRIYRGLAVYDQHWLSIGDYLEQLESRLNDAWAVAPRPFLRAILRDIDAGRQENTGDFIFDRESFSPFDDEDDREKKRFWRRDIKRREGIDNQEKPHNGAHIQKKSQEKHDDSDYKLLDEFDIGWLRFLAEPSRTLEMCDASQVPEDNLVLIFDAKLQSYFRSLEYSGHPDWAALDIWNETSVDVEDKMRDFKPHTLKHVLAYINGCGEQEVSYSGNLCPVPGHPNASYQFSEEEAEFLCIRLQQMGRCTYIPGRRSWAGKKGESARIDRPSYMVHPEDRVRWRYHDSVDFLQNRDIFVDEMLEHYDQNYGQWSTYLRNKVKYTGEDITKHTSKERVNYTSELEWMIDHAGPDFPYELVAKEIEDVDNHVKDDKLQRKQFIKKHIIPEVMYAVGNIDTDDSEFEKASPYWEDLATWELTGEFVTAWEKAITANRPRRMNEPFHPKTPEKTVQFFRNLAYRMGRTLRHAKQIKDRLQYLVQDPPELKPTRHLDLSLKPIHPRPMKTLPSFEESPVIARKWWHAISFDDYELAVDRWDDAVRDGHGEVALLPPKIEDIIEHADPTSSFRKTLSSSGDPFTIIREGIIHDCVQNRPTRYPSRMIGFKDNQDKEFQGYQRPGLFEWATKEQRRFQAPHTRRNFFNMQRWPSNRMLPHRLEAIRHRKDEVLRQDPSQKDQAYGILTHRVPIGNEKPLYAHPIIDHHHHRHRDGLDPDDDDDDDLWRGIRKDPDHPDSIASVDDDDKVGESDKEVKHIPLPPDPISSGQPETSTNQSNSDNMNHHHGRRQHGQRPQPPQPPQAPRAPGTGMRQDKKSVTTMTKDKSGATSQALGRQLIPFQHSQNKFHPGVAALVHGDTLLQRVALSQSIDGMLHGSPWWWQTRWAGIPKLWKTVSGSKLPLIPLVPTSRRANIPRSNPYKRKMPIEYLNSEQPVMKKIKFDTNHTVHLKPGGLGGQFGAAFEPEKPVITEKKAEKEQHFPMKISPDNKEADKQFKKSFPQGWDVRNVWDHNKPDDMFGAALRSLRGSINRQLHGHKVEREELMELLHKDEKCKVIMQFWNPRDKAQKVFYVEFLAYLLKVWGEKKNLKLHLGIVQEDPNKANTDPRYPKTFVPYLVGESQNPDFSGIPIWVRLAYDQKNPAVAIVGPATSYNSYNAVRLVK

SEQ ID NO: 3792 - DNA, 1323 bp, Muscodor strobelii
  misc_feature: SGI cDNA ID NO. 560933
  misc_feature: Encodes the peptide sequence at SEQ ID NO 3793
atgccagataagagacagttccaagctgattcagctgccgctaaagatgacgcgcaccagcaggctaaatcaaagcaaaacggtcggcgaaatcgatcgctcttgtttacagatgaagaagtagcagaacggagagcgcgtgagctccaattcaagatcaggaagggcttaatccagaaagtatcagaagtagaggcatcagcgcaaacacttcaaaattggacacatgacaaaattccgacaggcgaggagactcgggaatcactacctcaaccgccaatcccagaatccgaaagcgataggccgcggaagccctgggagacgatcgcgtatggcctttcgctgggcgaaaatttgagttacatcgaagagaaagaacgtgaaatcgaacaggaacgttacatcgtgaaatattgcgagagaaactcaccaaaccaagtagagtgccacaagaaactcttaaatcagctgaacgaagagagagcacggatgagtgagaatgaagaaaatcacatgcctcgagatcaaagggagaaaaagactcggattgccgaacgattagatttgctgcgatgggtccttgataggagtagatgtgaggacgagaggatcaatgtcaaagcagcaatatctgggtacgagtctggccagatatcatatactaccagcttcaccctcatatatggtggccgcatcgttgatacatgtccaacgtatcaatctttctgtcaagatagggccgaaagactagagcgatattctattaagtttggagctggctggctctggcatgaacctcctctagatggcgcacaaagctatgatgcagtggccatgaaaggcatcgccttcggtaaaaacctgtattttgatcggtatggcattggtaactacagcgtccatctcaagtttgagatagacaaactcagagtctcgggaggaccgtcaaatgcaagagagcatcaactggaaaaggagatttcttcaacacagcagacaggaacaggaatcgtacaatctgaagaaaaatggtgtgtgctggaaacacttttggatagcggtgcaagtttccctattatatttgacgttgatcttcccaaacttggtgtggatttaacgcaatactcagctcaaggggcagtaaatatcgccgctgttggaggagttgtgaggatggtcttctatgaaatgttcgtatcatgctatgccaaccccgtggcggacaccgtcttagtggccaagtgccttttgacgtttgttacctgtcttcagctccaaccatgcggcaaatttgggctggagaggaccgacgagacgtgctag

SEQ ID NO: 3793 - protein, 440 aa, Muscodor strobelii
  misc_feature: SGI Peptide ID NO. 560933
  misc_feature (91)..(399): NCBI GI: 85074851 Blast Desc: NCU00653 [Neurospora crassa OR74A] gi|28927606|gb|EAA36557.1| [Neurospora crassa OR74A]
  misc_feature (116)..(399): NCBI GI: 116182108 Blast Desc: CHGG_01682 [Chaetomium globosum CBS 148.51] gi|88185979|gb|EAQ93447.1| CHGG_01682 [Chaetomium globosum CBS 148.51]
  misc_feature (86)..(399): NCBI GI: 256730594 Blast Desc: NECHADRAFT_89780 [Nectria haematococca mpVI 77-13-4]
  misc_feature (101)..(399): NCBI GI: 46109200 Blast Desc: FG01482.1 [Gibberella zeae PH-1]
  misc_feature (117)..(401): NCBI GI: 171695034 Blast Desc: protein product [Podospora anserina] gi|170947759|emb|CAP59922.1| protein product [Podospora anserina]
  misc_feature (91)..(305): NCBI GI: 261358659 Blast Desc: conserved [Verticillium albo-atrum VaMs.102]
MPDKRQFQADSAAAKDDAHQQAKSKQNGRRNRSLLFTDEEVAERRARELQFKIRKGLIQKVSEVEASAQTLQNWTHDKIPTGEETRESLPQPPIPESESDRPRKPWETIAYGLSLGENLSYIEEKEREIEQERYIVKYCERNSPNQVECHKKLLNQLNEERARMSENEENHMPRDQREKKTRIAERLDLLRWVLDRSRCEDERINVKAAISGYESGQISYTTSFTLIYGGRIVDTCPTYQSFCQDRAERLERYSIKFGAGWLWHEPPLDGAQSYDAVAMKGIAFGKNLYFDRYGIGNYSVHLKFEIDKLRVSGGPSNAREHQLEKEISSTQQTGTGIVQSEEKWCVLETLLDSGASFPIIFDVDLPKLGVDLTQYSAQGAVNIAAVGGVVRMVFYEMFVSCYANPVADTVLVAKCLLTFVTCLQLQPCGKFGLERTDETC

SEQ ID NO: 3794 - DNA, 1200 bp, Muscodor strobelii
  misc_feature: SGI cDNA ID NO. 560934
  misc_feature: Encodes the peptide sequence at SEQ ID NO 3795
atggcgtactctacctcaaatgactatttcgtcgagtccgatgagccaagacggatcgacatgaagaacgccgccaaaatgcttgcacgcaatcggcaggaaatgatagccaacgacctgtcgcgtctcgccggcgatgagtatctcgaggacatcatgcaacatttgcgacacatggaggacgaaacactacccgacgctaatctcatcgacatgcagagagagatccagtggtttatgagaccctacctaatcgacttcctcatcgaggcacacgctgccttcgcgttgcttcctgagacgctgtttctcactgtcaacctcctggaccgttactgctcaaaacgtgtcgtctacaagcagcattatcaacttgttgggtgcgcggccttgttgatcgccgccaagtacggcgacaagaaggatcgggtcccgcaaatcaacgaactgaacaatatgtgctgtggactctatgactcgggcatgttcacacagatggaaatgcatgttctcaacacattggaatggaatatcggccaccccactgtcgacttttttactcagctcatcgctgccgaggagggagacgatcgtgaggtggagaacatggccgcatacatttgcgagattgccctatatcaccgtgacttcgtatccacaaagccgtcgatcatggcacgagcctccctcgccctgtctcgagcgattctcggacgtcccgaggtaaatgacggagaatgggaccatgtcgaaaaccttacggttttgacgttgtcgcaacatctgcaccagccctcggtcacactgtcacggaaatattcttctgcgcagacctgccgagtttcccttactcttgccgagttcctcgcacagcaagctgccatctcacggagagcgcaacaggccccaccatcccctcccgcggagcctatgatgccatccagccacgcctccatctataatacccctcagaagggctgcggtgctatgccaggcgccgctgatggctacatgacgcctcctatcacgcctgatggcatgtgcttctcaggcaacgatcctatgaacaagtatgttccacctcggtgtcccgttacccccacaccacaagttccgagcatgtcagggtattcacaacgacaacaacacccttacgccacatacacgtatgatgaatacgcacattcgatggtagcttag

SEQ ID NO: 3795 - protein, 399 aa, Muscodor strobelii
  misc_feature: SGI Peptide ID NO. 560934
  misc_feature (51)..(179): Pfam Id: PF00134 Pfam Desc: Cyclin, N-terminal domain
  misc_feature (181)..(239): Pfam Id: PF02984 Pfam Desc: Cyclin, C-terminal domain
  misc_feature (2)..(370): NCBI GI: 116182110 Blast Desc: CHGG_01683 [Chaetomium globosum CBS 148.51] gi|88185980|gb|EAQ93448.1| CHGG_01683 [Chaetomium globosum CBS 148.51]
  misc_feature (1)..(383): NCBI GI: 85111796 Blast Desc: NCU02114 [Neurospora crassa OR74A] gi|28925874|gb|EAA34872.1| NCU02114 [Neurospora crassa OR74A]
  misc_feature (3)..(370): NCBI GI: 171695032 Blast Desc: protein product [Podospora anserina] gi|170947758|emb|CAP59921.1| protein product [Podospora anserina]
  misc_feature (1)..(369): NCBI GI: 46108118 Blast Desc: FG00941.1 [Gibberella zeae PH-1]
  misc_feature (9)..(369): NCBI GI: 39943030 Blast Desc: MGG_03595 [Magnaporthe grisea 70-15] gi|145009835|gb|EDJ94491.1| MGG_03595 [Magnaporthe grisea 70-15]
  misc_feature (1)..(370): NCBI GI: 256735391 Blast Desc: NECHADRAFT_90283 [Nectria haematococca mpVI 77-13-4]
  misc_feature (1)..(383): NCBI GI: 256725207 Blast Desc: NECHADRAFT_98124 [Nectria haematococca mpVI 77-13-4]
  misc_feature (2)..(388): NCBI GI: 240276570 Blast Desc: G1/S-specific cyclin CLN1 [Ajellomyces capsulatus H143]
  misc_feature (2)..(379): NCBI GI: 225556314 Blast Desc: G1/S-specific cyclin CLN1 [Ajellomyces capsulatus G186AR]
  misc_feature (1)..(369): NCBI GI: 156057233 Blast Desc: SS1G_04347 [Sclerotinia sclerotiorum 1980] gi|154702133|gb|EDO01872.1| SS1G_04347 [Sclerotinia sclerotiorum 1980]
MAYSTSNDYFVESDEPRRIDMKNAAKMLARNRQEMIANDLSRLAGDEYLEDIMQHLRHMEDETLPDANLIDMQREIQWFMRPYLIDFLIEAHAAFALLPETLFLTVNLLDRYCSKRVVYKQHYQLVGCAALLIAAKYGDKKDRVPQINELNNMCCGLYDSGMFTQMEMHVLNTLEWNIGHPTVDFFTQLIAAEEGDDREVENMAAYICEIALYHRDFVSTKPSIMARASLALSRAILGRPEVNDGEWDHVENLTVLTLSQHLHQPSVTLSRKYSSAQTCRVSLTLAEFLAQQAAISRRAQQAPPSPPAEPMMPSSHASIYNTPQKGCGAMPGAADGYMTPPITPDGMCFSGNDPMNKYVPPRCPVTPTPQVPSMSGYSQRQQHPYATYTYDEYAHSMVA

SEQ ID NO: 3796 - DNA, 3241 bp, Muscodor strobelii
  misc_feature: SGI EST ID NO. CUFF.9995.0
  misc_feature: Variant of the nucleotide sequence at SEQ ID NO 3794
ttcatctcctgcatcctcctccaactcgaggccctctctcctcctctctccttcctcacctccctatcctcctccatccgaaccattcattcccttctcctcgacacatctccctacgatagtctgcctgatccaaccacggagagggaaggaggagagataatcgtcagggccgccgctgcagtcgaacttaggaatagaagggtcgagtcattagagtgcatgtgctgtatctctgtatctaccttaggactaggacttggacttggtattaaagccaaagccattcgagatcttagcgattgaagtcgagcaagacaataaagcagttgcaccccccgtaattgctttattagacaacaaactccttctttcccctcgagagcccggcctgtcccacgttggtccctcctgctggcgttgcattcctcgccattaattcatctctcctgacgaggaatctacggtccaccacattccctccctttgctcggctcctccccatcacgcctgcctcccactgtccaacccccaccccttggccagcttccgcaccctcggtcgataccttccgcccattcctcgggcgataccccttatccgccgacgagcccactgcgtactgcctcaccctcgtgtgccagcagtacctggaatctgagcctggctatcgcaatcaagtgcatagactcctggtacatcagtttcagactctattccacatagagtctgacgctgattggagcacgccgctcgaaagccctgcatgagcccagtcacttcgacgacaacacttttatagaagcgttgcttgtgtggagtggaatgccgaacaggtcccttgtgttttaacggcatccttcgtacccaagcacgcttcacactgttgagcagatacaaattgcctcgtgggactcgttaactcgctgttcccaccgtgttctcaggaagtgccaatttcctgacgattagtcgtggcgacctatccgctcaaactctctcaaaaagggtcttctccccgacccaggtcatctcgataactaaccatatcgtggcgaccattccaactttgtcattcccttttttcactctgagaatattattcaccacgctctttaataccctaatgttgatacggcctgtctagtcgagataattcactcttttacactcaactacgacgaccacttaataacaatcaagcaacaagattcctggagaacctgaccgtcactctttcacaaacaccacaaccaccaatttcagatcaactcttccgcaacactcagatcagtcaccatggcgtactctacctcaaatgactatttcgtcgagtccgatgagccaagacggatcgacatgaagaacgccgccaaaatgcttgcacgcaatcggcaggaaatgatagccaacgacctgtcgcgtctcgccggcgatgagtatctcgaggacatcatgcaacatttgcgacacatggaggacgaaacactacccgacgctaatctcatcgacatgcagagagagatccagtggtttatgagaccctacctaatcgacttcctcatcgaggcacacgctgccttcgcgttgcttcctgagacgctgtttctcactgtcaacctcctggaccgttactgctcaaaacgtgtcgtctacaagcagcattatcaacttgttgggtgcgcggccttgttgatcgccgccaagtacggcgacaagaaggatcgggtcccgcaaatcaacgaactgaacaatatgtgctgtggactctatgactcgggcatgttcacacagatggaaatgcatgttctcaacacattggaatggaatatcggccaccccactgtcgacttttttactcagctcatcgctgccgaggagggagacgatcgtgaggtggagaacatggccgcatacatttgcgagattgccctatatcaccgtgacttcgtatccacaaagccgtcgatcatggcacgagcctccctcgccctgtctcgagcgattctcggacgtcccgaggtaaatgacggagaatgggaccatgtcgaaaaccttacggttttgacgttgtcgcaacatctgcaccagccctcggtcacactgtcacggaaatattcttctgcgcagacctgccgagtttcccttactcttgccgagttcctcgcacagcaagctgccatctcacggagagcgcaacaggccccaccatcccctcccgcggagcctatgatgccatccagccacgcctccatctataatacccctcagaagggctgcggtgctatgccaggcgccgctgatggctacatgacgcctcctatcacgcctgatggcatgtgcttctcaggcaacgatcctatgaacaagtatgttccacctcggtgtcccgttacccccacaccacaagttccgagcatgtcagggtattcacaacgacaacaacacccttacgccacatacacgtatgatgaatacgcacattcgatggtagcttaggtatccgaatcgttaatgatgcggtttcatctcgacaccacacgctgatttcatccgccctcgtgggcatcactgtcacaccctttcgagtcgtccgcatgatctgtaccaatggaagaagaaaaaagattgctgcataaaattgacggttgggaaatctccatggcattagcgacttgattcgagttcatttccttttttcagtcatacccattgcgcgctttgctttgcacgaaccaaatgaacgattgtcacaccaaaaaaaatctgatttcaccccttgcgattccggcgtctccccacgatgtcattccaaatgcgcccaagattgcaggataaaaagaaggagaagcgcgcgcaagcaaacgaataagtgcaggagcagtaaaacaggaggcgatgtggccaagcaaaccgggctccccacgagacgatggtctacggattgcggaggatttatttttgagggccgaaaaagcatatgcacacaagccacggtgcaacaccgcggcagctgtactagctgtttaccacccgagtcgtccaacctttggacgggcgggattttctgcgggtgcattacctgcgctctaccacggtcataggaagttacaatgaccaatccctcgggagggagaataattaattcttagtagaggcactctactagaagcaatgctctactggtagtagtgctgctcaccacacgtaaatgcaacagacaaaaattttccaccctcaa

SEQ ID NO: 3797 - DNA, 816 bp, Muscodor strobelii
  misc_feature: SGI cDNA ID NO. 560935
  misc_feature: Reduced expression when VOC is produced
  misc_feature: Encodes the peptide sequence at SEQ ID NO 3798
atggctgaccgtggtggtgctggtgctggtgctggtgccgagcgcggcggtgcccgtggcggctttggatcgcgcggcgatcgcggcggcgagcgaggacgaggacgaggccgcggccgtggcagacgcggcggcaacaaggacagcgagaaggagtggatgcccgtcaccaagctgggccgcctcgtgaaggccggcaagatcaagagcatggaggagatctacctgcactctctgcccatcaaggagtaccagatcgtcgatttcttcctacctaagctcaaggacgaggtcatgaagatcaagcccgtccagaagcagacccgtgccggtcagcgcacccgtttcaaggccatcgtcatcattggcgactcggagggccacgtcggtctcggcatcaagacctccaaggaagtcgccactgccatccgtgccgccatcatcatcgccaagctctccgtcatccccgtccgccgtggctactggggcaccaacctcggtactccccactccctgcccgtcaaggagagtggcaagtgcggttccgtcaccgtcagacttatccctgccccccgtggtacccagatcgtcgcctcccccgccgtcaagcgtctcctccagctcgccggtatcgaggacgcctacacctcgtcttccggctcgaccaagacgctcgagaacacgctcaaggccaccttcgccgccatctccaactgctacggcttcctcaccccgaacctgtggaaggagaccaagctcatccgctccccgctcgaggagtatgccgacacgctccgcgagggcaagagatactag

SEQ ID NO: 3798 - protein, 271 aa, Muscodor strobelii
  misc_feature: SGI Peptide ID NO. 560935
  misc_feature (93)..(159): Pfam Id: PF00333 Pfam Desc: Ribosomal protein S5, N-terminal domain
  misc_feature (177)..(249): Pfam Id: PF03719 Pfam Desc: Ribosomal protein S5, C-terminal domain
  misc_feature (47)..(271): NCBI GI: 39958032 Blast Desc: conserved [Magnaporthe grisea 70-15] gi|59803002|gb|AAX07689.1| 40S ribosomal protein S2-like protein [Magnaporthe grisea] gi|145013340|gb|EDJ97981.1| conserved grisea
  misc_feature (1)..(271): NCBI GI: 85094053 Blast Desc: 40S ribosomal protein S2 [Neurospora crassa OR74A] gi|28921265|gb|EAA30574.1| 40S ribosomal protein S2 [Neurospora crassa OR74A]
  misc_feature (47)..(271): NCBI GI: 121709371 Blast Desc: ribosomal protein S5 [Aspergillus clavatus NRRL 1] gi|119400550|gb|EAW10975.1| ribosomal protein S5 [Aspergillus clavatus NRRL 1]
  misc_feature (1)..(271): NCBI GI: 171680833 Blast Desc: protein product [Podospora anserina] gi|27764310|emb|CAD60590.1| protein product [Podospora anserina] gi|170940044|emb|CAP65271.1| protein product [Podospora anserina]
  misc_feature (47)..(271): NCBI GI: 145245948 Blast Desc: An12g01350 [Aspergillus niger] gi|134079935|emb|CAK48419.1| protein product [Aspergillus niger]
  misc_feature (47)..(271): NCBI GI: 169785585 Blast Desc: [Aspergillus oryzae RIB40] gi|238506609|ref|XP_002384506.1| ribosomal protein S5 [Aspergillus flavus NRRL3357] gi|83776001|dbj|BAE66120.1| protein
  misc_feature (47)..(271): NCBI GI: 116200626 Blast Desc: CHGG_10858 [Chaetomium globosum CBS 148.51] gi|88175572|gb|EAQ83040.1| CHGG_10858 [Chaetomium globosum CBS 148.51]
  misc_feature (47)..(271): NCBI GI: 255955253 Blast Desc: Pc21g13620 [Penicillium chrysogenum Wisconsin 54-1255] gi|211590090|emb|CAP96259.1| Pc21g13620 [Penicillium chrysogenum Wisconsin 54-1255]
  misc_feature (11)..(271): NCBI GI: 154271999 Blast Desc: ribosomal protein S5 [Ajellomyces capsulatus NAm1] gi|150408839|gb|EDN04295.1| ribosomal protein S5 [Ajellomyces capsulatus NAm1] gi|225556379|gb|EEH04668.1| ribosomal protein S5
  misc_feature (47)..(271): NCBI GI: 256730593 Blast Desc: [Nectria haematococca mpVI 77-13-4]
  misc_feature: Useful for introducing or modulating the production of volatile compounds
MADRGGAGAGAGAERGGARGGFGSRGDRGGERGRGRGRGRGRRGGNKDSEKEWMPVTKLGRLVKAGKIKSMEEIYLHSLPIKEYQIVDFFLPKLKDEVMKIKPVQKQTRAGQRTRFKAIVIIGDSEGHVGLGIKTSKEVATAIRAAIIIAKLSVIPVRRGYWGTNLGTPHSLPVKESGKCGSVTVRLIPAPRGTQIVASPAVKRLLQLAGIEDAYTSSSGSTKTLENTLKATFAAISNCYGFLTPNLWKETKLIRSPLEEYADTLREGKRY

SEQ ID NO: 3799 - DNA, 1411 bp, Muscodor strobelii
  misc_feature: SGI EST ID NO. CUFF.9626.0
  misc_feature: Variant of the nucleotide sequence at SEQ ID NO 3797
cggctggacccgcctcgcacacaacccgagaaaccaaaaatccaagccccaaaattatacagcccactttgcagcgaaaattccccccatcgcccaaagtgcaggtgtctatcggccactaacccacagctcacactctcgcccgcgacaaccacccaaccatccatccgatccgaacggcacgaacaacttcagacacataaaatccgacaacatggctgaccgtggtggtgctggtgctggtgctggtgccgagcgcggcggtgcccgtggcggctttggatcgcgcggcgatcgcggcggcgagcgaggacgaggacgaggccgcggccgtggcagacgcggcggcaacaaggacagcgagaaggagtggatgcccgtcaccaagctgggccgcctcgtgaaggccggcaagatcaagagcatggaggagatctacctgcactctctgcccatcaaggagtaccagatcgtcgatttcttcctacctaagctcaaggacgaggtcatgaagatcaagcccgtccagaagcagacccgtgccggtcagcgcacccgtttcaaggccatcgtcatcattggcgactcggagggccacgtcggtctcggcatcaagacctccaaggaagtcgccactgccatccgtgccgccatcatcatcgccaagctctccgtcatccccgtccgccgtggctactggggcaccaacctcggtactccccactccctgcccgtcaaggagagtggcaagtgcggttccgtcaccgtcagacttatccctgccccccgtggtacccagatcgtcgcctcccccgccgtcaagcgtctcctccagctcgccggtatcgaggacgcctacacctcgtcttccggctcgaccaagacgctcgagaacacgctcaaggccaccttcgccgccatctccaactgctacggcttcctcaccccgaacctgtggaaggagaccaagctcatccgctccccgctcgaggagtatgccgacacgctccgcgagggcaagagatactagagggagcgtttgtttttgggcactcggcgcggtttctcttttcgggctttgttaaattgcattgatgccaggtgggtaggcatcaggccaaggtagcaaaaaatgacaactactcttatgatctgacgatttcagacattgatgacaccctctgcccgcgttacgatgattgtgtatgtgcccctgaataacgcataataggacacaggtctgcagcagacagttgtcacgaattggcaaatggtctatggtttatgtaggaaatgaaggatattcatccaagcttcagatatagtgttttgcggcgagttgactgtgaccacgatcattgccttcccgagcttgaacggtgatttcccatggccatgatgtctacccatc

SEQ ID NO: 3800 - DNA, 2166 bp, Muscodor strobelii
  misc_feature: SGI cDNA ID NO. 560936
  misc_feature: Reduced expression when VOC is produced
  misc_feature: Encodes the peptide sequence at SEQ ID NO 3801
atgctgtttcgaatatcagcttctcgctcctcgcaccagtcagaatatgcgtccgcttttatcttgctcctcctcggctcttcagtcagcggaagcgtgtctgagagtttcccgcccaagttcctccatactcctagctctcttcccgaatcacgaccaccgacattcagtgaagcagctgtgactagtctgagaccaatggaacaagagagtcgtcttgtgctggacgatggcgttccagcggccttcaagcacagaacgtatcatagccagaccgctgtcgagacatatgttacggtcaattccaacggcccggttcccacaaacacacaaggccgtgacatgattgctgctacagagaccgcagtaggtggaaacggagctaccacaatctatgagtacacgacgttttacgagcagtgctgctcaactgcacttgccccagccgtcaccgtaacatcaactgtgacaattcaagagccctgcgttcctcctgtttgtcccccgcagcctcaaccaacctgcaattgtcctatgataccggcttgtcctccgcagtctcagcagccctgtgtttgtccgggttgtgccccacagtcctgtcctgttgttgattccccgtcaaccactttgtgtgagagctctacggacacaacggtcacgatcacgatgccattcactgtgagcccagcaccagctagccccacaacttggtctgtcacgtctgtctcgtctgtcacgactcatccacggccaccacccgcggccccaacaccgtctatcccagttcaggcggctagctggggatactgcggttgttgggccgatgatctcttggttccggccctcggcacatctgtaaccggtcttggtgtcgtgacaaacgaaatatgtgttaagcactgcataggccaaggtttcctcatggctggcacagaaaacggcgtagattgctattgcggaaatttcctgaacggaactcaactcttggacgacatatactgctccgtaccatgtctgggaaacttcagagaagcatgtggtggtctgggaagtctcacctgctggagtcctgacggtgaagcccacggatgggcaagtgttggacctcaacccaaagcacctacgattccaccaccattggctgcatcgatcaatactggtggtgtcgcactcagcatcgtgactacgcctgtgattatttggccgcccaccgatgtcgaccctacttcgtgggtgcgctcgattgtgagtacgtttagtcaaccgttgggatctattcctccgcacacaaccattttggagccgtcgacaccaccgaatttgccctcgggtactggtgcgagccttacagcccctggtcacggatctggctcgactacatcgagtgcaacgtctagtgaaacatctagtgtgcctacaacggacagctcgacgcctccgacaactactccaaatgcgagcagttcaatcagctcaataccgtcgacaactagcccaagtgtaaccagtccgagcagctcggcatcgccagcgatcactccaagtgagagcacaccgagcacttcctcggtcccaacaacatctcctggtcgtggtggcagcggagttgcaccaggtcatggtgatccttcatcaacacagccaggaagcagctcaggcccgccgatcacgacgccaaccagtaacagcaatccaccaggacagacaccgggttccataccacctggaggtggaagcactcccagtccaacactcccttcgagcactctgccgccgacaagtctaccacctacaccaccgtccgacacttccaacgagctcaataccaacatcaagtttaccatcctcgccacctccgaatggtggctcaggtgcagctccaggacatggttctccatcaacaagtccatcagcgcctccgagtttgccattggcctaatgtgggaccgtcatgtcctcccggcagtacttgtactggaccatttggaggaagcggcgctgcgcctggtcacggacaaccctcgagctctataccaagcagcataccaatacaccgagctccgtgcccgtgccgtcatcgactccaagtcttccaaatcccggaacgacacctgcgacggcgccaccttcaccgacgagcacgacttcaatctcgacaactag

SEQ ID NO: 3801 - protein, 721 aa, Muscodor strobelii
  misc_feature: SGI Peptide ID NO. 560936
  misc_feature (270)..(349): Pfam Id: PF01822 Pfam Desc: WSC domain
  misc_feature (270)..(404): NCBI GI: 39958019 Blast Desc: MGG_09221 [Magnaporthe grisea 70-15] gi|145013341|gb|EDJ97982.1| MGG_09221 [Magnaporthe grisea 70-15]
  misc_feature (236)..(361): NCBI GI: 116207386 Blast Desc: CHGG_02986 [Chaetomium globosum CBS 148.51] gi|88183583|gb|EAQ91051.1| CHGG_02986 [Chaetomium globosum CBS 148.51]
  misc_feature (236)..(362): NCBI GI: 171685980 Blast Desc: protein product [Podospora anserina] gi|170942951|emb|CAP68604.1| protein product [Podospora anserina]
  misc_feature (253)..(359): NCBI GI: 39941558 Blast Desc: MGG_05690 [Magnaporthe grisea 70-15] gi|145022383|gb|EDK06403.1| MGG_05690 [Magnaporthe grisea 70-15]
  misc_feature (256)..(362): NCBI GI: 169863293 Blast Desc: CC1G_04712 [Coprinopsis cinerea okayama7#130] gi|116500561|gb|EAU83456.1| CC1G_04712 [Coprinopsis cinerea okayama7#130]
  misc_feature (254)..(357): NCBI GI: 46137839 Blast Desc: FG10435.1 [Gibberella zeae PH-1]
  misc_feature (268)..(363): NCBI GI: 169863293 Blast Desc: CC1G_04712 [Coprinopsis cinerea okayama7#130] gi|116500561|gb|EAU83456.1| CC1G_04712 [Coprinopsis cinerea okayama7#130]
  misc_feature (237)..(351): NCBI GI: 46137839 Blast Desc: FG10435.1 [Gibberella zeae PH-1]
  misc_feature: Useful for introducing or modulating the production of volatile compounds
MLFRISASRSSHQSEYASAFILLLLGSSVSGSVSESFPPKFLHTPSSLPESRPPTFSEAAVTSLRPMEQESRLVLDDGVPAAFKHRTYHSQTAVETYVTVNSNGPVPTNTQGRDMIAATETAVGGNGATTIYEYTTFYEQCCSTALAPAVTVTSTVTIQEPCVPPVCPPQPQPTCNCPMIPACPPQSQQPCVCPGCAPQSCPVVDSPSTTLCESSTDTTVTITMPFTVSPAPASPTTWSVTSVSSVTTHPRPPPAAPTPSIPVQAASWGYCGCWADDLLVPALGTSVTGLGVVTNEICVKHCIGQGFLMAGTENGVDCYCGNFLNGTQLLDDIYCSVPCLGNFREACGGLGSLTCWSPDGEAHGWASVGPQPKAPTIPPPLAASINTGGVALSIVTTPVIIWPPTDVDPTSWVRSIVSTFSQPLGSIPPHTTILEPSTPPNLPSGTGASLTAPGHGSGSTTSSATSSETSSVPTTDSSTPPTTTPNASSSISSIPSTTSPSVTSPSSSASPAITPSESTPSTSSVPTTSPGRGGSGVAPGHGDPSSTQPGSSSGPPITTPTSNSNPPGQTPGSIPPGGGSTPSPTLPSSTLPPTSLPPTPPSDTSNELNTNIKFTILATSEWWLRCSSRTWFSINKSISASEFAIGLMWDRHVLPAVLVLDHLEEAALRLVTDNPRALYQAAYQYTELRARAVIDSKSSKSRNDTCDGATFTDEHDFNLDN

SEQ ID NO: 3802 - DNA, 3141 bp, Muscodor strobelii
  misc_feature: SGI EST ID NO. CUFF.9599.0
  misc_feature: Variant of the nucleotide sequence at SEQ ID NO 3800
gctaccacaatctatgagtacacgacgttttacgagcagtgctgctcaactgcacttgccccagccgtcaccgtaacatcaactgtgacaattcaagagccctgcgttcctcctgtttgtcccccgcagcctcaaccaacctgcaattgtcctatgataccggcttgtcctccgcagtctcagcagccctgtgtttgtccgggttgtgccccacagtcctgtcctgttgttgattccccgtcaaccactttgtgtgagagctctacggacacaacggtcacgatcacgatgccattcactgtgagcccagcaccagctagccccacaacttggtctgtcacgtctgtctcgtctgtcacgactcatccacggccaccacccgcggccccaacaccgtctatcccagttcaggcggctagctggggatactgcggttgttgggccgatgatctcttggttccggccctcggcacatctgtaaccggtcttggtgtcgtgacaaacgaaatatgtgttaagcactgcataggccaaggtttcctcatggctggcacagaaaacggcgtagattgctattgcggaaatttcctgaacggaactcaactcttggacgacatatactgctccgtaccatgtctgggaaacttcagagaagcatgtggtggtctgggaagtctcacctgctggagtcctgacggtgaagcccacggatgggcaagtgttggacctcaacccaaagcacctacgattccaccaccattggctgcatcgatcaatactggtggtgtcgcactcagcatcgtgactacgcctgtgattatttggccgcccaccgatgtcgaccctacttcgtgggtgcgctcgattgtgagtacgtttagtcaaccgttgggatctattcctccgcacacaaccattttggagccgtcgacaccaccgaatttgccctcgggtactggtgcgagccttacagcccctggtcacggatctggctcgactacatcgagtgcaacgtctagtgaaacatctagtgtgcctacaacggacagctcgacgcctccgacaactactccaaatgcgagcagttcaatcagctcaataccgtcgacaactagcccaagtgtaaccagtccgagcagctcggcatcgccagcgatcactccaagtgagagcacaccgagcacttcctcggtcccaacaacatctcctggtcgtggtggcagcggagttgcaccaggtcatggtgatccttcatcaacacagccaggaagcagctcaggcccgccgatcacgacgccaaccagtaacagcaatccaccaggacagacaccgggttccataccacctggaggtggaagcactcccagtccaacactcccttcgagcactctgccgccgacaagtctaccacctacaccaccggtaggcgggacaaccccaagtcctgcacttccaacgacatctttgccatccaccccaccaggaggtggcactacccctagtccgacacttccaacgagctcaataccaacatcaagtttaccatcctcgccacctccgaatggtggctcaggtgcagctccaggacatggttctccatcaacaagtccatcagcgcctccgagtttgccagtatgtacaccagggtcaaacgatccggcgtgcatacctcccacgagcacaccctttcttccaagtactccaagtaccgctagttggcctaatgtgggaccgtcatgtcctcccggcagtacttgtactggaccatttggaggaagcggcgctgcgcctggtcacggacaaccctcgagctctataccaagcagcataccaagtaatatcccgcctgctccgagcactacaccgggcagtttgcctcctccaccatctagcactccagtgtctcctccaccggagaacacgccaactcagccgctcccgagtggttttactcctccacctctgccgtcgagtagcccgccaaacagtctccctcctgggtcgccatcaagcacctttccgcctccaccgagcagtgttccaaacagctttcctccagggccgagcagtacgccaaacaacataccttctggtttttgcacaccaggctccactgatccactttgcacatcgccggtcgctggcagcggcgctgctccaggtcatggacaacctggcagctcgacaagcttcccaagtatgccccttagtacaccgagctccgtgcccgtgccgtcatcgactccaagtcttccaaatcccggaacgacacctgcgacggcgccaccttcaccgacgagcacgacttcaatctcgacaactagtagtacgtctatcttgacgactagcactgcatcgtcaactacttcaccgaacggtggcaatagagtggctccgggacagggtagcacgacgcctagcacaacttcaagcacgactcccatcagtaatcctagcatcactccaggtacacctacggttccagtacccacaacaacccctgtcatgggtcccagcagtcccataaacagtttcccaccgggtcaaccaacgacgattccaaccccgcctgggacttcttactcgtatccttccggtgtagttccctatgggcccttaacaacgctggcttctaggattgtgtggcagagctttgatgaggagtctagtcttctgcactcggatttgaaaacggtcaaggacagggcagggtataagtatagcaacgataaagtggggacgctgggaatcagcgatagtgcgtctggcatggtgaggaatagagctggtgggccggagagaaaggatcccagtacgacggcgacgaccttttcgaaaatttttaggccagctgtttggaattgaaggggaagtatagaaagagagaagatgggaagaataggggttaggggcctaggaagttgacaggtggcaatatgatcacgatttatgaggctggagatgagttatacatacacctcagacgggacggaaaaaaggatagatgaagtccagagaggaagagccgtcttgggagacaagtttttggaaggcaagattacgcggagtagatacctatcattttggaagctgggtttagtccgctagggtatttacattctctcaaattagaagtttgac

SEQ ID NO: 3803 - DNA, 1215 bp, Muscodor strobelii
  misc_feature: SGI cDNA ID NO. 560937
  misc_feature: Encodes the peptide sequence at SEQ ID NO 3804
atggctcgtcgtccgaaactcaccaaggcagaaaaggctgccctcaggccggaacaaaggcagctgggaattgacctgaagcctcgtactgatcgcttgcagggttatccacttcagaatggctattaccgctgcacactcccgtgtcgtggacgtcctgtctgtggcgaggcaatcacggacaagatgggcagtcgtggtagtcactataccaggaagcataaggactacatggaggagcttgcacagcagcagggccagcagaaccccgttacgggccaattgtctctggccggacagaatactgtccattcacagtctgtagcttctacccagccaagcatgctccgtgcccaagatgaggacgaggacgatgcccctccttcggcgccagcaatttcggccagaagtctccagcgccaggagcctcagtacctgcagcagtacctttcttcaagacagaaccatgcgatgggtcgaatgccacgcatgggacagagtaccgtccctccgcagcctgcagcttttgcccagccaagcatgctccatgctcaagcacacactctatcacagccggcggcttacagccagcagcagcaacaccaatcatatcagacccaacctccgaatccgaaccacacgggagatctcatgcagcgccacgggaaccaattcgccaacatgcacaactctggtattgcggcgaacagaagccaggtagggtgggatgttatcgagaacggtactcaagtccgttcagcccaatacccggcaccgggacggcagatccgtgggccccagccccggctctcaggccagacccccgtgccggaggctcccggacaggctccggctatgcctcagccccgagttcctttcccgcattacatgccccctgcccactctgagccgttccagccgcatccggcgccctctggcgtgcccatgaggcagcctcctgactatcctcccagccgggagcaacgacatccgcagcatttaatcccgccatctaatggacagaatgcacagcagttagccctgcagtctccctccaattcacagcccatgcagatggcacaggcacccaccggactgtcgagcttcgacgtgcctgatgagccgttgacagaggagcctttgaccgaggaggacagggagattttcgagtcatttgtgcgcacacacggtggtgatgacgcatggatacaatga

SEQ ID NO: 3804 - protein, 404 aa, Muscodor strobelii
  misc_feature: SGI Peptide ID NO. 560937
MARRPKLTKAEKAALRPEQRQLGIDLKPRTDRLQGYPLQNGYYRCTLPCRGRPVCGEAITDKMGSRGSHYTRKHKDYMEELAQQQGQQNPVTGQLSLAGQNTVHSQSVASTQPSMLRAQDEDEDDAPPSAPAISARSLQRQEPQYLQQYLSSRQNHAMGRMPRMGQSTVPPQPAAFAQPSMLHAQAHTLSQPAAYSQQQQHQSYQTQPPNPNHTGDLMQRHGNQFANMHNSGIAANRSQVGWDVIENGTQVRSAQYPAPGRQIRGPQPRLSGQTPVPEAPGQAPAMPQPRVPFPHYMPPAHSEPFQPHPAPSGVPMRQPPDYPPSREQRHPQHLIPPSNGQNAQQLALQSPSNSQPMQMAQAPTGLSSFDVPDEPLTEEPLTEEDREIFESFVRTHGGDDAWIQ

SEQ ID NO: 3805 - DNA, 285 bp, Muscodor strobelii
  misc_feature: SGI cDNA ID NO. 560938
  misc_feature: Encodes the peptide sequence at SEQ ID NO 3806
atgggcagtggaaccggtgccgagacactcgcgaacagcctaggcgcagccgatggctggaacacccaaagcagcgcagacttctacaaagactatcccgcacagcgaaaagcgaacctcgctccatatagagactatgcggagcgcacgggaatgtataaagaccaagagggctcttccaagttgaagttttggaagaatttgggtgcgtataaggaggggaagagcgaagagaagggagcaaaagaggaagacaaagacgaacagaaatcatccgcagcctga

SEQ ID NO: 3806 - protein, 94 aa, Muscodor strobelii
  misc_feature: SGI Peptide ID NO. 560938
MGSGTGAETLANSLGAADGWNTQSSADFYKDYPAQRKANLAPYRDYAERTGMYKDQEGSSKLKFWKNLGAYKEGKSEEKGAKEEDKDEQKSSAA

SEQ ID NO: 3807 - DNA, 558 bp, Muscodor strobelii
  misc_feature: SGI EST ID NO. CUFF.9629.0
  misc_feature: Variant of the nucleotide sequence at SEQ ID NO 3805
attttctagatcaagtcatcaagaattgaaacacttaaaattagagcagaaacatattacaatcaacatcaccaaaacatcccaatcaaacaacaacggacaaaaaatgggcagtggaaccggtgccgagacactcgcgaacagcctaggcgcagccgatggctggaacacccaaagcagcgcagacttctacaaagactatcccgcacagcgaaaagcgaacctcgctccatatagagactatgcggagcgcacgggaatgtataaagaccaagagggctcttccaagttgaagttttggaagaatttgggtgcgtataaggaggggaagagcgaagagaagggagcaaaagaggaagacaaagacgaacagaaatcatccgcagcctgacgtggtcatggttatttgatgggcgtcgatgtttcttagtactacagtatggagtatggatggtagaccatctgatactacaatatacccgaaattctaccaacagccttgtaaaatacagcgtctgcaagcttaggtacctctcacggtgaatacttttattaaag

SEQ ID NO: 3808 - DNA, 1038 bp, Muscodor strobelii
  misc_feature: SGI cDNA ID NO. 560939
  misc_feature: Encodes the peptide sequence at SEQ ID NO 3809
atggtcaccatcgccatccttcgctccacgagagctgcagtcactcgccagtcctttcgcaagttccagaagttccagaagataggcatcatggaatcccgtcgcgccctctcctcctatctcgttactcccaaggagctgaacgaagctctaaagaagagcccaccctctcccatcagcaccgatccccgtgtcatcccgctgtgtgccacctggttcatgcccaacgactcccgcaccggcatcaacagcttcaacgagaagcgcatccccaaggctcgcttcttcgacctcgacaaagtcaaagacaagcactctccttacccgcacatgctcccgacagccaagcagtttgcccaggccatgagcgagttgggcatccgtaaggacgacaccgttgttgtctacgactcccacgaggttggtatcttcagcgccccccgcgttggctggactttgcgtgtcttcggccaccccaaggtccacattctcaacaacttcaagctctgggtcgaagagggcttcccggtcgagactggcaacttttccagcatcgagtgcaacccctatccgattccccagcttgacgagtccaaggtggcgagctacgaggaggttcgccaagttgctgaggaccacaacaaggagggtgccgagggcattcagatcttggatgctcgaccccacgcacgattcactggcgaagccccagagcccagggagggactctcctcgggtcacatgcctggcgcaattagcattgccttccctgaggtgttggaccccaccaccaagacctttctccccaaggatcagctacgaaagctattcgaatcgaaaggtgttgaccccaccaggcctatcatctcgtcttgtgggactggtgtgactgcagttgtaatcgacacggctctcgaggaggccggttatggctctgccgataagcgccgtgtctacgacggtagttggactgagtgggcccagcgagtcgagccttctgataacctcattatcaaagagaaagaaactgaggtgtga

SEQ ID NO: 3809 - protein, 345 aa, Muscodor strobelii
  misc_feature: SGI Peptide ID NO. 560939
  misc_feature (202)..(329): Pfam Id: PF00581 Pfam Desc: Rhodanese-like domain
  misc_feature (15)..(173): Pfam Id: PF00581 Pfam Desc: Rhodanese-like domain
  misc_feature (89)..(173): Pfam Id: PF00581 Pfam Desc: Rhodanese-like domain
  misc_feature (1)..(339): NCBI GI: 46109252 Blast Desc: FG01508.1 [Gibberella zeae PH-1]
  misc_feature (1)..(341): NCBI GI: 261358804 Blast Desc: thiosulfate sulfurtransferase [Verticillium albo-atrum VaMs.102]
  misc_feature (1)..(337): NCBI GI: 171680863 Blast Desc: protein product [Podospora anserina] gi|27764326|emb|CAD60606.1| protein product [Podospora anserina] gi|170940059|emb|CAP65286.1| protein product [Podospora anserina]
  misc_feature (35)..(339): NCBI GI: 85092487 Blast Desc: NCU06017 [Neurospora crassa OR74A] gi|28920831|gb|EAA30182.1| NCU06017 [Neurospora crassa OR74A]
  misc_feature (25)..(341): NCBI GI: 156035631 Blast Desc: SS1G_13019 [Sclerotinia sclerotiorum 1980] gi|154698424|gb|EDN98162.1| SS1G_13019 [Sclerotinia sclerotiorum 1980]
  misc_feature (34)..(342): NCBI GI: 39944152 Blast Desc: MGG_04087 [Magnaporthe grisea 70-15] gi|145014813|gb|EDJ99381.1| MGG_04087 [Magnaporthe grisea 70-15]
  misc_feature (36)..(341): NCBI GI: 255955283 Blast Desc: Pc21g13770 [Penicillium chrysogenum Wisconsin 54-1255] gi|211590105|emb|CAP96274.1| Pc21g13770 [Penicillium chrysogenum Wisconsin 54-1255]
  misc_feature (36)..(339): NCBI GI: 259485652 Blast Desc: TPA: thiosulfate sulfurtransferase, (AFU_orthologue; AFUA_7G01370) [Aspergillus nidulans FGSC A4]
  misc_feature (36)..(339): NCBI GI: 115402381 Blast Desc: conserved [Aspergillus terreus NIH2624] gi|114189113|gb|EAU30813.1| conserved [Aspergillus terreus NIH2624]
  misc_feature (36)..(339): NCBI GI: 169785565 Blast Desc: [Aspergillus oryzae RIB40] gi|238506585|ref|XP_002384494.1| thiosulfate sulfurtransferase, [Aspergillus flavus NRRL3357] gi|83775991|dbj|BAE66110.1| protein
  misc_feature (64)..(332): SWISSPROT Homolog: EC 2.8.1.1 Thiosulfate sulfurtransferase
MVTIAILRSTRAAVTRQSFRKFQKFQKIGIMESRRALSSYLVTPKELNEALKKSPPSPISTDPRVIPLCATWFMPNDSRTGINSFNEKRIPKARFFDLDKVKDKHSPYPHMLPTAKQFAQAMSELGIRKDDTVVVYDSHEVGIFSAPRVGWTLRVFGHPKVHILNNFKLWVEEGFPVETGNFSSIECNPYPIPQLDESKVASYEEVRQVAEDHNKEGAEGIQILDARPHARFTGEAPEPREGLSSGHMPGAISIAFPEVLDPTTKTFLPKDQLRKLFESKGVDPTRPIISSCGTGVTAVVIDTALEEAGYGSADKRRVYDGSWTEWAQRVEPSDNLIIKEKETEV

SEQ ID NO: 3810 - DNA, 2276 bp, Muscodor strobelii
  misc_feature: SGI EST ID NO. CUFF.9633.0
  misc_feature: Variant of the nucleotide sequence at SEQ ID NO 3808
cacaacagctcgtccgaaatttggtatgtttggcgtaccaaataagctacacttcagccaacgaatgataagaggaagtgaaaagtcgtcacttccgtcatcatctctgcgtcatcccgctgcccgcgtttgcgtctctttaactcccaactgcctgtatgattccgaaacgatagctccaaattgactagcgagagagcaacgttagtggaaagtcaattgatgtagagctccccgcaccgttagccatcgttttggtgctgattgatcgttcccgtttactcccggctcggcatccccagctacaatcaccctttcctgtatatcattctgaatatcttcatttctcctcactttcaattgtctattaatatttgcatccttaaaagggctcggtgaggtcatcacaagcccatcgggacctcatccacccattcgacccttggacagcagatagctgtatgattaggtagtggccggtgtgtttgcggatctgcaccatccgccgaacaacggagctgtgcagcagcagcagcagcagcagcagcaaccggaacgaacccaccagctataacgcctatcagcattgccgactgcctcctccgcctacacacatcatggtcaccatcgccatccttcgctccacgagagctgcagtcactcgccagtcctttcgcaagttccagaagttccagaagataggcatcatggaatcccgtcgcgccctctcctcctatctcgttactcccaaggagctgaacgaagctctaaagaagagcccaccctctcccatcagcaccgatccccgtgtcatcccgctgtgtgccacctggttcatgcccaacgactcccgcaccggcatcaacagcttcaacgagaagcgcatccccaaggctcgcttcttcgacctcgacaaagtcaaagacaagcactctccttacccgcacatgctcccgacagccaagcagtttgcccaggccatgagcgagttgggcatccgtaaggacgacaccgttgttgtctacgactcccacgaggttggtatcttcagcgccccccgcgttggctggactttgcgtgtcttcggccaccccaaggtccacattctcaacaacttcaagctctgggtcgaagagggcttcccggtcgagactggcaacttttccagcatcgagtgcaacccctatccgattccccagcttgacgagtccaaggtggcgagctacgaggaggttcgccaagttgctgaggaccacaacaaggagggtgccgagggcattcagatcttggatgctcgaccccacgcacgattcactggcgaagccccagagcccagggagggactctcctcgggtcacatgcctggcgcaattagcattgccttccctgaggtgttggaccccaccaccaagacctttctccccaaggatcagctacgaaagctattcgaatcgaaaggtgttgaccccaccaggcctatcatctcgtcttgtgggactggtgtgactgcagttgtaatcgacacggctctcgaggaggccggttatggctctgccgataagcgccgtgtctacgacggtagttggactgagtgggcccagcgagtcgagccttctgataacctcattatcaaagagaaagaaactgaggtgtgaaacctcctatctctgttacaccgaagagcatcgcacgaacgaccagagatactagagatcacaacaaaccgccgaagaagcttaacacaaacaaaataatgcatcgcctgccgttagataccctgcgcttgttttactgctattgctcacgttgtatgattacgaagcgctgcatgttccgcgaacgtttgacgccattctggcttcaccactcattgcaatgcgatatgggtcgtggtgttctgcggaagaagatggtgaggggtgcagaggcagatttccctcatcatgccaaggatgggatggatgatggtggtgatcaagccaccatgttacgggtagttgacgctgaccacagatcccaattgtcgaatttgcagaaccaagcatctatgccggacttgcgactatcgtctcccaattgacatggcactaagacagtgcacttgtcagaagatggcaacggatcgcgcctggtgtgctgcggttcagtcttcttgtagatacttgcaggatgagtctgtcttgtttgtggactggacataataaacaaacaaagtctcccttcacgtttcttcttgtacttgatgcttgacatgtgattggtacatgcttggtcat

SEQ ID NO: 3811 - DNA, 324 bp, Muscodor strobelii
  misc_feature: SGI cDNA ID NO. 560940
  misc_feature: Elevated expression when VOC is produced
  misc_feature: Encodes the peptide sequence at SEQ ID NO 3812
atgaaagtcaagatcaagaaatgggacgcggtcgcaacctggcgatgggatctccctgaggatgatgtctgtggtatctgtcaagtacagttcgatggaacctgtccgacctgcaaatatcccggtgacgactgcagtttgttgtccgggaagtgtggacacaacttccacatgcattgcatcatggagtggatcaagcaagacgctgccaaaggacagtgtcccatgtgtcgacagaaatttgagtggaatgaagcaggttcaggtcaagaacagcagcaggaggaagaggagcagctggtggatacagagatccccgaatag

SEQ ID NO: 3812 - protein, 107 aa, Muscodor strobelii
  misc_feature: SGI Peptide ID NO. 560940
  misc_feature (35)..(77): Pfam Id: PF00097 Pfam Desc: Zinc finger, C3HC4 type (RING finger)
  misc_feature (1)..(85): NCBI GI: 145607215 Blast Desc: conserved [Magnaporthe grisea 70-15] gi|145014814|gb|EDJ99382.1| conserved [Magnaporthe grisea 70-15]
  misc_feature (1)..(85): NCBI GI: 116200598 Blast Desc: conserved [Chaetomium globosum CBS 148.51] gi|88175558|gb|EAQ83026.1| conserved [Chaetomium globosum CBS 148.51]
  misc_feature (1)..(85): NCBI GI: 171680865 Blast Desc: protein product [Podospora anserina] gi|170940060|emb|CAP65287.1| protein product [Podospora anserina]
  misc_feature (1)..(81): NCBI GI: 242780167 Blast Desc: anaphase promoting complex subunit Apc11, [Talaromyces stipitatus ATCC 10500] gi|218719686|gb|EED19105.1| anaphase promoting complex subunit Apc11, [Talaromyces stipitatus ATCC
  misc_feature (1)..(85): NCBI GI: 238840042 Blast Desc: anaphase promoting complex subunit 11 [Microsporum canis CBS 113480]
  misc_feature (1)..(79): NCBI GI: 256730816 Blast Desc: NECHADRAFT_9904 [Nectria haematococca mpVI 77-13-4]
  misc_feature (1)..(81): NCBI GI: 145245978 Blast Desc: An12g01510 [Aspergillus niger] gi|134079950|emb|CAK48434.1| protein product [Aspergillus niger]
  misc_feature (1)..(86): NCBI GI: 240276580 Blast Desc: RING finger domain-containing protein [Ajellomyces capsulatus H143]
  misc_feature (1)..(88): NCBI GI: 119178538 Blast Desc: CIMG_08098 [Coccidioides immitis RS]
  misc_feature (1)..(97): NCBI GI: 212526168 Blast Desc: anaphase promoting complex subunit Apc11, [Penicillium marneffei ATCC 18224] gi|210072639|gb|EEA26726.1| anaphase promoting complex subunit Apc11, [Penicillium marneffei ATCC
  misc_feature: Useful for introducing or modulating the production of volatile compounds
MKVKIKKWDAVATWRWDLPEDDVCGICQVQFDGTCPTCKYPGDDCSLLSGKCGHNFHMHCIMEWIKQDAAKGQCPMCRQKFEWNEAGSGQEQQQEEEEQLVDTEIPE

SEQ ID NO: 3813 - DNA, 715 bp, Muscodor strobelii
  misc_feature: SGI EST ID NO. CUFF.9644.1
  misc_feature: Variant of the nucleotide sequence at SEQ ID NO 3811
aacaagggtctgagaaacaaggtgctgtgaaaacacaccggaatatcacacaacaacggcttctggtgaaactcctctgcttacattatcctacaaaacttcctacgtctcacaaaatctcagttatgaaagtcaagatcaagaaatgggacgcggtcgcaacctggcgatgggatctccctgaggatgatgtctgtggtatctgtcaagtacagttcgatggaacctgtccgacctgcaaatatcccggtgacgactgcagtttgttgtccgggaagtgtggacacaacttccacatgcattgcatcatggagtggatcaagcaagacgctgccaaaggacagtgtcccatgtgtcgacagaaatttgagtggaatgaagcaggttcaggtcaagaacagcagcaggaggaagaggagcagctggtggatacagagatccccgaataggtgtcaagtcagtcgttccaataaggtctgaaagtggtcagattgcttgctgggacattattcggcgtttgggtgtttgggctcaatacccccatgggcagttcatgaaggaaatgaaggggatgaaaaagtgtgtttgaagagaaccataccttctgtcaatacctacctacagaaagacttccaaagagagaggtctctaatttgaattgcaaaaacacagacaaacagagacatgcaatactgtatgactttcaggtccccca

SEQ ID NO: 3814 - DNA, 495 bp, Muscodor strobelii
  misc_feature: SGI cDNA ID NO. 560941
  misc_feature: Encodes the peptide sequence at SEQ ID NO 3815
atggctgcccagaaccgtggaaacaggacagagaacaaccagaaacaacaagggtctgagaaacaaggtgctgtgaaaacacaccggaatatcacacaacaacggcttctggtgaaactcctctgcttacattatcctacaaaacttcctacgtctcacaaaatctcagttatgaaagtcaagatcaagaaatgggacgcggtcgcaacctggcgatgggatctccctgaggatgatgtctgtggtatctgtcaagtacagttcgatggaacctgtccgacctgcaaatatcccggtgacgactgcagtttgttgtccgggaagtgtggacacaacttccacatgcattgcatcatggagtggatcaagcaagacgctgccaaaggacagtgtcccatgtgtcgacagaaatttgagtggaatgaagcaggttcaggtcaagaacagcagcaggaggaagaggagcagctggtggatacagagatccccgaatag

SEQ ID NO: 3815 - protein, 164 aa, Muscodor strobelii
  misc_feature: SGI Peptide ID NO. 560941
  misc_feature (92)..(134): Pfam Id: PF00097 Pfam Desc: Zinc finger, C3HC4 type (RING finger)
  misc_feature (58)..(142): NCBI GI: 145607215 Blast Desc: conserved [Magnaporthe grisea 70-15] gi|145014814|gb|EDJ99382.1| conserved [Magnaporthe grisea 70-15]
  misc_feature (58)..(142): NCBI GI: 116200598 Blast Desc: conserved [Chaetomium globosum CBS 148.51] gi|88175558|gb|EAQ83026.1| conserved [Chaetomium globosum CBS 148.51]
  misc_feature (58)..(142): NCBI GI: 171680865 Blast Desc: protein product [Podospora anserina] gi|170940060|emb|CAP65287.1| protein product [Podospora anserina]
  misc_feature (58)..(140): NCBI GI: 242780167 Blast Desc: anaphase promoting complex subunit Apc11, [Talaromyces stipitatus ATCC 10500] gi|218719686|gb|EED19105.1| anaphase promoting complex subunit Apc11, [Talaromyces stipitatus ATCC
  misc_feature (58)..(142): NCBI GI: 238840042 Blast Desc: anaphase promoting complex subunit 11 [Microsporum canis CBS 113480]
  misc_feature (56)..(138): NCBI GI: 145245978 Blast Desc: An12g01510 [Aspergillus niger] gi|134079950|emb|CAK48434.1| protein product [Aspergillus niger]
  misc_feature (58)..(136): NCBI GI: 256730816 Blast Desc: NECHADRAFT_9904 [Nectria haematococca mpVI 77-13-4]
  misc_feature (58)..(143): NCBI GI: 240276580 Blast Desc: RING finger domain-containing protein [Ajellomyces capsulatus H143]
  misc_feature (58)..(154): NCBI GI: 212526168 Blast Desc: anaphase promoting complex subunit Apc11, [Penicillium marneffei ATCC 18224] gi|210072639|gb|EEA26726.1| anaphase promoting complex subunit Apc11, [Penicillium marneffei ATCC
  misc_feature (58)..(145): NCBI GI: 119178538 Blast Desc: CIMG_08098 [Coccidioides immitis RS]
MAAQNRGNRTENNQKQQGSEKQGAVKTHRNITQQRLLVKLLCLHYPTKLPTSHKISVMKVKIKKWDAVATWRWDLPEDDVCGICQVQFDGTCPTCKYPGDDCSLLSGKCGHNFHMHCIMEWIKQDAAKGQCPMCRQKFEWNEAGSGQEQQQEEEEQLVDTEIPE

SEQ ID NO: 3816 - DNA, 715 bp, Muscodor strobelii; identical to SEQ ID NO: 3813
  misc_feature: SGI EST ID NO. CUFF.9644.1
  misc_feature: Variant of the nucleotide sequence at SEQ ID NO 3814

SEQ ID NO: 3817 - DNA, 768 bp, Muscodor strobelii
  misc_feature: SGI cDNA ID NO. 560942
  misc_feature: Encodes the peptide sequence at SEQ ID NO 3818
atgaccgactcaccaacagcagcccaagcaggaggctcccggccaacctcgtctgctgctgatatccctcagccgcgccggacaggcacgccgcctccattcgcacccatcttcaccctcgtagacaacacctcaacacggacaacacatcacccacacgttcgatacatcttcagcgacgatgacccagacatcctcacccatgcacttgccgaatgcgatctcaacaacacaggtggcaacgactcagaccctacgagccgagccatgatgcttgacttacaacctgatgaccaaggcggctacagcgtagcttggtcctctagtctctcaccctcgtgggccgtgctggatgcacaattaagccatatatccccaccgtcctccgaagcggggagcagcggcggtgagggaaatacagcaaaaaagccggacagactgatgctccgcatcgagggcattgaaaccacaaatcctgggtcaagttcggagctccggatctcgggtgagagaacacggcatggctccggaagtgctagtggtagcgggagcggcagcggacacaaggaacatgacaaagaagactatactggcatgttaaacgagttcgaaaagcgcatggctacgctgcggaaggtggttaatgcgagtgaggaccggaggaagaaggttgctgccaaggctggtttgactgacgaggtaccggaggaaacaccagacgacgagaggaccactacggacccacaaccagaacaatcaagatcatga

SEQ ID NO: 3818 - protein, 255 aa, Muscodor strobelii
  misc_feature: SGI Peptide ID NO. 560942
  misc_feature (35)..(247): NCBI GI: 261358805 Blast Desc: conserved [Verticillium albo-atrum VaMs.102]
  misc_feature (34)..(224): NCBI GI: 116200596 Blast Desc: CHGG_10843 [Chaetomium globosum CBS 148.51] gi|88175557|gb|EAQ83025.1| CHGG_10843 [Chaetomium globosum CBS 148.51]
  misc_feature (34)..(222): NCBI GI: 171680867 Blast Desc: protein product [Podospora anserina] gi|27764328|emb|CAD60608.1| protein product [Podospora anserina] gi|170940061|emb|CAP65288.1| protein product [Podospora anserina]
  misc_feature (32)..(226): NCBI GI: 85092724 Blast Desc: NCU02461 [Neurospora crassa OR74A] gi|28920951|gb|EAA30280.1| NCU02461 [Neurospora crassa OR74A]
  misc_feature (40)..(217): NCBI GI: 145607217 Blast Desc: MGG_04089 [Magnaporthe grisea 70-15] gi|145014815|gb|EDJ99383.1| MGG_04089 [Magnaporthe grisea 70-15]
  misc_feature (32)..(224): NCBI GI: 256735395 Blast Desc: NECHADRAFT_98909 [Nectria haematococca mpVI 77-13-4]
  misc_feature (13)..(221): NCBI GI: 46108138 Blast Desc: FG00951.1 [Gibberella zeae PH-1]
  misc_feature (32)..(239): NCBI GI: 238840041 Blast Desc: conserved [Microsporum canis CBS 113480]
  misc_feature (33)..(124): NCBI GI: 261188828 Blast Desc: conserved [Ajellomyces dermatitidis SLH14081] gi|239591969|gb|EEQ74550.1| conserved [Ajellomyces dermatitidis SLH14081]
  misc_feature (33)..(124): NCBI GI: 239615345 Blast Desc: conserved [Ajellomyces dermatitidis ER-3]
MTDSPTAAQAGGSRPTSSAADIPQPRRTGTPPPFAPIFTLVDNTSTRTTHHPHVRYIFSDDDPDILTHALAECDLNNTGGNDSDPTSRAMMLDLQPDDQGGYSVAWSSSLSPSWAVLDAQLSHISPPSSEAGSSGGEGNTAKKPDRLMLRIEGIETTNPGSSSELRISGERTRHGSGSASGSGSGSGHKEHDKEDYTGMLNEFEKRMATLRKVVNASEDRRKKVAAKAGLTDEVPEETPDDERTTTDPQPEQSRS

SEQ ID NO: 3819 - DNA, 2010 bp, Muscodor strobelii
  misc_feature: SGI EST ID NO. CUFF.9647.0
  misc_feature: Variant of the nucleotide sequence at SEQ ID NO 3817
gtcggccatgcgggtgcccagctcgcccagtccgcccagctgttgagctgccacacaaggcgcattgttgttcctgttcttgttccgcctgcagcgcgcaggcatctacgcaggcattcgcacgcggacagccagcaacctgcaggacacgctgcagctggtatgcatcctccaccacctcccgacagtctgcccgttgcggcttgaatatccggaccagagctagcggtgtcgtgccacaaggtacctcgctcgcctctgccaccttagctctcccaagctctcaaccaacaacatcccatcctctcttgtatccttgaacagtccacgatgcatcaatcccatcctcgctgccaccatctctcccgccactcttcattctttctatatctcactccctgtgctgttctgctcttatagctacatagctcgcatccatccacatgtcatccatcaacacccaatcatcgacatgaccgactcaccaacagcagcccaagcaggaggctcccggccaacctcgtctgctgctgatatccctcagccgcgccggacaggcacgccgcctccattcgcacccatcttcaccctcgtagacaacacctcaacacggacaacacatcacccacacgttcgatacatcttcagcgacgatgacccagacatcctcacccatgcacttgccgaatgcgatctcaacaacacaggtggcaacgactcagaccctacgagccgagccatgatgcttgacttacaacctgatgaccaaggcggctacagcgtagcttggtcctctagtctctcaccctcgtgggccgtgctggatgcacaattaagccatatatccccaccgtcctccgaagcggggagcagcggcggtgagggaaatacagcaaaaaagccggacagactgatgctccgcatcgagggcattgaaaccacaaatcctgggtcaagttcggagctccggatctcgggtgagagaacacggcatggctccggaagtgctagtggtagcgggagcggcagcggacacaaggaacatgacaaagaagactatactggcatgttaaacgagttcgaaaagcgcatggctacgctgcggaaggtggttaatgcgagtgaggaccggaggaagaaggttgctgccaaggctggtttgactgacgaggtaccggaggaaacaccagacgacgagaggaccactacggacccacaaccagaacaatcaagatcatgaatgcttcctatccaacggaggggatcgctattttgttcttggaggacgacgaggaacaccaattcatgagcatgatctcaacagctcatttctaggaaacgtggtcgatcatcttggcccaagaacgagaatgctaaaaggagacctggcggacatgatctcgatgatcaatcgctatacatcagtcctgacagaaaggacaatgatgaagacggagctgtccagtacgccccatattcttaatgacggaatacatctcacggcaagacagcacgtgaggatcaggtgactaagcttcggaaccctataaactactctattgcatgaatgaatgaacaggacggcgttggtctcgatggctacaatctggataagggagaaagcaaagttatactcaaagccacacgcaaagctatacgcaactagctggatgagcttacgtatctatgtatatatcgggaatggtatatacaaatcatgatcttgataacgtctacttgccctagtctctcctcgttcggtgatattccatgagaaacccttgctggcacgtaaaactcaagtttatttcaagttacttgcggtagagtaaggaatggcaactactccaagtctgtccttaccgtagctcttccaaaaatctcagaatcccaaacgactttgactccgcggtagtgatagatattcacattgctggcttgaggggtctaacttatttatggatggtgatgatcgtgcgacatttcgatgacaaccaatgtaggagttgc

SEQ ID NO: 3820 - DNA, 1047 bp, Muscodor strobelii
  misc_feature: SGI cDNA ID NO. 560943
  misc_feature: Encodes the peptide sequence at SEQ ID NO 3821
atgacggacaccacgggtaacgcgcaactgctacagcacccgttcttcgacttggcgccgttgacttcccagatggaagaggccatgctgttttacctatggcctccagcagagcaccaggctgcacaaccacatgttgcggatttcaggtcttatttcgcctacctgcaacaggaacggaacctaatttttgcgcagcaaaccacaatccagacgtttgccgatatcataacaatcttggagatcctccagagagagggggatatgacattagagactattcgccatctcatcggagccgcgaatgcctcgttggccgcggaccatgccaagctttcgagatcaatagaactagtcgtccggctttggcttctactacgagttggtatatccgcacccgatccaaggaatcttaatttcgaagtccacattccttggcgtgagtatcagagcttgcctgaagcacttgaccaagcccttactcgtccatcaatgggcagcatcgccaccatggacacgttctcccctttcttcaacgccgtggatatgaggaacattgcgaaattccaagtagtctggacaaacaacgtcgccgagcacttaactttaagagggaagttcattcttatatttcaccacatttcagcgctcaagcgaatgaagatctctctagatgacatccactttcttccgccagcaatgatagacgagacagtcaatactctcggtctcctcatgcctcatagtatggcaagctgcaacacttggcttcagggtgaaattgaacgatatgctcttgaccgcaacatcatgtatcgtgaaacggcagatcgcagcgaatccgcctatgtcttctggaatgagaagctctgtgcaatctaccactccttcaatcagaccaaaccttcaagtctcgtccagtggtggtatgatcgtcgtgatatgggcctgtggtggagcttctggcttggagtgacaggactcttcctaactgttttatttgggcttatccagtcggttaccggcatcattcaagtgatagtttag

SEQ ID NO: 3821 - protein, 348 aa, Muscodor strobelii
  misc_feature: SGI Peptide ID NO. 560943
  misc_feature (48)..(346): NCBI GI: 169601684 Blast Desc: SNOG_03713 [Phaeosphaeria nodorum SN15] gi|160705991|gb|EAT88918.2| SNOG_03713 [Phaeosphaeria nodorum SN15]
  misc_feature (42)..(347): NCBI GI: 46120446 Blast Desc: FG04870.1 [Gibberella zeae PH-1]
  misc_feature (178)..(346): NCBI GI: 238508650 Blast Desc: conserved [Aspergillus flavus NRRL3357] gi|220688404|gb|EED44757.1| conserved [Aspergillus flavus NRRL3357]
  misc_feature (178)..(346): NCBI GI: 189199848 Blast Desc: conserved [Pyrenophora tritici-repentis Pt-1C-BFP] gi|187983360|gb|EDU48848.1| conserved [Pyrenophora tritici-repentis Pt-1C-BFP]
  misc_feature (43)..(346): NCBI GI: 256734970 Blast Desc: NECHADRAFT_75762 [Nectria haematococca mpVI 77-13-4]
  misc_feature (106)..(346): NCBI GI: 116202897 Blast Desc: CHGG_09333 [Chaetomium globosum CBS 148.51] gi|88177851|gb|EAQ85319.1| CHGG_09333 [Chaetomium globosum CBS 148.51]
  misc_feature (178)..(346): NCBI GI: 156033223 Blast Desc: SS1G_13687 [Sclerotinia sclerotiorum 1980] gi|154699090|gb|EDN98828.1| SS1G_13687 [Sclerotinia sclerotiorum 1980]
  misc_feature (36)..(346): NCBI GI: 46109538 Blast Desc: FG01651.1 [Gibberella zeae PH-1]
  misc_feature (68)..(346): NCBI GI: 171682634 Blast Desc: protein product [Podospora anserina] gi|170941276|emb|CAP66926.1| protein product [Podospora anserina]
  misc_feature (48)..(340): NCBI GI: 169618469 Blast Desc: SNOG_12425 [Phaeosphaeria nodorum SN15] gi|111059118|gb|EAT80238.1| SNOG_12425 [Phaeosphaeria nodorum SN15]
MTDTTGNAQLLQHPFFDLAPLTSQMEEAMLFYLWPPAEHQAAQPHVADFRSYFAYLQQERNLIFAQQTTIQTFADIITILEILQREGDMTLETIRHLIGAANASLAADHAKLSRSIELVVRLWLLLRVGISAPDPRNLNFEVHIPWREYQSLPEALDQALTRPSMGSIATMDTFSPFFNAVDMRNIAKFQVVWTNNVAEHLTLRGKFILIFHHISALKRMKISLDDIHFLPPAMIDETVNTLGLLMPHSMASCNTWLQGEIERYALDRNIMYRETADRSESAYVFWNEKLCAIYHSFNQTKPSSLVQWWYDRRDMGLWWSFWLGVTGLFLTVLFGLIQSVTGIIQVIV

SEQ ID NO: 3822 - DNA, 833 bp, Muscodor strobelii
  misc_feature: SGI EST ID NO. CUFF.9639.0
  misc_feature: Variant of the nucleotide sequence at SEQ ID NO 3820
ccactgtcgatctcagcggaggagctacttgccgtttatggtatcgcccattgaataaatgtttggagtcgaaccgactatctgaaatccgcaggactgatattcgagcataaaagcaaatatattgcgggctaactcacgatgacggacaccacgggtaacgcgcaactgctacagcacccgttcttcgacttggcgccgttgacttcccagatggaagaggccatgctgttttacctatggcctccagcagagcaccaggctgcacaaccacatgttgcggatttcaggtcttatttcgcctacctgcaacaggaacggaacctaatttttgcgcagcaaaccacaatccagacgtttgccgatatcataacaatcttggagatcctccagagagagggggatatgacattagagactattcgccatctcatcggagccgcgaatgcctcgttggccgcggaccatgccaagctttcgagatcaatagaactagtcgtccggctttggcttctactacgagttggtatatccgcacccgatccaaggaatcttaatttcgaagtccacattccttggcgtgagtatcagagcttgcctgaagcacttgaccaagcccttactcgtccatcaatgggcagcatcgccaccatggacacgttctcccctttcttcaacgccgtggatatgaggaacattgcgaaattccaagtagtctggacaaacaacgtcgccgagcacttaactttaagagggaagttcattcttatatttcaccacatttcagcgctcaagcgaatgaagatctctctagatgacatccactttcttcc

SEQ ID NO: 3823 - DNA, 1017 bp, Muscodor strobelii
  misc_feature: SGI cDNA ID NO. 560944
  misc_feature: Reduced expression when VOC is produced
  misc_feature: Encodes the peptide sequence at SEQ ID NO 3824
atgcgatttgagggcaatgatgtccctattctcgatcttcaaactattgacttcgataagctcgtgtctaacgagccaagtgaaattctgaggctcctagaatgctgccaaaaagaaggtttcttctacctggaccttcgtggcatcgacggtcgccgtactcttgacgacaaagagagactcctcgacttgatgagtcgcttttttagtgcgtcactagaagcgaagaacgagattggactcccttcgcagaaacacggatatgaacccgtaggcttgcatgcaggtctcactgacaattcccgagatggttacgagtgtctcaaggttgctctttcggagcttgcatcaggctctcccaagctcccaagtattctaaacaataaggcggatatcaagactctccaagacttctctgcaggtggagatatgatcaccaagatcatgctgtcttgtctttctaatgccatgggtctcgcgaacgaagaacgttttgaatcatttcatcgtagctggcgaaattcaaattgcacattagcaatgtttcgttatatccctggcgatctccaagcccagtctgatcagaacaccgttggccaccaacagcatacagacattgggtctttcacactactcttcagcgaccagtatggattgcaggtacaaccggcaaacaagcccaatgctgagtttgggttcgttgagccccgttctggtcacgccatcattaacgttggcgactccttacggttcgcttcaggccagaaactgtactcgtgcatccatcgagttgttccatatgacgtgtctaattatcgctactcacttgcctattttttacggcctgaagttgatgtctcgtggaaagacagtgagggtcgcatggtaacagcaggacaatggcacgacgagaaatatgacgtcttctcggccactcatgagatgcagaagaaccaacttcccaaaaccatgcttcttggcggtatgccacagcaaattgctggcatccagacttga

SEQ ID NO: 3824 - protein, 338 aa, Muscodor strobelii
  misc_feature: SGI Peptide ID NO. 560944
  misc_feature (185)..(282): Pfam Id: PF03171 Pfam Desc: 2OG-Fe(II) oxygenase superfamily
  misc_feature (1)..(331): NCBI GI: 39940200 Blast Desc: MGG_05140 [Magnaporthe grisea 70-15] gi|145010603|gb|EDJ95259.1| MGG_05140 [Magnaporthe grisea 70-15]
  misc_feature (5)..(329): NCBI GI: 261358031 Blast Desc: conserved [Verticillium albo-atrum VaMs.102]
  misc_feature (1)..(329): NCBI GI: 171685308 Blast Desc: protein product [Podospora anserina] gi|170942615|emb|CAP68267.1| protein product [Podospora anserina]
  misc_feature (1)..(329): NCBI GI: 169608552 Blast Desc: SNOG_07358 [Phaeosphaeria nodorum SN15] gi|111063704|gb|EAT84824.1| SNOG_07358 [Phaeosphaeria nodorum SN15]
  misc_feature (1)..(329): NCBI GI: 116200933 Blast Desc: CHGG_08351 [Chaetomium globosum CBS 148.51] gi|88176869|gb|EAQ84337.1| CHGG_08351 [Chaetomium globosum CBS 148.51]
  misc_feature (1)..(294): NCBI GI: 189202228 Blast Desc: conserved [Pyrenophora tritici-repentis Pt-1C-BFP] gi|187984549|gb|EDU50037.1| conserved [Pyrenophora tritici-repentis Pt-1C-BFP]
  misc_feature (4)..(333): NCBI GI: 46127407 Blast Desc: FG08081.1 [Gibberella zeae PH-1]
  misc_feature (10)..(331): NCBI GI: 121704112 Blast Desc: 2OG-Fe(II) oxygenase family oxidoreductase, [Aspergillus clavatus NRRL 1] gi|119398464|gb|EAW08894.1| 2OG-Fe(II) oxygenase family oxidoreductase, [Aspergillus clavatus
  misc_feature (6)..(333): NCBI GI: 256721279 Blast Desc: NECHADRAFT_44669 [Nectria haematococca mpVI 77-13-4]
  misc_feature (10)..(329): NCBI GI: 238507652 Blast Desc: gibberellin 20-oxidase family protein [Aspergillus flavus NRRL3357] gi|220688546|gb|EED44898.1| gibberellin 20-oxidase family protein [Aspergillus flavus NRRL3357]
  misc_feature (6)..(287): SWISSPROT Homolog: EC 1.14.11.9 Flavanone 3-dioxygenase
  misc_feature: Useful for introducing or modulating the production of volatile compounds
MRFEGNDVPILDLQTIDFDKLVSNEPSEILRLLECCQKEGFFYLDLRGIDGRRTLDDKERLLDLMSRFFSASLEAKNEIGLPSQKHGYEPVGLHAGLTDNSRDGYECLKVALSELASGSPKLPSILNNKADIKTLQDFSAGGDMITKIMLSCLSNAMGLANEERFESFHRSWRNSNCTLAMFRYIPGDLQAQSDQNTVGHQQHTDIGSFTLLFSDQYGLQVQPANKPNAEFGFVEPRSGHAIINVGDSLRFASGQKLYSCIHRVVPYDVSNYRYSLAYFLRPEVDVSWKDSEGRMVTAGQWHDEKYDVFSATHEMQKNQLPKTMLLGGMPQQIAGIQT

SEQ ID NO: 3825 - DNA, 1512 bp, Muscodor strobelii
  misc_feature: SGI EST ID NO. CUFF.9650.0
  misc_feature: Variant of the nucleotide sequence at SEQ ID NO 3823
caacttcataaaaaccactcaattctcaatatctgaaaacatctcatgatactagacaaagtgcagcgaactatgcgatttgagggcaatgatgtccctattctcgatcttcaaactattgacttcgataagctcgtgtctaacgagccaagtgaaattctgaggctcctagaatgctgccaaaaagaaggtttcttctacctggaccttcgtggcatcgacggtcgccgtactcttgacgacaaagagagactcctcgacttgatgagtcgcttttttagtgcgtcactagaagcgaagaacgagattggactcccttcgcagaaacacggatatgaacccgtaggcttgcatgcaggtctcactgacaattcccgagatggttacgagtgtctcaaggttgctctttcggagcttgcatcaggctctcccaagctcccaagtattctaaacaataaggcggatatcaagactctccaagacttctctgcaggtggagatatgatcaccaagatcatgctgtcttgtctttctaatgccatgggtctcgcgaacgaagaacgttttgaatcatttcatcgtagctggcgaaattcaaattgcacattagcaatgtttcgttatatccctggcgatctccaagcccagtctgatcagaacaccgttggccaccaacagcatacagacattgggtctttcacactactcttcagcgaccagtatggattgcaggtacaaccggcaaacaagcccaatgctgagtttgggttcgttgagccccgttctggtcacgccatcattaacgttggcgactccttacggttcgcttcaggccagaaactgtactcgtgcatccatcgagttgttccatatgacgtgtctaattatcgctactcacttgcctattttttacggcctgaagttgatgtctcgtggaaagacagtgagggtcgcatggtaacagcaggacaatggcacgacgagaaatatgacgtcttctcggccactcatgagatgcagaagaaccaacttcccaaaaccatgcttcttggcggtatgccacagcaaattgctggcatccagacttgaagtgttgattggggcacccacgaggatttggcaatgctgagaaagaatccgtgaggcaaacgcccatttcactccttatatcaccacacgctcgtttgactctctataggagacatacatggttatcgttatagatgtacattggggtacagaactgttgtagctgctcactgatatgtgacttatattacaaacctaaatggcaactacatctatccataatactcgacttgacagtactttgtcatagtaagactacattttggaaagtatttccagttcgggatctgtgtagcctcacgtaacaggacatcaatgctagctctaagtggcaactcttcttgcagcggagaatggcgcaatgctttgtatttcaacaccttttattatagagtcataactcaagtatgatgtacctcgtcc

SEQ ID NO: 3826 - DNA, 1479 bp, Muscodor strobelii
  misc_feature: SGI cDNA ID NO. 560945
  misc_feature: Encodes the peptide sequence at SEQ ID NO 3827
atgaatccaccagcaactaacgagaatgaagcttccacggagaagcgaggctctggaagcattcacaatacacccagagaatccaatattgtcgacttcgaagatattcagggcgcgaataatccaatgaactggactttagtgaagaagacatatacgagtctcctatatagtttttcgagcctgacctcggtttgggcaagtacggcatatgccgcaggaaatcggagcatcgcagaggagtttaatacttcagagaccatcgcccttctaggcacctctcttcttcttgtagggtgggcctttgggcccctcgtatgggcaccactttcagagctctacggcagaaaatggcctattttagttcctgtccttctagcaactatcatgtcatttttgaccgcaactgcaaaggacattcaaaccattttggttacgaggtttctgaatggcttgttcgggtctgctcctatcacgataaccggcgctgtattcgtggatctttggtcaccaactcataggggaatcgctatagtcggctataccttttgtgtttgtggaattccaactttagctcccattgttggcggtgtcattattcatactggcacgtcttggaggtggactgaatatattacgggcctgcttcaaatcaccgtcttcttcttaagcctattcctaatccgagagtcatacgctcctgtccttctaaaacgcagggccgcagtattacggagaaccacgggaaactgggcgctacatgccaagtcggaggagcacgagctgttcgctcaagacctcgccataaaatatggtcttcgcccacttcaaatgctcggaacaccaatatgtctgtgcataactatatacactgccttcatttacgcgttatactacgctagtctggcatctttccctatcatattccagcggacacggcactggaatgacttaattgggtctctgccatacttggctctcttgatcggagttgcactcggcgtgctcatgaacctcctcacccacaaatattacacggtgagggatagacccaacagttgccataccgttccagaagcgcgtcttccaccgatgatgattggctcgtacgcgcttactgcaagtcttttcatcatcggctggacgtcaacgcaaactatccactggattgctccggttattggcatagctctaatgggctttggatactatgccgtcttcactagcgctatcaactacctagtcgatactttcccgcgctggagcgccagtgcgttggctgcaaacacatttgctcggagtgcattggccgctattttgccgttggtaatcggacctctgtttcgagcgcttggaaatggctgggcctatagcgtgctggggattttcgccgccgtgaacatactagtccctcatgtattttatttctatggtcccagcattcggaagagaggacgattcagttccaacttgggttga

SEQ ID NO: 3827 - protein, 492 aa, Muscodor strobelii
  misc_feature: SGI Peptide ID NO. 560945
  misc_feature (56)..(441): Pfam Id: PF07690 Pfam Desc: Major Facilitator Superfamily
  misc_feature (22)..(489): NCBI GI: 121701923 Blast Desc: MFS multidrug transporter, [Aspergillus clavatus NRRL 1] gi|119397369|gb|EAW07800.1| MFS multidrug transporter, [Aspergillus clavatus NRRL 1]
  misc_feature (22)..(489): NCBI GI: 119495917 Blast Desc: MFS multidrug transporter, [Neosartorya fischeri NRRL 181] gi|119412896|gb|EAW22837.1| MFS multidrug transporter, [Neosartorya fischeri NRRL 181]
  misc_feature (22)..(489): NCBI GI: 159131158 Blast Desc: MFS multidrug transporter, [Aspergillus fumigatus A1163]
  misc_feature (22)..(489): NCBI GI: 146322564 Blast Desc: MFS multidrug transporter [Aspergillus fumigatus Af293] gi|129557730|gb|EAL90365.2| MFS multidrug transporter, [Aspergillus fumigatus Af293]
  misc_feature (22)..(488): NCBI GI: 238498516 Blast Desc: MSF drug transporter, [Aspergillus flavus NRRL3357] gi|220693767|gb|EED50112.1| MSF drug transporter, [Aspergillus flavus NRRL3357]
  misc_feature (22)..(488): NCBI GI: 169781712 Blast Desc: [Aspergillus oryzae RIB40] gi|83774061|dbj|BAE64186.1| protein product [Aspergillus oryzae]
  misc_feature (27)..(488): NCBI GI: 242792644 Blast Desc: conserved [Talaromyces stipitatus ATCC 10500] gi|218718584|gb|EED18004.1| conserved [Talaromyces stipitatus ATCC 10500]
  misc_feature (22)..(490): NCBI GI: 154309451 Blast Desc: BC1G_07196 [Botryotinia fuckeliana B05.10] gi|150852219|gb|EDN27411.1| BC1G_07196 [Botryotinia fuckeliana B05.10]
  misc_feature (22)..(488): NCBI GI: 145239397 Blast Desc: An08g02290 [Aspergillus niger] gi|134076854|emb|CAK45274.1| protein product [Aspergillus niger]
  misc_feature (22)..(488): NCBI GI: 67521568 Blast Desc: AN1243.2 [Aspergillus nidulans FGSC A4] gi|40746680|gb|EAA65836.1| AN1243.2 [Aspergillus nidulans FGSC A4] gi|259488436|tpe|CBF87867.1| TPA: MFS multidrug transporter,
MNPPATNENEASTEKRGSGSIHNTPRESNIVDFEDIQGANNPMNWTLVKKTYTSLLYSFSSLTSVWASTAYAAGNRSIAEEFNTSETIALLGTSLLLVGWAFGPLVWAPLSELYGRKWPILVPVLLATIMSFLTATAKDIQTILVTRFLNGLFGSAPITITGAVFVDLWSPTHRGIAIVGYTFCVCGIPTLAPIVGGVIIHTGTSWRWTEYITGLLQITVFFLSLFLIRESYAPVLLKRRAAVLRRTTGNWALHAKSEEHELFAQDLAIKYGLRPLQMLGTPICLCITIYTAFIYALYYASLASFPIIFQRTRHWNDLIGSLPYLALLIGVALGVLMNLLTHKYYTVRDRPNSCHTVPEARLPPMMIGSYALTASLFIIGWTSTQTIHWIAPVIGIALMGFGYYAVFTSAINYLVDTFPRWSASALAANTFARSALAAILPLVIGPLFRALGNGWAYSVLGIFAAVNILVPHVFYFYGPSIRKRGRFSSNLG

SEQ ID NO: 3828 - DNA, 1086 bp, Muscodor strobelii
  misc_feature: SGI cDNA ID NO. 560946
  misc_feature: Reduced expression when VOC is produced
  misc_feature: Encodes the peptide sequence at SEQ ID NO 3829
atgagttacggatacgggcagcaaaacccattcgatgaccgcaataacggcggttacgatggtgcctacaacagcggtggtggattgccatcgcgccccaactaccgcaacgagtatgcctccaacgtcgagatggcgccattgacgtcaaacgccgagtctttcccggccagcaattccaactcggctctcgaagagatcagcgacatcaccaggggaatcgacgacatcgagtcgggcctcaacaccctgaagagaatccagcaacaggtactcgatgccactaaccccaatgcgaacagagagcttgacagcctctccgctgagatcatggccaagtacagatctctcgtccagcgcgtccgcgtcctcaagagcaacccccaaaaccagcagagattcggtgcccaggtcaagcgcatcgatggccggctgaaggaggccatcagggcctaccagaactgcgaggcttcttaccgagccaagactcaagaatccatgaagcgtcagtatcgtattgtgcgccccgacgcctccgaggacgagattcgcgccgttgtcgaggacgacagcggtactggccaggtcttccagcaagctctgatgcagagcaaccgcaccggtcgggctcaagaagcactcaacgcagtaaccgaccgccatcaacaactcgagaagattaacaagcagatgattgagttgtcacagctattccaggatatggacgtcctggtcatgcaacaagaagagaacatcgtcagcatcgagcaaaagggcgaggaggttgtcgacaacttggacaggggcaaccaagaggttggtgtggccgtgaacaccgctcgtgcgacccgcaagaagaagtggtggtgcctcggtatctgtgtcgcaatcgttctcatcgtggttcttatccttgtcatctactttgttctcaacccaccgggaggcaaatcgaagcgcagcttgccagagcttgctgtgcgcgacctcatcgacaccgaagccgctgccaagcttttcctgcctaaattccactcgagaatcaaccctgaaaccagacgctggctcatgagcacgactacgtaa

SEQ ID NO: 3829 - protein, 361 aa, Muscodor strobelii
  misc_feature: SGI Peptide ID NO. 560946
  misc_feature (219)..(281): Pfam Id: PF05739 Pfam Desc: SNARE domain
  misc_feature (1)..(292): NCBI GI: 46108136 Blast Desc: FG00950.1 [Gibberella zeae PH-1]
  misc_feature (3)..(311): NCBI GI: 261358807 Blast Desc: SSO2 [Verticillium albo-atrum VaMs.102]
  misc_feature (1)..(292): NCBI GI: 256734681 Blast Desc: NECHADRAFT_98908 [Nectria haematococca mpVI 77-13-4]
  misc_feature (36)..(311): NCBI GI: 39944158 Blast Desc: MGG_04090 [Magnaporthe grisea 70-15] gi|145014816|gb|EDJ99384.1| MGG_04090 [Magnaporthe grisea 70-15]
  misc_feature (1)..(292): NCBI GI: 8102019 Blast Desc: AF262964_1 SNARE protein [Neurospora crassa]
  misc_feature (3)..(292): NCBI GI: 164423462 Blast Desc: NCU11387 [Neurospora crassa OR74A] gi|157070105|gb|EAA30279.2| [Neurospora crassa OR74A]
  misc_feature (1)..(292): NCBI GI: 148278086 Blast Desc: SSOII [Hypocrea jecorina]
  misc_feature (3)..(290): NCBI GI: 258577333 Blast Desc: conserved [Uncinocarpus reesii 1704] gi|237903114|gb|EEP77515.1| conserved [Uncinocarpus reesii 1704]
  misc_feature (3)..(290): NCBI GI: 240104884 Blast Desc: SNARE domain containing protein [Coccidioides posadasii C735 delta SOWgp]
  misc_feature (3)..(290): NCBI GI: 119178516 Blast Desc: CIMG_08090 [Coccidioides immitis RS]
  misc_feature: Useful for introducing or modulating the production of volatile compounds
MSYGYGQQNPFDDRNNGGYDGAYNSGGGLPSRPNYRNEYASNVEMAPLTSNAESFPASNSNSALEEISDITRGIDDIESGLNTLKRIQQQVLDATNPNANRELDSLSAEIMAKYRSLVQRVRVLKSNPQNQQRFGAQVKRIDGRLKEAIRAYQNCEASYRAKTQESMKRQYRIVRPDASEDEIRAVVEDDSGTGQVFQQALMQSNRTGRAQEALNAVTDRHQQLEKINKQMIELSQLFQDMDVLVMQQEENIVSIEQKGEEVVDNLDRGNQEVGVAVNTARATRKKKWWCLGICVAIVLIVVLILVIYFVLNPPGGKSKRSLPELAVRDLIDTEAAAKLFLPKFHSRINPETRRWLMSTTT

SEQ ID NO: 3830 - DNA, 2200 bp, Muscodor strobelii
  misc_feature: SGI EST ID NO. CUFF.9683.0
  misc_feature: Variant of the nucleotide sequence at SEQ ID NO 3828
cagcagcaggtgtagatgcccggcagagagcagttggggggtggtgcactcgcagctggaagcttgaacctaacagggcaggcaaggatggcagggagtcaagggacacaggactcttgtattggcgaagctttgcctcagcctttttcaatctcgttattagcccccagcttccttccatcaagccccttctattcatcgcgctgaccgtattcaattgacctgccttttactttcatcaccataataacccattgtcctttgcatcctgcttcatctgtcattcagttccttttgtacttctcgattgccgatttcttgctttctcgactccgcagaatatcgataattgagtaacgagcgaccggccccttgggatctccccgttcatccctcgccagtcaaacgcaatccgccgcatcaacatgagttacgggtaaatgactcccgccgtcccatctcgattactacgaggccatttatgacgagaacgcccgaaactgacacagactctcgcgcagatacgggcagcaaaacccattcgatgaccgcaataacggcggttacgatggtgcctacaacagcggtggtggattgccatcgcgccccaactaccgcaacgagtatgcctccaacgtcgagatggcgccattgacgtcaaacgccgagtctttcccggccagcaattccaactcggctctcgaagagatcagcgacatcaccaggggaatcgacgacatcgagtcgggcctcaacaccctgaagagaatccagcaacaggtactcgatgccactaaccccaatgcgaacagagagcttgacagcctctccgctgagatcatggccaagtacagatctctcgtccagcgcgtccgcgtcctcaagagcaacccccaaaaccagcagagattcggtgcccaggtcaagcgcatcgatggccggctgaaggaggccatcagggcctaccagaactgcgaggcttcttaccgagccaagactcaagaatccatgaagcgtcagtatcgtattgtgcgccccgacgcctccgaggacgagattcgcgccgttgtcgaggacgacagcggtactggccaggtcttccagcaagctctgatgcagagcaaccgcaccggtcgggctcaagaagcactcaacgcagtaaccgaccgccatcaacaactcgagaagattaacaagcagatgattgagttgtcacagctattccaggatatggacgtcctggtcatgcaacaagaagagaacatcgtcagcatcgagcaaaagggcgaggaggttgtcgacaacttggacaggggcaaccaagaggttggtgtggccgtgaacaccgctcgtgcgacccgcaagaagaagtggtggtgcctcggtatctgtgtcgcaatcgttctcatcgtggttcttatccttgtcatctactttgttctcaacccaccgggaggcaaatcgaagcgcagcttgccagagcttgctgtgcgcgacctcatcgacaccgaagccgctgccaagcttttcctgcctaaattccactcgagaatcaaccctgaaaccagacgctggctcatgagcacgactacgtaaatgctctctgctgcgtcttggcaagggcggcaacatgatacgacccatatacatacctacctacctacttaatagagccaccgttgagtggacaacagataccggctgcctgcgtctcgaggtgcctgccaaaacgacatattcaattcgagttcgattcgtggctcacacatgtcctccatatgtcttttaactcggattgcttggcgtacaggggttttgagctatactggtgctccgaccatcgcacgaaccacgtttggctcgatgtcaaccgcaggttgtgatgagcgaaggcgatcagttggggatagagagctcactatgttggaataaaagttgatgcagaagcttgttcttttgttggaagcagagatggatcggtcttttctcttgtgtgttatacaagctagcacaagcatactccccatgccccgtgttgtgttggggcaatagggagctgtattgcattgaacggcgtattaggctgttatatcatactgtcttatacaatgctatgttttctctgtcttctgattttatttttgcattgtgaaatggtagaatgcaagaattgcgaagtgacgtgatgttaagatcgtag

SEQ ID NO: 3831 - DNA, 2091 bp, Muscodor strobelii
  misc_feature: SGI cDNA ID NO. 560947
  misc_feature: Encodes the peptide sequence at SEQ ID NO 3832
atgactgaggcgggcctcaatactgtcaatctgagccaaatgacgacatggcaacaagtcttactatggctattgatcatcattggaggctccatctgggtaagcatttggacggtcctcgtgcgcaaacatgcatttgagcgccgcttcaaggaaatcgtcaagcgggaacgtgagcgaagtaacgagcgaagaaaaagtgcgaatttgagtctcgtgcctatcacgcaacgccttaagtctttcagcaaaagcaaaacttctgcttccgagcccccatctacgccaatgaggcttggcgatattagttcttcccgtgggataagaggttctatactttctatctcggggccaactaatggacgactagcatctgttgcggttcctcccaaagatgcatctggagaagcatctgacaatgctgcatcaactacacaagattcatccccagatcctatggccgcggcggagcaacagatagagaggcgcatagcatccggtgatggagtggttggaagagataattttgccaataggacttccatgaactccgagcacatcatttttgccgatcagcccttcacgagaccggtatcctccacgttccgctcgcaaggcctgacgcagagaggttctgtaaatgtcgaaccatcttccccgactctggctgccagcacggcaattgacgagtcttctcaccctgggttgcttaaagttggacgaaatgcccaattccatgggctcaccatcgaagaacgagataaacttggcggtaccgaatatcgagcattgaggctactttcgatcgtcgtccccttatatttcgtattgtggcagctgttgggtagcattgcccttggtgcttggattgcaataaatcagcctggccctgcccttgataacgcaatctcgccttggtggaatggcatatttaatggcgtatctgctttcaacaacagtggtatgagcgttttggatttgaatatgattccctacggtggaagctacttcgtcctcattgtcatgggagcgatgattcttgcaggaaataccgcgtatccgatcttcctacgtctgggtctatggtgcggcctaaaaatcttgaggcttgtcacctatgagcacgacttcgccgaatggaaatcgacactcgaatatatactaaagtacccacgacgggtatataccaatctgtttccatctcggcaaacatggtggcttgtctttatgctcttcgttttgaacggcactgactgggccgccttcgaaattctcaatttcggcaatccgaatcttgaacatatctctattggctctcgtgtcatcgatggtctcttccaagcaatcgctgtgcgatccggtggtttctatgtagtctccatcccgacagtctacatcggacttcaagtactatacgtcatcatgatgtacatctcagtgtatccagtcgtaataacaatgcgacattccaacgtgtacgaggaacgatcattgggtatctatgacagcgagaatgcctataatgacgacttcctcagtcgcccattatcgcgcacgcgcacgggaggaaaaagtgaaggccttggtctcggcaaagtgctacgtcggcgcttttctgaatggcatggagtgggcgcggtgcctaacaggcgctcagaccatatcgatgagcttggtgagagccggatcgatttcatcggccatcaggtccgaggtcagctctcgcatgatttatggtggttagttttggcagttctgctcatcatgatcattgaaacaaggcacttcctggaggaccctatcacctactcagtattcaacgtcgtattcgaagtcgtctctgcgtacggttgtgtaggcatcagcattggactcccaacccaagcttacagcttctccggtggtctgtacgccggctcgaaactcgttctctgtgcggtgatgctgagaggtcggcatcggggacttccggtcgcacttgatcgtgctgtgaggctgcctggtgatgagatgcatagagtggaggaggaggatcatgatattagacgttcgatgtccatacggcgtcccagtatttcacataatcattga

SEQ ID NO: 3832 - protein, 696 aa, Muscodor strobelii
  misc_feature: SGI Peptide ID NO. 560947
  misc_feature (255)..(667): Pfam Id: PF02386 Pfam Desc: Cation transport protein
  misc_feature (1)..(689): NCBI GI: 171680877 Blast Desc: protein product [Podospora anserina] gi|27764333|emb|CAD60613.1| protein product [Podospora anserina] gi|170940066|emb|CAP65293.1| protein product [Podospora anserina]
  misc_feature (185)..(685): NCBI GI: 256721024 Blast Desc: NECHADRAFT_94790 [Nectria haematococca mpVI 77-13-4]
  misc_feature (1)..(689): NCBI GI: 256730632 Blast Desc: NECHADRAFT_74352 [Nectria haematococca mpVI 77-13-4]
  misc_feature (1)..(692): NCBI GI: 116200588 Blast Desc: CHGG_10839 [Chaetomium globosum CBS 148.51] gi|88175553|gb|EAQ83021.1| CHGG_10839 [Chaetomium globosum CBS 148.51]
  misc_feature (1)..(689): NCBI GI: 46109050 Blast Desc: FG01407.1 [Gibberella zeae PH-1]
  misc_feature (1)..(668): NCBI GI: 85092714 Blast Desc: NCU02456 [Neurospora crassa OR74A] gi|28920946|gb|EAA30275.1| conserved [Neurospora crassa OR74A]
  misc_feature (1)..(667): NCBI GI: 156035575 Blast Desc: SS1G_12991 [Sclerotinia sclerotiorum 1980] gi|154698396|gb|EDN98134.1| SS1G_12991 [Sclerotinia sclerotiorum 1980]
  misc_feature (1)..(689): NCBI GI: 212544732 Blast Desc: conserved [Penicillium marneffei ATCC 18224] gi|210065489|gb|EEA19583.1| conserved [Penicillium marneffei ATCC 18224]
  misc_feature (15)..(667): NCBI GI: 154312433 Blast Desc: BC1G_05819 [Botryotinia fuckeliana B05.10] gi|150849920|gb|EDN25113.1| BC1G_05819 [Botryotinia fuckeliana B05.10]
  misc_feature (1)..(677): NCBI GI: 121714993 Blast Desc: cation transporter, [Aspergillus clavatus NRRL 1] gi|119403262|gb|EAW13680.1| cation transporter, [Aspergillus clavatus NRRL 1]
MTEAGLNTVNLSQMTTWQQVLLWLLIIIGGSIWVSIWTVLVRKHAFERRFKEIVKRERERSNERRKSANLSLVPITQRLKSFSKSKTSASEPPSTPMRLGDISSSRGIRGSILSISGPTNGRLASVAVPPKDASGEASDNAASTTQDSSPDPMAAAEQQIERRIASGDGVVGRDNFANRTSMNSEHIIFADQPFTRPVSSTFRSQGLTQRGSVNVEPSSPTLAASTAIDESSHPGLLKVGRNAQFHGLTIEERDKLGGTEYRALRLLSIVVPLYFVLWQLLGSIALGAWIAINQPGPALDNAISPWWNGIFNGVSAFNNSGMSVLDLNMIPYGGSYFVLIVMGAMILAGNTAYPIFLRLGLWCGLKILRLVTYEHDFAEWKSTLEYILKYPRRVYTNLFPSRQTWWLVFMLFVLNGTDWAAFEILNFGNPNLEHISIGSRVIDGLFQAIAVRSGGFYVVSIPTVYIGLQVLYVIMMYISVYPVVITMRHSNVYEERSLGIYDSENAYNDDFLSRPLSRTRTGGKSEGLGLGKVLRRRFSEWHGVGAVPNRRSDHIDELGESRIDFIGHQVRGQLSHDLWWLVLAVLLIMIIETRHFLEDPITYSVFNVVFEVVSAYGCVGISIGLPTQAYSFSGGLYAGSKLVLCAVMLRGRHRGLPVALDRAVRLPGDEMHRVEEEDHDIRRSMSIRRPSISHNH

SEQ ID NO: 3833 - DNA, 2533 bp, Muscodor strobelii
  misc_feature: SGI EST ID NO. CUFF.9673.0
  misc_feature: Variant of the nucleotide sequence at SEQ ID NO 3831
cgattatgatcggactgggattttgtcccatgataagtgataggttgtaaaataataacagaaaacagatgcttacttccttgttgtgtcgctactcacgtccctcatcttttggggttcctcgaatcccagatttagtatcagttatgtcgatagtctctttctagtcatttcggccatgactgaggcgggcctcaatactgtcaatctgagccaaatgacgacatggcaacaagtcttactatggctattgatcatcattggaggctccatctgggtaagcatttggacggtcctcgtgcgcaaacatgcatttgagcgccgcttcaaggaaatcgtcaagcgggaacgtgagcgaagtaacgagcgaagaaaaagtgcgaatttgagtctcgtgcctatcacgcaacgccttaagtctttcagcaaaagcaaaacttctgcttccgagcccccatctacgccaatgaggcttggcgatattagttcttcccgtgggataagaggttctatactttctatctcggggccaactaatggacgactagcatctgttgcggttcctcccaaagatgcatctggagaagcatctgacaatgctgcatcaactacacaagattcatccccagatcctatggccgcggcggagcaacagatagagaggcgcatagcatccggtgatggagtggttggaagagataattttgccaataggacttccatgaactccgagcacatcatttttgccgatcagcccttcacgagaccggtatcctccacgttccgctcgcaaggcctgacgcagagaggttctgtaaatgtcgaaccatcttccccgactctggctgccagcacggcaattgacgagtcttctcaccctgggttgcttaaagttggacgaaatgcccaattccatgggctcaccatcgaagaacgagataaacttggcggtaccgaatatcgagcattgaggctactttcgatcgtcgtccccttatatttcgtattgtggcagctgttgggtagcattgcccttggtgcttggattgcaataaatcagcctggccctgcccttgataacgcaatctcgccttggtggaatggcatatttaatggcgtatctgctttcaacaacagtggtatgagcgttttggatttgaatatgattccctacggtggaagctacttcgtcctcattgtcatgggagcgatgattcttgcaggaaataccgcgtatccgatcttcctacgtctgggtctatggtgcggcctaaaaatcttgaggcttgtcacctatgagcacgacttcgccgaatggaaatcgacactcgaatatatactaaagtacccacgacgggtatataccaatctgtttccatctcggcaaacatggtggcttgtctttatgctcttcgttttgaacggcactgactgggccgccttcgaaattctcaatttcggcaatccgaatcttgaacatatctctattggctctcgtgtcatcgatggtctcttccaagcaatcgctgtgcgatccggtggtttctatgtagtctccatcccgacagtctacatcggacttcaagtactatacgtcatcatgatgtacatctcagtgtatccagtcgtaataacaatgcgacattccaacgtgtacgaggaacgatcattgggtatctatgacagcgagaatgcctataatgacgacttcctcagtcgcccattatcgcgcacgcgcacgggaggaaaaagtgaaggccttggtctcggcaaagtgctacgtcggcgcttttctgaatggcatggagtgggcgcggtgcctaacaggcgctcagaccatatcgatgagcttggtgagagccggatcgatttcatcggccatcaggtccgaggtcagctctcgcatgatttatggtggttagttttggcagttctgctcatcatgatcattgaaacaaggcacttcctggaggaccctatcacctactcagtattcaacgtcgtattcgaagtcgtctctgcgtacggttgtgtaggcatcagcattggactcccaacccaagcttacagcttctccggtggtctgtacgccggctcgaaactcgttctctgtgcggtgatgctgagaggtcggcatcggggacttccggtcgcacttgatcgtgctgtgaggctgcctggtgatgagatgcatagagtggaggaggaggatcatgatattagacgttcgatgtccatacggcgtcccagtatttcacataatcattgagtgtgttctggatctatatagagatggctgacaataattggatatcaaaggcgtgctatttctggatacagtagcttgcttagataagttctatagtgcaatatgcggcaacaatttatcgttgatttgcggtcatcaactcttcagatttacattgtcttataccttaactcgaaattcgttcaaaatgcgtgcgcttccgaccctcctaccgtatacagtaggtggttgtacgtttcagacagtgtgcgtgatacagtaaac

SEQ ID NO: 3834 - DNA, 564 bp, Muscodor strobelii
  misc_feature: SGI cDNA ID NO. 560948
  misc_feature: Encodes the peptide sequence at SEQ ID NO 3835
atgtatcgtcttctctgctcgctgggtcttttggcctctgctgccgtgggagccctcgccgccgaccttcagatcgacgtgacccttcctgtcgagtgcgaacgcaagactcagaacggcgaccaagttcagatgcactaccgaggcacgttacaagccgatggcagcaaatttgatgccagctacgaccgcggcacgcctttcagctttcagcttggagcaggcagagtcatcaagggctgggaccaaggtctgttggacatgtgcatcggcgagaagagaactcttactattcctcccgagttgggctatggtaaccgaggaatgggcccgattccagccggctcgactttagtcttcgaaacggaattgatgggcatccaaggcgtccccaagcccgagacgattagttacaagtccaccgcgactgaagctgccgccgaggaaacgggtgttgccggcaagattgctgagaaggtaggcgaggctgtcggaggggccgctgcggctgcgggcacaatgattctagacactgacgacgtcaccgaacatcaggagctgtga

SEQ ID NO: 3835 - protein, 187 aa, Muscodor strobelii
  misc_feature: SGI Peptide ID NO. 560948
  misc_feature (31)..(125): Pfam Id: PF00254 Pfam Desc: FKBP-type peptidyl-prolyl cis-trans isomerase
  misc_feature (1)..(187): NCBI GI: 3929348 Blast Desc: FKBP2_NEUCR RecName: Full=FK506-binding protein 2; AltName: Full=Peptidyl-prolyl cis-trans isomerase; Short=PPIase; Short=Rotamase; AltName: Full=FKBP-21; AltName: Full=NcFKBP22;
  misc_feature (8)..(187): NCBI GI: 46109052 Blast Desc: FG01408.1 [Gibberella zeae PH-1]
  misc_feature (8)..(187): NCBI GI: 93204581 Blast Desc: FG01408.1 [Gibberella zeae PH-1]
  misc_feature (16)..(187): NCBI GI: 171680879 Blast Desc: protein product [Podospora anserina] gi|74619439|sp|Q86ZF2.1|FKBP2_PODAN RecName: Full=FK506-binding protein 2; AltName: Full=Peptidyl-prolyl cis-trans isomerase;
  misc_feature (16)..(163): NCBI GI: 116200588 Blast Desc: CHGG_10839 [Chaetomium globosum CBS 148.51] gi|88175553|gb|EAQ83021.1| CHGG_10839 [Chaetomium globosum CBS 148.51]
  misc_feature (8)..(134): NCBI GI: 256730631 Blast Desc: NECHADRAFT_19842 [Nectria haematococca mpVI 77-13-4]
  misc_feature (5)..(187): NCBI GI: 156035617 Blast Desc: SS1G_13012 [Sclerotinia sclerotiorum 1980] gi|154698417|gb|EDN98155.1| SS1G_13012 [Sclerotinia sclerotiorum 1980]
  misc_feature (5)..(187): NCBI GI: 154312393 Blast Desc: peptidylprolyl isomerase [Botryotinia fuckeliana B05.10] gi|150849900|gb|EDN25093.1| peptidylprolyl isomerase [Botryotinia fuckeliana B05.10]
  misc_feature (19)..(187): NCBI GI: 145612595 Blast Desc: peptidylprolyl isomerase [Magnaporthe grisea 70-15] gi|145019732|gb|EDK03960.1| peptidylprolyl isomerase [Magnaporthe grisea 70-15]
  misc_feature (22)..(134): NCBI GI: 242808261 Blast Desc: FKBP-type peptidyl-prolyl isomerase, [Talaromyces stipitatus ATCC 10500] gi|218715751|gb|EED15173.1| FKBP-type peptidyl-prolyl isomerase, [Talaromyces stipitatus ATCC 10500]
  misc_feature (22)..(187): SWISSPROT Homolog: EC 5.2.1.8 Peptidylprolyl isomerase
MYRLLCSLGLLASAAVGALAADLQIDVTLPVECERKTQNGDQVQMHYRGTLQADGSKFDASYDRGTPFSFQLGAGRVIKGWDQGLLDMCIGEKRTLTIPPELGYGNRGMGPIPAGSTLVFETELMGIQGVPKPETISYKSTATEAAAEETGVAGKIAEKVGEAVGGAAAAAGTMILDTDDVTEHQEL

SEQ ID NO: 3836 - DNA, 1602 bp, Muscodor strobelii
  misc_feature: SGI EST ID NO. CUFF.9680.0
  misc_feature: Variant of the nucleotide sequence at SEQ ID NO 3834
cgctgctccccactctgttgcctggaaagcagatggtctacttagtgactcaagagctttggctaagcctccagcagttcttgggttcggtaaatgtggccatgaagattagttatatttcgtcgcttggccacaacttcaccgaacgcgtggagatgcaaattgtgtcgacaatggtaagacgtcgcgtattcaacggtgcatgtcgcgtttcgttcaacgcgccagtgattggcacttgtacgactgatttcgcaggtgcgcgcaatgataatgataatcgacccctttgggctaggtatgtagtaggtaacgtggaggtctcccgatcagggaggtggaaggccacgacccctcccccgctgtgacttcagtacagtacaagctggccacaactcgacgctgtgttcatctcaactcacccgtacaccgccatccgaggcaaattgactccaatcgactcaaacgactccaattcgactttctttttcgtgagattgtagtcacttagcaacgcggtcatcctcgctgtcatcctcgctaccagctgtcctcgatctccgtacttgaacccggcatctgtcgacatgtatcgtcttctctgctcgctgggtcttttggcctctgctgccgtgggagccctcgccgccgaccttcagatcgacgtgacccttcctgtcgagtgcgaacgcaagactcagaacggcgaccaagttcagatgcactaccgaggcacgttacaagccgatggcagcaaatttgatgccagctacgaccgcggcacgcctttcagctttcagcttggagcaggcagagtcatcaagggctgggaccaaggtctgttggacatgtgcatcggcgagaagagaactcttactattcctcccgagttgggctatggtaaccgaggaatgggcccgattccagccggctcgactttagtcttcgaaacggaattgatgggcatccaaggcgtccccaagcccgagacgattagttacaagtccaccgcgactgaagctgccgccgaggaaacgggtgttgccggcaagattgctgagaaggtaggcgaggctgtcggaggggccgctgcggctgcgggcacaatgattctagacactgacgacgtcaccgaacatcaggagctgtgagtctgccagcttacctgccagagccaagtaatgcatatgaatagacatcgggtctatcaagcagacgttattgcggcagtgcgaggctgggcggactacccgtggccatcagcggtccccgacacagtattgtcaggcggcctagcatccgaaaatgattacacgcttgataaagtcgcatgacaacttcggccaactgcaaacgcagattagatgatgcattgacgggcattgatccatctcacctgagcagcgaggtatatacagaaatatagactcaaccaaataaagtcaaatgaagaaaatcgtacatgtgtccaatcgcgtgcattgcagtcaagtttattttaaaactgttgatagcaagggccgcctttgggacatatgcattgggtctacaatatgcaaccttgacgtagggcagccttgcgcatcagcgcatcaaaaaaac

SEQ ID NO: 3837 - DNA, 240 bp, Muscodor strobelii
  misc_feature: SGI cDNA ID NO. 560949
  misc_feature: Elevated expression when VOC is produced
  misc_feature: Encodes the peptide sequence at SEQ ID NO 3838
atggatcgctacacctccagctcttcctctcgtgactcatctgcccatacagaatacctgaggtcccccaaggccaaggaattcagggttgaaaaagtctcacgaagcggcacagatgtgtacaaccattacgctagaggatacgacgtcaacgcgcccaatcccacatatagcagcacctacagcaagtcgtcgtccagcagatcttcgtccaacaagtcgtccagcagacatcactag

SEQ ID NO: 3838 - protein, 79 aa, Muscodor strobelii
  misc_feature: SGI Peptide ID NO. 560949
  misc_feature: Useful for introducing or modulating the production of volatile compounds
MDRYTSSSSSRDSSAHTEYLRSPKAKEFRVEKVSRSGTDVYNHYARGYDVNAPNPTYSSTYSKSSSSRSSSNKSSSRHH

SEQ ID NO: 3839 - DNA, 1621 bp, Muscodor strobelii
  misc_feature: SGI EST ID NO. CUFF.9920.2
  misc_feature: Variant of the nucleotide sequence at SEQ ID NO 3837
gttttttcatctccataactgccattgaccatgtgaaagggggtttgggaaaagcccaatgctgacacaaaggtccccttttaggtaagcagccggagccaatttgccccccaagtgcgcctatactactcccaaggttgtctcaacggcacagccatagaaagctgcctgaagagaggtagaccgctgatttattctgcgccctgaacattctgcaggcttctgatctttctgttaccttctcgcagtcttcggtaacgcgctcagatcggtagacccctatagcttttaacatcaccacctgacacacgatcacaaacttatgggtcttcctaaatcgatttcggtgtcctcaggcacagcccccagagttggttaggcagagccaggcaggaatggataacggtgacatcgtttttcgacttcagcacactaaagagtcattatgacctttgttcgctggggctcgaagtcctatggcccaagtcttgagcatagcgcctccaagactctattctctgcctaacgttgcaggctccaaggatccacctccgtattgtatagggaagactctgatgaatgtcttccgtaatctctattcaaccaatatctattcgtcaattgactcatactgtcttgctgtgccatgcttgctccagcctccgacgtgttgcagttggatcaaatgtatgccatgagatctgcctcagtgtctgccagggggcagtgaatagcggctttgatatacactttgccatgaacacccaatccgacgctgtgattggttgttgctttgccctctggacataaagtataatgaccacctcgtggctacgatgggtgtatatatttctcgtctctgctcatagttattcatctctctgtattcaaacatcactccaatattccacttcatctcagattgtccacttcgactttcatttgccatcacctttgcttcaaacgatgtcacagagcacttacaacatggatcgctacacctccagctcttcctctcgtgactcatctgcccatacagaatacctgaggtcccccaaggccaaggaattcagggttgaaaaagtctcacgaagcggcacagatgtgtacaaccattacgctagaggatacgacgtcaacgcgcccaatcccacatatagcagcacctacagcaagtcgtcgtccagcagatcttcgtccaacaagtcgtccagcagacatcactagcgatttcgacttcttgcatactgcagccctcacatcgacgcgagctacctcggccgcgatggcgcacgcactcgccgtaaacgcggctccagacaatacaatgcaactcgatttcacttgcaagattttagtcttctttgttgctataaactataaatgaccatgaagtcatgccccagggcactctacagcatagcagctggcgttggcggatcagtttggaaatgtaattgacgtacccataatgagtttggaattcatagatcaaatggaaatttacaataccaaataccaatcttacatcgcatatgaagtgacgtttgtttcaattaaggctgaagatcgccgagccgcattggctttaatattgtgacgttgtgttggttcctgcagc

SEQ ID NO: 3840 - DNA, 246 bp, Muscodor strobelii
  misc_feature: SGI cDNA ID NO. 560950
  misc_feature: Elevated expression when VOC is produced
  misc_feature: Encodes the peptide sequence at SEQ ID NO 3841
atggatcgctacacctccagctcttcctctcgtgactcatctgcccatacagaatacctgaggtcccccaaggccaaggaattcagggttgaaaaagtctcacgaagcggcacagatgtgtacaaccattacgctagaggatacgacgtcaacgcgcccaatcccacatatcctagtagcagcacctacagcaagtcgtcgtccagcagatcttcgtccaacaagtcgtccagcagacatcactag

SEQ ID NO: 3841 - protein, 81 aa, Muscodor strobelii
  misc_feature: SGI Peptide ID NO. 560950
  misc_feature: Useful for introducing or modulating the production of volatile compounds
MDRYTSSSSSRDSSAHTEYLRSPKAKEFRVEKVSRSGTDVYNHYARGYDVNAPNPTYPSSSTYSKSSSSRSSSNKSSSRHH

SEQ ID NO: 3842 - DNA, 1621 bp, Muscodor strobelii; identical to SEQ ID NO: 3839
  misc_feature: SGI EST ID NO. CUFF.9920.2
  misc_feature: Variant of the nucleotide sequence at SEQ ID NO 3840

SEQ ID NO: 3843 - DNA, 237 bp, Muscodor strobelii
  misc_feature: SGI cDNA ID NO. 560951
  misc_feature: Elevated expression when VOC is produced
  misc_feature: Encodes the peptide sequence at SEQ ID NO 3844
atggatcgctacacctccagctcttcctctcgtgactcatctgcccatacagaatacctgaggtcccccaaggccaaggaattcagggttgaaaaagtctcacgaagcggcacagatgtgtacaaccattacgctagaggatacgacgtcaacgcgcccaatcccacatacagcacctacagcaagtcgtcgtccagcagatcttcgtccaacaagtcgtccagcagacatcactag

SEQ ID NO: 3844 - protein, 78 aa, Muscodor strobelii
  misc_feature: SGI Peptide ID NO. 560951
  misc_feature: Useful for introducing or modulating the production of volatile compounds
MDRYTSSSSSRDSSAHTEYLRSPKAKEFRVEKVSRSGTDVYNHYARGYDVNAPNPTYSTYSKSSSSRSSSNKSSSRHH

SEQ ID NO: 3845 - DNA, 1621 bp, Muscodor strobelii; identical to SEQ ID NO: 3839
  misc_feature: SGI EST ID NO. CUFF.9920.2
  misc_feature: Variant of the nucleotide sequence at SEQ ID NO 3843

SEQ ID NO: 3846 - DNA, 507 bp, Muscodor strobelii
  misc_feature: SGI cDNA ID NO. 560952
  misc_feature: Elevated expression when VOC is produced
  misc_feature: Encodes the peptide sequence at SEQ ID NO 3847
atggcgaccctcttctccccatcgctgatttccgcggaggtcacacggtctctgcctagcgactttacaattcgcccgatatcaagagatgactacgcgaaaggctttttcaagtgtctggaggttctgacatggatcggcgagccgagcgaagcagaattccacgagcgttttgatgagatggctgaggtgaaggacacatactacttcaccgttattgagcacgagggccatatcgttgggactggatgtttagtcgtcgagaagaagtttatacagaatcgctgtaaagtcggacacgtcgaagagatcgccgtagcgaaggagcatcaggggaaaggactaggcttgaagatgttgcaagcgcttgattcggtggccgtagctgtgggttgcagaaggagtatactgaattgttcaccgaagaatgagccgttttatgtgaagtgtgggtataagaatacgggaattgagatgtcgcaagagtttagagagggtagggagtga

SEQ ID NO: 3847 - protein, 168 aa, Muscodor strobelii
  misc_feature: SGI Peptide ID NO. 560952
  misc_feature (71)..(153): Pfam Id: PF00583 Pfam Desc: Acetyltransferase (GNAT) family
  misc_feature (2)..(168): NCBI GI: 46117402 Blast Desc: FG04543.1 [Gibberella zeae PH-1]
  misc_feature (4)..(163): NCBI GI: 156031028 Blast Desc: SS1G_14122 [Sclerotinia sclerotiorum 1980] gi|154700513|gb|EDO00252.1| SS1G_14122 [Sclerotinia sclerotiorum 1980]
  misc_feature (6)..(168): NCBI GI: 242783890 Blast Desc: glucosamine 6-phosphate N-acetyltransferase, [Talaromyces stipitatus ATCC 10500] gi|218720424|gb|EED19843.1| glucosamine 6-phosphate N-acetyltransferase, [Talaromyces ATCC
  misc_feature (4)..(166): NCBI GI: 238914596 Blast Desc: Gcn5-related N-acetyltransferase [Beauveria bassiana]
  misc_feature (4)..(163): NCBI GI: 169609330 Blast Desc: SNOG_07753 [Phaeosphaeria nodorum SN15] gi|111064099|gb|EAT85219.1| SNOG_07753 [Phaeosphaeria nodorum SN15]
  misc_feature (2)..(163): NCBI GI: 169778849 Blast Desc: [Aspergillus oryzae RIB40] gi|83772628|dbj|BAE62756.1| protein product [Aspergillus oryzae]
  misc_feature (4)..(163): NCBI GI: 70984649 Blast Desc: glucosamine 6-phosphate acetyltransferase [Aspergillus fumigatus Af293] gi|194319983|pdb|2VXK|A Chain A, Structural Comparison Between Aspergillus Fumigatus And Human Gna1 Chain A,
  misc_feature (2)..(163): NCBI GI: 238499423 Blast Desc: glucosamine 6-phosphate acetyltransferase, [Aspergillus flavus NRRL3357] gi|220692699|gb|EED49045.1| glucosamine 6-phosphate acetyltransferase, [Aspergillus flavus
  misc_feature (4)..(163): NCBI GI: 256734276 Blast Desc: [Nectria haematococca mpVI 77-13-4]
  misc_feature (4)..(163): NCBI GI: 159122615 Blast Desc: glucosamine 6-phosphate acetyltransferase, [Aspergillus fumigatus A1163]
  misc_feature (18)..(163): SWISSPROT Homolog: EC 2.3.1.4 Glucosamine-phosphate N-acetyltransferase
  misc_feature: Useful for introducing or modulating the production of volatile compounds
MATLFSPSLISAEVTRSLPSDFTIRPISRDDYAKGFFKCLEVLTWIGEPSEAEFHERFDEMAEVKDTYYFTVIEHEGHIVGTGCLVVEKKFIQNRCKVGHVEEIAVAKEHQGKGLGLKMLQALDSVAVAVGCRRSILNCSPKNEPFYVKCGYKNTGIEMSQEFREGRE

SEQ ID NO: 3848 - DNA, 6377 bp, Muscodor strobelii
  misc_feature: SGI EST ID NO. CUFF.9765.1
  misc_feature: Variant of the nucleotide sequence at SEQ ID NO 3846
ttctttagcgcgcatcatcacatcacagcacagttcggcaagtccaacatttatcatggaagccgaatggccttagtttaatatggtcgctgctcgtagctcattgcgtctgacgctatccgatcatactctgagatggcagacaactccgatgctgcgccggaagccgactctctgggggaccatgacacgttgaagtatcaccttcttggtccctctctgaccaaagccggccaagactctgtcgatcagtctaaggtgtcggagatcatttacaatgcgtccaagggatcgaagttcttcaaccgcgaagaagaaaaggacaaagttctgacgcaaagaatcgagaagatcttgactaagaagcgtgctctcgagaagctggacctcacccgtgagtctcgtgcggcagatcaactgattgctgaacttgagttatctcgcgatctcacgcagcgcattgttcatgtcgactgcgatgcattttatgctgcagtcgagcaacttgatcgccctgagttgaatgatgtcccattcgctgtcggtggcggtgtgttaacgacctgtaactatcatgctcgaaagttcggctgccgcagtggaatggctgggtttgtggctaaaaaattgtgtccacaactacttctcatcaagcctaatcaccaaaagtatggagctaaagctcacgaaattagggacattctagccgattatgacccaagatttgaaagtgcgagtatcgatgaggcctatctcaacataaccgagtactgcgcagaacacagtatgacgtcagaagaagccgttcaacaaatgcgagatgagattcacgaaaagacaaaagtcacggtctccgcaggtatagcagcaaatgcgaagctagcgaagatttgttcgaatctcaacaaaccaaatggtcaatattccatgccaaatgatagaattgagattatgacctttatgcgcgatttatcgactaggaaagtcaatggcatagggcgtgttctagaaagagagctccaagaaataggtattaagacctgtggcgacatatatcctcaacgtcatcttttacgacaattgttcggtgaaaagacatatgactttctcataaggtgtcatctgggtttaggtcgaacaaatatccaacctgccgaagactatgagcgcaaatcagttggcactgaaagcacctttcgggacatgtctgatcctacgcaactgaaggaaaagcttcgttggacagctgactctttggaaaaggatatgcaaaaggctgaatgcaaaggccgaacactagttctgaagatcaagttgcacacctatgaggtttttacgcggcaggtcatattgccgaggtctatctggaaagcagatgatcttttcgacttctcactaccaatactaacgaaactacagcatgaaatccctaatatgaaactgcgccttatgggcttacgatgtacgaatctcgtgagtaccaagaagcccgatgcacgggcgttctttggattgcagcctttgaaatcaaatgaaattgcttccgaagcgcaggattctggcaagagaatggctgatgatttgcctgatgccgatgatgacgaagaaaaattgagactagctcttggcgatagggatggctttcgggaggaaactcaagagattgcaccaaacgctggcgctgggaacgagcctcaagaagagtggtgggattgtccaatctgttccagaccccaaccggtggacgagcaacgtttcaacgagcaccttgatgcatgtctttcccgacaaacaatccgcgacacggtgcagaggaactccacggagagtcctccgcttccagccgatggaccagcacagaagaagttgaaaagcggcccagagaaaaaacgagggcgaccggcggcttcaaccgatccgaaacagaggaagctgttcttcggctgatctctgatctgctgcaatgggttttatatgttcaagagagattcaatcgagcaggagtttctcaattgactgataagcaccaactgcacgataccttatggctgatagtgacctcgagttagcagggggtggcacaaacagtgattggttctatcaaatgcagcccctgggaataacgcactaatcgacatcgaagtaataatacgacgaatacgagcctcacaaagcttcaatcgctgcggcaggcaagtgtcaacgtgccagcgtggatatcatcttgccccacttactactttcagccctgagatagtttcgccatttctacctatgcggaccatcgacaggaatctcaatcttcgcattagtccaaccttcaactagacctctgttactccagcctgtagagcatgcgaagcaatgtcaaaacccggccaatcagaaccctatagactcgtcgatgattctgaaaacgaatactgctatgttcatgaagtcaagctctcgctatgcagcccgttgagcaagcatcacgatcgctacaaatgtctttacaagctctgtcgcgagtggctgggacaatgcctccagaaacactctgagtgcatcgaatctgcagcacatgactacaaagctggatccgctctcgggcgactgggcgccatcatcccaacgcgcttgtgcgtaactctctcattttggatgaaaaaaccgaactgcgccaggaaattctatactataacgagatcataccaaagaaagacaggctgacatattttcatacactagaatagacgttggttctgcgactgtccgccctcgcttgatcaaatttaaagacaaagctcagctcttcggccaaaaaggcgcaagatacccaggttatgcgactttaagttattgctggggcaataccccggataagacacatgtcctgcgtcgagacaatgaaatcgcattctacgacgaattaccaacattgccaaaaacaatagaggaagcaatcttactctgccaacgtattggcgttcgatacctctgggttgattcactttgcatcattcagaccgaagagagcgacggcgatgaatctgattggctcgcagagtcctcgcgcgtcgggtcttactatgccaacagcctcttcaccattgcggcagctggatctagcgataatcaaaacgggtgcttttctttccctaagtcagttcgaagtagaagcggatccgaactcggagcacaaatcactaaataccgagattatatcaaggacaatcaccttccagactggctgagatcaattacgcatcaacgtgtaaccctaaattacgatcaagtatggagccagagcaacgagcgtccaataagtgaggatcctcttctcaagcgtggatgggtggcgcaagagctcgctctgtcgaaccgagttttatggctatccactagaggaatcttctggagctgtggtagcatgacccgcggtcgcctatggattgatgcaacaggactactaccatttaccaggaagagagacaagtctgttcatctggacttcttctcactctttgcaggttggaacagccttttaagagacctctcgcggatgtctctttcgttttcagcggatgccttgccgtcgatctcgggtctttgcaaatacttcgatttggagaaccaagatgtctatctagctggattatggcagagctcgcttcaccatgacatgtgttgggtcaggtgttgggttagaagctgggagaccggtcgtgatgcaccaccaacagcagaagagattcgaattcatcggaaggaaacgaacttgccgtcttggtcaccgctttatctccctttcgcagttgaatactcaaaatttggaaagtgttatcaagcgtgctttatatgccaaaacagacactgcgaactggtaaatgcagccgcccgtctggagtctgcagacaatcacgggcgaatatctagcgctactctcgagttgtctacagtgatttgtagcttccgcccgttgccacagaagatgacagatcgcgatcccgctaatcgctgggttcgatttgtctcaaatagccacgccgatgagaattatttatctcagccagctggaggcgatgtaaaaggcgagttcatcttggactacacaagagacgagagcatggataagtggcaaaaagccagagctatcctgattaatcacgaatcaatacctgaggtgacaatcgcgtttctcttgctgattgaagagacagcagtcccgggcacctaccagcgaatgggagcattcgttgcaaagatgtatccgaaggagactaccggtccccccatgtcgagatttttcgaatatggggttcgtaaacagataactcttatttaagatcggctcataggacgcctttctagatttggtcatgaaactcacaggtctcagatatgccagctcaatcaacctcttacaagtgatccgtagagatgatgaatccaagcccagcaatagcctcgagtcttgcacctatctacactataccagctatttgatgcagtggatggcttaaaacaaagaacttagtgatcgttaatttcatgatgctgaagaagagtacagatccaacatttgaaccgcctggcctccggggactactgctatcaaattattgccacgatcacactatcccgatcgagatgaatgtcgccctagttgagatcggggatttgtgcttttgataggatgagatacctagcttgtcgtgtcaccgtgggaggagcgctgattcagcagcacggccgaagaataaagaacagctaaggccataatcgcgtcttccgcttgtgtgcttggagtgagtaatcgagactactccgatttgacggaatgtacgttacaaagagcgtaactggcagtaaacactttgaggcccgaatattctgttcttctatggttgttgaagtgagaaattgaagtggtaaatattatagtacagcttacacagaccagtcaatctaaatcatcatgccgtgtctgttggcgaacttcatcatcacttacgcacatgcatcatgtggtgacccctcaacccctcattgccgagagcgggccatgtgttaaatggactttcgcattcttcactcatttcgcccacaaccgacttttagcagcaatctcttctgcgaacccggacgctcggcgcagagatactgcaaagatcacttaatcgacatcaccaggaacagccaaaaagtcgagatggcgaccctcttctccccatcgctgatttccgcggaggtcacacggtctctgcctagcgactttacaattcgcccgatatcaagagatgactacgcgaaaggctttttcaagtgtctggaggttctgacatggatcggcgagccgagcgaagcagaattccacgagcgttttgatgagatggctgaggtgaaggacacatactacttcaccgttattgagcacgagggccatatcgttgggactggatgtttagtcgtcgagaagaagtttatacagaatcgctgtaaagtcggacacgtcgaagagatcgccgtagcgaaggagcatcaggggaaaggactaggcttgaagatgttgcaagcgcttgattcggtggccgtagctgtgggttgcagaaggagtatactgaattgttcaccgaagaatgagccgttttatgtgaagtgtgggtataagaatacgggaattgagatgtcgcaagagtttagagagggtagggagtgaaatcgaagagtgtttgattctctttggtgatggtctttgaagttggcatcgtattcggattcgggatgtggcatagtagttgatgatggtgatcggtcgacgatgtcgggatactggttcgagtctgtgccgaggcgaagcggaagatgagtgaatttattgtattctctattgctcgagagtctcggtcggttttgtgaatcaggcggattcttaggacttatatctcccattccgagtcctggtcccagtcccaatccttgaacaatggcaaggtcacacatcaccatccttccaggcaacgcggtcaatgcaagtccgtcaggcaccgatccatcgtacgtatcaggcatcatttcaatattcaactccatcacacctcttcagattggtaagcttaccccgactaatatatactctctccttaaaccggtgcctaacacagatccaggtgagtgcgggccacaggactccagtcatccgcaatctcccataagacggcaaccatcgacaaggtacggatcgtcaacccatgaaataactgccaactccgtaaaataccatgcataaacgatctatccacatagccctaccttagtcattcccacgcggcaattcaacccgagagcctggtcacgatctcgacccctcaatgtatcaatgtggagtgctg

SEQ ID NO: 3849 - DNA, 1812 bp, Muscodor strobelii
  misc_feature: SGI cDNA ID NO. 560953
  misc_feature: Elevated expression when VOC is produced
  misc_feature: Encodes the peptide sequence at SEQ ID NO 3850
atggcagacaactccgatgctgcgccggaagccgactctctgggggaccatgacacgttgaagtatcaccttcttggtccctctctgaccaaagccggccaagactctgtcgatcagtctaaggtgtcggagatcatttacaatgcgtccaagggatcgaagttcttcaaccgcgaagaagaaaaggacaaagttctgacgcaaagaatcgagaagatcttgactaagaagcgtgctctcgagaagctggacctcacccgtgagtctcgtgcggcagatcaactgattgctgaacttgagttatctcgcgatctcacgcagcgcattgttcatgtcgactgcgatgcattttatgctgcagtcgagcaacttgatcgccctgagttgaatgatgtcccattcgctgtcggtggcggtgtgttaacgacctgtaactatcatgctcgaaagttcggctgccgcagtggaatggctgggtttgtggctaaaaaattgtgtccacaactacttctcatcaagcctaatcaccaaaagtatggagctaaagctcacgaaattagggacattctagccgattatgacccaagatttgaaagtgcgagtatcgatgaggcctatctcaacataaccgagtactgcgcagaacacagtatgacgtcagaagaagccgttcaacaaatgcgagatgagattcacgaaaagacaaaagtcacggtctccgcaggtatagcagcaaatgcgaagctagcgaagatttgttcgaatctcaacaaaccaaatggtcaatattccatgccaaatgatagaattgagattatgacctttatgcgcgatttatcgactaggaaagtcaatggcatagggcgtgttctagaaagagagctccaagaaataggtattaagacctgtggcgacatatatcctcaacgtcatcttttacgacaattgttcggtgaaaagacatatgactttctcataaggtgtcatctgggtttaggtcgaacaaatatccaacctgccgaagactatgagcgcaaatcagttggcactgaaagcacctttcgggacatgtctgatcctacgcaactgaaggaaaagcttcgttggacagctgactctttggaaaaggatatgcaaaaggctgaatgcaaaggccgaacactagttctgaagatcaagttgcacacctatgaggtttttacgcggcaggtcatattgccgaggtctatctggaaagcagatgatcttttcgacttctcactaccaatactaacgaaactacagcatgaaatccctaatatgaaactgcgccttatgggcttacgatgtacgaatctcgtgagtaccaagaagcccgatgcacgggcgttctttggattgcagcctttgaaatcaaatgaaattgcttccgaagcgcaggattctggcaagagaatggctgatgatttgcctgatgccgatgatgacgaagaaaaattgagactagctcttggcgatagggatggctttcgggaggaaactcaagagattgcaccaaacgctggcgctgggaacgagcctcaagaagagtggtgggattgtccaatctgttccagaccccaaccggtggacgagcaacgtttcaacgagcaccttgatgcatgtctttcccgacaaacaatccgcgacacggtgcagaggaactccacggagagtcctccgcttccagccgatggaccagcacagaagaagttgaaaagcggcccagagaaaaaacgagggcgaccggcggcttcaaccgatccgaaacagaggaagctgttcttcggctga

SEQ ID NO: 3850 - protein, 603 aa, Muscodor strobelii
  misc_feature: SGI Peptide ID NO. 560953
  misc_feature (112)..(448): Pfam Id: PF00817 Pfam Desc: impB/mucB/samB family
  misc_feature (3)..(603): NCBI GI: 46109048 Blast Desc: FG01406.1 [Gibberella zeae PH-1]
  misc_feature (15)..(602): NCBI GI: 171680875 Blast Desc: protein product [Podospora anserina] gi|27764332|emb|CAD60612.1| protein product [Podospora anserina] gi|170940065|emb|CAP65292.1| protein product [Podospora anserina]
  misc_feature (16)..(603): NCBI GI: 116200590 Blast Desc: CHGG_10840 [Chaetomium globosum CBS 148.51] gi|88175554|gb|EAQ83022.1| CHGG_10840 [Chaetomium globosum CBS 148.51]
  misc_feature (1)..(603): NCBI GI: 145612599 Blast Desc: MGG_07238 [Magnaporthe grisea 70-15] gi|145019736|gb|EDK03964.1| MGG_07238 [Magnaporthe grisea 70-15]
  misc_feature (19)..(603): NCBI GI: 85092716 Blast Desc: NCU02457 [Neurospora crassa OR74A] gi|28920947|gb|EAA30276.1| NCU02457 [Neurospora crassa OR74A]
  misc_feature (5)..(602): NCBI GI: 154322288 Blast Desc: BC1G_01291 [Botryotinia fuckeliana B05.10] gi|150850538|gb|EDN25731.1| BC1G_01291 [Botryotinia fuckeliana B05.10]
  misc_feature (2)..(603): NCBI GI: 242780241 Blast Desc: DNA-directed polymerase kappa, [Talaromyces stipitatus ATCC 10500] gi|218719701|gb|EED19120.1| DNA-directed polymerase kappa, [Talaromyces stipitatus ATCC 10500]
  misc_feature (2)..(602): NCBI GI: 119488628 Blast Desc: DNA-directed polymerase kappa, [Neosartorya fischeri NRRL 181] gi|119410922|gb|EAW20867.1| DNA-directed polymerase kappa, [Neosartorya fischeri NRRL 181]
  misc_feature (17)..(603): NCBI GI: 212526212 Blast Desc: DNA-directed polymerase kappa, [Penicillium marneffei ATCC 18224] gi|210072661|gb|EEA26748.1| DNA-directed polymerase kappa, [Penicillium marneffei ATCC 18224]
  misc_feature (2)..(602): NCBI GI: 70982554 Blast Desc: DNA-directed polymerase kappa [Aspergillus fumigatus Af293] gi|66844429|gb|EAL84767.1| DNA-directed polymerase kappa, [Aspergillus fumigatus Af293] gi|159122955|gb|EDP48075.1| kappa,
  misc_feature (11)..(448): SWISSPROT Homolog: EC 2.7.7.7 DNA-directed DNA polymerase
  misc_feature: Useful for introducing or modulating the production of volatile compounds
MADNSDAAPEADSLGDHDTLKYHLLGPSLTKAGQDSVDQSKVSEIIYNASKGSKFFNREEEKDKVLTQRIEKILTKKRALEKLDLTRESRAADQLIAELELSRDLTQRIVHVDCDAFYAAVEQLDRPELNDVPFAVGGGVLTTCNYHARKFGCRSGMAGFVAKKLCPQLLLIKPNHQKYGAKAHEIRDILADYDPRFESASIDEAYLNITEYCAEHSMTSEEAVQQMRDEIHEKTKVTVSAGIAANAKLAKICSNLNKPNGQYSMPNDRIEIMTFMRDLSTRKVNGIGRVLERELQEIGIKTCGDIYPQRHLLRQLFGEKTYDFLIRCHLGLGRTNIQPAEDYERKSVGTESTFRDMSDPTQLKEKLRWTADSLEKDMQKAECKGRTLVLKIKLHTYEVFTRQVILPRSIWKADDLFDFSLPILTKLQHEIPNMKLRLMGLRCTNLVSTKKPDARAFFGLQPLKSNEIASEAQDSGKRMADDLPDADDDEEKLRLALGDRDGFREETQEIAPNAGAGNEPQEEWWDCPICSRPQPVDEQRFNEHLDACLSRQTIRDTVQRNSTESPPLPADGPAQKKLKSGPEKKRGRPAASTDPKQRKLFFG

SEQ ID NO: 3851 - DNA, 6377 bp, Muscodor strobelii; identical to SEQ ID NO: 3848
  misc_feature: SGI EST ID NO. CUFF.9765.1
  misc_feature: Variant of the nucleotide sequence at SEQ ID NO 3849

SEQ ID NO: 3852 - DNA, 360 bp, Muscodor strobelii
  misc_feature: SGI cDNA ID NO. 560954
  misc_feature: Elevated expression when VOC is produced
  misc_feature: Encodes the peptide sequence at SEQ ID NO 3853
atggctgacaacacaggcaccgcgaccccgcccgtagacgagacgcccatctctcccgtcaaccctgaccagaaacgtaagatgtctctggaacagcacttgaagggaagacccgacaggtctgaactcgtcgataagaacatcctcccttcatctacagccgcgcccagcctgcaagagaaacaaaaagagcttgagaaacacatgcgagctgattcgctcaatgacaagatctcccatcgccctgcacccgaagatcttgtcaagaccggtgtgctccacgaggatcctcgctctcccgacgaaaagtacgccgaagccatcgaggacgaatacgccaagagggagggcggtgcctag

SEQ ID NO: 3853 - protein, 119 aa, Muscodor strobelii
  misc_feature: SGI Peptide ID NO. 560954
  misc_feature (72)..(97): Pfam Id: PF02755 Pfam Desc: RPEL repeat
  misc_feature (8)..(119): NCBI GI: 39971843 Blast Desc: MGG_07237 [Magnaporthe grisea 70-15] gi|145019735|gb|EDK03963.1| MGG_07237 [Magnaporthe grisea 70-15]
  misc_feature (3)..(119): NCBI GI: 171680883 Blast Desc: protein product [Podospora anserina] gi|27764336|emb|CAD60616.1| protein product [Podospora anserina] gi|170940069|emb|CAP65296.1| protein product [Podospora anserina]
  misc_feature (1)..(119): NCBI GI: 116200584 Blast Desc: CHGG_10837 [Chaetomium globosum CBS 148.51] gi|88175551|gb|EAQ83019.1| CHGG_10837 [Chaetomium globosum CBS 148.51]
  misc_feature (1)..(119): NCBI GI: 256730630 Blast Desc: [Nectria haematococca mpVI 77-13-4]
  misc_feature (1)..(119): NCBI GI: 46109054 Blast Desc: FG01409.1 [Gibberella zeae PH-1]
  misc_feature (9)..(119): NCBI GI: 261358780 Blast Desc: RPEL repeat protein [Verticillium albo-atrum VaMs.102]
  misc_feature (29)..(119): NCBI GI: 156046773 Blast Desc: SS1G_09470 [Sclerotinia sclerotiorum 1980] gi|154693865|gb|EDN93603.1| SS1G_09470 [Sclerotinia sclerotiorum 1980]
  misc_feature (29)..(119): NCBI GI: 154322286 Blast Desc: BC1G_01290 [Botryotinia fuckeliana B05.10] gi|150850537|gb|EDN25730.1| BC1G_01290 [Botryotinia fuckeliana B05.10]
  misc_feature (24)..(100): NCBI GI: 115402385 Blast Desc: conserved [Aspergillus terreus NIH2624] gi|114189115|gb|EAU30815.1| conserved [Aspergillus terreus NIH2624]
  misc_feature (29)..(96): NCBI GI: 240104899 Blast Desc: conserved [Coccidioides posadasii C735 delta SOWgp]
  misc_feature: Useful for introducing or modulating the production of volatile compounds
MADNTGTATPPVDETPISPVNPDQKRKMSLEQHLKGRPDRSELVDKNILPSSTAAPSLQEKQKELEKHMRADSLNDKISHRPAPEDLVKTGVLHEDPRSPDEKYAEAIEDEYAKREGGA

SEQ ID NO: 3854 - DNA, 947 bp, Muscodor strobelii
  misc_feature: SGI EST ID NO. CUFF.9738.0
  misc_feature: Variant of the nucleotide sequence at SEQ ID NO 3852
ggtcaagagctgaggtcctttgaaacaacaacaacaagaagagtctccctgaccaaccccattcttgcgaagctctccactctgcactgttgtcccaagactcgatctctgtgcatcctcatcaacaattaattgacacttcccaacgaacagaacccacacgaactcggcgtttgcctgcccattaggttccacgacttacatcatggctgacaacacaggcaccgcgaccccgcccgtagacgagacgcccatctctcccgtcaaccctgaccagaaacgtaagatgtctctggaacagcacttgaagggaagacccgacaggtctgaactcgtcgatagtaggaatcccatatcaattcaatgcccttttaatactatttgcacctcgtcggcaagaaattgactgatagccaccggtcctcagagaacatcctcccttcatctacagccgcgcccagcctgcaagagaaacaaaaagagcttgagaaacacatgcgagctgattcgctcaatgacaagatctcccatcgccctgcacccgaagatcttgtcaagaccggtgtgctccacgaggatcctcgctctcccgacgaaaagtacgccgaagccatcgaggacgaatacgccaagagggagggcggtgcctagatggctttgatatttggccaatttgcaagcagcaactggtactatgaaggtttcattgtcaagagcatcagacaagaaagcaacccaaaaaaagactatatactggccctgagatgggacgtcggtttgcgtcgctatatgactgtttccattatctttgttcatctaggtattttttgtaggactaaagcattgtgcgtttacctcaaccaaacttgccatgtccatggacgacaatctgttctctcgtgtagacacatttaaatgaaacgaataacgattacattcggcttctg

SEQ ID NO: 3855 - DNA, 1152 bp, Muscodor strobelii
  misc_feature: SGI cDNA ID NO. 560955
  misc_feature: Encodes the peptide sequence at SEQ ID NO 3856
atgatcggcatcaagctcacgctttcagtggcgttcttcgcgggtctggccatctcatcgcctacctcggccgatcagcaaggaggaattggtgtctgttcggcctcgaaacagacatgtcacagcagcaaggacggcacggtgtttggattgtgccaaagtgattgtaccaaagacggcaacgcgtgctattcttatgcgaactgtgagtctcgattcttctccatatcggcgccttcactgagacttcagcttactttgggcgcattatacgactatgacggtatcatggctcttgcctcgctgcctaaggggatagtcatagtgagcaagggcgcacagcccatcgatagcgtacccggattgctggatttttccaagagcgatggcaaccgccagtctgactcgcgcatgattggtgctaacttgcgccaaaaccgaaccttgggttacagagttcatcatggtacagacgacggtctgtacggaaatccgtacagcggactcgaggaggctgccgaagccacctggcccaacgtcccgggagcccgtgcccgacagccgttcaagcgggaagattgggatcgtgtattcggctctgagttcgacatagtgaccgatctggcgtcgccgttcgttgaccagctgatccgtgcatatcctgatgccaaggtagtagtagtccagcgtgactttgaatcatggtggccgagttattactcgggtgttgtattggaacttttcacgccggtgcagaagactatactgtggttatgcgaccacgttctaggagtgcctgcaggaccagccatgcacaagaccctcctaggccagttcaacgcaaagaacatgcatgagatcgaggagcacgcccgccaaacatacgacgagtactaccagcgcatccgtgaaatggtgccgccggaaaagagactggaattcaatctgaatgatggttgggagcccttgtgtgcattcctgggcaaggacattccagatgtgccgtttccgcgcgagaacgatcgccagacgttgtacaaacaaaacaggcagacaagcaacaatgtggtgtacaaaagcatgtttaagattctgcaatatcttgctccagtcgcggtaggcggatactcaatatggtatttgtggaaatga

SEQ ID NO: 3856 - protein, 383 aa, Muscodor strobelii
  misc_feature: SGI Peptide ID NO. 560955
  misc_feature (144)..(349): NCBI GI: 154304931 Blast Desc: BC1G_09051 [Botryotinia fuckeliana B05.10] gi|150853913|gb|EDN29105.1| BC1G_09051 [Botryotinia fuckeliana B05.10]
  misc_feature (191)..(382): NCBI GI: 116179296 Blast Desc: CHGG_00276 [Chaetomium globosum CBS 148.51] gi|88184573|gb|EAQ92041.1| CHGG_00276 [Chaetomium globosum CBS 148.51]
  misc_feature (147)..(383): NCBI GI: 46116006 Blast Desc: FG03845.1 [Gibberella zeae PH-1]
  misc_feature (149)..(350): NCBI GI: 238837557 Blast Desc: conserved [Microsporum canis CBS 113480]
  misc_feature (147)..(351): NCBI GI: 116198675 Blast Desc: CHGG_07493 [Chaetomium globosum CBS 148.51] gi|88178772|gb|EAQ86240.1| CHGG_07493 [Chaetomium globosum CBS 148.51]
  misc_feature (149)..(378): NCBI GI: 169605543 Blast Desc: SNOG_05797 [Phaeosphaeria nodorum SN15] gi|160706786|gb|EAT86861.2| SNOG_05797 [Phaeosphaeria nodorum SN15]
  misc_feature (149)..(378): NCBI GI: 145607804 Blast Desc: MGG_10067 [Magnaporthe grisea 70-15] gi|145015300|gb|EDJ99836.1| MGG_10067 [Magnaporthe grisea 70-15]
  misc_feature (143)..(365): NCBI GI: 256728010 Blast Desc: NECHADRAFT_45960 [Nectria haematococca mpVI 77-13-4]
  misc_feature (149)..(341): NCBI GI: 256728993 Blast Desc: NECHADRAFT_93184 [Nectria haematococca mpVI 77-13-4]
  misc_feature (149)..(381): NCBI GI: 46120546 Blast Desc: FG04920.1 [Gibberella zeae PH-1]
MIGIKLTLSVAFFAGLAISSPTSADQQGGIGVCSASKQTCHSSKDGTVFGLCQSDCTKDGNACYSYANCESRFFSISAPSLRLQLTLGALYDYDGIMALASLPKGIVIVSKGAQPIDSVPGLLDFSKSDGNRQSDSRMIGANLRQNRTLGYRVHHGTDDGLYGNPYSGLEEAAEATWPNVPGARARQPFKREDWDRVFGSEFDIVTDLASPFVDQLIRAYPDAKVVVVQRDFESWWPSYYSGVVLELFTPVQKTILWLCDHVLGVPAGPAMHKTLLGQFNAKNMHEIEEHARQTYDEYYQRIREMVPPEKRLEFNLNDGWEPLCAFLGKDIPDVPFPRENDRQTLYKQNRQTSNNVVYKSMFKILQYLAPVAVGGYSIWYLWK

SEQ ID NO: 3857 - DNA, 886 bp, Muscodor strobelii
  misc_feature: SGI EST ID NO. CUFF.9704.0
  misc_feature: Variant of the nucleotide sequence at SEQ ID NO 3855
cagaatagaacgactctagcccatgacgagtaagaaaatagactaacatattttgaacaccagaccgaaccttgggttacagagttcatcatggtacagacgacggtctgtacggaaatccgtacagcggactcgaggaggctgccgaagccacctggcccaacgtcccgggagcccgtgcccgacagccgttcaagcgggaagattgggatcgtgtattcggctctgagttcgacatagtgaccgatctggcgtcgccgttcgttgaccagctgatccgtgcatatcctgatgccaaggtagtagtagtccagcgtgactttgaatcatggtggccgagttattactcgggtgttgtattggaacttttcacgccggtgcagaagactatactgtggttatgcgaccacgttctaggagtgcctgcaggaccagccatgcacaagaccctcctaggccagttcaacgcaaagaacatgcatgagatcgaggagcacgcccgccaaacatacgacgagtactaccagcgcatccgtgaaatggtgccgccggaaaagagactggaattcaatctgaatgatggttgggagcccttgtgtgcattcctgggcaaggacattccagatgtgccgtttccgcgcgagaacgatcgccagacgttgtacaaacaaaacaggcagacaagcaacaatgtggtgtacaaaagcatgtttaagattctgcaatatcttgctccagtcgcggtaggcggatactcaatatggtatttgtggaaatgacaagctctggctgctgtcagagcgcctgtataatcataagagggctgaacggaagctagacagaaatatcgttgctcaaaactcgtttctcattgtgtttatccttc

SEQ ID NO: 3858 - DNA, 387 bp, Muscodor strobelii
  misc_feature: SGI cDNA ID NO. 560956
  misc_feature: Elevated expression when VOC is produced
  misc_feature: Encodes the peptide sequence at SEQ ID NO 3859
atggctgagaagacacccgttgttaccgacaaggctcccaaggctctgcctggcatctatagccaggcaatcaaggccaatggcttcgtcttcgtttctggtgccgtccctatggaccccgtctcaatgcaaatcattcctggtgacatccaggcgcacactcatcaatgcatcaagaacttaagcgccattctcgaggcgtcgggatccgacatcaccaaggtcgtcaaggtgaacgtcttcctcgataacatggacaactttgccgccatgaacgagatttactcgcaatactggggcgatgtgaagccgtgcagaacttgtgttgctgtcaagacactgccactgaatgtcgacgtcgagatcgagtgcacggcgacctattaa

SEQ ID NO: 3859 - protein, 128 aa, Muscodor strobelii
  misc_feature: SGI Peptide ID NO. 560956
  misc_feature (9)..(128): Pfam Id: PF01042 Pfam Desc: Endoribonuclease L-PSP
  misc_feature (1)..(126): NCBI GI: 39969661 Blast Desc: L-PSP endoribonuclease family protein Brt1 [Magnaporthe grisea 70-15] gi|145012144|gb|EDJ96800.1| L-PSP endoribonuclease family protein Brt1 [Magnaporthe grisea 70-15]
  misc_feature (1)..(126): NCBI GI: 242814134 Blast Desc: L-PSP endoribonuclease family protein Brt1, [Talaromyces stipitatus ATCC 10500] gi|218714649|gb|EED14072.1| L-PSP endoribonuclease family protein Brt1, [Talaromyces ATCC
  misc_feature (1)..(126): NCBI GI: 145242758 Blast Desc: An09g06380 [Aspergillus niger] gi|134078508|emb|CAK40430.1| protein product [Aspergillus niger]
  misc_feature (1)..(126): NCBI GI: 212544918 Blast Desc: L-PSP endoribonuclease family protein Brt1, [Penicillium marneffei ATCC 18224] gi|210065582|gb|EEA19676.1| L-PSP endoribonuclease family protein Brt1, [Penicillium ATCC
  misc_feature (1)..(126): NCBI GI: 255949070 Blast Desc: Pc22g13780 [Penicillium chrysogenum Wisconsin 54-1255] gi|211592319|emb|CAP98666.1| Pc22g13780 [Penicillium chrysogenum Wisconsin 54-1255]
  misc_feature (1)..(126): NCBI GI: 70984920 Blast Desc: L-PSP endoribonuclease family protein Brt1 [Aspergillus fumigatus Af293] gi|66845594|gb|EAL85928.1| L-PSP endoribonuclease family protein Brt1, [Aspergillus fumigatus
  misc_feature (1)..(126): NCBI GI: 119498799 Blast Desc: L-PSP endoribonuclease family protein (Brt1), [Neosartorya fischeri NRRL 181] gi|119414321|gb|EAW24260.1| L-PSP endoribonuclease family protein (Brt1), [Neosartorya fischeri
  misc_feature (1)..(126): NCBI GI: 259481028 Blast Desc: TPA: L-PSP endoribonuclease family protein Brt1, (AFU_orthologue; AFUA_5G03780) [Aspergillus nidulans FGSC A4]
  misc_feature (1)..(126): NCBI GI: 121718256 Blast Desc: L-PSP endoribonuclease family protein (Brt1), [Aspergillus clavatus NRRL 1] gi|119404348|gb|EAW14724.1| L-PSP endoribonuclease family protein (Brt1), [Aspergillus clavatus 1]
  misc_feature (1)..(124): NCBI GI: 67902512 Blast Desc: AN8243.2 [Aspergillus nidulans FGSC A4] gi|40739791|gb|EAA58981.1| AN8243.2 [Aspergillus nidulans FGSC A4]
  misc_feature (14)..(115): SWISSPROT Homolog: EC 3.5.99.5 2-aminomuconate deaminase
  misc_feature: Useful for introducing or modulating the production of volatile compounds
MAEKTPVVTDKAPKALPGIYSQAIKANGFVFVSGAVPMDPVSMQIIPGDIQAHTHQCIKNLSAILEASGSDITKVVKVNVFLDNMDNFAAMNEIYSQYWGDVKPCRTCVAVKTLPLNVDVEIECTATY

SEQ ID NO: 3860 - DNA, 1198 bp, Muscodor strobelii
  misc_feature: SGI EST ID NO. CUFF.9725.0
  misc_feature: Variant of the nucleotide sequence at SEQ ID NO 3858
tatatattagactgtcgggtcgccgtatcgcgaatgatgagtatataagtgtctgctcatacccaatttgctgagatcccaagttctccatttgcattggggtcacagtcaccagagttccacagtgcccctcacaacccctcagtctccagcagaagcgtagcgattgcttagcaaaccgtagtagaaacgactataaaacccaggacttctaaatgctgagacctctgttgacgagacgtgcacctgtctccctaacatctaggttccatatcaatcgttgttcttccttccgcctgacagcgaaaattacatcaaactcctataactcctcgaagcatccccagtctcaccactacagagcgttctcccaatcttccaccatggctgagaagacacccgttgttaccgacaaggctcccaaggctctgcctggcatctatagccaggcaatcaaggccaatggcttcgtcttcgtttctggtgccgtccctatggaccccgtctcaatgcaaatcattcctggtgacatccaggcgcacactcatcaatgcatcaagaacttaagcgccattctcgaggcgtcgggatccgacatcaccaaggtcgtcaaggtgaacgtcttcctcgataacatggacaactttgccgccatgaacgagatttactcgcaatactggggcgatgtgaagccgtgcagaacttgtgttgctgtcaagacactgccactgaatgtcgacgtcgagatcgagtgcacggcgacctattaaaatgcccgagctaaacttggcattcggaggcattaagcttatattggcatctctactccacgtcaaaatgcaagatgacacttgccgcgtcggaactttgggaacttcggtgaggattatcatcaggatctagggacctgatcgttaagctctgggcgtgtaattcgccttgtattcacacgatgtatcacgaagataagataaatctccacccaaataattgcacactcgaatcgtctttcacatcgcacaatgggctccgctcattaaaggctccgaaacatatgcacctgactcgagcatagtcggcttaaaatagtttgaaaataatgatggagcgcctctcataagttgcaattctcacttcatttcgggctgtaaatctacaacttaggtgccaatagatacaaaagctcttaccggctgct

SEQ ID NO: 3861 - DNA, 1416 bp, Muscodor strobelii
  misc_feature: SGI cDNA ID NO. 560957
  misc_feature: Elevated expression when VOC is produced
  misc_feature: Encodes the peptide sequence at SEQ ID NO 3862
atggcggatgcccaggacagagccgactcgggctccgtgaccaataagaaaatctccggcgatatcgagtatcagaatgatgatattgccagtgaaacgcctcaagtcgtcgacagtgccgccgaaagagccctttaccgcaagtttgacttccgattgctgcccgtattggcaatcatgtatctgttcaatgctctcgataagggcaatctcggtaatgcacagactgcaggcctgtctgatgacttgcacttcgcagatggccaatacaatctgatcgtcggaatcttctttgtgccttatgtacgtatacacacgggtctcacattcggacccgggatttttgccctgcgttggttcctcggcactgccgagagtggcttcttcccgcttgttatcttctatcttacgacattctaccgacgaggtgaactagctcgacgactggctatcttctacgctgcatccaatattgccaatgctttttctggtcttcttgcatttggtgttttccaaattaaatcaaaccgggtagatcacgcttggagatggctgttcatcatcgagggtagtttgaccgtggtgttctcggtcttcgcgttcttatatctccctaagaatgctgctgaggcaagatttttgaatgaagaagaaaaggcgctcgcataccaccgtattcatgttgactcttccgccgttgtcaacgaggaattcaacttgaaggagtctctgaagattttcagacgcccgactacgtacggcttcttattgattgaactcgcattgggagtgccgcttcaagcagtcgcactcttcttgccgcagattgttcagcgagtcattactggaactgtgaaggtcaatctttacacggtagcgccgaatattacaggagccgtaactctgcttattttggcattttcttccgattttctccggatccgcttccccttcatctgcttgggattcgcccttacgctaattggcttcatcatttacgccgctatcgatgatgtccatgcacagaataagcttgcgtattttgcgacgtttatgatgacgtggggaacctctgctccttctgttttactgagtacttggtataataacaacgtcgcacatgaaggcgagcgattaactttgacatcggtcggtgttcccttcgcgaatctgatggggctggtggcaagcaacatcttccgaaaagaagacgctccgaagtacctgcccgccctcatcacaactgccagttttggtggattcgggtttattgtcacagcatgcttaggattttttatgctgtgggacaacaagcgccgaaaccgcagacaaggcgtgaaaatttctgcacgagatgttcctacatcaagacttagggatgggccaaaggtggacgatttcaggtggttcttgtag

SEQ ID NO: 3862 - protein, 471 aa, Muscodor strobelii
  misc_feature: SGI Peptide ID NO. 560957
  misc_feature (57)..(397): Pfam Id: PF07690 Pfam Desc: Major Facilitator Superfamily
  misc_feature (106)..(397): Pfam Id: PF07690 Pfam Desc: Major Facilitator Superfamily
  misc_feature (9)..(471): NCBI GI: 225559977 Blast Desc: conserved [Ajellomyces capsulatus G186AR]
  misc_feature (25)..(471): NCBI GI: 261199984 Blast Desc: MFS transporter [Ajellomyces dermatitidis SLH14081] gi|239594601|gb|EEQ77182.1| MFS transporter [Ajellomyces dermatitidis SLH14081] gi|239607990|gb|EEQ84977.1| MFS ER-3]
  misc_feature (25)..(471): NCBI GI: 119184064 Blast Desc: CIMG_06881 [Coccidioides immitis RS]
  misc_feature (3)..(471): NCBI GI: 115433224 Blast Desc: ATEG_08128 [Aspergillus terreus NIH2624] gi|114189601|gb|EAU31301.1| ATEG_08128 [Aspergillus terreus NIH2624]
  misc_feature (12)..(471): NCBI GI: 242783482 Blast Desc: MFS transporter, [Talaromyces stipitatus ATCC 10500] gi|218720343|gb|EED19762.1| MFS transporter, [Talaromyces stipitatus ATCC 10500]
  misc_feature (25)..(471): NCBI GI: 240109773 Blast Desc: Major Facilitator Superfamily protein [Coccidioides posadasii C735 delta SOWgp]
  misc_feature (41)..(471): NCBI GI: 169777479 Blast Desc: [Aspergillus oryzae RIB40] gi|83771942|dbj|BAE62072.1| protein product [Aspergillus oryzae]
  misc_feature (41)..(471): NCBI GI: 238494622 Blast Desc: MFS transporter, [Aspergillus flavus NRRL3357] gi|220695197|gb|EED51540.1| MFS transporter, [Aspergillus flavus NRRL3357]
  misc_feature (9)..(471): NCBI GI: 240276153 Blast Desc: MFS transporter [Ajellomyces capsulatus H143]
  misc_feature (3)..(471): NCBI GI: 255951234 Blast Desc: Pc22g24960 [Penicillium chrysogenum Wisconsin 54-1255] gi|211593401|emb|CAP99784.1| Pc22g24960 [Penicillium chrysogenum Wisconsin 54-1255]
  misc_feature: Useful for introducing or modulating the production of volatile compounds
MADAQDRADSGSVTNKKISGDIEYQNDDIASETPQVVDSAAERALYRKFDFRLLPVLAIMYLFNALDKGNLGNAQTAGLSDDLHFADGQYNLIVGIFFVPYVRIHTGLTFGPGIFALRWFLGTAESGFFPLVIFYLTTFYRRGELARRLAIFYAASNIANAFSGLLAFGVFQIKSNRVDHAWRWLFIIEGSLTVVFSVFAFLYLPKNAAEARFLNEEEKALAYHRIHVDSSAVVNEEFNLKESLKIFRRPTTYGFLLIELALGVPLQAVALFLPQIVQRVITGTVKVNLYTVAPNITGAVTLLILAFSSDFLRIRFPFICLGFALTLIGFIIYAAIDDVHAQNKLAYFATFMMTWGTSAPSVLLSTWYNNNVAHEGERLTLTSVGVPFANLMGLVASNIFRKEDAPKYLPALITTASFGGFGFIVTACLGFFMLWDNKRRNRRQGVKISARDVPTSRLRDGPKVDDFRWFL

SEQ ID NO: 3863 - DNA, 2197 bp, Muscodor strobelii
  misc_feature: SGI EST ID NO. CUFF.9733.0
  misc_feature: Variant of the nucleotide sequence at SEQ ID NO 3861
tttgcccctccggttgcaatgctcggaaagaagattggacccgctcgaatgcttccaattttgatgttcatatttggaacattgacgctgttgactgcgaccgcgaaaaacttcagcgggatttttgccctgcgttggttcctcggcactgccgagagtggcttcttcccgcttgttatcttctatcttacgacattctaccgacgaggtgaactagctcgacgactggctatcttctacgctgcatccaatattgccaatgctttttctggtcttcttgcatttggtgttttccaaattaaatcaaaccgggtagatcacgcttggagatggctgttcatcatcgagggtagtttgaccgtggtgttctcggtcttcgcgttcttatatctccctaagaatgctgctgaggcaagatttttgaatgaagaagaaaaggcgctcgcataccaccgtattcatgttgactcttccgccgttgtcaacgaggaattcaacttgaaggagtctctgaagattttcagacgcccgactacgtacggcttcttattgattgaactcgcattgggagtgccgcttcaagcagtcgcactcttcttgccgcagattgttcagcgagtcattactggaactgtgaaggtcaatctttacacggtagcgccgaatattacaggagccgtaactctgcttattttggcattttcttccgattttctccggatccgcttccccttcatctgcttgggattcgcccttacgctaattggcttcatcatttacgccgctatcgatgatgtccatgcacagaataagcttgcgtattttgcgacgtttatgatgacgtggggaacctctgctccttctgttttactgagtacttggtataataacaacgtcgcacatgaaggcgagcgattaactttgacatcggtcggtgttcccttcgcgaatctgatggggctggtggcaagcaacatcttccgaaaagaagacgctccgaagtacctgcccgccctcatcacaactgccagttttggtggattcgggtttattgtcacagcatgcttaggattttttatgctgtgggacaacaagcgccgaaaccgcagacaaggcgtgaaaatttctgcacgagatgttcctacatcaagacttagggatgggccaaaggtggacgatttcaggtggttcttgtagagttgcatagactgtcgctacatttataggtcgaagctgtgaagaaccctttgcagggatagtctataagatcagtggctcagccgaccgtgtgctattatgtggtttggtaatttaaccttggtcaacatattataatattataacctccccaaaaaatccccttcctctcgggacatcgtttctctcattccatggccttttctgattatctgagccctactaggctatttccgcagatctttgttttaggattaagattctgtaaatgcgactcccgaatcagcccgtatccgcgtaggacttaaaggcgtctcctcgttagtcttcaccgcgttgtatttatctgcatcgaacttccagatcatgcccgtctccttgcgcgtggcaagtctatcggccacgggatcttctgtggcttctgtgaaatatcgcctttcccatatccggccggcggctttttcttcctttcgcaaagcgcgctgcgcattctcgattttgctcttctcccgcgctactcccatcatatcgtttctcatgatcgcgtcgcatacctgctgccatgcacgtcgcgagtcgagtgggtctttatctggcaaagatttgacttgtagtggcgttcggcatagtttcgtgagatcaactgtttctagtactttcccacgagcgtctttcaccgtgtatgtcccattccatttcccatcgagtatgtaaagcggctctttgtcgcggctcccatctcgatggattgtcgcagaaaaagcattactctgtccaccgagccagcccttgcactcgtaattgatgcgcgtcgtaaaccccgatgagctatgtatgtgcgatgatccgctgagctcgggattgagttggaaagacatcataccctcaatatgtgcctttggcatcgttatccaatgcgtctcgtcatgtgcgtcaatgtgtaacaagctgtaaccccgccgctcaatattcaccgttgagctgaagtaggactttggtg

SEQ ID NO: 3864 - DNA, 1224 bp, Muscodor strobelii
  misc_feature: SGI cDNA ID NO. 560958
  misc_feature: Elevated expression when VOC is produced
  misc_feature: Encodes the peptide sequence at SEQ ID NO 3865
atgtcgttgacgataacttcctcgaagtgtgaagctcgcaaggagcaatcgcagaataagtcggcttggtttcagttcataaagtcaatagcatcttccaaaggcgacctcgcggctctttcggcaccaccattccttctcgcacctcaatcgattgtggagttcagcgcatattgggcagagcaccctagtcttttcgtagcaccagcacacgaaccaagcgctgagaagcgtgccttattagtcctcaaatggttcatgagcacactcacgcgacaacacgcgagcaaggatgagaacgggcagaagaagcgaatgaagcccctaaacccattcctcggcgagctcttcttaggcaaatgggaagatgaagccggtaccacacagcttatcagtgagcaagtcagtcatcacccgcctgcgactgcgtaccgggtgtggaacaacgatcatggtgtacagctggaaggccacatagcaccaaagtcctacttcagctcaacggtgaatattgagcggcggggttacagcttgttacacattgacgcacatgacgagacgcattggataacgatgccaaaggcacatattgagggtatgatgtctttccaactcaatcccgagctcagcggatcatcgcacatacatagctcatcggggtttacgacgcgcatcaattacgagtgcaagggctggctcggtggacagagtaatgctttttctgcgacaatccatcgagatgggagccgcgacaaagagccgctttacatactcgatgggaaatggaatgggacatacacggtgaaagacgctcgtgggaaagtactagaaacagttgatctcacgaaactatgccgaacgccactacaagtcaaatctttgccagataaagacccactcgactcgcgacgtgcatggcagcaggtatgcgacgcgatcatgagaaacgatatgatgggagtagcgcgggagaagagcaaaatcgagaatgcgcagcgcgctttgcgaaaggaagaaaaagccgccggccggatatgggaaaggcgatatttcacagaagccacagaagatcccgtggccgatagacttgccacgcgcaaggagacgggcatgatctggaagttcgatgcagataaatacaacgcggtgaagactaacgaggagacgcctttaagtcctacgcggatacgggctgattcgggagtcgcatttacagaatcttaa

SEQ ID NO: 3865 - protein, 407 aa, Muscodor strobelii
  misc_feature: SGI Peptide ID NO. 560958
  misc_feature (14)..(407): Pfam Id: PF01237 Pfam Desc: Oxysterol-binding protein
  misc_feature (75)..(351): Pfam Id: PF01237 Pfam Desc: Oxysterol-binding protein
  misc_feature (14)..(69): Pfam Id: PF01237 Pfam Desc: Oxysterol-binding protein
  misc_feature (9)..(406): NCBI GI: 154298152 Blast Desc: BC1G_12041 [Botryotinia fuckeliana B05.10] gi|150858227|gb|EDN33419.1| BC1G_12041 [Botryotinia fuckeliana B05.10]
  misc_feature (18)..(396): NCBI GI: 189205124 Blast Desc: PTRG_08565 [Pyrenophora tritici-repentis Pt-1C-BFP] gi|187985996|gb|EDU51484.1| PTRG_08565 [Pyrenophora tritici-repentis Pt-1C-BFP]
  misc_feature (5)..(403): NCBI GI: 156052789 Blast Desc: SS1G_06562 [Sclerotinia sclerotiorum 1980] gi|154704340|gb|EDO04079.1| SS1G_06562 [Sclerotinia sclerotiorum 1980]
  misc_feature (9)..(383): NCBI GI: 156044592 Blast Desc: SS1G_10400 [Sclerotinia sclerotiorum 1980] gi|154694788|gb|EDN94526.1| SS1G_10400 [Sclerotinia sclerotiorum 1980]
  misc_feature (18)..(385): NCBI GI: 169610661 Blast Desc: SNOG_08438 [Phaeosphaeria nodorum SN15] gi|160702124|gb|EAT84714.2| SNOG_08438 [Phaeosphaeria nodorum SN15]
  misc_feature (5)..(403): NCBI GI: 154314987 Blast Desc: BC1G_04835 [Botryotinia fuckeliana B05.10] gi|150848373|gb|EDN23566.1| BC1G_04835 [Botryotinia fuckeliana B05.10]
  misc_feature (7)..(379): NCBI GI: 67524839 Blast Desc: AN2877.2 [Aspergillus nidulans FGSC A4] gi|40744272|gb|EAA63448.1| AN2877.2 [Aspergillus nidulans FGSC A4] gi|259486186|tpe|CBF83826.1| TPA: oxysterol binding protein
  misc_feature (21)..(385): NCBI GI: 261352857 Blast Desc: kes1 [Verticillium albo-atrum VaMs.102]
  misc_feature (21)..(379): NCBI GI: 116206838 Blast Desc: conserved [Chaetomium globosum CBS 148.51] gi|88183309|gb|EAQ90777.1| conserved [Chaetomium globosum CBS 148.51]
  misc_feature (17)..(384): NCBI GI: 238486710 Blast Desc: oxysterol binding protein (Osh5), [Aspergillus flavus NRRL3357] gi|220699472|gb|EED55811.1| oxysterol binding protein (Osh5), [Aspergillus flavus NRRL3357]
  misc_feature: Useful for introducing or modulating the production of volatile compounds
MSLTITSSKCEARKEQSQNKSAWFQFIKSIASSKGDLAALSAPPFLLAPQSIVEFSAYWAEHPSLFVAPAHEPSAEKRALLVLKWFMSTLTRQHASKDENGQKKRMKPLNPFLGELFLGKWEDEAGTTQLISEQVSHHPPATAYRVWNNDHGVQLEGHIAPKSYFSSTVNIERRGYSLLHIDAHDETHWITMPKAHIEGMMSFQLNPELSGSSHIHSSSGFTTRINYECKGWLGGQSNAFSATIHRDGSRDKEPLYILDGKWNGTYTVKDARGKVLETVDLTKLCRTPLQVKSLPDKDPLDSRRAWQQVCDAIMRNDMMGVAREKSKIENAQRALRKEEKAAGRIWERRYFTEATEDPVADRLATRKETGMIWKFDADKYNAVKTNEETPLSPTRIRADSGVAFTES

SEQ ID NO: 3866 - DNA, 1872 bp, Muscodor strobelii
  misc_feature: SGI EST ID NO. CUFF.9734.1
  misc_feature: Variant of the nucleotide sequence at SEQ ID NO 3864
catttgctgtattgagaaaatttcctatttcggccaatctcactgctagcggacgcaacggcttcgcctccattagcgccgccgcgccacgatagtatactcccgctagacgggcacgagtattcttgagattcatataagttcgcatcgggtcttcacagttcaaatcgtctatatcgcgacattcattcaacagaaggagacaacagacggattgtgacaaacatacaacgcagtaatgtcgttgacgataacttcctcgaagtgtgaagctcgcaaggagcaatcgcagaataagtcggcttggtttcagttcataaagtcaatagcatcttccaaaggcgacctcgcggctctttcggcaccaccattccttctcgcacctcaatcgattgtggagttcagcgcatattgggcagagcaccctagtcttttcgtagcaccagcacacgaaccaagcgctgagaagcgtgccttattagtcctcaaatggttcatgagcacactcacgcgacaacacgcgagcaaggatgagaacgggcagaagaagcgaatgaagcccctaaacccattcctcggcgagctcttcttaggcaaatgggaagatgaagccggtaccacacagcttatcagtgagcaagtcagtcatcacccgcctgcgactgcgtaccgggtgtggaacaacgatcatggtgtacagctggaaggccacatagcaccaaagtcctacttcagctcaacggtgaatattgagcggcggggttacagcttgttacacattgacgcacatgacgagacgcattggataacgatgccaaaggcacatattgagggtatgatgtctttccaactcaatcccgagctcagcggatcatcgcacatacatagctcatcggggtttacgacgcgcatcaattacgagtgcaagggctggctcggtggacagagtaatgctttttctgcgacaatccatcgagatgggagccgcgacaaagagccgctttacatactcgatgggaaatggaatgggacatacacggtgaaagacgctcgtgggaaagtactagaaacagttgatctcacgaaactatgccgaacgccactacaagtcaaatctttgccagataaagacccactcgactcgcgacgtgcatggcagcaggtatgcgacgcgatcatgagaaacgatatgatgggagtagcgcgggagaagagcaaaatcgagaatgcgcagcgcgctttgcgaaaggaagaaaaagccgccggccggatatgggaaaggcgatatttcacagaagccacagaagatcccgtggccgatagacttgccacgcgcaaggagacgggcatgatctggaagttcgatgcagataaatacaacgcggtgaagactaacgaggagacgcctttaagtcctacgcggatacgggctgattcgggagtcgcatttacagaatcttaatcctaaaacaaagatctgcggaaatagcctagtagggctcagataatcagaaaaggccatggaatgagagaaacgatgtcccgagaggaaggggattttttggggaggttataatattataatatgttgaccaaggttaaattaccaaaccacataatagcacacggtcggctgagccactgatcttatagactatccctgcaaagggttcttcacagcttcgacctataaatgtagcgacagtctatgcaactctacaagaaccacctgaaatcgtccacctttggcccatccctaagtcttgatgtaggaacatctcgtgcagaaattttcacgccttgtctgcggtttcggcgcttgttgtcccacagcataaaaaatcctaagcatgctgtgacaataaacccgaa

SEQ ID NO: 3867 - DNA, 492 bp, Muscodor strobelii
  misc_feature: SGI cDNA ID NO. 560959
  misc_feature: Elevated expression when VOC is produced
  misc_feature: Encodes the peptide sequence at SEQ ID NO 3868
atgcctacacaggaagaagagcgcaatattgccacagtcgtgaagtatttcactgagttctggggcaaggcaaatcccgatgttgtcgatgagacgtgcgcggacgattttgttatgaattatccaatgcatggaatccgtaacggtaaagcagaggccaaaaaaatgctccgggacttgaaggaggcatttccagacttgaccttcagtgtatatcaacatccgatcattgctagtggggagcacgtggtaggacgatggatcgggggcggaacacacactggtggcgcattccacgatgttcccgttggtggcctcgacaagcctgccacagggaagaaaatgcacttctcaggaataactatcttcacgcttcgagacggcaaaatcgtagacgaaactggcgaggagggcgctttgacggcattgcaacaattaggtgctcttcccggacctaatcctgggaaagaggtcaaatatttgtatgagtag

SEQ ID NO: 3868 - protein, 163 aa, Muscodor strobelii
  misc_feature: SGI Peptide ID NO. 560959
  misc_feature (11)..(146): Pfam Id: PF07366 Pfam Desc: SnoaL-like polyketide cyclase
  misc_feature (1)..(163): NCBI GI: 256722308 Blast Desc: NECHADRAFT_87940 [Nectria haematococca mpVI 77-13-4]
  misc_feature (1)..(163): NCBI GI: 256730210 Blast Desc: NECHADRAFT_82962 [Nectria haematococca mpVI 77-13-4]
  misc_feature (7)..(160): NCBI GI: 146418084 Blast Desc: PGUG_02737 [Pichia guilliermondii ATCC 6260] gi|146390481|gb|EDK38639.1| PGUG_02737 [Pichia guilliermondii ATCC 6260]
  misc_feature (4)..(149): NCBI GI: 209514916 Blast Desc: protein of function DUF1486 [Burkholderia sp. H160] gi|209504542|gb|EEA04529.1| protein of function DUF1486 [Burkholderia sp. H160]
  misc_feature (4)..(149): NCBI GI: 78066394 Blast Desc: Bcep18194_A4924 [Burkholderia sp. 383] gi|77967139|gb|ABB08519.1| Bcep18194_A4924 [Burkholderia sp. 383]
  misc_feature (4)..(149): NCBI GI: 255530231 Blast Desc: protein of function DUF1486 [Pedobacter heparinus DSM 2366] gi|255343215|gb|ACU02541.1| protein of function DUF1486 [Pedobacter heparinus DSM 2366]
  misc_feature (4)..(149): NCBI GI: 94314368 Blast Desc: Rmet_5449 [Ralstonia metallidurans CH34] gi|93358220|gb|ABF12308.1| protein of function DUF1486 [Ralstonia metallidurans CH34]
  misc_feature (4)..(149): NCBI GI: 78066387 Blast Desc: Bcep18194_A4917 [Burkholderia sp. 383] gi|77967132|gb|ABB08512.1| Bcep18194_A4917 [Burkholderia sp. 383]
  misc_feature (5)..(149): NCBI GI: 260469668 Blast Desc: protein of function DUF1486 [Mesorhizobium opportunistum WSM2075] gi|259028580|gb|EEW29893.1| protein of function DUF1486 [Mesorhizobium opportunistum WSM2075]
  misc_feature (5)..(149): NCBI GI: 256424683 Blast Desc: protein of function DUF1486 [Chitinophaga pinensis DSM 2588] gi|256039591|gb|ACU63135.1| protein of function DUF1486 [Chitinophaga pinensis DSM 2588]
  misc_feature: Useful for fungicidal and/or biocontrol applications
  misc_feature: Useful for introducing or modulating the production of volatile compounds
MPTQEEERNIATVVKYFTEFWGKANPDVVDETCADDFVMNYPMHGIRNGKAEAKKMLRDLKEAFPDLTFSVYQHPIIASGEHVVGRWIGGGTHTGGAFHDVPVGGLDKPATGKKMHFSGITIFTLRDGKIVDETGEEGALTALQQLGALPGPNPGKEVKYLYE

SEQ ID NO: 3869 - DNA, 1724 bp, Muscodor strobelii
  misc_feature: SGI EST ID NO. CUFF.9777.0
  misc_feature: Variant of the nucleotide sequence at SEQ ID NO 3867
tcagtagcatgtacgtgagacacgatgagcaatcaaacacatagtatccaatctcaagaacagttttcagaaaataaacttttttctttaattcattaaagacgaatcaaaatgcctacacaggaagaagagcgcaatattgccacagtcgtgaagtatttcactgagttctggggcaaggcaaatcccgatgttgtcgatgagacgtgcgcggacgattttgttatgaattatccaatgcatggaatccgtaacggtaaagcagaggccaaaaaaatgctccgggacttgaaggaggcatttccagacttgaccttcagtgtatatcaacatccgatcattgctagtggggagcacgtggtaggacgatggatcgggggcggaacacacactggtggcgcattccacgatgttcccgttggtggcctcgacaagcctgccacagggaagaaaatgcacttctcaggaataactatcttcacgcttcgagacggcaaaatcgtagacgaaactggcgaggagggcgctttgacggcattgcaacaattaggtgctcttcccggacctaatcctgggaaagaggtcaaatatttgtatgagtaggacaataatgaagcgccgggattgacatgcaaagaagagtgttgtcgctgcgaacgtgagtgctttacagaatgcgcctaactctgccttagcccatttcgagtccatccaaaactgcgtcttgtgaccgtcattggattcagcttaccaatagcggacatcgtgacgctgaaatacatggatctggcttgccatatgcatccgcaggtcttagggcagatttgaggaaacaggagaggtgtgccatggaccgactggtacgtagcgccttgagtagccggttcgaaatgatagcatgggcagatctcaacgaaccaccaaagcaattcgacggcgagtatcaaaaccacgatatgaaaagtttggccagaggcttggaatcaacgccgcgctccaaaaggcctacgcgcaggtctatatagatattgtaccacatggcatcatccgaccacaccggttacacatcgttgcccgccgcagactcagcgacgggctgactagaagatctctgagggttctagacgggcgacggggatcggttgcgcaagaatctgagctcttaatgacaatgtcctccgattcaatacctatagacaatctggtggtgtgtgagcagcagcatgcgggtgcagagcagaactgctatgatcgtgaagaaaccgggtttataatacagtcgaagcgagactacacaattcgtggccgccaaaatggggaagactaccatcgtcctgcaagactcgaaaatggcaggcatatagtctagtcgtgtatgactaagtgagcatcctacgagcggaagcgacaagggcgaatgctatccgcaggacgacacactgggactctgcttaaatttccaaggaataagtcgataggttcactcaggaagctggctgccggtggaaaatcgtcgcaggtagagttgatactcagcatatgcttgtccatgcctgatggtagcgctgggccgacacgctcgggatatattgatcgtgtgcctagaagatgcaaaggaatgtaatggattcaatgtactcgtgagatacagataccatctatcccatattgttggcacctacgccatactgtagatacgagcgatggtgttgccttgctcgaac

SEQ ID NO: 3870 - DNA, 1044 bp, Muscodor strobelii
  misc_feature: SGI cDNA ID NO. 560960
  misc_feature: Encodes the peptide sequence at SEQ ID NO 3871
atggccacgtttctttcgcttcctcgggaactgcgagaccagatcatcgagatccttgcttggcttcccgtggatccgccaaaagatattgctgcgcttctttcgaaagaccggacgactatttctgcaaaggacacaggtaattgggctgatcagtttgattcacaacatgtccacttcgaaaagcattcggcacttgcaaaatccgtcagaccattgatgctagcgaatcgccagcttgcccaagaagcgaaggatgctcttgcacgtttgaaggcgaaacctgtggactatgtcctcgatatcttgtaccgtagggacgttcaaatttatcccacctggctttgcgtcccagcattttcatcaaatgtgcgaaccgcctacacgcaattcagaatttccaatatgttggatgccgactccttttccagctcgacgcaaaacttgttccacgggggagacggaacgggctatcctagtgtttattggattttctatcatcttttcagaggactcatgcgcttcgggccgcaaggaaagagagcaggaaagcgcaagggcaagaagggctcagaaagcaatgacagccgccacaatgcacaatctggtaagggtattacgatagaaaacctgatcatcgactttctgcctaccgaagggccaagtctcctacccgttgggccctgcccttacggatcatccgattcttacgttcgttgggtatcatcggtgagggactggaaggcaccagcagacaacaaactgacggccggtgggattttgagtcattgggttattgatgcattgacctcgttgatggatagccgatttatatacgaaagaattgggaatatcgaggtgcgacttggcggcattcttagagagcgcttcgatcttggcactctgtttgcaaagtttacggaacccacgtataactcttattttgcgcacggagaacaattcaagaagtggcttgaaagggcagcaaagaagagaagggatgccggattgaaggtcactattgcaaattttgatcaagtttaa

SEQ ID NO: 3871 - protein, 347 aa, Muscodor strobelii
  misc_feature: SGI Peptide ID NO. 560960
  misc_feature (1)..(335): NCBI GI: 212533785 Blast Desc: conserved [Penicillium marneffei ATCC 18224] gi|210072413|gb|EEA26502.1| conserved [Penicillium marneffei ATCC 18224]
  misc_feature (2)..(337): NCBI GI: 261358743 Blast Desc: [Verticillium albo-atrum VaMs.102]
  misc_feature (49)..(305): NCBI GI: 255956437 Blast Desc: [Penicillium chrysogenum Wisconsin 54-1255] gi|211590682|emb|CAP96877.1| [Penicillium chrysogenum Wisconsin 54-1255]
  misc_feature (6)..(177): NCBI GI: 256720051 Blast Desc: NECHADRAFT_89395 [Nectria haematococca mpVI 77-13-4]
  misc_feature (2)..(219): NCBI GI: 239606876 Blast Desc: BDCG_00668 [Ajellomyces dermatitidis ER-3]
  misc_feature (2)..(219): NCBI GI: 261191262 Blast Desc: BDBG_07441 [Ajellomyces dermatitidis SLH14081] gi|239589805|gb|EEQ72448.1| BDBG_07441 [Ajellomyces dermatitidis SLH14081]
MATFLSLPRELRDQIIEILAWLPVDPPKDIAALLSKDRTTISAKDTGNWADQFDSQHVHFEKHSALAKSVRPLMLANRQLAQEAKDALARLKAKPVDYVLDILYRRDVQIYPTWLCVPAFSSNVRTAYTQFRISNMLDADSFSSSTQNLFHGGDGTGYPSVYWIFYHLFRGLMRFGPQGKRAGKRKGKKGSESNDSRHNAQSGKGITIENLIIDFLPTEGPSLLPVGPCPYGSSDSYVRWVSSVRDWKAPADNKLTAGGILSHWVIDALTSLMDSRFIYERIGNIEVRLGGILRERFDLGTLFAKFTEPTYNSYFAHGEQFKKWLERAAKKRRDAGLKVTIANFDQV

SEQ ID NO: 3872 - DNA, 239 bp, Muscodor strobelii
  misc_feature: SGI EST ID NO. CUFF.9746.0
  misc_feature: Variant of the nucleotide sequence at SEQ ID NO 3870
cgagatccttgcttggcttcccgtggatccgccaaaagatattgctgcgcttctttcgaaagaccggacgactatttctgcaaaggacacaggtaattgggctgatcagtttgattcacaacatgtccacttcgaaaagcattcggcacttgcaaaatccgtcagaccattgatgctagcgaatcgccagcttgcccaagaagcgaaggatgctcttgcacgtttgaaggcgaaacctg

SEQ ID NO: 3873 - DNA, 1233 bp, Muscodor strobelii
  misc_feature: SGI cDNA ID NO. 560961
  misc_feature: Encodes the peptide sequence at SEQ ID NO 3874
atgaagcttctcagcttgagcacagctctggtggccgtcgctagcgcagctcagcccatgactgcttttgacggatcgctcataaccgtttttgacggatcagtcccgacttcgtgtagtatcgaatatggcgaaacctctgttggaggagcgcttcccgtgcacacatcgattcataccgtgctgtcaggcaccaagaccatcatcgccgacgtgactcaaactacgactcgaacctcatggacaacgatgcccgcaaaagaatcaacgcaatggttcgacgattacaagactgtcaccaggaccgtttctggggggcctatatccacgatatttcgcaccaagacagaaacttcgactgtcaccgacgtcttgactcaaacgaagacaactacaactaccgttgcgggccacccattgactattccgactccttgcgactttactcccatccaaagcaatacggattttactgctagggtcatggcgacggatactatcagggccgttggttctctcattccagacctctccaaagaggtcatcgggcaactctctaggctaggctcccgaaacgaagtccccgccgccacccatcgctcaaatgacgacctatatcctactggaatcatgtgtcacgtcacgcagacttttcaagaaattgtagcaatcacccctactgcagttacgacgaaaacagtcaccgttgattcgggcggcacacacaccgtcacccggactcgaactggcgagaccactgtgacggtaaccggtggcgcgcctccagctgtggaggaaagcaccacaacaactgtggtgcatacaaaaacaacgacgacagctcatgcaacacaaacagtgggcaaccgcttcgtgaatatccacgatgcatgcttggattcgtccaactacgtaaacaagacaaaccatggccattccatcgcaagaatcgataacagcggctcggccagagtccgagagctttctaatatctcggatgccaaagcttgctgcgaagcctgctttgacgagaccatccaatgtcgtgctagtgcattttacaaagacggtggcgagactggcacggctctttgttatctgctacttggtaacgagtgccgtccagggcacgaattcggcgacaaatacgtcagctcggccggacttgacgttggatatattgtcagtaacggcccttgcggcgttttgaacaactcaccagactccgaatag

SEQ ID NO: 3874 - protein, 410 aa, Muscodor strobelii
  misc_feature: SGI Peptide ID NO. 560961
MKLLSLSTALVAVASAAQPMTAFDGSLITVFDGSVPTSCSIEYGETSVGGALPVHTSIHTVLSGTKTIIADVTQTTTRTSWTTMPAKESTQWFDDYKTVTRTVSGGPISTIFRTKTETSTVTDVLTQTKTTTTTVAGHPLTIPTPCDFTPIQSNTDFTARVMATDTIRAVGSLIPDLSKEVIGQLSRLGSRNEVPAATHRSNDDLYPTGIMCHVTQTFQEIVAITPTAVTTKTVTVDSGGTHTVTRTRTGETTVTVTGGAPPAVEESTTTTVVHTKTTTTAHATQTVGNRFVNIHDACLDSSNYVNKTNHGHSIARIDNSGSARVRELSNISDAKACCEACFDETIQCRASAFYKDGGETGTALCYLLLGNECRPGHEFGDKYVSSAGLDVGYIVSNGPCGVLNNSPDSE

SEQ ID NO: 3875 - DNA, 813 bp, Muscodor strobelii
  misc_feature: SGI cDNA ID NO. 560962
  misc_feature: Elevated expression when VOC is produced
  misc_feature: Encodes the peptide sequence at SEQ ID NO 3876
atgtcacaacgcttgcagggcaaagtggccgtcattacagggtcctcttctgggctcggtagggcgatagcgttggcttaccaccgtgaaggagctgtcattgtatgtgccgacttgaaacaagaagcccgtgcagaagtgccagatgaagttttggtgaacacagacgcagtcattacgaaagccggtgggcaggcgatattcgtcaagacagatgtaagtcgtactgccgacgtcgagtcacttatgcagcaagccgtagcgagattcggaagaatagatatacttgtcaacaacgcaggcatttctattgaggctggccgagcaccgctgacttgtcatgaaacatctgaggacacatgggataccacgatggctgtcaatacaaaatcagtattcctcggatgcaagtatgtacttgcacaaatgctcaagcaggagccacacagctcaggtcatcgagggtggattatcaacatgtcatctatctttggcattacagcagggcgacacaatatttcatatgctgcctcaaaggctgctgtagcgaatatgacaagacaagtggcgcttgactatgcacaacacaagatacactgcaatgcaatctgccctggctatacaaagactgccatcttcgcggaaacgatctcctatctagatgatgctgctggtattgcggctcgacacccctttggtggtgtaggcactcccgaagatattgtaggcgcagccatatttctcgcaagtagcgacgcatcatggattacgggagtgtgcttgcccgtcgacggtggctacacagcacagtag

SEQ ID NO: 3876 - protein, 270 aa, Muscodor strobelii
  misc_feature: SGI Peptide ID NO. 560962
  misc_feature (8)..(194): Pfam Id: PF00106 Pfam Desc: short chain dehydrogenase
  misc_feature (3)..(270): NCBI GI: 256727224 Blast Desc: NECHADRAFT_90624 [Nectria haematococca mpVI 77-13-4]
  misc_feature (4)..(270): NCBI GI: 145259194 Blast Desc: An04g09410 [Aspergillus niger] gi|134074917|emb|CAK39026.1| protein product [Aspergillus niger]
  misc_feature (2)..(270): NCBI GI: 259484319 Blast Desc: TPA: conserved [Aspergillus nidulans FGSC A4]
  misc_feature (2)..(270): NCBI GI: 67902798 Blast Desc: AN8386.2 [Aspergillus nidulans FGSC A4] gi|40747852|gb|EAA67008.1| AN8386.2 [Aspergillus nidulans FGSC A4]
  misc_feature (2)..(270): NCBI GI: 255938518 Blast Desc: Pc14g00340 [Penicillium chrysogenum Wisconsin 54-1255] gi|211584650|emb|CAP74175.1| Pc14g00340 [Penicillium chrysogenum Wisconsin 54-1255]
  misc_feature (4)..(270): NCBI GI: 46110769 Blast Desc: FG02266.1 [Gibberella zeae PH-1]
  misc_feature (1)..(270): NCBI GI: 242803924 Blast Desc: short-chain dehydrogenase, [Talaromyces stipitatus ATCC 10500] gi|218717616|gb|EED17037.1| short-chain dehydrogenase, [Talaromyces stipitatus ATCC 10500]
  misc_feature (4)..(270): NCBI GI: 169775683 Blast Desc: [Aspergillus oryzae RIB40] gi|83771043|dbj|BAE61175.1| protein product [Aspergillus oryzae]
  misc_feature (4)..(270): NCBI GI: 238502325 Blast Desc: gluconate 5-dehydrogenase, [Aspergillus flavus NRRL3357] gi|220691206|gb|EED47554.1| gluconate 5-dehydrogenase, [Aspergillus flavus NRRL3357]
  misc_feature (4)..(269): NCBI GI: 238497219 Blast Desc: short chain type dehydrogenase, [Aspergillus flavus NRRL3357] gi|220694725|gb|EED51069.1| short chain type dehydrogenase, [Aspergillus flavus NRRL3357]
  misc_feature (1)..(268): SWISSPROT Homolog: EC 1.1.1.47 Glucose 1-dehydrogenase
  misc_feature: Useful for introducing or modulating the production of volatile compounds
MSQRLQGKVAVITGSSSGLGRAIALAYHREGAVIVCADLKQEARAEVPDEVLVNTDAVITKAGGQAIFVKTDVSRTADVESLMQQAVARFGRIDILVNNAGISIEAGRAPLTCHETSEDTWDTTMAVNTKSVFLGCKYVLAQMLKQEPHSSGHRGWIINMSSIFGITAGRHNISYAASKAAVANMTRQVALDYAQHKIHCNAICPGYTKTAIFAETISYLDDAAGIAARHPFGGVGTPEDIVGAAIFLASSDASWITGVCLPVDGGYTAQ

SEQ ID NO: 3877 - DNA, 1291 bp, Muscodor strobelii
  misc_feature: SGI EST ID NO. CUFF.9750.0
  misc_feature: Variant of the nucleotide sequence at SEQ ID NO 3875
caatcactctacttcgaagcgtctcggccctcgtgatttacacagcaggttgacactaaaccgtatcccctcaacatcccgaggggcagcccagcagcgcgcattcatcccgctaaatggagttcaaaacgcggggtctctgctcccactatagggcactccgcatgcagcaccgggcgacagaaggccgatgaatatacgataatcaaatacaaacttctgagtgcctattttccagcgcgtgcctcatctgccttattttgcattgcgaagttcaagttatcattctctctatgagatccttccttctcagcggtacttccacttccatcacttagagatcatactgttttgctatgtcacaacgcttgcagggcaaagtggccgtcattacagggtcctcttctgggctcggtagggcgatagcgttggcttaccaccgtgaaggagctgtcattgtatgtgccgacttgaaacaagaagcccgtgcagaagtgccagatgaagttttggtgaacacagacgcagtcattacgaaagccggtgggcaggcgatattcgtcaagacagatgtaagtcgtactgccgacgtcgagtcacttatgcagcaagccgtagcgagattcggaagaatagatatacttgtcaacaacgcaggcatttctattgaggctggccgagcaccgctgacttgtcatgaaacatctgaggacacatgggataccacgatggctgtcaatacaaaatcagtattcctcggatgcaagtatgtacttgcacaaatgctcaagcaggagccacacagctcaggtcatcgagggtggattatcaacatgtcatctatctttggcattacagcagggcgacacaatatttcatatgctgcctcaaaggctgctgtagcgaatatgacaagacaagtggcgcttgactatgcacaacacaagatacactgcaatgcaatctgccctggctatacaaagactgccatcttcgcggaaacgatctcctatctagatgatgctgctggtattgcggctcgacacccctttggtggtgtaggcactcccgaagatattgtaggcgcagccatatttctcgcaagtagcgacgcatcatggattacgggagtgtgcttgcccgtcgacggtggctacacagcacagtagcccggatctcagtcaagtaaaagcatcacatatttgtggagaagtgatgtggcatacttgcagtgtcctgttaaaaatattgttgaatgataagaagttacttgaatttcgggaaatcgaaa

SEQ ID NO: 3878 - DNA, 987 bp, Muscodor strobelii
  misc_feature: SGI cDNA ID NO. 560963
  misc_feature: Encodes the peptide sequence at SEQ ID NO 3879
atggatatttacgcagctgttgaaaagctgaatgagctcaggaaatctttccccgacgcccgcgtgcacattattcttcactgtccggagaattctgccttcgggaagttcatgcgggcctgccacggcgatcagatcacattctccgccggggccaaagaggatcttcgtcgagagatacactctgggtactctttgctttctcgcttcttcggtacacagcctgtctgttctccggatcatttcgtagacgttaagagtttcaatactttcgagtactttccgagcaacgtcgggtttgtcgatcaccaatttgagtttgaccgcaagcaaagacttgggggcgataaattctctcgattccactacgagaatctcatttcccatccccagaggctttctgtgttccctttgaacggaaatctcgtgtcctgcttcaacggagctcctaatctttatctcgacggagcttcggggagctcgggtcacaatttgcttcctaccacggaagcctggctcgaaaagcagaatttgcagttcccgagcttccagttcgagactcgccagaaggcgatcttcgctgggattcgttcacttggtcagcctgcaatcgctgacaaggctgccggcgaccttgcttggatcttcgctaacacgacatatcgtgccaaagatcaagtcgacgaagttgaagtctttgaccttcgcaaaaacaccagttgggctctggctgaaaagggctacttcaataacctcaacggcgagggcaccgaaaacctccttgtcaaagcgtttgacatcgtcaacactctttccgttgttgccagctaccttttgaacaagatcaatcgcgatcttgggtcagttgggactggcaatttcaactctctgtccgatccggttgatctaggcggcaacgcccacggaaacacctacggcgatctgggccatcacccaatgacaacccaccactgcatttgctgttaa

SEQ ID NO: 3879 - protein, 328 aa, Muscodor strobelii
  misc_feature: SGI Peptide ID NO. 560963
MDIYAAVEKLNELRKSFPDARVHIILHCPENSAFGKFMRACHGDQITFSAGAKEDLRREIHSGYSLLSRFFGTQPVCSPDHFVDVKSFNTFEYFPSNVGFVDHQFEFDRKQRLGGDKFSRFHYENLISHPQRLSVFPLNGNLVSCFNGAPNLYLDGASGSSGHNLLPTTEAWLEKQNLQFPSFQFETRQKAIFAGIRSLGQPAIADKAAGDLAWIFANTTYRAKDQVDEVEVFDLRKNTSWALAEKGYFNNLNGEGTENLLVKAFDIVNTLSVVASYLLNKINRDLGSVGTGNFNSLSDPVDLGGNAHGNTYGDLGHHPMTTHHCICC

SEQ ID NO: 3880 - DNA, 2566 bp, Muscodor strobelii
  misc_feature: SGI EST ID NO. CUFF.9753.0
  misc_feature: Variant of the nucleotide sequence at SEQ ID NO 3878
cgaacggagcgaatccttaccttgcagatgtcgatggatggacgcctttactgtgggcatgtgatttagataacccttcagccgcttcccttcttctccaacaggattctctagacagagtgaagcacatggaccggtttaagcaaaccgccctgtctattgccagtagggaaggacatgcaaatatactaagactactaatggaatatgacccacaggcgactatgatggatattgaagacgagtcaggttggacaccactgatacaggccgccaagcatggcagcaaagaggtactcagtatcatactcaatacgagcgtcggattaaacagcattgcacatcgagaccgtgctggtaagaccgctcttcactgggcggcagagcagggaaatacggcggcagtttgcttgctcctcagcgcaggcgtggatatcaactcgcatgatagcgctttgcgcaccccattatggctctccgccaagaatggacatctcgagacagtgagggcattgattggtgcacatgctcaggtgaacaccaaagacgtgcagcaaaaaacgccattgcagctcgctattgaaaacggacacggcaccgtcgcggagacactactaaatgccaacgccgtattaaatgacaacccatttaccgattgggaatttttgcacatttcgtatcaactttcaccttggccaagggtcagagaacacgtactacgcgtgaaatcaggcgcggatgcgggaggggcagacacactcggattggacggccttttctgtgattccaatgagatgccctgctagtctgcaggacattcagcccagctatcacaccccaccatccgtaacctgcatactcagcgatcgggcgtacgttgtttggattgggcgtacctattaatattcagctactcccgtaccccttttgtcagttcacggttgaattatacgtttgcaccagtctatcacaacttttgacctgttacaatcaccgaaacctcacttagagtttgaatcaccttgagacgtcgttgtctcggtaccgtttctttcatcatggatatttacgcagctgttgaaaagctgaatgagctcaggaaatctttccccgacgcccgcgtgcacattattcttcactgtccggagaattctgccttcgggaagttcatgcgggcctgccacggcgatcagatcacattctccgccggggccaaagaggatcttcgtcgagagatacactctgggtactctttgctttctcgcttcttcggtacacagcctgtctgttctccggatcatttcgtagacgttaagagtttcaatactttcgagtactttccgagcaacgtcgggtttgtcgatcaccaatttgagtttgaccgcaagcaaagacttgggggcgataaattctctcgattccactacgagaatctcatttcccatccccagaggctttctgtgttccctttgaacggaaatctcgtgtcctgcttcaacggagctcctaatctttatctcgacggagcttcggggagctcgggtcacaatttgcttcctaccacggaagcctggctcgaaaagcagaatttgcagttcccgagcttccagttcgagactcgccagaaggcgatcttcgctgggattcgttcacttggtcagcctgcaatcgctgacaaggctgccggcgaccttgcttggatcttcgctaacacgacatatcgtgccaaagatcaagtcgacgaagttgaagtctttgaccttcgcaaaaacaccagttgggctctggctgaaaagggctacttcaataacctcaacggcgagggcaccgaaaacctccttgtcaaagcgtttgacatcgtcaacactctttccgttgttgccagctaccttttgaacaagatcaatcgcgatcttgggtcagttgggactggcaatttcaactctctgtccgatccggttgatctaggcggcaacgcccacggaaacacctacggcgatctgggccatcacccaatgacaacccaccactgcatttgctgttaaatatgaatgatccaggccgccctgggtggcattgtcgctgcaatccgccgcgaaggcatgatttcgctattcgagcctgtagaggctgtgatgcaccaagatatgatcctatgctttccttaccacatgacactatgactcactgccacaatgggcaagatatgaaaatgactaaaaaacaaaacaaaaaaaccctcagtgcttgacgggcatctctacgcgatgctggggatcaattcgcaggacatggatactcgcgtgcggagctaagacctgtcagatgaagatcaatcaactatgtatttttacctatacagtcaagcttcggtagaatagaataaacatgttgttggcttcaatattgaatgagaggtgtggggaggcgaaaggaacaccggacacggttacgtttggactaatagattcagagctggaacgcacttcgctgtaaccccgagttcaaatcgattcccatatttgctattgggtacctctatctttaatagtcccatctattcaac

SEQ ID NO: 3881 - DNA, 3240 bp, Muscodor strobelii
  misc_feature: SGI cDNA ID NO. 560964
  misc_feature: Encodes the peptide sequence at SEQ ID NO 3882
atgtctttcggggtgggctttggggacatcgtcaaagcgatagcgctgacgaagcaagtggtgaactcgtacaaaagtgccccaggtcaagtgaaggatgtagctgatgaaatttctgcgtcccttggcattttagagaaagcttatgacattctccaacgccgcgagctcgcggaacacgaaaataacgtccttgtatccattctcgaaggttatctagtcaccctgaataagcttcgagacgcacataatgagaatcacacacttatcgccgatgagatacgaggaatgggcagccgcgccagaagagtgggcaagaggctagcattcgagccaagtgcaataaaggatctacgacataacgtccttcattacaatgccatgctaaccagttttttgagcttgttgaatgcttcggtcggatgggatacacatcgagaagtggaaaagctagttgagtacaagaatacgaaagaagatggtgagatattagcctggctgtctgcgctggattttggcaaactacacactggcagattgagaagaagagagccagggacaggcacatggctcttccatactgaacaatttcaatcatggcttgacgagccgcaaacgacgctcctatgcccggggatgcctggggctgggaagtcgatcatctcctccgcagttataagttatctagaggagatctacacacatgatcaagagactcgcgtcacattcttgatctgcgacatcgaatctcaacaggaacagtgcccagaggatctactggcaaacttactgaagcaactcacttctgcccggccgattccaaccgacttacagtctctttttgagcgctataagcgcaaaccttctgggtgtagaccgctgatgggtgaactgctggactgtcttgtcacagcaatcggactatacgaaagaattttcattgtcatcgatgcgctcgacgaatccaggacagaagatagaaacagattcctggagatgattcttcgacttcaaacatcatctaaagtgaatctgttcgtcacgctaagacacattgaagaattgatgtccgctttcagaaacggcggacttccacttcgcgtgcttgagatacaggcacacgaagaggacatacacaaatttcttgagcacaaattgaagagtaacctgttttttctcatgcgaagatccgacgaatctcgacggaaaatccatagcgaaatcatacaagaaatcactcgagccgcggacggaataagcgagacacgagatctcgctatgcaaatattatcttggattgtctgggccaaacgacctctcaagattcgagagctccaacatgctttagcaatcattgacggttccatagtcctcgaagaggacagtcttacggatgcagaagatattgtctcttcgtgcgagggtctgattaccttggacctgagcaccaatattgtcaggcttgttcattacacaacccggcagtatcttgagagcattcaatctgcttggttcttacagattgacaacaccatactgcgcatttgtttagagttgctctcgtcgcctgcctttgaaagtggcacctgtccgacagactgggagttcgaggaacggctgacacggtaccctctatatgattactcttccaaacactggggaggtcatgcgcgcaagtctaccgcgatggaccaagtactcctgtcatttctccaggatactccaaaagtagaagcggcgagtcaatgccaacttacttataaaggatactctcagagcgtgccgaccagtgtaatcggcctacatctagccgctagggacggcctagatcgtgtagtcagcgaacttctatccagcggtactgatgtcaatcacccaacatcatacggaacgacaccgatattctattcagcggccagtgggttcgagtctacggtgttactgctcctacaacacaatgctagagcagatgtaaaggatatgtattcgcagactcccttgtcctacgcggccgaatatggacaattgaaaattgtgcaggccctaattagccacggcgcagatgtaaaccagatagatgtattttgccgttctcctatctcctacgcttctgacggtggatatggagaggtagtgagctgcttgctacattgtccaaacgtcataattgatttacaagatgcatccggtcggactccaatctcgagagcattcaaaaataggcactggggaattttcaagttacttgcggccgctggagcaaatatggactcgtgttttcgcgacttcacttggctcaactggggtgatgcagaagcattcgatctttttattgcctccttagagaatctagatctcacggacctagaaggacgaacggcactatcgcacgcaagcgaggcaaatcatctgcaatttttatcagtcttgttggcgaacggagcgaatccttaccttgcagatgtcgatggatggacgcctttactgtgggcatgtgatttagataacccttcagccgcttcccttcttctccaacaggattctctagacagagtgaagcacatggaccggtttaagcaaaccgccctgtctattgccagtagggaaggacatgcaaatatactaagactactaatggaatatgacccacaggcgactatgatggatattgaagacgagtcaggttggacaccactgatacaggccgccaagcatggcagcaaagaggtactcagtatcatactcaatacgagcgtcggattaaacagcattgcacatcgagaccgtgctggtaagaccgctcttcactgggcggcagagcagggaaatacggcggcagtttgcttgctcctcagcgcaggcgtggatatcaactcgcatgatagcgctttgcgcaccccattatggctctccgccaagaatggacatctcgagacagtgagggcattgattggtgcacatgctcaggtgaacaccaaagacgtgcagcaaaaaacgccattgcagctcgctattgaaaacggacacggcaccgtcgcggagacactactaaatgccaacgccgtattaaatgacaacccatttaccgattgggaatttttgcacatttcgtatcaactttcaccttggccaagggtcagagaacacgtactacgcgtgaaatcaggcgcggatgcgggaggggcagacacactcggattggacggccttttctgtgattccaatgagatgccctgctag

SEQ ID NO: 3882 - protein, 1079 aa, Muscodor strobelii
  misc_feature: SGI Peptide ID NO. 560964
  misc_feature (662)..(694): Pfam Id: PF00023 Pfam Desc: Ankyrin repeat
  misc_feature (930)..(962): Pfam Id: PF00023 Pfam Desc: Ankyrin repeat
  misc_feature (790)..(822): Pfam Id: PF00023 Pfam Desc: Ankyrin repeat
  misc_feature (963)..(995): Pfam Id: PF00023 Pfam Desc: Ankyrin repeat
  misc_feature (601)..(628): Pfam Id: PF00023 Pfam Desc: Ankyrin repeat
  misc_feature (823)..(846): Pfam Id: PF00023 Pfam Desc: Ankyrin repeat
  misc_feature (159)..(1065): NCBI GI: 238508580 Blast Desc: Pfs, NACHT and Ankyrin domain protein [Aspergillus flavus NRRL3357] gi|220688371|gb|EED44724.1| Pfs, NACHT and Ankyrin domain protein [Aspergillus flavus NRRL3357]
  misc_feature (148)..(966): NCBI GI: 225557065 Blast Desc: ankyrin repeat protein [Ajellomyces capsulatus G186AR]
  misc_feature (1)..(914): NCBI GI: 255957133 Blast Desc: Pc21g23520 [Penicillium chrysogenum Wisconsin 54-1255] gi|211591030|emb|CAP97249.1| Pc21g23520 [Penicillium chrysogenum Wisconsin 54-1255]
  misc_feature (132)..(869): NCBI GI: 115390338 Blast Desc: conserved [Aspergillus terreus NIH2624] gi|114195070|gb|EAU36770.1| conserved [Aspergillus terreus NIH2624]
  misc_feature (1)..(1022): NCBI GI: 154313093 Blast Desc: BC1G_05548 [Botryotinia fuckeliana B05.10] gi|150849633|gb|EDN24826.1| BC1G_05548 [Botryotinia fuckeliana B05.10]
  misc_feature (147)..(1021): NCBI GI: 212528994 Blast Desc: Pfs, NACHT and Ankyrin domain protein [Penicillium marneffei ATCC 18224] gi|210074052|gb|EEA28139.1| Pfs, NACHT and Ankyrin domain protein [Penicillium marneffei ATCC 18224]
  misc_feature (162)..(1063): NCBI GI: 242821429 Blast Desc: ankyrin repeat-containing protein, [Talaromyces stipitatus ATCC 10500] gi|218712600|gb|EED12025.1| ankyrin repeat-containing protein, [Talaromyces stipitatus ATCC 10500]
  misc_feature (102)..(754): NCBI GI: 119497765 Blast Desc: Ankyrin repeat protein [Neosartorya fischeri NRRL 181] gi|119413804|gb|EAW23743.1| Ankyrin repeat protein [Neosartorya fischeri NRRL 181]
  misc_feature (1)..(951): NCBI GI: 258572672 Blast Desc: conserved [Uncinocarpus reesii 1704] gi|237905368|gb|EEP79769.1| conserved [Uncinocarpus reesii 1704]
  misc_feature (1)..(968): NCBI GI: 255939916 Blast Desc: Pc16g03680 [Penicillium chrysogenum Wisconsin 54-1255] gi|211585350|emb|CAP93038.1| Pc16g03680 [Penicillium chrysogenum Wisconsin 54-1255]
MSFGVGFGDIVKAIALTKQVVNSYKSAPGQVKDVADEISASLGILEKAYDILQRRELAEHENNVLVSILEGYLVTLNKLRDAHNENHTLIADEIRGMGSRARRVGKRLAFEPSAIKDLRHNVLHYNAMLTSFLSLLNASVGWDTHREVEKLVEYKNTKEDGEILAWLSALDFGKLHTGRLRRREPGTGTWLFHTEQFQSWLDEPQTTLLCPGMPGAGKSIISSAVISYLEEIYTHDQETRVTFLICDIESQQEQCPEDLLANLLKQLTSARPIPTDLQSLFERYKRKPSGCRPLMGELLDCLVTAIGLYERIFIVIDALDESRTEDRNRFLEMILRLQTSSKVNLFVTLRHIEELMSAFRNGGLPLRVLEIQAHEEDIHKFLEHKLKSNLFFLMRRSDESRRKIHSEIIQEITRAADGISETRDLAMQILSWIVWAKRPLKIRELQHALAIIDGSIVLEEDSLTDAEDIVSSCEGLITLDLSTNIVRLVHYTTRQYLESIQSAWFLQIDNTILRICLELLSSPAFESGTCPTDWEFEERLTRYPLYDYSSKHWGGHARKSTAMDQVLLSFLQDTPKVEAASQCQLTYKGYSQSVPTSVIGLHLAARDGLDRVVSELLSSGTDVNHPTSYGTTPIFYSAASGFESTVLLLLQHNARADVKDMYSQTPLSYAAEYGQLKIVQALISHGADVNQIDVFCRSPISYASDGGYGEVVSCLLHCPNVIIDLQDASGRTPISRAFKNRHWGIFKLLAAAGANMDSCFRDFTWLNWGDAEAFDLFIASLENLDLTDLEGRTALSHASEANHLQFLSVLLANGANPYLADVDGWTPLLWACDLDNPSAASLLLQQDSLDRVKHMDRFKQTALSIASREGHANILRLLMEYDPQATMMDIEDESGWTPLIQAAKHGSKEVLSIILNTSVGLNSIAHRDRAGKTALHWAAEQGNTAAVCLLLSAGVDINSHDSALRTPLWLSAKNGHLETVRALIGAHAQVNTKDVQQKTPLQLAIENGHGTVAETLLNANAVLNDNPFTDWEFLHISYQLSPWPRVREHVLRVKSGADAGGADTLGLDGLFCDSNEMPC

SEQ ID NO: 3883 - DNA, 1907 bp, Muscodor strobelii
  misc_feature: SGI EST ID NO. CUFF.9756.0
  misc_feature: Variant of the nucleotide sequence at SEQ ID NO 3881
ccgcaaacgacgctcctatgcccggggatgcctggggctgggaagtcgatcatctcctccgcagttataagttatctagaggagatctacacacatgatcaagagactcgcgtcacattcttgatctgcgacatcgaatctcaacaggaacagtgcccagaggatctactggcaaacttactgaagcaactcacttctgcccggccgattccaaccgacttacagtctctttttgagcgctataagcgcaaaccttctgggtgtagaccgctgatgggtgaactgctggactgtcttgtcacagcaatcggactatacgaaagaattttcattgtcatcgatgcgctcgacgaatccaggacagaagatagaaacagattcctggagatgattcttcgacttcaaacatcatctaaagtgaatctgttcgtcacgctaagacacattgaagaattgatgtccgctttcagaaacggcggacttccacttcgcgtgcttgagatacaggcacacgaagaggacatacacaaatttcttgagcacaaattgaagagtaacctgttttttctcatgcgaagatccgacgaatctcgacggaaaatccatagcgaaatcatacaagaaatcactcgagccgcggacggaatgttcctacttgccgctctatattttgactccataacaatgtgtcgcaatatagatagcattcgcaaatgcatcgcggagcttcccaagggactgaatgcgtatgacaaactctatgcaggcaccctaacacgaatccaaagaagcgagacacgagatctcgctatgcaaatattatcttggattgtctgggccaaacgacctctcaagattcgagagctccaacatgctttagcaatcattgacggttccatagtcctcgaagaggacagtcttacggatgcagaagatattgtctcttcgtgcgagggtctgattaccttggacctgagcaccaatattgtcaggcttgttcattacacaacccggcagtatcttgagagcattcaatctgcttggttcttacagattgacaacaccatactgcgcatttgtttagagttgctctcgtcgcctgcctttgaaagtggcacctgtccgacagactgggagttcgaggaacggctgacacggtaccctctatatgattactcttccaaacactggggaggtcatgcgcgcaagtctaccgcgatggaccaagtactcctgtcatttctccaggatactccaaaagtagaagcggcgagtcaatgccaacttacttataaaggatactctcagagcgtgccgaccagtgtaatcggcctacatctagccgctagggacggcctagatcgtgtagtcagcgaacttctatccagcggtactgatgtcaatcacccaacatcatacggaacgacaccgatattctattcagcggccagtgggttcgagtctacggtgttactgctcctacaacacaatgctagagcagatgtaaaggatatgtattcgcagactcccttgtcctacgcggccgaatatggacaattgaaaattgtgcaggccctaattagccacggcgcagatgtaaaccagatagatgtattttgccgttctcctatctcctacgcttctgacggtggatatggagaggtagtgagctgcttgctacattgtccaaacgtcataattgatttacaagatgcatccggtcggactccaatctcgagagcattcaaaaataggcactggggaattttcaagttacttgcggccgctggagcaaatatggactcgtgttttcgcgacttcacttggctcaactggggtgatgcagaagcattcgatctttttattgcctccttagagaatctagatctcacggacctagaaggacg

SEQ ID NO: 3884 - DNA, 897 bp, Muscodor strobelii
  misc_feature: SGI cDNA ID NO. 560965
  misc_feature: Encodes the peptide sequence at SEQ ID NO 3885
atggcgtctacaacggattccaaactccctagcgacagcaggaccaccaaaaagccccgcgacagcacagcgcgggccgatccgtcgatgccgaaactccaaacccctccgtcgccgccgcccaccgaaacagacaccgacgagaccgagaccgagcccgactcgccaatatcgccattcccagacttcagacaggaagacgccgtagaagggcacgattcgacaacattcatcttcccctctatagaaacagccactgccagatctacaagcgatcaaacggcgcatctaagcaacgacttgtcgcaacgcctccaactcaacatgcctgacccaaatttaaccgcactcaccgtatcagaacctagcgacacggctgagtcccccatgatctcaccagtacagagtccgccctactggacgccacggaatagccaagaccacccgccaggccacaacagaacagtttcctctgaatcaataccagcgggcgtgggcataacgatgcgcgacaacgagaatagcagtattgacgagcgaggagacgcttgctgggccaagagtgtgcaagttacggactatgtagtcgtgaacggcagtgccaccaacattggtgcctttgttgtatttaatatcagggttgagactttaagtgggagttacatgaatattcgaaagcgatattcggagttcgatgatttcagatggaggctcatgaggacgttccccggattcgaggcagctgtgcctgagttaccgcctaagagcttgatttccaagttcaggccgaggtttctcgagaagaggagggcgggcttgcaatacttccttcattgtattttattgaatccggaattctcgggctcgccggtgctcaaagaattcctctttgcataa

SEQ ID NO: 3885 - protein, 298 aa, Muscodor strobelii
  misc_feature: SGI Peptide ID NO. 560965
  misc_feature (189)..(298): Pfam Id: PF00787 Pfam Desc: PX domain
  misc_feature (204)..(296): Pfam Id: PF00787 Pfam Desc: PX domain
  misc_feature (156)..(298): NCBI GI: 256734843 Blast Desc: NECHADRAFT_75520 [Nectria haematococca mpVI 77-13-4]
  misc_feature (134)..(298): NCBI GI: 171694956 Blast Desc: protein product [Podospora anserina] gi|170947720|emb|CAP59883.1| protein product [Podospora anserina]
  misc_feature (156)..(279): NCBI GI: 46135777 Blast Desc: FG09404.1 [Gibberella zeae PH-1]
  misc_feature (125)..(282): NCBI GI: 261355292 Blast Desc: PX domain-containing protein [Verticillium albo-atrum VaMs.102]
  misc_feature (155)..(298): NCBI GI: 85117764 Blast Desc: NCU03221 [Neurospora crassa OR74A] gi|28927128|gb|EAA36085.1| conserved [Neurospora crassa OR74A]
  misc_feature (21)..(298): NCBI GI: 116182538 Blast Desc: CHGG_01897 [Chaetomium globosum CBS 148.51] gi|88186194|gb|EAQ93662.1| CHGG_01897 [Chaetomium globosum CBS 148.51]
  misc_feature (110)..(298): NCBI GI: 156054893 Blast Desc: SS1G_06294 [Sclerotinia sclerotiorum 1980] gi|154704074|gb|EDO03813.1| SS1G_06294 [Sclerotinia sclerotiorum 1980]
  misc_feature (136)..(298): NCBI GI: 154290399 Blast Desc: sorting nexin-like protein [Botryotinia fuckeliana B05.10] gi|150847740|gb|EDN22933.1| sorting nexin-like protein [Botryotinia fuckeliana B05.10]
  misc_feature (137)..(298): NCBI GI: 169603493 Blast Desc: SNOG_04756 [Phaeosphaeria nodorum SN15] gi|160706408|gb|EAT88516.2| SNOG_04756 [Phaeosphaeria nodorum SN15]
  misc_feature (134)..(298): NCBI GI: 189211885 Blast Desc: PX domain containing protein [Pyrenophora tritici-repentis Pt-1C-BFP] gi|187979469|gb|EDU46095.1| PX domain containing protein [Pyrenophora tritici-repentis Pt-1C-BFP]
MASTTDSKLPSDSRTTKKPRDSTARADPSMPKLQTPPSPPPTETDTDETETEPDSPISPFPDFRQEDAVEGHDSTTFIFPSIETATARSTSDQTAHLSNDLSQRLQLNMPDPNLTALTVSEPSDTAESPMISPVQSPPYWTPRNSQDHPPGHNRTVSSESIPAGVGITMRDNENSSIDERGDACWAKSVQVTDYVVVNGSATNIGAFVVFNIRVETLSGSYMNIRKRYSEFDDFRWRLMRTFPGFEAAVPELPPKSLISKFRPRFLEKRRAGLQYFLHCILLNPEFSGSPVLKEFLFA

SEQ ID NO: 3886 - DNA, 3605 bp, Muscodor strobelii
  misc_feature: SGI EST ID NO. CUFF.9965.0
  misc_feature: Variant of the nucleotide sequence at SEQ ID NO 3884
gaattggggcgattctaagtatgaggtatgatagcagtacggaatttgagctcgtgggggacgttgcgctattatcccttccgctcctacattctttctggtcactcactacgttccactctcgaacgctgggtactccgtaacaatgcgtgtaggcaggggaatgacagtcctgtgaacaaagcttcgcaaaattggtgggtgtgcatcatcagtatcaaattcaaaattttgtacagggtcgaatgtttcgacagcgtagtcaacgtgaatagcctttgcaaccattgatagtcattctcgacttcatgtgagttgcagtcttggggtaccttatattatcttgatgaatacaatagtgatgatgaaagaaggcctattcgagtttaagttcacctccagcatctaaagagggagatagcgcgtgttaatggactaccccacactttattctcaaagaccctgtcgccgcggcctgtctcactcgggatctttgtagtgccgcgaccaggtacagtatcctggaatatcgagatccaacaattgactgaatttatcgctcgtcgtcatcatcgactgcttgctctcaaattgccaacactaccgtctccaacgaatcacccaacaccattgcgcacaccaatcacatgcgacaattcctcccttccttcgctgtcgcatacagcacattactacaccatccattttccgcccaccatcatccgtcttactgaattgatctggcgcaaccgctgcgtacaacggccaaaactttaacatcacccgggaacagtcaaatggcgtctacaacggattccaaactccctagcgacagcaggaccaccaaaaagccccgcgacagcacagcgcgggccgatccgtcgatgccgaaactccaaacccctccgtcgccgccgcccaccgaaacagacaccgacgagaccgagaccgagcccgactcgccaatatcgccattcccagacttcagacaggaagacgccgtagaagggcacgattcgacaacattcatcttcccctctatagaaacagccactgccagatctacaagcgatcaaacggcgcatctaagcaacgacttgtcgcaacgcctccaactcaacatgcctgacccaaatttaaccgcactcaccgtatcagaacctagcgacacggctgagtcccccatgatctcaccagtacagagtccgccctactggacgccacggaatagccaagaccacccgccaggccacaacagaacagtttcctctgaatcaataccagcgggcgtgggcataacgatgcgcgacaacgagaatagcagtattgacgagcgaggagacgcttgctgggccaagagtgtgcaagttacggactatgtagtcgtgaacggcagtgccaccaacattggtgcctttgttgtatttaatatcagggttgagactttaagtgggagttacatgaatattcgaaagcgatattcggagttcgatgatttcagatggaggctcatgaggacgttccccggattcgaggcagctgtgcctgagttaccgcctaagagcttgatttccaagttcaggccgaggtttctcgagaagaggagggcgggcttgcaatacttccttcattgtattttattgaatccggaattctcgggctcgccggtgctcaaagaattcctctttgcataatgattgacgatttcgactaggatgcatgagacgcttcaaaggcagagattgtatagcgacttctacaaatcagagccctggacggcagacgaaacataatcagaataaacgccattggaacgaacataatgctaatcatgtataacaacattacgatcgtttgataccagccgtgggtattggcgttgcataaaaaaaatcaagcgctctaaagaaagtgtcacatcaaattgccgcgtctcgggcggactacatagcatattcagttcacacacatactttcaataccaaactaaatttgcacatcaaatcaaatctcctaagctgtgtcttgaaaatcgcttgtatacagtctataggccggtagatatctgtaatccagctcattatctagatactcaaagggaaattctggcaatacagcgtagacgagtaataaacaagaagcttgaaagaacgcaacgctcgtcacgaaacgcctgtgtcatgcagccgatccgatcccgtccccaatctattttctcgcccctggggaagttacccgaaatctaggatgccgaaccgatgccatactgctctcctaccgcatcaactattatatgaagcaaatgctgcctctcccgccgcttgtcgcgatatccaagaaaaaattacttcgcattcgaattcgccaaactcaaatacgcattccagccaatgctcacaacattaacggccaagacgcgatggtgcaaaggtacaaatttgaagttgaccaattggacccaaggccagagcaagtagtttgtctgcaaggtggggaagtaagacttagagagcttctcggagggcgaggagccctcgagaatggccatggaggagaggaagacgccgatgaaggttggcgcgaagatcagctggtcgcaggctacgcgggcgagaatctcggcgttcttgttggggagaacaactttcttggacaggatcttgaaccaggttgttgctgctggaccgaagatgactagcaaggttgttaggttgagagaaagtgagtgaatgagattggctaggatgagtgtggtagttggtgtgctatcgagaaatgaaagtgagagtagatgtgaaatacagtgagatcaccacctcgctcatcactgtttcacccaaatcacatgcaatcccgctcaagtgagcctcagatacttcaaaagtgagatattgtactcaccaccaccatacgcgaacatgcgacccgtgcgcacgagctcgtgtttattcaggcccttcttctcaaccacctgctgcgcggtgatgtcaccgacggcgaagagaacagcagtcgtgacgctctgcgtcaagagtggccggctggcaagcttgcgttggtacctgttcttgtttgtcaattatgagttcatcttgatttgttttaatcattttgatggaaatgttgttcaattgagcttagatgtcgcaggtcgtcgcgcatcaacgtcagtgggctgaagcttcagcacaacaccgttatcggttggcggcaggttcctggaacaacccggagagcaattggggcgggaatgcaggttcaaagcttaccagcgaagcatattggcgtcagttggatgagtcgaccggccttcgagtcttggtataagcgagcgaatgtgttgacgaggcacagaatggaggattgatatgagcaatcgctcagaaatttaagcaaccaagaattcttgaggctgctactatcccaggcgagtcaaggtcataagtggaaaagtgggcttgttccaacgctctggagagtatcgatcgcctagtgatggatcttggcggtgccgacgtcactgaccccagatctcgaaactgtaaatcttctgggtagagagaggttgaaaactgtgaaaaatcataaaatgagttgtagttttg

SEQ ID NO: 3887 - DNA, 522 bp, Muscodor strobelii
  misc_feature: SGI cDNA ID NO. 560966
  misc_feature: Encodes the peptide sequence at SEQ ID NO 3888
atgcttcgctggtaccaacgcaagcttgccagccggccactcttgacgcagagcgtcacgactgctgttctcttcgccgtcggtgacatcaccgcgcagcaggtggttgagaagaagggcctgaataaacacgagctcgtgcgcacgggtcgcatgttcgcgtatggtggtgtcatcttcggtccagcagcaacaacctggttcaagatcctgtccaagaaagttgttctccccaacaagaacgccgagattctcgcccgcgtagcctgcgaccagctgatcttcgcgccaaccttcatcggcgtcttcctctcctccatggccattctcgagggctcctcgccctccgagaagctctctaagtcttacttccccaccttgcagacaaactacttgctctggccttgggtccaattggtcaacttcaaatttgtacctttgcaccatcgcgtcttggccgttaatgttgtgagcattggctggaatgcgtatttgagtttggcgaattcgaatgcgaagtaa

SEQ ID NO: 3888 - protein, 173 aa, Muscodor strobelii
  misc_feature: SGI Peptide ID NO. 560966
  misc_feature (107)..(172): Pfam Id: PF04117 Pfam Desc: Mpv17 / PMP22 family
  misc_feature (107)..(170): Pfam Id: PF04117 Pfam Desc: Mpv17 / PMP22 family
  misc_feature (1)..(170): NCBI GI: 116182182 Blast Desc: CHGG_01719 [Chaetomium globosum CBS 148.51] gi|88186016|gb|EAQ93484.1| CHGG_01719 [Chaetomium globosum CBS 148.51]
  misc_feature (1)..(170): NCBI GI: 156057949 Blast Desc: SS1G_04706 [Sclerotinia sclerotiorum 1980] gi|154702491|gb|EDO02230.1| SS1G_04706 [Sclerotinia sclerotiorum 1980]
  misc_feature (2)..(172): NCBI GI: 169616350 Blast Desc: SNOG_11347 [Phaeosphaeria nodorum SN15] gi|111059935|gb|EAT81055.1| SNOG_11347 [Phaeosphaeria nodorum SN15]
  misc_feature (1)..(172): NCBI GI: 154323324 Blast Desc: BC1G_00061 [Botryotinia fuckeliana B05.10] gi|150842290|gb|EDN17483.1| BC1G_00061 [Botryotinia fuckeliana B05.10]
  misc_feature (1)..(171): NCBI GI: 164429710 Blast Desc: NCU02117 [Neurospora crassa OR74A] gi|166210406|sp|Q7SCY7.2|SYM1_NEUCR RecName: Full=Protein sym-1 gi|157073587|gb|EAA34618.2| conserved [Neurospora crassa OR74A]
  misc_feature (2)..(170): NCBI GI: 256734689 Blast Desc: [Nectria haematococca mpVI 77-13-4]
  misc_feature (1)..(172): NCBI GI: 121719450 Blast Desc: integral membrane protein, Mpv17/PMP22 family, [Aspergillus clavatus NRRL 1] gi|119404622|gb|EAW14998.1| integral membrane protein, Mpv17/PMP22 family, [Aspergillus NRRL
  misc_feature (2)..(171): NCBI GI: 46107694 Blast Desc: FG00730.1 [Gibberella zeae PH-1] gi|97197141|sp|Q4IPX8.1|SYM1_GIBZE RecName: Full=Protein SYM1
  misc_feature (1)..(170): NCBI GI: 261358671 Blast Desc: SYM1 [Verticillium albo-atrum VaMs.102]
  misc_feature (4)..(141): NCBI GI: 39974203 Blast Desc: MGG_00752 [Magnaporthe grisea 70-15] gi|145018316|gb|EDK02595.1| MGG_00752 [Magnaporthe grisea 70-15]
MLRWYQRKLASRPLLTQSVTTAVLFAVGDITAQQVVEKKGLNKHELVRTGRMFAYGGVIFGPAATTWFKILSKKVVLPNKNAEILARVACDQLIFAPTFIGVFLSSMAILEGSSPSEKLSKSYFPTLQTNYLLWPWVQLVNFKFVPLHHRVLAVNVVSIGWNAYLSLANSNAK

SEQ ID NO: 3889 - DNA, 3304 bp, Muscodor strobelii
  misc_feature: SGI EST ID NO. CUFF.9966.1
  misc_feature: Variant of the nucleotide sequence at SEQ ID NO 3887
caaaactacaactcattttatgatttttcacagttttcaacctctctctacccagaagatttacagtttcgagatctggggtcagtgacgtcggcaccgccaagatccatcactaggcgatcgatactctccagagcgttggaacaagcccacttttccacttatgaccttgactcgcctgggatagtagcagcctcaagaattcttggttgcttaaatttctgagcgattgctcatatcaatcctccattctgtgcctcgtcaacacattcgctcgcttataccaagactcgaaggccggtcgactcatccaactgacgccaatatgcttcgctggtaccaacgcaagcttgccagccggccactcttgacgcagagcgtcacgactgctgttctcttcgccgtcggtgacatcaccgcgcagcaggtggttgagaagaagggcctgaataaacacgagctcgtgcgcacgggtcgcatgttcgcgtatggtggtgtcatcttcggtccagcagcaacaacctggttcaagatcctgtccaagaaagttgttctccccaacaagaacgccgagattctcgcccgcgtagcctgcgaccagctgatcttcgcgccaaccttcatcggcgtcttcctctcctccatggccattctcgagggctcctcgccctccgagaagctctctaagtcttacttccccaccttgcagacaaactacttgctctggccttgggtccaattggtcaacttcaaatttgtacctttgcaccatcgcgtcttggccgttaatgttgtgagcattggctggaatgcgtatttgagtttggcgaattcgaatgcgaagtaattttttcttggatatcgcgacaagcggcgggagaggcagcatttgcttcatataatagttgatgcggtaggagagcagtatggcatcggttcggcatcctagatttcgggtaacttccccaggggcgagaaaatagattggggacgggatcggatcggctgcatgacacaggcgtttcgtgacgagcgttgcgttctttcaagcttcttgtttattactcgtctacgctgtattgccagaatttccctttgagtatctagataatgagctggattacagatatctaccggcctatagactgtatacaagcgattttcaagacacagcttaggagatttgatttgatgtgcaaatttagtttggtattgaaagtatgtgtgtgaactgaatatgctatgtagtccgcccgagacgcggcaatttgatgtgacactttctttagagcgcttgattttttttatgcaacgccaatacccacggctggtatcaaacgatcgtaatgttgttatacatgattagcattatgttcgttccaatggcgtttattctgattatgtttcgtctgccgtccagggctctgatttgtagaagtcgctatacaatctctgcctttgaagcgtctcatgcatcctagtcgaaatcgtcaatcattatgcaaagaggaattctttgagcaccggcgagcccgagaattccggattcaataaaatacaactgttctcaagttagccacatgtatgatttgttgctcctactgtagcacttactgaaggaagtattgcaagcccgccctcctcttctcgagaaacctcggcctgaacttggaaatcaagctcttaggcggtaactcaggcacagctgcctcgaatccggggaacgtcctcatgagcctccatctgaaatcatcgaactccgaatatcgctttcgaatattcatgtaactcccctatacacccgattagcacctcttccggctagatccggacgactgtgatgcaaaactcacacttaaagtctcaaccctgatattaaatacaacaaaggcaccaatgttggtggcactgccgttcacgactacatagtccgtaacttgcacactcttggcccagcaagcgtctcctcgctcgtcaatactgctattctcgttgtcgcgcatcgttatgcccacgcccgctggtattgattcagaggaaactgttctgttgtggcctggcgggtggtcttggctattccgtggcgtccagtagggcggactctgtactggtgagatcatgggggactcagccgtgtcgctaggttctgatacggtgagtgcggttaaatttgggtcaggcatgttgagttggaggcgttgcgacaagtcgttgcttagatgcgccgtttgatcgcttgtagatctggcagtggctgtttctatagaggggaagatgaatgttgtcgaatcgtgcccttctacggcgtcttcctgtctgaagtctgggaatggcgatattggcgagtcgggctcggtctcggtctcgtcggtgtctgtttcggtgggcggcggcgacggaggggtttggagtttcggcatcgacggatcggcccgcgctgtgctgtcgcggggctttttggtggtcctgctgtcgctagggagtttggaatccgttgtagacgccatttgactgttcccgggtgatgttaaagttttggccgttgtacgcagcggttgcgccagatcaattcagtaagacggatgatggtgggcggaaaatggatggtgtagtaatgtgctgtatgcgacagcgaaggaagggaggaattgtcgcatgtgattggtgtgcgcaatggtgttgggtgattcgttggagacggtagtgttggcaatttgagagcaagcagtcgatgatgacgacgagcgataaattcagtcaattgttggatctcgatattccaggatactgtacctggtcgcggcactacaaagatcccgagtgagacaggccgcggcgacagggtctttgagaataaagtgtggggtagtccattaacacgcgctatctccctctttagatgctggaggtgaacttaaactcgaataggccttctttcatcatcactattgtattcatcaagataatataaggtaccccaagactgcaactcacatgaagtcgagaatgactatcaatggttgcaaaggctattcacgttgactacgctgtcgaaacattcgaccctgtacaaaattttgaatttgatactgatgatgcacacccaccaattttgcgaagctttgttcacaggactgtcattcccctgcctacacgcattgttacggagtacccagcgttcgagagtggaacgtagtgagtgaccagaaagaatgtaggagcggaagggataatagcgcaacgtcccccacgagctcaaattccgtactgctatcatacctcatacttagaatcgccccaattc

SEQ ID NO: 3890 - DNA, 993 bp, Muscodor strobelii
  misc_feature: SGI cDNA ID NO. 560967
  misc_feature: Encodes the peptide sequence at SEQ ID NO 3891
atgagtgaacaacaacataccggcagtcatcagcgcggccagtctgagcccaatggttatcacagactagccaatatcatgcagcaggaaccgcagttcgccatgttccgaaaattccaagagatcaatgtattgcatctcatgtttctccaagctgagattttggaattgaaaactcggtttgaacataggtgttcccaagatgagctgcaaaatcttacttactctacaatcttccagaatctaaggcggtcacaccaaccaaatcaattaccgagatacgacaatgaggctacgccaacgattggagaagaaaattggccgtcgttctcgcagtatgagctgcttatagagttaaaaagtaaaatgtccgactacaataaccttctgatacaagtatcacagatagcccaaatacctaagcctgacaaatcccagttgcaggaacttcaaggctggttatgtgatcctaaggggggcaacgactttcttaaggcattcgagttctctacgtggggagaaagcaatccagactgctacgtggttatgaaaaacgtcaacgataatgaagaaggggacatcttgtcgagattcgtgatgaaagccttgctcgtcctcgactggctgtctggcgagaaatggtcgatgggcaaggttatcgacaagcagtctgaactaatctcgtactccgacacaaaagtcagcagagcgagcagaatcatagccgcggctatatcttcggcgctgcccgtgttgactatcttcgttctaaatcagctttcctcgacgaatctacgaatcggtgtgacgttggtgttcacaagtgtcttcgccctgcttttaggagcattcacggcggcgaagaaagctgaggtctttgcggcaaccgcgacgtacgtagacagtattttagtagaagcatatgctaacaatcttgcaagatttgctgctattgaagtcgtattcatcggcaccgcaagtactcagtcttga

SEQ ID NO: 3891 - protein, 330 aa, Muscodor strobelii
  misc_feature: SGI Peptide ID NO. 560967
  misc_feature (14)..(327): NCBI GI: 256720608 Blast Desc: NECHADRAFT_85466 [Nectria haematococca mpVI 77-13-4]
  misc_feature (139)..(303): NCBI GI: 171680610 Blast Desc: protein product [Podospora anserina] gi|170939932|emb|CAP65158.1| protein product [Podospora anserina]
  misc_feature (19)..(292): NCBI GI: 256723768 Blast Desc: NECHADRAFT_8348 [Nectria haematococca mpVI 77-13-4]
  misc_feature (12)..(327): NCBI GI: 261358949 Blast Desc: VDBG_07487 [Verticillium albo-atrum VaMs.102]
  misc_feature (14)..(297): NCBI GI: 189192693 Blast Desc: conserved [Pyrenophora tritici-repentis Pt-1C-BFP] gi|187978249|gb|EDU44875.1| conserved [Pyrenophora tritici-repentis Pt-1C-BFP]
  misc_feature (19)..(295): NCBI GI: 145247594 Blast Desc: An12g09960 [Aspergillus niger] gi|134080785|emb|CAL00899.1| protein product [Aspergillus niger]
  misc_feature (144)..(291): NCBI GI: 171682472 Blast Desc: protein product [Podospora anserina] gi|170941195|emb|CAP66845.1| protein product [Podospora anserina]
  misc_feature (14)..(297): NCBI GI: 169604935 Blast Desc: SNOG_05484 [Phaeosphaeria nodorum SN15] gi|111065428|gb|EAT86548.1| SNOG_05484 [Phaeosphaeria nodorum SN15]
  misc_feature (19)..(296): NCBI GI: 67524323 Blast Desc: AN2619.2 [Aspergillus nidulans FGSC A4] gi|40743780|gb|EAA62966.1| [Aspergillus nidulans FGSC A4] gi|259486481|tpe|CBF84353.1| TPA: conserved [Aspergillus nidulans
  misc_feature (8)..(328): NCBI GI: 156050485 Blast Desc: [Sclerotinia sclerotiorum 1980] gi|154692230|gb|EDN91968.1| [Sclerotinia sclerotiorum 1980]
MSEQQHTGSHQRGQSEPNGYHRLANIMQQEPQFAMFRKFQEINVLHLMFLQAEILELKTRFEHRCSQDELQNLTYSTIFQNLRRSHQPNQLPRYDNEATPTIGEENWPSFSQYELLIELKSKMSDYNNLLIQVSQIAQIPKPDKSQLQELQGWLCDPKGGNDFLKAFEFSTWGESNPDCYVVMKNVNDNEEGDILSRFVMKALLVLDWLSGEKWSMGKVIDKQSELISYSDTKVSRASRIIAAAISSALPVLTIFVLNQLSSTNLRIGVTLVFTSVFALLLGAFTAAKKAEVFAATATYVDSILVEAYANNLARFAAIEVVFIGTASTQS

SEQ ID NO: 3892 - DNA, 585 bp, Muscodor strobelii
  misc_feature: SGI cDNA ID NO. 560968
  misc_feature: Encodes the peptide sequence at SEQ ID NO 3893
atgcattatgacttcacccgggatatcgtcgcgatcctcgaggtctcagggtgcgaaggaccggaaagattcaagtatgttcctctccgcaacaagatcgacactgcgagtgatgagaattttattagccgcaaggtacttgagaagcacagcatggacatgtcaattgttacccaaattccgaaaagagaccgtcataagagaacgctcgaatgtctcaatggcgactttactccagaagaagaggttaggctgcagtggcataagctccgggatagccaacaaagagacggagtcttcattgtggttgatgaccctccatttgacatactcatcggctccaaacaattcgccgatgaatcgaagtcgacagccatgtggggatttgggagacacaagtccagacctgaaatgagggatcaggacgagaaacgcatggaaaatggaaaggccgctgcagaggaggtgaacgcgcaactggcagaagctcgaaaaattcacaaggctttatcctcggaaagattgatccagccttacctcaagccgatgaagcaacgctcaactctcagaaacagaacgtcgtag

SEQ ID NO: 3893 - protein, 194 aa, Muscodor strobelii
  misc_feature: SGI Peptide ID NO. 560968
MHYDFTRDIVAILEVSGCEGPERFKYVPLRNKIDTASDENFISRKVLEKHSMDMSIVTQIPKRDRHKRTLECLNGDFTPEEEVRLQWHKLRDSQQRDGVFIVVDDPPFDILIGSKQFADESKSTAMWGFGRHKSRPEMRDQDEKRMENGKAAAEEVNAQLAEARKIHKALSSERLIQPYLKPMKQRSTLRNRTS

SEQ ID NO: 3894 - DNA, 669 bp, Muscodor strobelii
  misc_feature: SGI EST ID NO. CUFF.9778.0
  misc_feature: Variant of the nucleotide sequence at SEQ ID NO 3892
gaggattcgaattccatggcgagctgcacgcgaaatcaacactccctgactgcagattttgtattgttaatgcattatgacttcacccgggatatcgtcgcgatcctcgaggtctcagggtgcgaaggaccggaaagattcaagtatgttcctctccgcaacaagatcgacactgcgagtgatgagaattttattagccgcaaggtacttgagaagcacagcatggacatgtcaattgttacccaaattccgaaaagagaccgtcataagagaacgctcgaatgtctcaatggcgactttactccagaagaagaggttaggctgcagtggcataagctccgggatagccaacaaagagacggagtcttcattgtggttgatgaccctccatttgacatactcatcggctccaaacaattcgccgatgaatcgaagtcgacagccatgtggggatttgggagacacaagtccagacctgaaatgagggatcaggacgagaaacgcatggaaaatggaaaggccgctgcagaggaggtgaacgcgcaactggcagaagctcgaaaaattcacaaggctttatcctcggaaagattgatccagccttacctcaagccgatgaagcaacgctcaactctcagaaacagaacgtcgtagcctgatacattagtg

SEQ ID NO: 3895 - DNA, 1869 bp, Muscodor strobelii
  misc_feature: SGI cDNA ID NO. 560969
  misc_feature: Encodes the peptide sequence at SEQ ID NO 3896
atgaagtattcttcggtattgcttggctgcattgcgcctttagtatggctggggagtacggcctcggcgcaacgcccgaacattatttttataatgactgatgatcaggatcttcatctaggatctgtaaatcatcagccagtcttgaaaaaggagctgattgaaaagggcacgactttctcaaaacattatgtcacggttgctaaatgttgccccagcagagcctcgttgctgagaggacaagctggccataataccaatatcacagaagtcagtgctcctggcggcaactacgataaatggttgatatctggacaaaatgaggactacctcccgcattggcttacagcagcgggatataatgctgactatatcggaaagatcatgaatggctataacacggcaaactataagcaggtacccaaaggttggtcaaatattcagaccgcagttgatgactatacgtatgagtacaacaacgtagctttttcgctcaatggagagacgcctgtttcatatcccgggtatcatcagtctgacgttattcgggctatggctgtcgatcggattgacaagttggcagctcaagataaacctttctttctcgccattgcaccaacttcaccacatgtagagcttggcggcggcaagtggcccgtccctcctgtacggtacgcgaacaagtttcccaatctcaaagcgccgcgtaccgataattggaaccccgacgactcctttcagtcacaaaaagtctcttggatcaagaaattaccggtcttgaatcaaactagcattgatagactggatgggctctaccgtgcgcgagcccaatctcttctcggcatcgacgacatcattgaggatgtgattgcgaagcttgaagagaagaaaatcatagataatacgtatattgtctatacctcagacaacggctggcatattgggaaccatcgcatttcggcagggaagtctcttcattatagggaggactccaatgtgccgttctacgtaagaggtcctggtgtccccgcgaacaaggcatctaatcttcccggcgcgcatcttgatctcgcatcaacttttcttgacatagcaaatcttagtccggaagacccggcatacccacgattcctcgacgggcgtagtcttctgtcaaattggaagactccgggcgcggagcccaagcaatgccctgtgaatggtggagggcatgaagtcatcaatgtggagtattggggcattggcgaagaggagagcccatggggcaccataagacacgagggcaacagttacaagacattgcggattgttcgtcctgatggcggcacatatctctactcacgttggtgttcaggggagacagagttatacgatactgggtcagatccgactgagctcacaaatctcgcgctcaatccggatgacgacacgtctcgactgctctcgcggctaaacgcactgctgatggccgctaaatcctgtgctgaggacacttgtcgcaatccgtggtcactcctgcaacctgaaccggagcgacgtgccttagacgtgcaaacgaatcttactatcacttgtctcgaacaagctctcgagccgaaattcgataacttctttgactcagtgccacaggtagcatttgggcaatgcatgcgatatcagtatcgtccgaatgagataccgtactggccggagaatgtaacattgggtgagcagtacaggctgccaacagataattaccaaagctcgtctccttcagggaagaaaatcgtgtcggagggaaagtttggtacagtggctcagaggaatttgacgctggctgagattatgaagactgcgcgaaacttcactgctgaagagcttggcggatag

SEQ ID NO: 3896 - protein, 622 aa, Muscodor strobelii
  misc_feature: SGI Peptide ID NO. 560969
  misc_feature (24)..(468): Pfam Id: PF00884 Pfam Desc: Sulfatase
  misc_feature (1)..(621): NCBI GI: 145604811 Blast Desc: MGG_07920 [Magnaporthe grisea 70-15] gi|145012735|gb|EDJ97389.1| MGG_07920 [Magnaporthe grisea 70-15]
  misc_feature (1)..(621): NCBI GI: 145615374 Blast Desc: MGG_05540 [Magnaporthe grisea 70-15] gi|145022215|gb|EDK06235.1| MGG_05540 [Magnaporthe grisea 70-15]
  misc_feature (25)..(560): NCBI GI: 169598524 Blast Desc: SNOG_02066 [Phaeosphaeria nodorum SN15] gi|160704411|gb|EAT90278.2| SNOG_02066 [Phaeosphaeria nodorum SN15]
  misc_feature (23)..(549): NCBI GI: 119483994 Blast Desc: arylsulfatase, [Neosartorya fischeri NRRL 181] gi|119410056|gb|EAW20003.1| arylsulfatase, [Neosartorya fischeri NRRL 181]
  misc_feature (27)..(550): NCBI GI: 121714837 Blast Desc: arylsulfatase, [Aspergillus clavatus NRRL 1] gi|119403184|gb|EAW13602.1| arylsulfatase, [Aspergillus clavatus NRRL 1]
  misc_feature (23)..(551): NCBI GI: 70982853 Blast Desc: arylsulfatase [Aspergillus fumigatus Af293] gi|66844579|gb|EAL84916.1| arylsulfatase, [Aspergillus fumigatus Af293] gi|159123838|gb|EDP48957.1| arylsulfatase, [Aspergillus
  misc_feature (23)..(573): NCBI GI: 169786467 Blast Desc: [Aspergillus oryzae RIB40] gi|83776442|dbj|BAE66561.1| protein product [Aspergillus oryzae]
  misc_feature (22)..(555): NCBI GI: 256729513 Blast Desc: NECHADRAFT_95823 [Nectria haematococca mpVI 77-13-4]
  misc_feature (23)..(573): NCBI GI: 238507485 Blast Desc: arylsulfatase, [Aspergillus flavus NRRL3357] gi|220689657|gb|EED46008.1| arylsulfatase, [Aspergillus flavus NRRL3357]
  misc_feature (25)..(549): NCBI GI: 169779723 Blast Desc: [Aspergillus oryzae RIB40] gi|83773065|dbj|BAE63193.1| protein product [Aspergillus oryzae]
  misc_feature (6)..(559): SWISSPROT Homolog: EC 3.1.6.1 Arylsulfatase
MKYSSVLLGCIAPLVWLGSTASAQRPNIIFIMTDDQDLHLGSVNHQPVLKKELIEKGTTFSKHYVTVAKCCPSRASLLRGQAGHNTNITEVSAPGGNYDKWLISGQNEDYLPHWLTAAGYNADYIGKIMNGYNTANYKQVPKGWSNIQTAVDDYTYEYNNVAFSLNGETPVSYPGYHQSDVIRAMAVDRIDKLAAQDKPFFLAIAPTSPHVELGGGKWPVPPVRYANKFPNLKAPRTDNWNPDDSFQSQKVSWIKKLPVLNQTSIDRLDGLYRARAQSLLGIDDIIEDVIAKLEEKKIIDNTYIVYTSDNGWHIGNHRISAGKSLHYREDSNVPFYVRGPGVPANKASNLPGAHLDLASTFLDIANLSPEDPAYPRFLDGRSLLSNWKTPGAEPKQCPVNGGGHEVINVEYWGIGEEESPWGTIRHEGNSYKTLRIVRPDGGTYLYSRWCSGETELYDTGSDPTELTNLALNPDDDTSRLLSRLNALLMAAKSCAEDTCRNPWSLLQPEPERRALDVQTNLTITCLEQALEPKFDNFFDSVPQVAFGQCMRYQYRPNEIPYWPENVTLGEQYRLPTDNYQSSSPSGKKIVSEGKFGTVAQRNLTLAEIMKTARNFTAEELGG

SEQ ID NO: 3897 - DNA, 1032 bp, Muscodor strobelii
  misc_feature: SGI cDNA ID NO. 560970
  misc_feature: Encodes the peptide sequence at SEQ ID NO 3898
atgcgatccaacgcggcagcttacatcccagacaagggaagaactctcgaaattcgagggcatccgtttccggagctgaaggataaggagctagttattgccaaccgcgccgtttcactcaacccggtcgactttggtatgcaagatgatggacaagcacttttccccaatactgaattcaagtatccctgtgtccccggcgaagacgtcgcgggcgaagtcatagcggttggtccggccgtgacgcgcttcaaagtcggcgaccgcgttatcggtctagttgtgctcacagcattccaaaattaccccgtactggtcgagcatggcactgcaaacattccagattggatgtcgttcacggaagcttgtgttcttccactgtgcgtgtctactgcggcagcctgtttattccacagaaacaacatcggactttcagtgccctcgatagcatctccttcacctcaatcgacgggcaagacaatactcatctggggcggctcaacgagcgtcggtataaacgctattcaattagctatcgcggcaggctacaatgtcgtgaccacctcctccccgcgtaattttgaatatgttaagtcgctaggcgccggtgctatctttgactacaagagcgacactgtagtagacgatctgatcgcagcgattggtggtcagactctgataggatgcatagcgatcggcgggatcggaacaccaatgccatacgaagaagtgctacatgcgtgcgctgccgtcttaagacaagtcgagagcccgtgccctatgatcacgctcttaccaacgaaatcaatctcagaaggcatcgacgtacgattcactgatgctcaactgatcttggacaatccggagctaggtcgagccgtattcgaatttgtagctagtggattggctacacaagcctatcgtgctttgccaaaagctgacgttgtcgctcacggactagagggcctacaaacaggcttggatatcttgcgtggcggggtctcggctcggaagttagtggtaactctatag

SEQ ID NO: 3898 - protein, 343 aa, Muscodor strobelii
  misc_feature: SGI Peptide ID NO. 560970
  misc_feature (28)..(127): Pfam Id: PF08240 Pfam Desc: Alcohol dehydrogenase GroES-like domain
  misc_feature (157)..(300): Pfam Id: PF00107 Pfam Desc: Zinc-binding dehydrogenase
  misc_feature (28)..(91): Pfam Id: PF08240 Pfam Desc: Alcohol dehydrogenase GroES-like domain
  misc_feature (157)..(224): Pfam Id: PF00107 Pfam Desc: Zinc-binding dehydrogenase
  misc_feature (1)..(343): NCBI GI: 46124493 Blast Desc: FG06624.1 [Gibberella zeae PH-1]
  misc_feature (4)..(343): NCBI GI: 154299623 Blast Desc: BC1G_10774 [Botryotinia fuckeliana B05.10] gi|150857266|gb|EDN32458.1| BC1G_10774 [Botryotinia fuckeliana B05.10]
  misc_feature (1)..(343): NCBI GI: 145241714 Blast Desc: An09g01880 [Aspergillus niger] gi|134078043|emb|CAK40126.1| protein product [Aspergillus niger]
  misc_feature (3)..(343): NCBI GI: 242783896 Blast Desc: alcohol dehydrogenase, [Talaromyces stipitatus ATCC 10500] gi|242783902|ref|XP_002480279.1| alcohol dehydrogenase, [Talaromyces stipitatus ATCC 10500] gi|218720425|gb|EED19844.1|
  misc_feature (4)..(343): NCBI GI: 156030740 Blast Desc: SS1G_14309 [Sclerotinia sclerotiorum 1980] gi|154700700|gb|EDO00439.1| SS1G_14309 [Sclerotinia sclerotiorum 1980]
  misc_feature (3)..(343): NCBI GI: 159125418 Blast Desc: oxidoreductase, zinc-binding dehydrogenase family superfamily [Aspergillus fumigatus A1163]
  misc_feature (3)..(343): NCBI GI: 145253561 Blast Desc: An17g00640 [Aspergillus niger] gi|134083861|emb|CAK42992.1| protein product [Aspergillus niger]
  misc_feature (3)..(343): NCBI GI: 70993624 Blast Desc: oxidoreductase, zinc-binding dehydrogenase family superfamily [Aspergillus fumigatus Af293] gi|66849293|gb|EAL89621.1| oxidoreductase, zinc-binding family
  misc_feature (3)..(343): NCBI GI: 212527480 Blast Desc: zinc-binding oxidoreductase CipB [Penicillium marneffei ATCC 18224] gi|210073295|gb|EEA27382.1| zinc-binding oxidoreductase CipB [Penicillium marneffei ATCC 18224]
  misc_feature (1)..(343): NCBI GI: 212539219 Blast Desc: alcohol dehydrogenase, [Penicillium marneffei ATCC 18224] gi|210069507|gb|EEA23598.1| alcohol dehydrogenase, [Penicillium marneffei ATCC 18224]
  misc_feature (22)..(222): SWISSPROT Homolog: EC 1.6.5.5 NADPH:quinone reductase
MRSNAAAYIPDKGRTLEIRGHPFPELKDKELVIANRAVSLNPVDFGMQDDGQALFPNTEFKYPCVPGEDVAGEVIAVGPAVTRFKVGDRVIGLVVLTAFQNYPVLVEHGTANIPDWMSFTEACVLPLCVSTAAACLFHRNNIGLSVPSIASPSPQSTGKTILIWGGSTSVGINAIQLAIAAGYNVVTTSSPRNFEYVKSLGAGAIFDYKSDTVVDDLIAAIGGQTLIGCIAIGGIGTPMPYEEVLHACAAVLRQVESPCPMITLLPTKSISEGIDVRFTDAQLILDNPELGRAVFEFVASGLATQAYRALPKADVVAHGLEGLQTGLDILRGGVSARKLVVTL

SEQ ID NO: 3899 - DNA, 2097 bp, Muscodor strobelii
  misc_feature: SGI cDNA ID NO. 560971
  misc_feature: Elevated expression when VOC is produced
  misc_feature: Encodes the peptide sequence at SEQ ID NO 3900
atgagaggcagaacggagaattcattaaaattatgcgtcgagtggccatcctatgagcccaatgaagatgttctcgccggccatatctcatacgagaatgtccgcatgcaaaacataccaccgacacttgatcacaatcaggatactctacgaaacattgcgcttccagataatcccgtcaaagataaatatatgccagaggtagcagcggagaatggtatcatccacgtattaagcaaggacggtgacacaagcgtcgatggctgggtacactcgtggcaactcgacggcatagagttcgacataaatcgcctgatacgtttcatcatatgtagaaattttgtgctcgctttcaaaagcattgaagacaaccagtcaatagatcttacacgactcgacacgatgggtagatcggccatattttatgcgttgttgcctttccgcgagaatggcatgttcgatctagtggtacggaagttgaacaacgaatccgtcctaagcaagttattagaacgcaaagacagaaatgggaacacacttcaagctaggattaattcgctcaagtccctgttgaggcgagatgagcctcaactagcgattgcactaagagataatacggtcttcgacatgaaaagagatccctatacacaccctggttatgcatccaatcataaaagcgtctccgaaacggaacagaacatgggacgacaggttaacatcgtttttccatgcctcgtccttgagaacaagggtatctatcgtgacgtgaagagaaaactaagcgattggaagagctctcacaaccagatgttcattggacacacattcagatccgtgcgtactttagacgagacgtattttcccagcttgtcgtacgaaagcctcgagattcgagatgacaatcaggtcgtctctcgagaatttgtcgaacctaatgagccgctcggagctccgccactcccagttccaatcttggtcgttcccaacctctggatctggaggtgtgacaatggtatattgacgacatattcggcagattgcgctcgttggttctacaagcctggacgatggaagaatgtatcatggggacccggtattcaaataggcatcataatagcacagcatgtttcggacttcagcacaggactagaacctatgtcaaggcgcttcaacacggagtttccgccacctctagacattttcgaatgtgctgtcgtccgaatcctcgaagaggtcgatgcttatataggcccaaattcaagactgcgacctgagatggaaaaggaacgcgactacacgtttagaattgctgatataagagaggaactagtgatgatactggcaatcctgggacaacagctcgaaattgttgaggacatgatcgaagattttgaaaagaacgaccctgacataggagagcttctgggtactgaattcaatgccatgaacgagagattaaagaaagcaaacaaggaatggaaagcggtaaagaacacgccaaatctgatcgagcagcaacgaaaacgtgtgaagaagattgacgcagacgcagaaagggttgagcgaatgattcagaaccagctcaacttgaaacggacatatgcaagtatcgaagatgctcggactagcttgctactcggaacagccgtcattggcttcactgttataacggtaatatttgcgcctcttgccttcatgacggccctattcgcattacctattgatattctcgttcgcaatcagtttttattcgactcaacgagcgccaagtcatccaccatagggcaagcagattctatccctacgtatccttcacgctatgtcgggggttggttcttcctcgcagaggttgtttccctagtcgttacaggagtcctcgtgtggatctgtttaagactcttcggtgggaaggaagtttcaaccgtcttgaaagatcgcgtcaccgagactacgaagggattgaatatacatgtcgataacattgccgtgagtagggttgcgaccggatttgctcgcggtcaaaagagcctgagggatggggctacgaaactccttcagcgtcctaatcgtcgtcggggtcgttctgttgaagtctga

SEQ ID NO: 3900 - protein, 698 aa, Muscodor strobelii
  misc_feature: SGI Peptide ID NO. 560971
  misc_feature (280)..(635): NCBI GI: 169613761 Blast Desc: SNOG_10013 [Phaeosphaeria nodorum SN15] gi|111061228|gb|EAT82348.1| SNOG_10013 [Phaeosphaeria nodorum SN15]
  misc_feature (249)..(637): NCBI GI: 169617431 Blast Desc: SNOG_11894 [Phaeosphaeria nodorum SN15] gi|111059818|gb|EAT80938.1| SNOG_11894 [Phaeosphaeria nodorum SN15]
  misc_feature (294)..(612): NCBI GI: 169615727 Blast Desc: SNOG_11027 [Phaeosphaeria nodorum SN15] gi|160703031|gb|EAT81526.2| SNOG_11027 [Phaeosphaeria nodorum SN15]
  misc_feature (265)..(620): NCBI GI: 212535284 Blast Desc: ankyrin repeat-containing protein, [Penicillium marneffei ATCC 18224] gi|210070197|gb|EEA24287.1| ankyrin repeat-containing protein, [Penicillium marneffei ATCC 18224]
  misc_feature (280)..(574): NCBI GI: 67541593 Blast Desc: AN6960.2 [Aspergillus nidulans FGSC A4] gi|40738412|gb|EAA57602.1| AN6960.2 [Aspergillus nidulans FGSC A4] gi|259480577|tpe|CBF71837.1| TPA: conserved [Aspergillus FGSC
  misc_feature (433)..(580): NCBI GI: 46103918 Blast Desc: FG00110.1 [Gibberella zeae PH-1]
  misc_feature (276)..(573): NCBI GI: 46127459 Blast Desc: FG08107.1 [Gibberella zeae PH-1]
  misc_feature (425)..(613): NCBI GI: 212531615 Blast Desc: ankyrin repeat protein [Penicillium marneffei ATCC 18224] gi|210071328|gb|EEA25417.1| ankyrin repeat protein [Penicillium marneffei ATCC 18224]
  misc_feature (425)..(613): NCBI GI: 242773540 Blast Desc: ankyrin repeat protein [Talaromyces stipitatus ATCC 10500] gi|218721880|gb|EED21298.1| ankyrin repeat protein [Talaromyces stipitatus ATCC 10500]
  misc_feature (425)..(574): NCBI GI: 119495022 Blast Desc: ankyrin repeat protein [Neosartorya fischeri NRRL 181] gi|119412469|gb|EAW22410.1| ankyrin repeat protein [Neosartorya fischeri NRRL 181]
  misc_feature: Useful for introducing or modulating the production of volatile compounds
MRGRTENSLKLCVEWPSYEPNEDVLAGHISYENVRMQNIPPTLDHNQDTLRNIALPDNPVKDKYMPEVAAENGIIHVLSKDGDTSVDGWVHSWQLDGIEFDINRLIRFIICRNFVLAFKSIEDNQSIDLTRLDTMGRSAIFYALLPFRENGMFDLVVRKLNNESVLSKLLERKDRNGNTLQARINSLKSLLRRDEPQLAIALRDNTVFDMKRDPYTHPGYASNHKSVSETEQNMGRQVNIVFPCLVLENKGIYRDVKRKLSDWKSSHNQMFIGHTFRSVRTLDETYFPSLSYESLEIRDDNQVVSREFVEPNEPLGAPPLPVPILVVPNLWIWRCDNGILTTYSADCARWFYKPGRWKNVSWGPGIQIGIIIAQHVSDFSTGLEPMSRRFNTEFPPPLDIFECAVVRILEEVDAYIGPNSRLRPEMEKERDYTFRIADIREELVMILAILGQQLEIVEDMIEDFEKNDPDIGELLGTEFNAMNERLKKANKEWKAVKNTPNLIEQQRKRVKKIDADAERVERMIQNQLNLKRTYASIEDARTSLLLGTAVIGFTVITVIFAPLAFMTALFALPIDILVRNQFLFDSTSAKSSTIGQADSIPTYPSRYVGGWFFLAEVVSLVVTGVLVWICLRLFGGKEVSTVLKDRVTETTKGLNIHVDNIAVSRVATGFARGQKSLRDGATKLLQRPNRRRGRSVEV

SEQ ID NO: 3901 - DNA, 2773 bp, Muscodor strobelii
  misc_feature: SGI EST ID NO. CUFF.9914.2
  misc_feature: Variant of the nucleotide sequence at SEQ ID NO 3899
tttgttccggataggcttctttccacttcaaagctctccgccatagcaacgataccaaccaaaatgagaggcagaacggagaattcattaaaattatgcgtcgagtggccatcctatgagcccaatgaagatgttctcgccggccatatctcatacgagaatgtccgcatgcaaaacataccaccgacacttgatcacaatcaggatactctacgaaacattgcgcttccagataatcccgtcaaagataaatatatgccagaggtagcagcggagaatggtatcatccacgtattaagcaaggacggtgacacaagcgtcgatggctgggtacactcgtggcaactcgacggcatagagttcgacataaatcgcctgatacgtttcatcatatgtagaaattttgtgctcgctttcaaaagcattgaagacaaccagtcaatagatcttacacgactcgacacgatgggtagatcggccatattttatgcgttgttgcctttccgcgagaatggcatgttcgatctagtggtacggaagttgaacaacgaatccgtcctaagcaagttattagaacgcaaagacagaaatgggaacagtctcatgcactatgcgatgagactcaaaagtctagatgcaatcgagtaccttcttcggacgaatctcaattgggaaatcgaactaccaaatcaggaaccctcccaagaatatcagtacccctgccaacagtatttctcctgcagattggatgttaagcagttggttaaagtgcagttgcgagggaaaaaattagtcgatgcacttccaacgtcttgcagtggatgttatacagatctgggtgatgtctggagacaacttcactcgactctatcaccaagtgagacctgccattttacgtggttgcatttcccctggatatatgtatgatctccgatgcacgtatattgaaaatagcctgaccagcatcagggcgtctgcatctttgtacgtactaattgacatctacgaagcacttcaagctaggattaattcgctcaagtccctgttgaggcgagatgagcctcaactagcgattgcactaagagataatacggtcttcgacatgaaaagagatccctatacacaccctggttatgcatccaatcataaaagcgtctccgaaacggaacagaacatgggacgacaggttaacatcgtttttccatgcctcgtccttgagaacaagggtatctatcgtgacgtgaagagaaaactaagcgattggaagagctctcacaaccagatgttcattggacacacattcagatccgtgcgtactttagacgagacgtattttcccagcttgtcgtacgaaagcctcgagattcgagatgacaatcaggtcgtctctcgagaatttgtcgaacctaatgagccgctcggagctccgccactcccagttccaatcttggtcgttcccaacctctggatctggaggtgtgacaatggtatattgacgacatattcggcagattgcgctcgttggttctacaagcctggacgatggaagaatgtatcatggggacccggtattcaaataggcatcataatagcacagcatgtttcggacttcagcacaggactagaacctatgtcaaggcgcttcaacacggagtttccgccacctctagacattttcgaatgtgctgtcgtccgaatcctcgaagaggtcgatgcttatataggcccaaattcaagactgcgacctgagatggaaaaggaacgcgactacacgtttagaattgctgatataagagaggaactagtgatgatactggcaatcctgggacaacagctcgaaattgttgaggacatgatcgaagattttgaaaagaacgaccctgacataggagagcttctgggtactgaattcaatgccatgaacgagagattaaagaaagcaaacaaggaatggaaagcggtaaagaacacgccaaatctgatcgagcagcaacgaaaacgtgtgaagaagattgacgcagacgcagaaagggttgagcgaatgattcagaaccagctcaacttgaaacggacatatgcaagtatcgaagatgctcggactagcttgctactcggaacagccgtcattggcttcactgttataacggtaatatttgcgcctcttgccttcatgacggccctattcgcattacctattgatattctcgttcgcaatcagtttttattcgactcaacgagcgccaagtcatccaccatagggcaagcagattctatccctacgtatccttcacgctatgtcgggggttggttcttcctcgcagaggttgtttccctagtcgttacaggagtcctcgtgtggatctgtttaagactcttcggtgggaaggaagtttcaaccgtcttgaaagatcgcgtcaccgagactacgaagggattgaatatacatgtcgataacattgccgtgagtagggttgcgaccggatttgctcgcggtcaaaagagcctgagggatggggctacgaaactccttcagcgtcctaatcgtcgtcggggtcgttctgttgaagtctgatgcagtcgaaaatagtcatcaaagccaatgattctaagaatacacagacttatcagtcaatcaatttttcttatggcgatactccatgggatccgagatataccgttttctctattcacaaaatatcactataagaggcacagcgtgaagatgactgggatacatacctatttacgtaccttgcacatataagtgtccgat

SEQ ID NO: 3902 - DNA, 579 bp, Muscodor strobelii
  misc_feature: SGI cDNA ID NO. 560972
  misc_feature: Encodes the peptide sequence at SEQ ID NO 3903
atggccgacgaactctcagcaatggctcccaatgcgcccgatcccggtggtgccaacaatctcgcaatcaacccgaacacttgctatctctgcatcacgcacatcgcctcacagaaggacatcgctcaccagtgccaatatgatcccatgtggttgcccaacctgctagacgatgatgttctctgcgagtggacccgcaaacaacaccgtaccagggagcacatgattgtccctgaggctcttaagagtcacgccagcgaggtcctagagacagccgccaagtgccgagagactccagagtccggcagacttaccgatgcttatcatgccgaccacgaagctttcgtcaaggcttgcaagtcctggtcggccgagaagcgcgccaggaagcgcgattacaacgcccagctggagagagccaaggacttgcagaacgagctcgctgagatgaagggtctgagatctgagttgagtgcgtttgattgggccggtgtcattaagttcttcactgagttcttccagtggagctcgttggccttggaaattttcgaggccggtgagctacacaaatggatgtga

SEQ ID NO: 3903 - protein, 192 aa, Muscodor strobelii
  misc_feature: SGI Peptide ID NO. 560972
MADELSAMAPNAPDPGGANNLAINPNTCYLCITHIASQKDIAHQCQYDPMWLPNLLDDDVLCEWTRKQHRTREHMIVPEALKSHASEVLETAAKCRETPESGRLTDAYHADHEAFVKACKSWSAEKRARKRDYNAQLERAKDLQNELAEMKGLRSELSAFDWAGVIKFFTEFFQWSSLALEIFEAGELHKWM

SEQ ID NO: 3904 - DNA, 1512 bp, Muscodor strobelii
  misc_feature: SGI cDNA ID NO. 560973
  misc_feature: Encodes the peptide sequence at SEQ ID NO 3905
atggctcctccagaccagttctcggcagccaatgtcgccgctctcaagacccgcttcgagtctgccggccaaggtcacgtcttcaagttctacgactctctgagcgactctgagaaagaaacattcttcaagcagctgcagaagatcgaccttgcccgagtgaacaagctctggcatgacgccaagaatcccccgaaagagcccgaaaacaccgttgtcgagcccctgcccgaatccgccactgccagtatactcgactcaaaacccgaagacctcgagaaatggtacaactccggtctggacttgatagccaagggtgaggttgctgtcattctcctcgctggtggtcagggcaccagactcggcagtgccgccccgaaaggcgctttcaacatccagctcccctccaaaaagtctttgttccagatccaggccgaacgaatcaagaagatacaggacttggctgccgaaagggctaaagacaagaacaaggcccaaattccctggtacgtcatgaccagtggcccaacccgtgggcccacaaccaagttctttaagaaagagaagctggcagagctctcagatgaggacaataagactcgagctgccggccagccatatttcggtctggacgagaagaatgtcatgatatttgagcagggtgtgctcccttgctacgacttcgatggcaagatcatgctcgccaacaaaggtgaggtagctgttgcgccagatggaaacggtggcatctacaaggctctccaggatgagggtgttctggatgacatgcgcaagcgtggtatcaaacatgttcatgcctactgtgtcgataactgccttgccaaagtagccgatcccgtcttcattggattcgctgctgccaaaaatgccaagatcgcaaccaaggttgtgcgcaagcgcaacgctaccgagtcagttggtctgatcatatcgaagaacggacggccagacgtagtggagtactcagaaattgacaaggccacagctgaagctgaggacccggatcaccctggtgtactcaaattccgtgccgcgaacatcgtcaaccactactactccttcgagtacctggacggtatgggcgacaaggtgaacgcactcccgccacatgtagccaagaagaagattccatacttcgatctcgagaagggcgaggccgtgtccaaggtcactactcccaacggcatcaagctcgagcagtttgttttcgacaacttcaagtggctggaactctctgagtttgcttgctttgaggtcaagcgcgaagacgagttctctcctctcaagaacgcggatgcgcctggtgctgaggattgtcccactaccagccggaaacacatcaaagatcagggcaagcgatgggctgaggctgctggtgctacgatcaagaatggtgatgaggaaggtttggagatctctccttctacgagctacagcggtgaaggtctcgatggctggaagggcaaggaaattaccgatgcgacgatctaa

SEQ ID NO: 3905 - protein, 503 aa, Muscodor strobelii
  misc_feature: SGI Peptide ID NO. 560973
  misc_feature (38)..(491): Pfam Id: PF01704 Pfam Desc: UTP--glucose-1-phosphate uridylyltransferase
  misc_feature (108)..(334): Pfam Id: PF01704 Pfam Desc: UTP--glucose-1-phosphate uridylyltransferase
  misc_feature (6)..(499): NCBI GI: 261358702 Blast Desc: UDP-N-acetylglucosamine pyrophosphorylase [Verticillium albo-atrum VaMs.102]
  misc_feature (2)..(499): NCBI GI: 154299847 Blast Desc: BC1G_10814 [Botryotinia fuckeliana B05.10] gi|150857094|gb|EDN32286.1| BC1G_10814 [Botryotinia fuckeliana B05.10]
  misc_feature (3)..(499): NCBI GI: 39951355 Blast Desc: MGG_01320 [Magnaporthe grisea 70-15] gi|145020864|gb|EDK04993.1| MGG_01320 [Magnaporthe grisea 70-15]
  misc_feature (2)..(499): NCBI GI: 156053648 Blast Desc: UDP-N-acetylglucosamine pyrophosphorylase [Sclerotinia sclerotiorum 1980] gi|154703452|gb|EDO03191.1| UDP-N-acetylglucosamine pyrophosphorylase [Sclerotinia 1980]
  misc_feature (11)..(500): NCBI GI: 171694998 Blast Desc: protein product [Podospora anserina] gi|170947741|emb|CAP59904.1| protein product [Podospora anserina]
  misc_feature (2)..(498): NCBI GI: 226292808 Blast Desc: UDP-N-acetylglucosamine pyrophosphorylase [Paracoccidioides brasiliensis Pb18]
  misc_feature (2)..(498): NCBI GI: 225680554 Blast Desc: UDP-N-acetylglucosamine pyrophosphorylase [Paracoccidioides brasiliensis Pb03]
  misc_feature (4)..(499): NCBI GI: 116182180 Blast Desc: CHGG_01718 [Chaetomium globosum CBS 148.51] gi|88186015|gb|EAQ93483.1| CHGG_01718 [Chaetomium globosum CBS 148.51]
  misc_feature (4)..(498): NCBI GI: 242824520 Blast Desc: UDP-N-acetylglucosamine pyrophosphorylase [Talaromyces stipitatus ATCC 10500] gi|218713196|gb|EED12621.1| UDP-N-acetylglucosamine pyrophosphorylase [Talaromyces stipitatus
  misc_feature (2)..(498): NCBI GI: 226280901 Blast Desc: UDP-N-acetylglucosamine pyrophosphorylase [Paracoccidioides brasiliensis Pb01]
  misc_feature (19)..(503): SWISSPROT Homolog: EC 2.7.7.23 UDP-N-acetylglucosamine diphosphorylase
MAPPDQFSAANVAALKTRFESAGQGHVFKFYDSLSDSEKETFFKQLQKIDLARVNKLWHDAKNPPKEPENTVVEPLPESATASILDSKPEDLEKWYNSGLDLIAKGEVAVILLAGGQGTRLGSAAPKGAFNIQLPSKKSLFQIQAERIKKIQDLAAERAKDKNKAQIPWYVMTSGPTRGPTTKFFKKEKLAELSDEDNKTRAAGQPYFGLDEKNVMIFEQGVLPCYDFDGKIMLANKGEVAVAPDGNGGIYKALQDEGVLDDMRKRGIKHVHAYCVDNCLAKVADPVFIGFAAAKNAKIATKVVRKRNATESVGLIISKNGRPDVVEYSEIDKATAEAEDPDHPGVLKFRAANIVNHYYSFEYLDGMGDKVNALPPHVAKKKIPYFDLEKGEAVSKVTTPNGIKLEQFVFDNFKWLELSEFACFEVKREDEFSPLKNADAPGAEDCPTTSRKHIKDQGKRWAEAAGATIKNGDEEGLEISPSTSYSGEGLDGWKGKEITDATI

SEQ ID NO: 3906 - DNA, 2339 bp, Muscodor strobelii
  misc_feature: SGI EST ID NO. CUFF.9806.0
  misc_feature: Variant of the nucleotide sequence at SEQ ID NO 3904
cgataggagggtcgagctacaggacgacagggcgtcgggactaagagatgacctaatggcggggcatcatgcagctgaagaagctgtccacgtctgcacgtcctcccgcacctagaacttccgatgccttcagaacagcttcatcaggcttgcccatcttttccagtcctattttaggctacggacccttctttagttgtctcgtatcatcgttcgaccctcagaaataaatatatcggctgctgcttcctcagctcgcctcaattgattcattctgcctgttctttcttccctctatacccctccatacctgtaccttctctcattgagtacctcaggaacctctcttagtcaaaccttatatagaataagaccaatcaattgcccaaaagagaatccccctctcgtttcctgtcttctacatctatactactataactccagattcccaaagccaacatggctcctccagaccagttctcggcagccaatgtcgccgctctcaagacccgcttcgagtctgccggccaaggtcacgtcttcaagttctacgactctctgagcgactctgagaaagaaacattcttcaagcagctgcagaagatcgaccttgcccgagtgaacaagctctggcatgacgccaagaatcccccgaaagagcccgaaaacaccgttgtcgagcccctgcccgaatccgccactgccagtatactcgactcaaaacccgaagacctcgagaaatggtacaactccggtctggacttgatagccaagggtgaggttgctgtcattctcctcgctggtggtcagggcaccagactcggcagtgccgccccgaaaggcgctttcaacatccagctcccctccaaaaagtctttgttccagatccaggccgaacgaatcaagaagatacaggacttggctgccgaaagggctaaagacaagaacaaggcccaaattccctggtacgtcatgaccagtggcccaacccgtgggcccacaaccaagttctttaagaaagagaagctggcagagctctcagatgaggacaataagactcgagctgccggccagccatatttcggtctggacgagaagaatgtcatgatatttgagcagggtgtgctcccttgctacgacttcgatggcaagatcatgctcgccaacaaaggtgaggtagctgttgcgccagatggaaacggtggcatctacaaggctctccaggatgagggtgttctggatgacatgcgcaagcgtggtatcaaacatgttcatgcctactgtgtcgataactgccttgccaaagtagccgatcccgtcttcattggattcgctgctgccaaaaatgccaagatcgcaaccaaggttgtgcgcaagcgcaacgctaccgagtcagttggtctgatcatatcgaagaacggacggccagacgtagtggagtactcagaaattgacaaggccacagctgaagctgaggacccggatcaccctggtgtactcaaattccgtgccgcgaacatcgtcaaccactactactccttcgagtacctggacggtatgggcgacaaggtgaacgcactcccgccacatgtagccaagaagaagattccatacttcgatctcgagaagggcgaggccgtgtccaaggtcactactcccaacggcatcaagctcgagcagtttgttttcgacaacttcaagtggctggaactctctgagtttgcttgctttgaggtcaagcgcgaagacgagttctctcctctcaagaacgcggatgcgcctggtgctgaggattgtcccactaccagccggaaacacatcaaagatcagggcaagcgatgggctgaggctgctggtgctacgatcaagaatggtgatgaggaaggtttggagatctctccttctacgagctacagcggtgaaggtctcgatggctggaagggcaaggaaattaccgatgcgacgatctaaggcgcaaggcaggaaagagtgtatgcgtatgaattgagcttatatctgcgcgcgatgagtttttcatgttgtctatgactaaaatgggaagggattgggatttcggcctgaaaaggatatgggtgatgaattccgaaaatggcgccccatttgactgcgaagctctctggattctagcttgtaatccgataaatacatagatgtttgtatcaaatgcttcgcaacaaaattgtacagtgtaatggcaatcacaagaactggtgtgtatgcgggtcgtcttgtagtaggattcagtatgtctacgtgaaggagacgatatgacttgtactcttctctggcatcaccacgaaaagggcggaacgacgcgg

SEQ ID NO: 3907 - DNA, 993 bp, Muscodor strobelii
  misc_feature: SGI cDNA ID NO. 560974
  misc_feature: Encodes the peptide sequence at SEQ ID NO 3908
atgagtgacaacgacaaacagacctcattccgtggccgcctgcagctacaagactacatattcaaggcatcaccagcaacaccatcacacgtcgcaatggcttcatcatctgtcaagccgacgactaacaccgcccccgcaccaatcaagacggctggaaggaagcgcaaggcccaagatgaagagcccagtgaagctattgtgaccattgcagactcaccctcccccaagaagcgcgcccgtcagtcatcatcctacgctcccccgtcgacgtacgcacacttgtcccctctcgtagacatcattgaacccaacttgatcatcctcttcattggccttaacccgggggtcagaactgctcaaatgggccacgcctattcacacagatccaaccgcttctggacatttctccatacctccggcctcacgcccgtgcgctgcaaacccgaggaagaccgcactttacccgagcgcttcagtctgggcaacactaatatcgtctctcgaccaagtcgtaatggagcggagctgagcaaggcggagatggacgcaggtgtcgctgtcctggaggagaaatgcagacgctatcgaccggaagccgtttgtatcgtcggcaagagtatctgggagagccttcatcgtgtctggaaaggacgcaatctgaagaaggaagagtttgcgtatggatggcaggaagagaagatcggtgtcgtgccgcctgggcccaattctgcgacaatgaagctcaaagctaggactatcaagcagctgttgcgcgtaggaaccatgtcggatagggataatgatgagacggacgttgacaacacgccgtgggagggatccaagatcttcgtcgctactagcactagtggtcttgccgcatacccgccacttgctgagaaggagatgatatggaaggagttaggcgactggtgtgttcagaggcgtgcagagagagagatgggtgtcgtgaaagtggaggaagaggagtag

SEQ ID NO: 3908 - protein, 330 aa, Muscodor strobelii
  misc_feature: SGI Peptide ID NO. 560974
  misc_feature (99)..(262): Pfam Id: PF03167 Pfam Desc: Uracil DNA glycosylase superfamily
  misc_feature (99)..(210): Pfam Id: PF03167 Pfam Desc: Uracil DNA glycosylase superfamily
  misc_feature (6)..(330): NCBI GI: 261358853 Blast Desc: G/U mismatch-specific uracil DNA glycosylase [Verticillium albo-atrum VaMs.102]
  misc_feature (3)..(319): NCBI GI: 116182178 Blast Desc: CHGG_01717 [Chaetomium globosum CBS 148.51] gi|88186014|gb|EAQ93482.1| CHGG_01717 [Chaetomium globosum CBS 148.51]
  misc_feature (9)..(321): NCBI GI: 46107982 Blast Desc: FG00873.1 [Gibberella zeae PH-1]
  misc_feature (23)..(319): NCBI GI: 169621815 Blast Desc: SNOG_14120 [Phaeosphaeria nodorum SN15] gi|160704628|gb|EAT78357.2| SNOG_14120 [Phaeosphaeria nodorum SN15]
  misc_feature (3)..(319): NCBI GI: 145611060 Blast Desc: MGG_11518 [Magnaporthe grisea 70-15] gi|145018397|gb|EDK02676.1| MGG_11518 [Magnaporthe grisea 70-15]
  misc_feature (9)..(329): NCBI GI: 156053650 Blast Desc: SS1G_05672 [Sclerotinia sclerotiorum 1980] gi|154703453|gb|EDO03192.1| SS1G_05672 [Sclerotinia sclerotiorum 1980]
  misc_feature (8)..(319): NCBI GI: 189197195 Blast Desc: G/U mismatch-specific DNA glycosylase [Pyrenophora tritici-repentis Pt-1C-BFP] gi|187980883|gb|EDU47509.1| G/U mismatch-specific DNA glycosylase [Pyrenophora tritici-repentis
  misc_feature (33)..(329): NCBI GI: 154299845 Blast Desc: BC1G_10813 [Botryotinia fuckeliana B05.10] gi|150857093|gb|EDN32285.1| BC1G_10813 [Botryotinia fuckeliana B05.10]
  misc_feature (74)..(321): NCBI GI: 240111868 Blast Desc: mismatch-specific thymine-DNA glycosylate family protein [Coccidioides posadasii C735 delta SOWgp]
  misc_feature (1)..(238): NCBI GI: 256735431 Blast Desc: NECHADRAFT_75270 [Nectria haematococca mpVI 77-13-4]
MSDNDKQTSFRGRLQLQDYIFKASPATPSHVAMASSSVKPTTNTAPAPIKTAGRKRKAQDEEPSEAIVTIADSPSPKKRARQSSSYAPPSTYAHLSPLVDIIEPNLIILFIGLNPGVRTAQMGHAYSHRSNRFWTFLHTSGLTPVRCKPEEDRTLPERFSLGNTNIVSRPSRNGAELSKAEMDAGVAVLEEKCRRYRPEAVCIVGKSIWESLHRVWKGRNLKKEEFAYGWQEEKIGVVPPGPNSATMKLKARTIKQLLRVGTMSDRDNDETDVDNTPWEGSKIFVATSTSGLAAYPPLAEKEMIWKELGDWCVQRRAEREMGVVKVEEEE

SEQ ID NO: 3909 - DNA, 1517 bp, Muscodor strobelii
  misc_feature: SGI EST ID NO. CUFF.9820.0
  misc_feature: Variant of the nucleotide sequence at SEQ ID NO 3907
ggctgatagtcactgaatatagtgtggtgaatacctccgtgcccaaagctctctaacacggtagacactggcccttcctcctcgagcagtacctaagtgttgaccgacgacgcctgctaactcattctcccaaacctcaacaccaccagctttcatctaaactatgagcccaacattcgtcggatctatcacaccagtcttcgtccattccgcaaactctacctcgtccaatccgcgaaccctgctttgtcaattacgcaaactgtactttgtctaatgcgcaacccctacttcgtccaacacacaaccactacttcgtctaatacaagatacgacgaaaagtgtccatctgatctgtccagcttcacaaatcacgtgtgacattctcatatagatatcgcctccccccaggaatttgctcccataatcttctcttcaccaactatgagtgacaacgacaaacagacctcattccgtggccgcctgcagctacaagactacatattcaaggcatcaccagcaacaccatcacacgtcgcaatggcttcatcatctgtcaagccgacgactaacaccgcccccgcaccaatcaagacggctggaaggaagcgcaaggcccaagatgaagagcccagtgaagctattgtgaccattgcagactcaccctcccccaagaagcgcgcccgtcagtcatcatcctacgctcccccgtcgacgtacgcacacttgtcccctctcgtagacatcattgaacccaacttgatcatcctcttcattggccttaacccgggggtcagaactgctcaaatgggccacgcctattcacacagatccaaccgcttctggacatttctccatacctccggcctcacgcccgtgcgctgcaaacccgaggaagaccgcactttacccgagcgcttcagtctgggcaacactaatatcgtctctcgaccaagtcgtaatggagcggagctgagcaaggcggagatggacgcaggtgtcgctgtcctggaggagaaatgcagacgctatcgaccggaagccgtttgtatcgtcggcaagagtatctgggagagccttcatcgtgtctggaaaggacgcaatctgaagaaggaagagtttgcgtatggatggcaggaagagaagatcggtgtcgtgccgcctgggcccaattctgcgacaatgaagctcaaagctaggactatcaagcagctgttgcgcgtaggaaccatgtcggatagggataatgatgagacggacgttgacaacacgccgtgggagggatccaagatcttcgtcgctactagcactagtggtcttgccgcatacccgccacttgctgagaaggagatgatatggaaggagttaggcgactggtgtgttcagaggcgtgcagagagagagatgggtgtcgtgaaagtggaggaagaggagtagatcacgtctccttgatagacaatgaacatcgtgatttactcctgcgattgtaatagacttttgactaagtttccgaatcg

SEQ ID NO: 3910 - DNA, 825 bp, Muscodor strobelii
  misc_feature: SGI cDNA ID NO. 560975
  misc_feature: Encodes the peptide sequence at SEQ ID NO 3911
atgaagctcagcagcgccatcatcggcctcgctgccttggcgcagggcattaacgccgttgctgtccctgaaacacatgtcgcgctagatgcccgtgagccgcaaccgaagtacgacccgacgatcgaggagctatggaagcgtaaaggcggcggcggcggtggaggtcgcggaggaggtagttcttccggtggtggaggcaaaggaggttccagcagcagcggcggcaaaggaggtggccttggatcatcctctagtaacgccggcggccgaacgacaacaggcagtggccccaaacctaactacggcggagggtcatactatgggggtggaggcactcaaccttataaatccggctcaaggagcattggaggaatcctcccgtttgtcctagtaggaaccgcgcttaccgcgattacctttggtggtcttgcccttgccgctggcgcattcgcatacccatatcacaacccttacacattccacaacgccactacggacaagaacgagaccaagcccgtggtttgcgtctgcgagccgtaccaagaatgcggctgcgacgagccttcaaactcgacggcgttttacaacgatgtcatcggggacggcagctaccagaatctcaaccactcgctcgtcaccgtcgcgaagaacgacaccactggtaacgacacgatctacatcaacggtggcctacccaacggcacgaccgctgctggcggcaccgaagatccgaatgtggccggaagcatcaacgctctcgctcaagcgctgggctggtggcctcttgccactacggcgctcgcgtttgcatatctgatgtaa

SEQ ID NO: 3911 - protein, 274 aa, Muscodor strobelii
  misc_feature: SGI Peptide ID NO. 560975
  misc_feature (77)..(274): NCBI GI: 256734867 Blast Desc: NECHADRAFT_75571 [Nectria haematococca mpVI 77-13-4]
  misc_feature (83)..(272): NCBI GI: 85111552 Blast Desc: NCU02099 [Neurospora crassa OR74A] gi|28925747|gb|EAA34755.1| [Neurospora crassa OR74A]
  misc_feature (98)..(271): NCBI GI: 145610987 Blast Desc: MGG_00742 [Magnaporthe grisea 70-15] gi|145018325|gb|EDK02604.1| MGG_00742 [Magnaporthe grisea 70-15]
  misc_feature (44)..(262): NCBI GI: 171695060 Blast Desc: protein product [Podospora anserina] gi|170947772|emb|CAP59935.1| protein product [Podospora anserina]
  misc_feature (98)..(264): NCBI GI: 238498964 Blast Desc: conserved glycine-rich protein [Aspergillus flavus NRRL3357] gi|220693991|gb|EED50336.1| conserved glycine-rich protein [Aspergillus flavus NRRL3357]
  misc_feature (88)..(268): NCBI GI: 169616684 Blast Desc: SNOG_11517 [Phaeosphaeria nodorum SN15] gi|111060105|gb|EAT81225.1| SNOG_11517 [Phaeosphaeria nodorum SN15]
  misc_feature (92)..(274): NCBI GI: 154299851 Blast Desc: BC1G_10816 [Botryotinia fuckeliana B05.10] gi|150857096|gb|EDN32288.1| BC1G_10816 [Botryotinia fuckeliana B05.10]
  misc_feature (101)..(234): NCBI GI: 146324614 Blast Desc: conserved glycine-rich protein [Aspergillus fumigatus Af293] gi|129555384|gb|EAL84649.2| conserved glycine-rich protein [Aspergillus fumigatus Af293] gi|159123067|gb|EDP48187.1| protein
  misc_feature (95)..(272): NCBI GI: 156053642 Blast Desc: SS1G_05668 [Sclerotinia sclerotiorum 1980] gi|154703449|gb|EDO03188.1| SS1G_05668 [Sclerotinia sclerotiorum 1980]
  misc_feature (104)..(234): NCBI GI: 119489335 Blast Desc: conserved glycine-rich protein [Neosartorya fischeri NRRL 181] gi|119411036|gb|EAW20981.1| conserved glycine-rich protein [Neosartorya fischeri NRRL 181]
MKLSSAIIGLAALAQGINAVAVPETHVALDAREPQPKYDPTIEELWKRKGGGGGGGRGGGSSSGGGGKGGSSSSGGKGGGLGSSSSNAGGRTTTGSGPKPNYGGGSYYGGGGTQPYKSGSRSIGGILPFVLVGTALTAITFGGLALAAGAFAYPYHNPYTFHNATTDKNETKPVVCVCEPYQECGCDEPSNSTAFYNDVIGDGSYQNLNHSLVTVAKNDTTGNDTIYINGGLPNGTTAAGGTEDPNVAGSINALAQALGWWPLATTALAFAYLM

SEQ ID NO: 3912 - DNA, 1910 bp, Muscodor strobelii
  misc_feature: SGI EST ID NO. CUFF.10790.0
  misc_feature: Variant of the nucleotide sequence at SEQ ID NO 3910
cggttatgataccggtaccagcgaggcgagagatagtctctagtaatcgccttccagttcgcacttgggcccgacctggcatggctctgctcttggctttcatcagtcggtgcctccccgtccgatccccatcccactgccttactgtattgccatcgatgtacaagtaatcatcagctagcaaatcacgttctgccattcaattaatattcaccctcgtactaaatgagctatcaaggctactggtgatttaagagtggcacagtcaaatgccatcgctgatcaggtgcggttgcaccaattcccaagcacagcagtactttgccgcaagcgtcatagggcggacagcgtgacgggttaatcaaccgacgaaatcttaaatcattcctccattcagcccgccgttttctagaagccccctggtctcgtatatatctgcgactgacctttcccaaatccctacaccgtgccattccctacatgttttccttcaacctcatcatacactctctgcacatttgaatattgtctcacatttgccaagacaaacttcattctttacctgtgatcttcttcaaccacaagctatgaagctcagcagcgccatcatcggcctcgctgccttggcgcagggcattaacgccgttgctgtccctgaaacacatgtcgcgctagatgcccgtgagccgcaaccgaagtacgacccgacgatcgaggagctatggaagcgtaaaggcggcggcggcggtggaggtcgcggaggaggtagttcttccggtggtggaggcaaaggaggttccagcagcagcggcggcaaaggaggtggccttggatcatcctctagtaacgccggcggccgaacgacaacaggcagtggccccaaacctaactacggcggagggtcatactatgggggtggaggcactcaaccttataaatccggctcaaggagcattggaggaatcctcccgtttgtcctagtaggaaccgcgcttaccgcgattacctttggtggtcttgcccttgccgctggcgcattcgcatacccatatcacaacccttacacattccacaacgccactacggacaagaacgagaccaagcccgtggtttgcgtctgcgagccgtaccaagaatgcggctgcgacgagccttcaaactcgacggcgttttacaacgatgtcatcggggacggcagctaccagaatctcaaccactcgctcgtcaccgtcgcgaagaacgacaccactggtaacgacacgatctacatcaacggtggcctacccaacggcacgaccgctgctggcggcaccgaagatccgaatgtggccggaagcatcaacgctctcgctcaagcgctgggctggtggcctcttgccactacggcgctcgcgtttgcatatctgatgtaaattgtgcttggggataatcggtttttcgtttttggtgctttgcgggtttcacgatttcttacgaccattcgatctctcgagaaacaaaatttgagacgataatacgatattgcttgtcgagatggatgacactcgctcacggcgttcaggggaatggacgggttgaacaaaatctgcttttaacaattgattcccctattgccgttttggagttgagaagagaagaaaggaatggtggtgggtttttgacgtcgattacatataatgtgtacgagactgttacgattagtagctagaagtgagaggactctggtcttcggggcttctctcttgataaatacgtttaagaaatagtctattgcctccaagtcgatatactgcttttttagcaagaagtaacatttgtgacttgcatgttttgcttgaacttgtgataggtgacaacgggcggtcaacatactgcaggaatcgaagctacggaatagcatgagtttcgag

SEQ ID NO: 3913 - DNA, 1101 bp, Muscodor strobelii
  misc_feature: SGI cDNA ID NO. 560976
  misc_feature: Encodes the peptide sequence at SEQ ID NO 3914
atggcggaccaagaccctggcgagcctggatccgataagtccttgttagagcggctgaacgcgctcaaaccgagctctatcaatttggcaagcgaccaagctttagaatatagccctgcatctacaattgagcgtgcaaaaccaccttcaagagaagatgccttgaaggatcgactgaaaagccttcgaagtcaagagtcccgctctacaaaccagaccgcctcaaggtccaacgcatcggggactgaccctggaaagtccaatcagcctcgcgcggccgaaggatcgcgattttcaacggaaagcgaacagccaagatccatgacctctcggccagctcagcctcctgatgattctgacttgcttctcgagactgatgaccagactcttgaggaactattagctgacctcagatcagatgaaagttggttggatgaagtagcagctgaagaaacagagcatcagagagtaacagcgcttctcaacgaacttggtaaatcttcaagttcgaaagtcgacgaagaggggcaagaaaaagaagatgaagagaacagcagcgatgacgattctgacggcgaggtcatgactcgggagacaaatgatgtactcgcaaaagtcatggatgaagcagagtgggagaatgccaatcaggcttcctctccatcaccacaacaaccgaaaccctctgcgatagtcacgtctgatgagacaaagtcacgggctttgagcgacagtcctcttagatcccaaaagaagcagacaacatcgagtagcgaccctttcaatcttcccacagtaccgactgagcttcaagagcagccagatctacccgctcagtcacagtcggacacagactttgcagcttccattgcatcccgcatggccgccttgaagctttcaggtccacgcgcactaccatctgctccaacggcggacgttgactccctaggtcttcccatcgcccccaccttcgctcccgttgatcgtccggttcctggtatcgccaagcgaacgggcctcacagacgatgatgagaagacgtggtgcgttgtttgtctcgccgacggtgccgccgcgatgaagcgtcagctgggcttctaa

SEQ ID NO: 3914 - protein, 366 aa, Muscodor strobelii
  misc_feature: SGI Peptide ID NO. 560976
  misc_feature (12)..(356): NCBI GI: 46120516 Blast Desc: FG04905.1 [Gibberella zeae PH-1]
  misc_feature (12)..(356): NCBI GI: 256734894 Blast Desc: NECHADRAFT_99023 [Nectria haematococca mpVI 77-13-4]
  misc_feature (11)..(356): NCBI GI: 171695062 Blast Desc: protein product [Podospora anserina] gi|170947773|emb|CAP59936.1| protein product [Podospora anserina]
  misc_feature (12)..(366): NCBI GI: 261361313 Blast Desc: [Verticillium albo-atrum VaMs.102]
  misc_feature (11)..(348): NCBI GI: 116182174 Blast Desc: [Chaetomium globosum CBS 148.51] gi|88186012|gb|EAQ93480.1| [Chaetomium globosum CBS 148.51]
  misc_feature (9)..(352): NCBI GI: 154320784 Blast Desc: BC1G_01864 [Botryotinia fuckeliana B05.10] gi|150853553|gb|EDN28745.1| BC1G_01864 [Botryotinia fuckeliana B05.10]
  misc_feature (9)..(352): NCBI GI: 156040483 Blast Desc: SS1G_12258 [Sclerotinia sclerotiorum 1980] gi|154696314|gb|EDN96052.1| SS1G_12258 [Sclerotinia sclerotiorum 1980]
  misc_feature (9)..(352): NCBI GI: 189203273 Blast Desc: [Pyrenophora tritici-repentis Pt-1C-BFP] gi|187985071|gb|EDU50559.1| [Pyrenophora tritici-repentis Pt-1C-BFP]
  misc_feature (198)..(352): NCBI GI: 169603161 Blast Desc: SNOG_04589 [Phaeosphaeria nodorum SN15] gi|160706337|gb|EAT88349.2| SNOG_04589 [Phaeosphaeria nodorum SN15]
MADQDPGEPGSDKSLLERLNALKPSSINLASDQALEYSPASTIERAKPPSREDALKDRLKSLRSQESRSTNQTASRSNASGTDPGKSNQPRAAEGSRFSTESEQPRSMTSRPAQPPDDSDLLLETDDQTLEELLADLRSDESWLDEVAAEETEHQRVTALLNELGKSSSSKVDEEGQEKEDEENSSDDDSDGEVMTRETNDVLAKVMDEAEWENANQASSPSPQQPKPSAIVTSDETKSRALSDSPLRSQKKQTTSSSDPFNLPTVPTELQEQPDLPAQSQSDTDFAASIASRMAALKLSGPRALPSAPTADVDSLGLPIAPTFAPVDRPVPGIAKRTGLTDDDEKTWCVVCLADGAAAMKRQLGF

SEQ ID NO: 3915 - DNA, 402 bp, Muscodor strobelii
  misc_feature: SGI cDNA ID NO. 560977
  misc_feature: Encodes the peptide sequence at SEQ ID NO 3916
atgaagtctttccagaccctttttatcaccgctgcttcgctgacgcccttcatcgggtcagccgacgcttggcttgttcaattctgggacactcagggcacctgcgccttggatggcgccgataccgagcgtggaggtgtagctttacaagaaaattgcagtctcttgggacttgacgatattcgagctattagaatctcagactgggacgacggttgtacagtaggcctatggccagttgagagttacggctgtagtcagggcgacccaacgtgggagctgtctaaggaggacgcagacgcaaatggcgagcttgttgatggaaactggagctgtcaacagaatctagagggcatgggcgcgatctatgtgtcatactattgccagcatgaagacgagtag

SEQ ID NO: 3916 - protein, 133 aa, Muscodor strobelii
  misc_feature: SGI Peptide ID NO. 560977
  misc_feature (1)..(129): NCBI GI: 46113011 Blast Desc: FG02915.1 [Gibberella zeae PH-1]
MKSFQTLFITAASLTPFIGSADAWLVQFWDTQGTCALDGADTERGGVALQENCSLLGLDDIRAIRISDWDDGCTVGLWPVESYGCSQGDPTWELSKEDADANGELVDGNWSCQQNLEGMGAIYVSYYCQHEDE

SEQ ID NO: 3917 - DNA, 184 bp, Muscodor strobelii
  misc_feature: SGI EST ID NO. CUFF.9836.0
  misc_feature: Variant of the nucleotide sequence at SEQ ID NO 3915
aggaggacgcagacgcaaatggcgagcttgttgatggaaactggagctgtcaacagaatctagagggcatgggcgcgatctatgtgtcatactattgccagcatgaagacgagtagccgatgttgactgtcacgtcagggaagattgttgtgaagccagagacctggtaggaagtggatacaga

SEQ ID NO: 3918 - DNA, 1074 bp, Muscodor strobelii
  misc_feature: SGI cDNA ID NO. 560978
  misc_feature: Encodes the peptide sequence at SEQ ID NO 3919
atggtatcatccagtttacctcgcctggcggcagcggcagtgttttccactggtatcgtctccgcgcaagatgccattgcgagtgttgatctctggagcagcaatacttgtggcggtgaccccaatgatttatcacttctttctttcacgcttgaggctttccacagagatggagatgtgaataatccatcatctggctgcgctgacaccaggcttaccttggatggatggccaacccttgataacggcagatatactacctgggttgatacgtcggacattgaagagggttgtgtactctggttctatgatctctacggctccgacgagcaagtcaatggcgacaaagcttgtctctatccgcacacaaaggtggacccgaaggctggatcttgcgcctatgtagacttaacgcaacatttcgggtttggttattgctgtggcggcgcctgtggtcaagatattaaaagttggaaacgggatgaagcgcccgtcaactcgctatcggctaaaagtctgggagtcgaacccgatgaacattacagtcagggacattcaggccctagcgatgtagcggcagtcaagcgagcgcccctccttgaacgtgtgtataagcgggacggtacttgcaacttcgtgcttgatgaaccggcatacactacatatggtgagccgcaacaaaggagtccagtgcttgattgtgctgtcgatcagaccacttgcgggaaagacattggttatgacaaaggcacagaaataacggacggctggaatgtcgaagcgagtgttggtgtggagttcttcgaagttgtgtccacttctgtttcgtctggctacgaccatagcgtgacaaatagtgagcatttttcgagcacaacgcatattgctccccaaaacggtcacaagggctacgttatctttattccactttatgcatgcggaaagggccatgttgagggggattgcaacgccacggagacggcaaccattggcgacgatggaactgcttgcgtgttcaagatgcttccagaaaacgaaatagatggcatttgggacatcgttactgttagttaa

SEQ ID NO: 3919 - protein, 357 aa, Muscodor strobelii
  misc_feature: SGI Peptide ID NO. 560978
  misc_feature (20)..(356): NCBI GI: 46112995 Blast Desc: FG02914.1 [Gibberella zeae PH-1]
MVSSSLPRLAAAAVFSTGIVSAQDAIASVDLWSSNTCGGDPNDLSLLSFTLEAFHRDGDVNNPSSGCADTRLTLDGWPTLDNGRYTTWVDTSDIEEGCVLWFYDLYGSDEQVNGDKACLYPHTKVDPKAGSCAYVDLTQHFGFGYCCGGACGQDIKSWKRDEAPVNSLSAKSLGVEPDEHYSQGHSGPSDVAAVKRAPLLERVYKRDGTCNFVLDEPAYTTYGEPQQRSPVLDCAVDQTTCGKDIGYDKGTEITDGWNVEASVGVEFFEVVSTSVSSGYDHSVTNSEHFSSTTHIAPQNGHKGYVIFIPLYACGKGHVEGDCNATETATIGDDGTACVFKMLPENEIDGIWDIVTVS

SEQ ID NO: 3920 - DNA, 247 bp, Muscodor strobelii
  misc_feature: SGI EST ID NO. CUFF.9845.0
  misc_feature: Variant of the nucleotide sequence at SEQ ID NO 3918
aagacattggttatgacaaaggcacagaaataacggacggctggaatgtcgaagcgagtgttggtgtggagttcttcgaagttgtgtccacttctgtttcgtctggctacgaccatagcgtgacaaatagtgagcatttttcgagcacaacgcatattgctccccaaaacggtcacaagggctacgttatctttattccactttatgcatgcggaaagggccatgttgagggggattgcaacgccac

SEQ ID NO: 3921 - DNA, 1032 bp, Muscodor strobelii
  misc_feature: SGI cDNA ID NO. 560979
  misc_feature: Encodes the peptide sequence at SEQ ID NO 3922
atgactaaaattacaatacttggggctggtgttactggcatgacaattgccagccagctccccagagactacgaaatcacgattgtagctcgggaccttccaggtgatgatttctcacaagattgggcaagtcaatgggcttgcgccggctgggtggctcttggtggttcgcctctcgaagagcagatgcaactggatgccctcaccttctgccgtagactcgcaacgtctcacccagagtcaagcgtaagactcaacaaactcaccgatgtatatgatgttggggcatctgcggtctcagatctatggtatcgtgagcgagtacccgagtttgaatctcttgacgcgagtcggtttgcattgaaaggagaggagacgcagccagcagtcgctgttaaatatttgagttttacgctcacgccgacaacatttctgccctggctacggaagcgacttgaagactctggtgtcaagtttcagagaatagacactgtcaagtcaattgccgaattagaacactttggccacgatgtcttgattaacgcgtctggcgtcgcttcttcgacacttgaggatatcaaagatgagcaaatcatcagtgaccgaacttatgtcacggtagtcaagtccaagtaccaggaggcgttcgtgcgccgctgcgcaactgagtacacgtacattttcggccgtcatgatggtactactgtccttggcggcatatctgagcctgttcagaatgaggtccagtcatctgcagccattagagaagatcttgtccgtcgcgctaatgctaacttgcccgaatatttcccatcggctaatgtggaagattatgaattcgtgcaagacctagtcggcattcggccacttcgccttcctaatgtgagagttgagaaggacgtaattggaaaccagaaggttgttcacgcgtatggcacgacaattggggcttacatgtatgccttcggccttgcacgggaagcagttcgtttagtcgaccaatttgtatttgagcaattgacattaagctag

SEQ ID NO: 3922 - protein, 343 aa, Muscodor strobelii
  misc_feature: SGI Peptide ID NO. 560979
  misc_feature (3)..(331): Pfam Id: PF01266 Pfam Desc: FAD dependent oxidoreductase
  misc_feature (1)..(337): NCBI GI: 256724485 Blast Desc: NECHADRAFT_88109 [Nectria haematococca mpVI 77-13-4]
  misc_feature (1)..(342): NCBI GI: 256721720 Blast Desc: NECHADRAFT_88675 [Nectria haematococca mpVI 77-13-4]
  misc_feature (3)..(338): NCBI GI: 256725508 Blast Desc: NECHADRAFT_83204 [Nectria haematococca mpVI 77-13-4]
  misc_feature (1)..(338): NCBI GI: 255938642 Blast Desc: Pc14g00970 [Penicillium chrysogenum Wisconsin 54-1255] gi|211584712|emb|CAP74238.1| Pc14g00970 [Penicillium chrysogenum Wisconsin 54-1255]
  misc_feature (1)..(338): NCBI GI: 256725381 Blast Desc: NECHADRAFT_83205 [Nectria haematococca mpVI 77-13-4]
  misc_feature (3)..(335): NCBI GI: 159130204 Blast Desc: D-amino acid oxidase, [Aspergillus fumigatus A1163]
  misc_feature (3)..(342): NCBI GI: 119474259 Blast Desc: FAD dependent oxidoreductase, [Neosartorya fischeri NRRL 181] gi|119407158|gb|EAW17108.1| FAD dependent oxidoreductase, [Neosartorya fischeri NRRL 181]
  misc_feature (3)..(339): NCBI GI: 145236817 Blast Desc: An06g02340 [Aspergillus niger] gi|134075517|emb|CAK48078.1| protein product [Aspergillus niger]
  misc_feature (4)..(342): NCBI GI: 71023241 Blast Desc: UM05703.1 [Ustilago maydis 521] gi|46100709|gb|EAK85942.1| UM05703.1 [Ustilago maydis 521]
  misc_feature (3)..(334): NCBI GI: 190344274 Blast Desc: PGUG_00018 [Pichia guilliermondii ATCC 6260]
  misc_feature (1)..(334): SWISSPROT Homolog: EC 1.4.3.3 D-amino-acid oxidase
MTKITILGAGVTGMTIASQLPRDYEITIVARDLPGDDFSQDWASQWACAGWVALGGSPLEEQMQLDALTFCRRLATSHPESSVRLNKLTDVYDVGASAVSDLWYRERVPEFESLDASRFALKGEETQPAVAVKYLSFTLTPTTFLPWLRKRLEDSGVKFQRIDTVKSIAELEHFGHDVLINASGVASSTLEDIKDEQIISDRTYVTVVKSKYQEAFVRRCATEYTYIFGRHDGTTVLGGISEPVQNEVQSSAAIREDLVRRANANLPEYFPSANVEDYEFVQDLVGIRPLRLPNVRVEKDVIGNQKVVHAYGTTIGAYMYAFGLAREAVRLVDQFVFEQLTLS

SEQ ID NO: 3923 - DNA, 1456 bp, Muscodor strobelii
  misc_feature: SGI EST ID NO. CUFF.9852.0
  misc_feature: Variant of the nucleotide sequence at SEQ ID NO 3921
cacagcttggttggtgctcaagactatttctgagccaccatgccatagtcttgtaagcgccgagcatacatacctgcagtagcttgcattgagattatggagctcagtcagcttcaactctcacgtcaccataaggatctcaaagtatcgggtaaagggagcatttggcctgtagcctcatacgtgcagtttctagatattgaatatgcaaggctttgtttacatgatatactggcttacaaaggtagtagtcccgttcgtaggaagaactgaataaccttgaagagccctatattcgattggcacattgtcttgacgttttatcatgactaaaattacaatacttggggctggtgttactggcatgacaattgccagccagctccccagagactacgaaatcacgattgtagctcgggaccttccaggtgatgatttctcacaagattgggcaagtcaatgggcttgcgccggctgggtggctcttggtggttcgcctctcgaagagcagatgcaactggatgccctcaccttctgccgtagactcgcaacgtctcacccagagtcaagcgtaagactcaacaaactcaccgatgtatatgatgttggggcatctgcggtctcagatctatggtatcgtgagcgagtacccgagtttgaatctcttgacgcgagtcggtttgcattgaaaggagaggagacgcagccagcagtcgctgttaaatatttgagttttacgctcacgccgacaacatttctgccctggctacggaagcgacttgaagactctggtgtcaagtttcagagaatagacactgtcaagtcaattgccgaattagaacactttggccacgatgtcttgattaacgcgtctggcgtcgcttcttcgacacttgaggatatcaaagatgagcaaatcatcagtgaccgaacttatgtcacggtagtcaagtccaagtaccaggaggcgttcgtgcgccgctgcgcaactgagtacacgtacattttcggccgtcatgatggtactactgtccttggcggcatatctgagcctgttcagaatgaggtccagtcatctgcagccattagagaagatcttgtccgtcgcgctaatgctaacttgcccgaatatttcccatcggctaatgtggaagattatgaattcgtgcaagacctagtcggcattcggccacttcgccttcctaatgtgagagttgagaaggacgtaattggaaaccagaaggttgttcacgcgtatggcacgacaattggggcttacatgtatgccttcggccttgcacgggaagcagttcgtttagtcgaccaatttgtatttgagcaattgacattaagctagtgtcacattgcatatttcgctaagatagccaagctcgtgtcggtatgtctaggcctatccacgccctgttcgtgagatgttggtatccttgttgcaatc

SEQ ID NO: 3924 - DNA, 1332 bp, Muscodor strobelii
  misc_feature: SGI cDNA ID NO. 560980
  misc_feature: Encodes the peptide sequence at SEQ ID NO 3925
atggcttcatcacagacagtctactcaaatggcatcttctacgggttgccgacatacccgaatagtccccagtatcaggatcttacagcaattgtcaccggggctactggggtttctggatattccatggtccaggtacttgcggcatcgccacgatggagcaagatctactgcctcagctctcggccaccccccgataacttctttgccgacctaggagagaacgcacaacgagtcgagcatcttgcaatagactttcagcttgacgcggctgatattgccgcccagctgaaaaagaaaatcgatcgtgtgtgcgcgtacagtgactccgttttctatcattcatacatgcatccactacctaaaggagatgttaaagatttctgggccaacgcggatgaggtctccgaaataaatgtatccttatttcagaatttcattggtggactacaacagtctcacttgaatcctcgccgattcatgctgcaaaccggaaccaaacagtacggattctatttaggtccggtaacaatcccaagctttgaatcagacccacgtgtcaccctcgacaacaacttctactatgcccaagaagacatcttatctgattattgtcgagccgtgggtgccaagtggagcgtgtctcgaccgtcttatatcgttggagccgttcgagatgggctactcaaccatctccttggtgtcgctatctatgccacagtgcaggcccatttgaaacagccgatcgtttatcccggagactaccgagcttgggcccgtgaactagtacagtctaccgggttactcaatgcgtattttggcgaatggctcgttcttagcgaaaaggcggagaatgaggctttcaatatccatgacggcttacatttcacttgggagcgcctgtgggcttacctagggctgtggtaccaggtcgaatcgagtccacccgaagttgatgaaaccaagtatcgcctcatgcagatgccaggttcgcagacaccaagaggtcacggcccgcaggcaacactcaactcgactttcagtcttcttgagtggtcacaccagcccgaggtggagcgcgcttgggcacagttgaagcagaagcacgatctagtgcttgatcctttcgatgatcgataccgctcgcgcattttctcgttcgccgactcggcattgattggtgatatcccgatggtaacaagcatacgtaaagcacgaaagtgtggtttcttcggaactgttgattcctataacgctatttttaacacgatgcaccacctggctcaattgaagctagtacctgcaccagctgctagcgcgtttatcgagtag

SEQ ID NO: 3925 - protein, 443 aa, Muscodor strobelii
  misc_feature: SGI Peptide ID NO. 560980
  misc_feature (2)..(442): NCBI GI: 116203113 Blast Desc: CHGG_09441 [Chaetomium globosum CBS 148.51] gi|88177959|gb|EAQ85427.1| CHGG_09441 [Chaetomium globosum CBS 148.51]
  misc_feature (1)..(434): NCBI GI: 67524927 Blast Desc: AN2921.2 [Aspergillus nidulans FGSC A4] gi|40744316|gb|EAA63492.1| AN2921.2 [Aspergillus nidulans FGSC A4] gi|259486141|tpe|CBF83745.1| TPA: conserved [Aspergillus FGSC
  misc_feature (6)..(434): NCBI GI: 240111468 Blast Desc: NAD dependent epimerase/dehydratase family protein [Coccidioides posadasii C735 delta SOWgp]
  misc_feature (6)..(434): NCBI GI: 119188821 Blast Desc: CIMG_04458 [Coccidioides immitis RS]
  misc_feature (2)..(434): NCBI GI: 258575967 Blast Desc: [Uncinocarpus reesii 1704] gi|237902431|gb|EEP76832.1| [Uncinocarpus reesii 1704]
  misc_feature (7)..(434): NCBI GI: 261196896 Blast Desc: NAD dependent epimerase/dehydratase [Ajellomyces dermatitidis SLH14081] gi|239596096|gb|EEQ78677.1| NAD dependent epimerase/dehydratase [Ajellomyces dermatitidis SLH14081]
  misc_feature (6)..(442): NCBI GI: 226280844 Blast Desc: conserved [Paracoccidioides brasiliensis Pb01]
  misc_feature (6)..(434): NCBI GI: 225680504 Blast Desc: aldo-keto reductase family protein [Paracoccidioides brasiliensis Pb03]
  misc_feature (6)..(434): NCBI GI: 226292860 Blast Desc: conserved [Paracoccidioides brasiliensis Pb18]
  misc_feature (7)..(434): NCBI GI: 238843216 Blast Desc: aldo-keto reductase family protein [Microsporum canis CBS 113480]
MASSQTVYSNGIFYGLPTYPNSPQYQDLTAIVTGATGVSGYSMVQVLAASPRWSKIYCLSSRPPPDNFFADLGENAQRVEHLAIDFQLDAADIAAQLKKKIDRVCAYSDSVFYHSYMHPLPKGDVKDFWANADEVSEINVSLFQNFIGGLQQSHLNPRRFMLQTGTKQYGFYLGPVTIPSFESDPRVTLDNNFYYAQEDILSDYCRAVGAKWSVSRPSYIVGAVRDGLLNHLLGVAIYATVQAHLKQPIVYPGDYRAWARELVQSTGLLNAYFGEWLVLSEKAENEAFNIHDGLHFTWERLWAYLGLWYQVESSPPEVDETKYRLMQMPGSQTPRGHGPQATLNSTFSLLEWSHQPEVERAWAQLKQKHDLVLDPFDDRYRSRIFSFADSALIGDIPMVTSIRKARKCGFFGTVDSYNAIFNTMHHLAQLKLVPAPAASAFIE

SEQ ID NO: 3926 - DNA, 539 bp, Muscodor strobelii
  misc_feature: SGI EST ID NO. CUFF.9855.0
  misc_feature: Variant of the nucleotide sequence at SEQ ID NO 3924
gcgtgtgtcccaggcatagtactgagatgatccaagttaacctcgtcaggcgtacagtgactccgttttctatcattcatacatgcatccactacctaaaggagatgttaaagatttctgggccaacgcggatgaggtctccgaaataaatgcgcgcttgggcacagttgaagcagaagcacgatctagtgcttgatcctttcgatgatcgataccgctcgcgcattttctcgttcgccgactcggcattgattggtgatatcccgatggtaacaagcatacgtaaagcacgaaagtgtggtttcttcggaactgttgattcctataacgctatttttaacacgatgcaccacctggctcaattgaagctagtacctgcaccagctgctagcgcgtttatcgagtaggcagttgggtgattagtggagttggagaagtagtgttatggagcctagctttgacgactgggcggaaacttctattatgaattatcaccactcgagaaatcgttgccgtataagacatttattcagaataga

SEQ ID NO: 3927 - DNA, 1290 bp, Muscodor strobelii
  misc_feature: SGI cDNA ID NO. 560981
  misc_feature: Encodes the peptide sequence at SEQ ID NO 3928
atgaagaagttgcatcttttcgaagaagttcaatccttacacaatgaatacggcgattatgtgcggctcggtccatcggagctgtcgattgcagaccccagggcagtcacagctatctacggaggcccgtcgccagtgaccaaaggtccttggtacacgctgctcgagcctcggacgccgctctttatggcccgcgacaaacaagagcatgcgcgccgccgaaagatatgggattatggattttcaacacaagcgcttcttggctatgatcctcgtataaccaaatctatcagtctattgctccaggcaatcgataaacaagttggtcagccaatggacatgtcggaatggtttgcgtttttcgtatttgatgtcatggaagatcttgcattcaacaagacatcaaacatgttggtcgacgggaaacaagcgtatgttctcgaaacaattcgtgaggacatgtggaatattgcattctttgcgcatctcccttggctgttgccttttctgaaaaggacgccattactgaaccacaactacctaaaattctggaaatggattcaagaccatatcgatgagagaattaagaacgagcctgaccagcctgatattttctcatggctcctggccgcgtacaacaaaagcgcaaagactcagagagacaactatgatctccatggagatacccaattgatcgtcattgctggaagcgacagcgtagcagcgacactcacgcatctgttcctcgagctagcacatcacccagagatcaagcaagcgcttcagaaggagcttgatgcactctctagcctggcgcacgagaatttgatgagcgttgagtttctagacgccgttattaatgaaactatgcgtcttcatccaccagtcatctccggtacacagcgagtcacgccacctgaagggttactaattggcgacaagcatattcctggcgataccattgttcaggtccctagctatactgtctttagagattcacgttcttttgaacgtccattagatttcatcccagagcggtggacaacacgacctgagctagtgaaagatagatcagttttcatacccttcaactcaggcccgtatgcatgcgttggaaaacgtctggcgatgatggagctacgacgttgtgtgtccgaaattctatggcgttatgattactcggtggcgcccgggcatgaaagagcagcttggctggacgggaagcaagacacgtttactgttgtctctgcaccgttgcctttaatttttgaagaacgcgttaggaactaa

SEQ ID NO: 3928 - protein, 429 aa, Muscodor strobelii
  misc_feature: SGI Peptide ID NO. 560981
  misc_feature (1)..(423): Pfam Id: PF00067 Pfam Desc: Cytochrome P450
  misc_feature (234)..(398): Pfam Id: PF00067 Pfam Desc: Cytochrome P450
  misc_feature (91)..(197): Pfam Id: PF00067 Pfam Desc: Cytochrome P450
  misc_feature (1)..(423): NCBI GI: 116203111 Blast Desc: CHGG_09440 [Chaetomium globosum CBS 148.51] gi|88177958|gb|EAQ85426.1| CHGG_09440 [Chaetomium globosum CBS 148.51]
  misc_feature (2)..(426): NCBI GI: 238502809 Blast Desc: cytochrome P450 oxidoreductase, [Aspergillus flavus NRRL3357] gi|220691448|gb|EED47796.1| cytochrome P450 oxidoreductase, [Aspergillus flavus NRRL3357]
  misc_feature (2)..(426): NCBI GI: 169776117 Blast Desc: [Aspergillus oryzae RIB40] gi|83771260|dbj|BAE61392.1| protein product [Aspergillus oryzae]
  misc_feature (2)..(426): NCBI GI: 242810525 Blast Desc: cytochrome P450, [Talaromyces stipitatus ATCC 10500] gi|218716223|gb|EED15645.1| cytochrome P450, [Talaromyces stipitatus ATCC 10500]
  misc_feature (2)..(426): NCBI GI: 212536985 Blast Desc: benzoate 4-monooxygenase cytochrome P450, [Penicillium marneffei ATCC 18224] gi|210068390|gb|EEA22481.1| benzoate 4-monooxygenase cytochrome P450, [Penicillium marneffei ATCC
  misc_feature (1)..(426): NCBI GI: 261354521 Blast Desc: benzoate 4-monooxygenase cytochrome P450 [Verticillium albo-atrum VaMs.102]
  misc_feature (2)..(426): NCBI GI: 261357700 Blast Desc: cytochrome P450 67 [Verticillium albo-atrum VaMs.102]
  misc_feature (1)..(426): NCBI GI: 46114488 Blast Desc: FG03086.1 [Gibberella zeae PH-1]
  misc_feature (1)..(427): NCBI GI: 256722711 Blast Desc: NECHADRAFT_87276 [Nectria haematococca mpVI 77-13-4]
  misc_feature (7)..(423): NCBI GI: 115433851 Blast Desc: [Aspergillus terreus NIH2624] gi|114189914|gb|EAU31614.1| [Aspergillus terreus NIH2624]
  misc_feature (2)..(395): SWISSPROT Homolog: EC 1.14.13.12 Benzoate 4-monooxygenase
MKKLHLFEEVQSLHNEYGDYVRLGPSELSIADPRAVTAIYGGPSPVTKGPWYTLLEPRTPLFMARDKQEHARRRKIWDYGFSTQALLGYDPRITKSISLLLQAIDKQVGQPMDMSEWFAFFVFDVMEDLAFNKTSNMLVDGKQAYVLETIREDMWNIAFFAHLPWLLPFLKRTPLLNHNYLKFWKWIQDHIDERIKNEPDQPDIFSWLLAAYNKSAKTQRDNYDLHGDTQLIVIAGSDSVAATLTHLFLELAHHPEIKQALQKELDALSSLAHENLMSVEFLDAVINETMRLHPPVISGTQRVTPPEGLLIGDKHIPGDTIVQVPSYTVFRDSRSFERPLDFIPERWTTRPELVKDRSVFIPFNSGPYACVGKRLAMMELRRCVSEILWRYDYSVAPGHERAAWLDGKQDTFTVVSAPLPLIFEERVRN

SEQ ID NO: 3929 - DNA, 642 bp, Muscodor strobelii
  misc_feature: SGI EST ID NO. CUFF.9875.0
  misc_feature: Variant of the nucleotide sequence at SEQ ID NO 3927
tatggattttcaacacaagcgcttcttggctatgatcctcgtataaccaaatctatcagtctattgctccaggcaatcgataaacaagttggtcagccaatggacatgtcggaatggtttgcgtttttcgtatttgatgtcatggaagatcttgcattcaacaagacatcaaacatgttggtcgacgggaaacaagcgtatgttctcgaaacaattcgtgaggacatgtggaatattgcattctttgcgcatctcccttggctgttgccttttctgaaaaggacgccattactgaaccacaactacctaaaattctggaaatggattcaagaccatatcgatgagagaattaagaacgagcctgaccagcctgatattttctcatggctcctggccgcgtacaacaaaagcgcaaagactcagagagacaactatgatctccatggagatacccaattgatcgtcattgctggaagcgacagcgtagcagcgacactcacgcatctgttcctcgagctagcacatcacccagagatcaagcaagcgcttcagaaggagcttgatgcactctctagcctggcgcacgagaatttgatgagcgttgagtttctagacgccgttattaatgaaactatgcgtctt

SEQ ID NO: 3930 - DNA, 366 bp, Muscodor strobelii
  misc_feature: SGI cDNA ID NO. 560982
  misc_feature: Encodes the peptide sequence at SEQ ID NO 3931
atgaagcccctcaacctcctagccctagcagcaaccacaacagcctaccgctgccgcatggaccgctacacccccgtaacaccagggtcctgcgtaggcgcagtcaaagccggcgaccaaaccaacaaagagccctgctcagacgaacacacaaactcctgctacgggcgcccaagcgacgagaagggcgatccaaactgcaaagtcattattaccaagcccggctgcgtcgctccaatcttgggcgaggtctggtgcgactcagatgacgtgctcttcatctccgagaagcatagttattacgtcggatgtcttgttgggactagtcgggatactttcgaatatgaacccctcgagctcgagtga

SEQ ID NO: 3931 - protein, 121 aa, Muscodor strobelii
  misc_feature: SGI Peptide ID NO. 560982
MKPLNLLALAATTTAYRCRMDRYTPVTPGSCVGAVKAGDQTNKEPCSDEHTNSCYGRPSDEKGDPNCKVIITKPGCVAPILGEVWCDSDDVLFISEKHSYYVGCLVGTSRDTFEYEPLELE

SEQ ID NO: 3932 - DNA, 4062 bp, Muscodor strobelii
  misc_feature: SGI cDNA ID NO. 560983
  misc_feature: Encodes the peptide sequence at SEQ ID NO 3933
atgccttacgaggtgttagtgggacagccttgctacgctgcatggcaatctcaaaagctgttagatcagatcagcaaaaccagtcagagcaaagtcaagagcatcactggctcatggatctactacattcatgctaagaagtcattgaacctgaatgatatcaggttattcctcggtctatcttcacactcctctcaaccttcagctgcagctactggctctaccggcgtctatgttacacctaggacaatctcgccttggagctcccaagccacggccattgcgcaagtctgtggactgcaagatgtcatacgtgtcgagagaggccgactgatcaacgtcgagttcgaggacccgaccgaggctaagaatctggccacttttatcgatgtcgtctacgaccgtatgacagagacatacagcacgaccgagccgcatccagaatctacggtctttgctgagagtgctcgaggtctccttgtggtcgtagatatcttctctgacgcccgcgggccgatcgctgctctgacggaatacagcaaagagaatggattgggtctagatgatggcgaaatccaatatctgatcgatgttttccaaggcctcggccgtccgcccaacgatattgagctgttcatgtttggtcaagtcaactccgaacattgccgccacaaagtcttcaacgctaattggacaatcgatgatcagcgccgagatggcagccttttcgagatgattaagaacacccacaagaagacaccacagttcactgtctctgcctatagcgataatgcagcggttctacaaggagagccctctgcattctgggcgcccgaatatcaaactgggacctggaaattgacgaaagaagttttacatatgctagcaaaggtcgagacacataatcatcctacagccatatcaccattcccgggggcggcaactgggtcaggaggtgaaataagggacgaggctgcagtggggagaggctcgactacgaaagcaggtctttcgggattctttgtatccgatctacggattcctggatttgaacagccatgggaaagtgacatcggcaagccctatgccagcagtcttgacataatgctcgaagctcccatcggctcggctcgatacaacaacgaattcggccgacccgcactcaccggtgttttccgcactctcctgacagatgtcgacgatgactggaggggataccataagcccatcatgttggctggcgggcttggatcagtccgacctcagcatgcgctaaaaagtcccgatgatgtactcgaaggtgcccatgttattgttcttggcggacctgctatgctcatcggtcttggcggtggtgctgcatcaagtagcaactcgagtgaagctaccgccgaattagacttcaacagtgtccaacgcggcaatccagaagttgagagacgtgttcagatggtcatcaatacttgcgttgctcttggtcaggagaacccgattgctatgattcatgacgtaggagccggcggaatatccaatgctctacccgaacttgtcaaagatgccgctggtggaggtaagtttgagctgcgccaagtcgcaagtgtagacgacagcatgagtcctcttcagatttggtgctgtgaggctcaggaacgatatgttcttctgataaacagagacaaaataaatcggttcacaagcatttgcaaacgcgaacgctgcgatttctccaacgtaggaacgctcacctcccgggatggcactggcaagacaaaattagttctatccgatcgggaaacgccatctcaacctttgccaattgacctaccaatggatgccctcttccctccgggtcgtaaacaagagcgctttgacaaaaccgcaagtcgggtcttgagtcctttcgattctgcctcaagcctcaaggaaagacatggtgttttgaaccttacggatatgatcacgcaagctactcgtctcgtcttctctctacccgctgtgggatcaaagatgttcctcattactattgccgaccgcacagttggtggcctcacgacccgagatcagcttgttggtccatggcaggtcccggtggctgatgttgccgttacattgggatccttcagcattgatcagtcgactcgctatggagaggctatggcaatgggggagaaagcttcgctcgcattgatctcagcgggtgcatctgcacgaatggctgttgtggaaagtctacttaatctgggagcggctcacatcaagaacgatacaaacgtccgaggtgacttgcgccgtgtcaagctttctgccaattggatggctgctgtcaatcaccctggcgagggcgctgctttgtacgaagcagtccaagctattggaatagatctatgcccgaaattgggtgtttcaattcctgttggcaaagactcaacatctatgaaggcatcctggaaggatagaacgacgaacgaagcaaagagtgtcactgctcccgtgacagtagccatctctgcattctcccttgtcgaggatgtgaggaacacctggacgccccagctcagacgtgttgaagatgtcggtgaatcaattctcatcttcgtcgaccttgcgcagggatacaaagcaatgggcggttcagctcttgcgcagagtctggggcagttgggcaatgaagcgcccgatgtccgtgatgccgatttgattacggattacttcgatgctatatctcaattacatgaggagggcattgtcttggcataccacgaccgatcggacggtggcctccttaccacggtggcagagatgatgttcgcgggacggtctgctgctgagatttacatcgatgagctcgtgaagtccgcttccgattcaaatgttctggacgcattattcaacgaagagcttggtgccgtattccaaattcggaaatcagacgaaactcaattccgacgatgcttcgcaacatgtgggccgcctcctgggcttttgaagaagatcggatttaccaagtcgtctcaaaaacagtcactttcaattcgctacagaggaaagattgtcgcagatcttaatcgagctgaaacacagcaatggtggtctgcgacgtcattccatatgcagaaagaacgtgataaccccgaatgcgctgaccaggagtacgacgctattctcgactcgcaggatcccggtatctctttcaagacgaagtttgatcatacagacgacggcctctctgtctttgggagcctgaagggactagttgcaccgagacctcgagtcgctatcctccgagagcaaggtgtgaacggccatgctgaaatggcctttgctttccgcgccgcaggcttcgaagcaattgatgtcatgatgaccgacataatcgatggccgcaccctggatgattttagcggtcttgctgcatgcggtggtttctcctacggtgatgtgcttgaagcaggacgaggatgggcactctcaatctccaggaacgaaaaggccaaggctacattcgaagcattcttcaaacgcccaaatacattcactcttggtgtatgtaatggctgtcaaatgctctcccgactcaatgagctcaatccaggtttgatccctggagcagagaactggccgacatttgttcaaaacaagagtcaacagtttgaggcccgcttttcaatggtaaagatcgctgacaataccaacgggtctatcttcttcggtggcatggaaggctcctctcttcccatcgctgtatctcacggagaaggaagagcagaattttcgtcgcaatcaaacttagagacaatcgctaagggcggactggctcccttgagatatgtggacaattacggcacaattactgagaaatacccctcgaatccgaatggtagccctcagggcatagctggtgtcactagtcgcgatggtcgtgtgttggctatgatgccccaccccgagcgaaccatcatggcagacgttgctagctatattccgacaacacaacttaaggacttcggacagtacggaccttggatcaagatgttcaagaatgctaggaaatggatcggataa

SEQ ID NO: 3933 - protein, 1353 aa, Muscodor strobelii
  misc_feature: SGI Peptide ID NO. 560983
  misc_feature (232)..(420): Pfam Id: PF00586 Pfam Desc: AIR synthase related protein, N-terminal domain
  misc_feature (432)..(591): Pfam Id: PF02769 Pfam Desc: AIR synthase related protein, C-terminal domain
  misc_feature (858)..(1012): Pfam Id: PF02769 Pfam Desc: AIR synthase related protein, C-terminal domain
  misc_feature (282)..(420): Pfam Id: PF00586 Pfam Desc: AIR synthase related protein, N-terminal domain
  misc_feature (858)..(978): Pfam Id: PF02769 Pfam Desc: AIR synthase related protein, C-terminal domain
  misc_feature (3)..(1353): NCBI GI: 46135849 Blast Desc: FG09440.1 [Gibberella zeae PH-1]
  misc_feature (1)..(1353): NCBI GI: 85105758 Blast Desc: phosphoribosylformylglycinamidine synthase [Neurospora crassa OR74A] gi|28923626|gb|EAA32798.1| phosphoribosylformylglycinamidine synthase [Neurospora crassa
  misc_feature (1)..(1353): NCBI GI: 171688308 Blast Desc: protein product [Podospora anserina] gi|170944116|emb|CAP70226.1| protein product [Podospora anserina]
  misc_feature (1)..(1353): NCBI GI: 145611162 Blast Desc: MGG_11541 [Magnaporthe grisea 70-15] gi|145018478|gb|EDK02757.1| MGG_11541 [Magnaporthe grisea 70-15]
  misc_feature (1)..(1353): NCBI GI: 156063396 Blast Desc: SS1G_01816 [Sclerotinia sclerotiorum 1980] gi|154697150|gb|EDN96888.1| SS1G_01816 [Sclerotinia sclerotiorum 1980]
  misc_feature (128)..(1353): NCBI GI: 154319251 Blast Desc: BC1G_02577 [Botryotinia fuckeliana B05.10] gi|150857008|gb|EDN32200.1| BC1G_02577 [Botryotinia fuckeliana B05.10]
  misc_feature (35)..(1353): NCBI GI: 212534866 Blast Desc: phosphoribosylformylglycinamidine synthase [Penicillium marneffei ATCC 18224] gi|210069988|gb|EEA24078.1| phosphoribosylformylglycinamidine synthase [Penicillium marneffei
  misc_feature (32)..(1353): NCBI GI: 225557015 Blast Desc: phosphoribosylformylglycinamidine synthase [Ajellomyces capsulatus G186AR]
  misc_feature (31)..(1353): NCBI GI: 225684937 Blast Desc: phosphoribosylformylglycinamidine synthase [Paracoccidioides brasiliensis Pb03]
  misc_feature (33)..(1353): NCBI GI: 121719001 Blast Desc: phosphoribosylformylglycinamidine synthase [Aspergillus clavatus NRRL 1] gi|119404457|gb|EAW14833.1| phosphoribosylformylglycinamidine synthase [Aspergillus clavatus
  misc_feature (16)..(1353): SWISSPROT Homolog: EC 6.3.5.3 Phosphoribosylformylglycinamidine synthase
MPYEVLVGQPCYAAWQSQKLLDQISKTSQSKVKSITGSWIYYIHAKKSLNLNDIRLFLGLSSHSSQPSAAATGSTGVYVTPRTISPWSSQATAIAQVCGLQDVIRVERGRLINVEFEDPTEAKNLATFIDVVYDRMTETYSTTEPHPESTVFAESARGLLVVVDIFSDARGPIAALTEYSKENGLGLDDGEIQYLIDVFQGLGRPPNDIELFMFGQVNSEHCRHKVFNANWTIDDQRRDGSLFEMIKNTHKKTPQFTVSAYSDNAAVLQGEPSAFWAPEYQTGTWKLTKEVLHMLAKVETHNHPTAISPFPGAATGSGGEIRDEAAVGRGSTTKAGLSGFFVSDLRIPGFEQPWESDIGKPYASSLDIMLEAPIGSARYNNEFGRPALTGVFRTLLTDVDDDWRGYHKPIMLAGGLGSVRPQHALKSPDDVLEGAHVIVLGGPAMLIGLGGGAASSSNSSEATAELDFNSVQRGNPEVERRVQMVINTCVALGQENPIAMIHDVGAGGISNALPELVKDAAGGGKFELRQVASVDDSMSPLQIWCCEAQERYVLLINRDKINRFTSICKRERCDFSNVGTLTSRDGTGKTKLVLSDRETPSQPLPIDLPMDALFPPGRKQERFDKTASRVLSPFDSASSLKERHGVLNLTDMITQATRLVFSLPAVGSKMFLITIADRTVGGLTTRDQLVGPWQVPVADVAVTLGSFSIDQSTRYGEAMAMGEKASLALISAGASARMAVVESLLNLGAAHIKNDTNVRGDLRRVKLSANWMAAVNHPGEGAALYEAVQAIGIDLCPKLGVSIPVGKDSTSMKASWKDRTTNEAKSVTAPVTVAISAFSLVEDVRNTWTPQLRRVEDVGESILIFVDLAQGYKAMGGSALAQSLGQLGNEAPDVRDADLITDYFDAISQLHEEGIVLAYHDRSDGGLLTTVAEMMFAGRSAAEIYIDELVKSASDSNVLDALFNEELGAVFQIRKSDETQFRRCFATCGPPPGLLKKIGFTKSSQKQSLSIRYRGKIVADLNRAETQQWWSATSFHMQKERDNPECADQEYDAILDSQDPGISFKTKFDHTDDGLSVFGSLKGLVAPRPRVAILREQGVNGHAEMAFAFRAAGFEAIDVMMTDIIDGRTLDDFSGLAACGGFSYGDVLEAGRGWALSISRNEKAKATFEAFFKRPNTFTLGVCNGCQMLSRLNELNPGLIPGAENWPTFVQNKSQQFEARFSMVKIADNTNGSIFFGGMEGSSLPIAVSHGEGRAEFSSQSNLETIAKGGLAPLRYVDNYGTITEKYPSNPNGSPQGIAGVTSRDGRVLAMMPHPERTIMADVASYIPTTQLKDFGQYGPWIKMFKNARKWIG

SEQ ID NO: 3934 - DNA, 3269 bp, Muscodor strobelii
  misc_feature: SGI EST ID NO. CUFF.9894.0
  misc_feature: Variant of the nucleotide sequence at SEQ ID NO 3932
gggatattgtcttttacacgaatcgtgacgctgacaatatgtagctatgccagcagtcttgacataatgctcgaagctcccatcggctcggctcgatacaacaacgaattcggccgacccgcactcaccggtgttttccgcactctcctgacagatgtcgacgatgactggaggggataccataagcccatcatgttggctggcgggcttggatcagtccgacctcagcatgcgctaaaaagtcccgatgatgtactcgaaggtgcccatgttattgttcttggcggacctgctatgctcatcggtcttggcggtggtgctgcatcaagtagcaactcgagtgaagctaccgccgaattagacttcaacagtgtccaacgcggcaatccagaagttgagagacgtgttcagatggtcatcaatacttgcgttgctcttggtcaggagaacccgattgctatgattcatgacgtaggagccggcggaatatccaatgctctacccgaacttgtcaaagatgccgctggtggaggtaagtttgagctgcgccaagtcgcaagtgtagacgacagcatgagtcctcttcagatttggtgctgtgaggctcaggaacgatatgttcttctgataaacagagacaaaataaatcggttcacaagcatttgcaaacgcgaacgctgcgatttctccaacgtaggaacgctcacctcccgggatggcactggcaagacaaaattagttctatccgatcgggaaacgccatctcaacctttgccaattgacctaccaatggatgccctcttccctccgggtcgtaaacaagagcgctttgacaaaaccgcaagtcgggtcttgagtcctttcgattctgcctcaagcctcaaggaaagacatggtgttttgaaccttacggatatgatcacgcaagctactcgtctcgtcttctctctacccgctgtgggatcaaagatgttcctcattactattgccgaccgcacagttggtggcctcacgacccgagatcagcttgttggtccatggcaggtcccggtggctgatgttgccgttacattgggatccttcagcattgatcagtcgactcgctatggagaggctatggcaatgggggagaaagcttcgctcgcattgatctcagcgggtgcatctgcacgaatggctgttgtggaaagtctacttaatctgggagcggctcacatcaagaacgatacaaacgtccgaggtgacttgcgccgtgtcaagctttctgccaattggatggctgctgtcaatcaccctggcgagggcgctgctttgtacgaagcagtccaagctattggaatagatctatgcccgaaattgggtgtttcaattcctgttggcaaagactcaacatctatgaaggcatcctggaaggatagaacgacgaacgaagcaaagagtgtcactgctcccgtgacagtagccatctctgcattctcccttgtcgaggatgtgaggaacacctggacgccccagctcagacgtgttgaagatgtcggtgaatcaattctcatcttcgtcgaccttgcgcagggatacaaagcaatgggcggttcagctcttgcgcagagtctggggcagttgggcaatgaagcgcccgatgtccgtgatgccgatttgattacggattacttcgatgctatatctcaattacatgaggagggcattgtcttggcataccacgaccgatcggacggtggcctccttaccacggtggcagagatgatgttcgcgggacggtctgctgctgagatttacatcgatgagctcgtgaagtccgcttccgattcaaatgttctggacgcattattcaacgaagagcttggtgccgtattccaaattcggaaatcagacgaaactcaattccgacgatgcttcgcaacatgtgggccgcctcctgggcttttgaagaagatcggatttaccaagtcgtctcaaaaacagtcactttcaattcgctacagaggaaagattgtcgcagatcttaatcgagctgaaacacagcaatggtggtctgcgacgtcattccatatgcagaaagaacgtgataaccccgaatgcgctgaccaggagtacgacgctattctcgactcgcaggatcccggtatctctttcaagacgaagtttgatcatacagacgacggcctctctgtctttgggagcctgaagggactagttgcaccgagacctcgagtcgctatcctccgagagcaaggtgtgaacggccatgctgaaatggcctttgctttccgcgccgcaggcttcgaagcaattgatgtcatgatgaccgacataatcgatggccgcaccctggatgattttagcggtcttgctgcatgcggtggtttctcctacggtgatgtgcttgaagcaggacgaggatgggcactctcaatctccaggaacgaaaaggccaaggctacattcgaagcattcttcaaacgcccaaatacattcactcttggtgtatgtaatggctgtcaaatgctctcccgactcaatgagctcaatccaggtttgatccctggagcagagaactggccgacatttgttcaaaacaagagtcaacagtttgaggcccgcttttcaatggtaaagatcgctgacaataccaacgggtctatcttcttcggtggcatggaaggctcctctcttcccatcgctgtatctcacggagaaggaagagcagaattttcgtcgcaatcaaacttagagacaatcgctaagggcggactggctcccttgagatatgtggacaattacggcacaattactgagaaatacccctcgaatccgaatggtagccctcagggcatagctggtgtcactagtcgcgatggtcgtgtgttggctatgatgccccaccccgagcgaaccatcatggcagacgttgctagctatattccgacaacacaacttaaggacttcggacagtacggaccttggatcaagatgttcaagaatgctaggaaatggatcggataaagtggtttatacgcgatgaaatatttcgctttgagggcactggaactatctggggcgtttgatagggtgtattgtattattgttctcaatgaataaatgtcgcatgacatatgtcacctcgtcgacttatctaaggtgtaccatcgcgtcttgctttcaacaataggccatagtgaccacgataccatgtagtaagcgacatttgttgatatgttccgataatcatcacactcatgtccgctccg

SEQ ID NO: 3935 - DNA, 1794 bp, Muscodor strobelii
  misc_feature: SGI cDNA ID NO. 560984
  misc_feature: Encodes the peptide sequence at SEQ ID NO 3936
atggaaacgttagattgtgtcgtgataggcgcaggatggagcggcctggccgcagccaagcagttcgtctgcactcagcctgatcgcagtattgcagtactcgacaaagagtcctcaattggaggcacgtgggcggatcatcgcctttaccatgggcttaagagcaacaacttgttggggacatttgagtaccccgacttccccatgacaaccgacaagttcgatgtgaagctaggacatcatatttctggctacgctgtcaacgcctatctcaaggcatatgctgaagccttcggccttactgacatcctacgactgcagacagtggtgctcagtgctgagcatcaggacacagaagaaggtggatgggtcttgactattaagtccttggatcaagacaccacaggtaggattggcgctcgtcgcctgatcgtcgcctccggtactacctcggaccccttcgtgccctctttcaaaggtcaagacgcctttggtgggaagatgttccacacgaaggactttccgcaaatcgtgaccaaagggacagatgaagacgtgaagaccgtcaccatatatgggtctggcaagtcgtcgtgggactctgtttaccactacgctaatgctgggatcaaagtgaattggattattcgagcaagtggccatggcccgatttggcagtcgcctccatatgtaacgcctctgaagaagtggcttgagaagcttgcaaatactcgacttctgacttggtttagcccctgtatctggggtgatgctgatggataccatggaaccagaaagttccttcacactaccgctattggccgcagtctcgtgaaaacgttctggaaaatcctaggtggagatgtaatgcatcttaacgactatgactctcaccccaagaccgcaaaactaaagccttggattgatgccatgtacgtcgggccaagtttcagtatcttgaattacgaaacggactttttcgagtttgtcaaaagcgagaagaacctgatcgacatccacatcggggagatctcccatctcagtcctcgatgtgttcatctaggcgatgggacaagactcgaatgcgatgctttcgtcttaaacacgggctggaacgatatcccctctatcaaattcctgcccgaaggaatcgagagggaacttggtataccgcatgtaccacacacagatgacaagcttcttggcagcggtcccgcttgtgaaacgcggcttcttaagcagtgcgacagcgagatcctgcatcagttccctatcctaaaaaagcaaccggtgtggaatccgagctttcgccctgttgcaggtcacgagactgataaattgacttcatacatgctttatcgcttcctcatacccgcgtcgccgcgatttctccgcgccagagatattgcattcatcggtcttcagaacaacttgagcacggtcctcacagcacatattacgagtctctggatcagcgcctactttgcaggaaagctaaccagagacccttcaaccgcggttggaaatccagtagcgttggacgaagtgcaatttgaaacaatgttacacaaccgctttggcaagtggcgctaccccgcggactggggcaatcgcgcgcctagcttcatcttcgatgctctgccttatcttgatatgttgcagcatgatctcgggttgaatccgcacaggaaagaagggcgatgggctgagatgactgtgccttatgggcctgaggattatcgctacatcacacaggagtggatggagtcgcataactgtaggaaggctaactag

SEQ ID NO: 3936 - protein, 597 aa, Muscodor strobelii
  misc_feature: SGI Peptide ID NO. 560984
  misc_feature (1)..(596): NCBI GI: 261202360 Blast Desc: conserved [Ajellomyces dermatitidis SLH14081] gi|239590491|gb|EEQ73072.1| conserved [Ajellomyces dermatitidis SLH14081] gi|239612218|gb|EEQ89205.1| conserved [Ajellomyces
  misc_feature (11)..(596): NCBI GI: 154285492 Blast Desc: conserved [Ajellomyces capsulatus NAm1] gi|150407182|gb|EDN02723.1| conserved [Ajellomyces capsulatus NAm1]
  misc_feature (11)..(581): NCBI GI: 240277706 Blast Desc: conserved [Ajellomyces capsulatus H143]
  misc_feature (11)..(581): NCBI GI: 225557159 Blast Desc: conserved [Ajellomyces capsulatus G186AR]
  misc_feature (1)..(589): NCBI GI: 116195442 Blast Desc: CHGG_04319 [Chaetomium globosum CBS 148.51] gi|88180232|gb|EAQ87700.1| CHGG_04319 [Chaetomium globosum CBS 148.51]
  misc_feature (1)..(596): NCBI GI: 256725724 Blast Desc: NECHADRAFT_81737 [Nectria haematococca mpVI 77-13-4]
  misc_feature (1)..(499): NCBI GI: 256731213 Blast Desc: NECHADRAFT_96476 [Nectria haematococca mpVI 77-13-4]
  misc_feature (1)..(590): NCBI GI: 171691506 Blast Desc: protein product [Podospora anserina] gi|170945701|emb|CAP71814.1| protein product [Podospora anserina]
  misc_feature (1)..(589): NCBI GI: 145606372 Blast Desc: MGG_02364 [Magnaporthe grisea 70-15] gi|145014052|gb|EDJ98693.1| MGG_02364 [Magnaporthe grisea 70-15]
  misc_feature (1)..(587): NCBI GI: 46133829 Blast Desc: FG09054.1 [Gibberella zeae PH-1]
  misc_feature (2)..(379): SWISSPROT Homolog: EC 1.14.13.92 Phenylacetone monooxygenase
METLDCVVIGAGWSGLAAAKQFVCTQPDRSIAVLDKESSIGGTWADHRLYHGLKSNNLLGTFEYPDFPMTTDKFDVKLGHHISGYAVNAYLKAYAEAFGLTDILRLQTVVLSAEHQDTEEGGWVLTIKSLDQDTTGRIGARRLIVASGTTSDPFVPSFKGQDAFGGKMFHTKDFPQIVTKGTDEDVKTVTIYGSGKSSWDSVYHYANAGIKVNWIIRASGHGPIWQSPPYVTPLKKWLEKLANTRLLTWFSPCIWGDADGYHGTRKFLHTTAIGRSLVKTFWKILGGDVMHLNDYDSHPKTAKLKPWIDAMYVGPSFSILNYETDFFEFVKSEKNLIDIHIGEISHLSPRCVHLGDGTRLECDAFVLNTGWNDIPSIKFLPEGIERELGIPHVPHTDDKLLGSGPACETRLLKQCDSEILHQFPILKKQPVWNPSFRPVAGHETDKLTSYMLYRFLIPASPRFLRARDIAFIGLQNNLSTVLTAHITSLWISAYFAGKLTRDPSTAVGNPVALDEVQFETMLHNRFGKWRYPADWGNRAPSFIFDALPYLDMLQHDLGLNPHRKEGRWAEMTVPYGPEDYRYITQEWMESHNCRKAN

SEQ ID NO: 3937 - DNA, 688 bp, Muscodor strobelii
  misc_feature: SGI EST ID NO. CUFF.9906.0
  misc_feature: Variant of the nucleotide sequence at SEQ ID NO 3935
gttcactgccatcgggaaaaccaacaagatttctcataggatggagcggcctggccgcagccaagcagttcgtctgcactcagcctgatcgcagtattgcagtactcgacaaagagtcctcaattggaggcacgtgggcggatcatcgcctttaccatgggcttaagagcaacaacttgttggggacatttgagtaccccgacttccccatgacaaccgacaagttcgatgtgaagctaggacatcatatttctggctacgctgtcaacgcctatctcaaggcatatgctgaagccttcggccttactgacatcctacgactgcagacagtggtgctcagtgctgagcatcaggacacagaagaaggtggatgggtcttgactattaagtccttggatcaagacaccacaggtaggattggcgctcgtcgcctgatcgtcgcctccggtactacctcggaccccttcgtgccctctttcaaaggtcaagacgcctttggtgggaagatgttccacacgaaggactttccgcaaatcgtgaccaaagggacagatgaagacgtgaagaccgtcaccatatatgggtctggcaagtcgtcgtgggactctgtttaccactacgctaatgctgggatcaaagtgaattggattattcgagcaagtggccatggcccgatttggcagtcgcc

SEQ ID NO: 3938 - DNA, 417 bp, Muscodor strobelii
  misc_feature: SGI cDNA ID NO. 560985
  misc_feature: Elevated expression when VOC is produced
  misc_feature: Encodes the peptide sequence at SEQ ID NO 3939
atgatcttgccctctgccgtgaccgtggtcaaaggcactgatctcgaggcgcagcgccaatccaaagatgccgcgatgatccgccaaggtgcgttgattggcaaaagcgatagaatgtgtgccacagtcatgatagcaaagcctcactgctcctcggcagtccatcatcacggggagcaagagacgatcatttacgcagcgtctggcaaagggatccttgttacaaaccccagcgacgaagaagaaccaaaacgggcagagctgtcagctggggattttgctttcataccaccatggaccgaacatcaagagatcaacgagacagatgaggatgttgtgtggatcctcattcgaaccggcccagagcccgtggttgtttacctaactgggtggggcggcgacgaagcaaaagactga

SEQ ID NO: 3939 - protein, 138 aa, Muscodor strobelii
  misc_feature: SGI Peptide ID NO. 560985
  misc_feature (42)..(118): Pfam Id: PF07883 Pfam Desc: Cupin domain
  misc_feature (1)..(137): NCBI GI: 256724694 Blast Desc: NECHADRAFT_48148 [Nectria haematococca mpVI 77-13-4]
  misc_feature (3)..(131): NCBI GI: 189202080 Blast Desc: conserved [Pyrenophora tritici-repentis Pt-1C-BFP] gi|187984475|gb|EDU49963.1| conserved [Pyrenophora tritici-repentis Pt-1C-BFP]
  misc_feature (5)..(131): NCBI GI: 145235587 Blast Desc: An03g05630 [Aspergillus niger] gi|134058129|emb|CAK38323.1| protein product [Aspergillus niger]
  misc_feature (1)..(137): NCBI GI: 85089549 Blast Desc: NCU06933 [Neurospora crassa OR74A] gi|28919303|gb|EAA28764.1| [Neurospora crassa OR74A]
  misc_feature (26)..(138): NCBI GI: 171681503 Blast Desc: protein product [Podospora anserina] gi|170940710|emb|CAP65938.1| protein product [Podospora anserina]
  misc_feature (1)..(138): NCBI GI: 116203941 Blast Desc: CHGG_09854 [Chaetomium globosum CBS 148.51] gi|88175982|gb|EAQ83450.1| CHGG_09854 [Chaetomium globosum CBS 148.51]
  misc_feature (3)..(132): NCBI GI: 169595976 Blast Desc: SNOG_00735 [Phaeosphaeria nodorum SN15] gi|111071110|gb|EAT92230.1| SNOG_00735 [Phaeosphaeria nodorum SN15]
  misc_feature (7)..(128): NCBI GI: 170751226 Blast Desc: cupin 2 domain-containing protein [Methylobacterium radiotolerans JCM 2831] gi|170657748|gb|ACB26803.1| Cupin 2 conserved barrel domain protein [Methylobacterium radiotolerans
  misc_feature (5)..(128): NCBI GI: 222086909 Blast Desc: Arad_3599 [Agrobacterium radiobacter K84] gi|221724357|gb|ACM27513.1| conserved [Agrobacterium radiobacter K84]
  misc_feature (21)..(135): NCBI GI: 84495338 Blast Desc: JNB_11069 [Janibacter sp. HTCC2649] gi|84384831|gb|EAQ00711.1| JNB_11069 [Janibacter sp. HTCC2649]
  misc_feature: Useful for introducing or modulating the production of volatile compounds
MILPSAVTVVKGTDLEAQRQSKDAAMIRQGALIGKSDRMCATVMIAKPHCSSAVHHHGEQETIIYAASGKGILVTNPSDEEEPKRAELSAGDFAFIPPWTEHQEINETDEDVVWILIRTGPEPVVVYLTGWGGDEAKD

SEQ ID NO: 3940 - DNA, 3146 bp, Muscodor strobelii
  misc_feature: SGI EST ID NO. CUFF.9999.1
  misc_feature: Variant of the nucleotide sequence at SEQ ID NO 3938
gactagtcgtatctctgtatcccaagaaaattcttaggagcatttctgagattcatcataattcgtatgattcggaagaggcatataaagctcacaagaacttcaagccataacttactatgtacctacatgtagttattgagaataatgtgatgcgttgccggccttagatctttgctggctgccgagctgcgccgggttccaggcctcaattgggagcacggaccatgagggtctcctgcctgctgtactcagcactcgtccgaaagtgttgtactagtcaggtttttaccacatagtgaatatcaccagttccgacgcgatgtccaatacgatgccatgaaatgaaatgacgtgtacgatttctatttctaatcttcattcatcttccatctagctcgaattcttctcttcgtccagtgctgtgtttattgctcagcaatgtcttctctcttctctttgctcccggacatacttccgatgatcttgccctctgccgtgaccgtggtcaaaggcactgatctcgaggcgcagcgccaatccaaagatgccgcgatgatccgccaaggtgcgttgattggcaaaagcgatagaatgtgtgccacagtcatgatagcaaagcctcactgctcctcggcagtccatcatcacggggagcaagagacgatcatttacgcagcgtctggcaaagggatccttgttacaaaccccagcgacgaagaagaaccaaaacgggcagagctgtcagctggggattttgctttcataccaccatggaccgaacatcaagagatcaacgagacagatgaggatgttgtgtggatcctcattcgaaccggcccagagcccgtggttgtttacctaactgggtggggcggcgacgaagcaaaagactgatactctgagcaagcccagtcacccgcaagccacgcgtgatcccgttcgcaaggacgtgcggaatgtcgtgtgtctactaatacgatgatattcatcatcatggattattgtctactctagtgaatattgcgagcgatctagcgcgtcatttctcattatttgacgcaaaggcgacgtgtaagctctgtcagacggtcttgagcttcccgatagtcaaacgtctgtgcatgatcaagccccggaaaccagagcacttcgatgccgtcgttcttgaagtgatttgagcctaacctgtctggctgctcccaagtgcttatcgatccattctggcggaaagctcgcttcgcctccatatcaggagatgcccaatcctccccgcccactaaatattggaacacggccgcagtatcaacgattaagtcgcgttccgaaaggcaaacggcgacatttcttgatctggacccatcagggagagagacatcgcttacgccatcttgtgtcaaaggcttcacaactttgatcagcaaatcctctttccaggctatattttctttccagaaaaaatgtctgcctagacagtgagcagtcccggggtccatgctggcaaaataccacaagagccactcgttagctttgatcggcttgcgtctggtgaagttgtaggcgacgtcaggcaaatgtagcagaatggagactggatcaatcaagataaccgtgtcgattcttgaacttagcgtcgctgacttcaacctagagcacaaagcacgtcagcttgctaatcaaaacactatggtctagactcgcatgatcctaatctcgaattcttggacctttggcgtctgatgctcggaacaccagagcacttactgcgatagatgttaatacaggcatcatcagaaggatcggtctggaaatgagatggattatacggaccatatgagtagccagcacagtaccataagagtggcagataatgccaaattgagcccaatcatgctcagctaggattgcttcgatctcatagagaaattcagcctgactgagcggtgcatcggtaaggcggaatgaaaccggcagtatctccaaagcgataataccgatctgatcatcttcatccgagtcttcatttaagctcgcaagatacgacgagtatgcccaaataccaatgccgatgccatgcataaagacaactggtagcctatcctttgacgtgtgcggtcgataccagtagctcagcctagagaccgaccgtttgctgctaagccatccctgcgggcgtggaggaactactgacagagcctgtgggtacggctgcgcgtaatatcggaagcctcggcggagttgttggaaatgtgtaaaaatatcgacgcctccaacaatgaggtaccaaaccacgcttctgtatcggatccccacgtcttcaaaagttaagcgaaggctattagcactaccccttccttctttcaacggccgtcccattcgctgctcaatcgcgtctatgtactcatcaatttcttcgttctccgcgttagtctgttgctctggccatttgtcaaagaatgcccacgaaagaaaatcgcggacattttctctgccaatgtcatcttcggcggcaccgagaaaccatttccgcaaatactgtttgaaatcaggaatattatctgtgcagcgtttgaaaagcgcttttcgctcggagtatggtattgttggcggatgtttggccgcttgtttgagccggtagctatatggatagaagatgaagcccgcgtataaagcgtcgaggactgaatatcctatcaatagcttattgctagtctgggatagcgccgatgagccattgagcgcaagagaaacgagaggataagtaaggcatatcggcgttgtgtattgaagtacgaagatgcaacatcgtatgaagcaatattcaggaaatgaagtgccaatcattatggggccactgaagaaggaccgccaagactggccgtgagtgagacctggaaacgagaaagatggcctcgctatcgatgcatcaaagggacaaaacaacagatgacgaggcgatgagtttcatgagagtcgatagtctatagcaagaccgttcggacctttgaagaacgaattttccaagtccttaaggggtgaatgattttaaagacgcgaatataggcaacattctttgcgatgcctcgggcgtgacgtcgttggtatctgggggagacatgtgcttggtggggcgctaacatcatcac

SEQ ID NO: 3941 - DNA, 1599 bp, Muscodor strobelii
  misc_feature: SGI cDNA ID NO. 560986
  misc_feature: Encodes the peptide sequence at SEQ ID NO 3942
atggatggcgaactgccggtcgagttgcaattcccctggcgctaccaatctacttcattaacacgcccggaaatttacaagtcaggagatattccaagcacgcagtccaccacttcgcttcccgctatcaccccagatcaatctgatgatgatgaggatgatggaatcgttgaggattggatggtccctcatgccaaccagcacagttcatctcggacacatgatgcgaagcacccaacgccgtttttgagtctgcctggcgaattgattgatgctgtgttttcgtatcttactccgctccaactcaaccaaatatcgtgggtctgtcagaggtttcgcagccatgcccacagcgaaatacattggcaacgccacgtattggcaaatcttcccgggaataaaatctcatcgccctacccgtgcaaaacttggcgcgatctatacgcaggccacgacccttactggttcctgaccaagcacaagttatggttctgcgatcgctcactagccggaaagatgatcatcattcgctatgatcagcgtcgcggatgcattgaaggctaccaacttgttgccacaagactgcgggaagagagcgaattctgggctggggtggacaacgtggagattcagttattcgaacctctcgtcaagctccacctcgacaagccagttatccagctcgatattgatattaatcatgcaatattgtcaacttcgaatttcggtccatcgccttttcgaccctttctccctgataagcagatgcgaaacaccttcgagactgacccacaactccgggtgctgaatctcgctcgttcacttgatcgatcacatgttgattatcatgtgcaaggcgaatttccgtatggtcaactatggccacctttgaccattccggcgcatcaacgtgtcctaggacatccctctcaaatcacacgagcagtatcaaacgcggtggctctaagatcttggaaagcacaaaagccctcggaagcatgcgaccaagcttttcgaatttgtcaatggatggaactgggagtgccgcctatgcgatttcatgttgacgaagaactcgtgacttattcgactcttgatccctcattatatacaccaacccgagagaaaccgtggaaaggcatatgggttggtgactacagtgtgcacggctgcgaattcatcttgatcaaccaacctgacagccttgaaagtacgaacgaagagcctcttacgaagcaggaaggcgagagcgacgaagaatttgaggcacgctttctgaatgaacgggtctatcgtggtaggcttgaagcaatcaaattgactggtgatcccaacgttccacgaggcgaatacacattcattgtggatgacctaggtgagcgcggtcatctgggctttgcgcaagcgccaccgttcgaaggcgctcggatggtcaaaagccgaggtcatattgcaggcattggcttcgcaaatgatcgatacctcgaatcgcaactgattctcgtgtcccataaccgcttagctcagtactgggtcgattatcatcatatcaacttttttgaaagggttgatatcgacagatttctcgtacccgaatga

SEQ ID NO: 3942 - protein, 532 aa, Muscodor strobelii
  misc_feature: SGI Peptide ID NO. 560986
  misc_feature (80)..(127): Pfam Id: PF00646 Pfam Desc: F-box domain
  misc_feature (67)..(531): NCBI GI: 171681501 Blast Desc: protein product [Podospora anserina] gi|170940709|emb|CAP65937.1| protein product [Podospora anserina]
  misc_feature (90)..(529): NCBI GI: 46126273 Blast Desc: FG07514.1 [Gibberella zeae PH-1]
  misc_feature (82)..(529): NCBI GI: 256724820 Blast Desc: NECHADRAFT_84508 [Nectria haematococca mpVI 77-13-4]
  misc_feature (171)..(530): NCBI GI: 261355432 Blast Desc: F-box domain-containing protein [Verticillium albo-atrum VaMs.102]
  misc_feature (85)..(529): NCBI GI: 115390719 Blast Desc: conserved [Aspergillus terreus NIH2624] gi|114193788|gb|EAU35488.1| conserved [Aspergillus terreus NIH2624]
  misc_feature (80)..(529): NCBI GI: 119468561 Blast Desc: F-box domain protein [Neosartorya fischeri NRRL 181] gi|119406013|gb|EAW15964.1| F-box domain protein [Neosartorya fischeri NRRL 181]
  misc_feature (82)..(529): NCBI GI: 255943305 Blast Desc: Pc18g05940 [Penicillium chrysogenum Wisconsin 54-1255] gi|211587154|emb|CAP94818.1| Pc18g05940 [Penicillium chrysogenum Wisconsin 54-1255]
  misc_feature (93)..(529): NCBI GI: 67538078 Blast Desc: AN5209.2 [Aspergillus nidulans FGSC A4] gi|40743200|gb|EAA62390.1| AN5209.2 [Aspergillus nidulans FGSC A4] gi|259484667|tpe|CBF81085.1| TPA: F-box domain protein FGSC
  misc_feature (85)..(531): NCBI GI: 156057689 Blast Desc: SS1G_04576 [Sclerotinia sclerotiorum 1980] gi|154702361|gb|EDO02100.1| SS1G_04576 [Sclerotinia sclerotiorum 1980]
  misc_feature (69)..(526): NCBI GI: 261187693 Blast Desc: F-box domain-containing protein [Ajellomyces dermatitidis SLH14081] gi|239594072|gb|EEQ76653.1| F-box domain-containing protein [Ajellomyces dermatitidis SLH14081]
MDGELPVELQFPWRYQSTSLTRPEIYKSGDIPSTQSTTSLPAITPDQSDDDEDDGIVEDWMVPHANQHSSSRTHDAKHPTPFLSLPGELIDAVFSYLTPLQLNQISWVCQRFRSHAHSEIHWQRHVLANLPGNKISSPYPCKTWRDLYAGHDPYWFLTKHKLWFCDRSLAGKMIIIRYDQRRGCIEGYQLVATRLREESEFWAGVDNVEIQLFEPLVKLHLDKPVIQLDIDINHAILSTSNFGPSPFRPFLPDKQMRNTFETDPQLRVLNLARSLDRSHVDYHVQGEFPYGQLWPPLTIPAHQRVLGHPSQITRAVSNAVALRSWKAQKPSEACDQAFRICQWMELGVPPMRFHVDEELVTYSTLDPSLYTPTREKPWKGIWVGDYSVHGCEFILINQPDSLESTNEEPLTKQEGESDEEFEARFLNERVYRGRLEAIKLTGDPNVPRGEYTFIVDDLGERGHLGFAQAPPFEGARMVKSRGHIAGIGFANDRYLESQLILVSHNRLAQYWVDYHHINFFERVDIDRFLVPE

SEQ ID NO: 3943 - DNA, 2366 bp, Muscodor strobelii
  misc_feature: SGI EST ID NO. CUFF.9917.0
  misc_feature: Variant of the nucleotide sequence at SEQ ID NO 3941
ttgttagtaccgaccaacggtaggcaggctcaagctacccgaacaatagtagcactgtgtcatattgctactcactgagcatgtgtcaatgggcatccaattctgcccctccaaattctttcgagtctcttcgcgatatttgttcctagcaaaaacatcaattttcacagagaaaaaataagtcaagaaaatattgcacatgtatcttgaccgatggtgttctctttaggttgaaaattaacctagcagcttccccattgatccgagggcactttacaggcatccgaccactacaaacagcgctacctatcaaaagtagggccaaggtgagcctccaaattgataccttgttgccccaaaacgcgacatcctccagccagtagaaactcgtttcgctcgccccagatgtatcacgcatctatgatgtggacggatcattcccagagatatcctaatatcaatccaccgccgcttgatggcaatctgaccaagatggatggcgaactgccggtcgagttgcaattcccctggcgctaccaatctacttcattaacacgcccggaaatttacaagtcaggagatattccaagcacgcagtccaccacttcgcttcccgctatcaccccagatcaatctgatgatgatgaggatgatggaatcgttgaggattggatggtccctcatgccaaccagcacagttcatctcggacacatgatgcgaagcacccaacgccgtttttgagtctgcctggcgaattgattgatgctgtgttttcgtatcttactccgctccaactcaaccaaatatcgtgggtctgtcagaggtttcgcagccatgcccacagcgaaatacattggcaacgccacgtattggcaaatcttcccgggaataaaatctcatcgccctacccgtgcaaaacttggcgcgatctatacgcaggccacgacccttactggttcctgaccaagcacaagttatggttctgcgatcgctcactagccggaaagatgatcatcattcgctatgatcagcgtcgcggatgcattgaaggctaccaacttgttgccacaagactgcgggaagagagcgaattctgggctggggtggacaacgtggagattcagttattcgaacctctcgtcaagctccacctcgacaagccagttatccagctcgatattgatattaatcatgcaatattgtcaacttcgaatttcggtccatcgccttttcgaccctttctccctgataagcagatgcgaaacaccttcgagactgacccacaactccgggtgctgaatctcgctcgttcacttgatcgatcacatgttgattatcatgtgcaaggcgaatttccgtatggtcaactatggccacctttgaccattccggcgcatcaacgtgtcctaggacatccctctcaaatcacacgagcagtatcaaacgcggtggctctaagatcttggaaagcacaaaagccctcggaagcatgcgaccaagcttttcgaatttgtcaatggatggaactgggagtgccgcctatgcgatttcatgttgacgaagaactcgtgacttattcgactcttgatccctcattatatacaccaacccgagagaaaccgtggaaaggcatatgggttggtgactacagtgtgcacggctgcgaattcatcttgatcaaccaacctgacagccttgaaagtacgaacgaagagcctcttacgaagcaggaaggcgagagcgacgaagaatttgaggcacgctttctgaatgaacgggtctatcgtggtaggcttgaagcaatcaaattgactggtgatcccaacgttccacgaggcgaatacacattcattgtggatgacctaggtgagcgcggtcatctgggctttgcgcaagcgccaccgttcgaaggcgctcggatggtcaaaagccgaggtcatattgcaggcattggcttcgcaaatgatcgatacctcgaatcgcaactgattctcgtgtcccataaccgcttagctcagtactgggtcgattatcatcatatcaacttttttgaaagggttgatatcgacagatttctcgtacccgaatgagcatactgcgccgtgtgaagtctttgcgtttttgagctaagatggattttagacgcttgccctcgttttacatacgttgcgaccgtacaaagggacacatgcagttgagagacagtcatcatgggtttcccttgttcaaaatgcgtccgcattcaaccctcctctcatatacaatagcggttcatacagttcgtacagcgtagattatacagttgattgagaaagacagtttagtaatgaaaaatagctagtatcaccaattaatcacatgcgaa

SEQ ID NO: 3944 - DNA, 1137 bp, Muscodor strobelii
  misc_feature: SGI cDNA ID NO. 560987
  misc_feature: Encodes the peptide sequence at SEQ ID NO 3945
atggcggaaaagtatatcatccgtgtcacagcgggttctgactacaacatcgatcatcaggtagtggttcctgtaaactctccggagacaatcaagattagcaacgagctcattgatgcggaaatcaatgtcagggtgcagaactaccatggcctaccccgcaattcgccgacaacatctccctacttttctctagaaccacacaaaacgaacaacgatcagtacagccttgcaatacgtttcactccaaagaaaccagttaataatccccggaaaggcgcaggtcaagcacacgctgcgtcagacgggggtcaggcagctcagcaagacgagtcggaagcggggcattctgcagcggggcaggcgccaaatgcgactgacaacaccgataattcaacctcagagactggcatctcaggtcatgatctccaattcggtaacgacttcgatcatgctatcagagatagactaccaccaggcttcagctatgcgatgaacatagtgaaatggtggattgacccgggtctcgacggcgacccgtatgccgacatgccgtatctatacgggcctggattgtcttcgttcaatgctattcatgtcggaaagggagacttcgattctgaaaagggcggcctctctttcgaggaaggaggtgatgaagcaggcatgcaagcacgtcacgatactggagcacctgacagcgcaaaagaccgcaagaaatgggctttgaataacgacagcaaggacaaatggatatatgagtacggcaagacctactgtgttgatttcttcaacccttatctcgatttcaacgaatttgcgttgcgactaccaggttttacggtgccgattatgaaatactgggatggccagggcctcaggtcccaccgcaagcgctcacacaccctcagatacgtgcttcgcaaccgatcgacgaacgacacgtaccttgtcatcctattcacgctgtacctcaaagaagacgtcaatgaagacggctctctcaagcctgccgcgcttgaggcaactcgcgaagataagctaatggcgatcgaggctgggaaaatggccgatgatagtggattggccaaggaggagcctgcaacaacgactggcggggatgatgatgtggactaa

SEQ ID NO: 3945 - protein, 378 aa, Muscodor strobelii
  misc_feature: SGI Peptide ID NO. 560987
  misc_feature (140)..(195): Pfam Id: PF08588 Pfam Desc: Domain of function (DUF1769)
  misc_feature (1)..(344): NCBI GI: 116203883 Blast Desc: CHGG_09825 [Chaetomium globosum CBS 148.51] gi|88175953|gb|EAQ83421.1| CHGG_09825 [Chaetomium globosum CBS 148.51]
  misc_feature (1)..(365): NCBI GI: 46126265 Blast Desc: FG07510.1 [Gibberella zeae PH-1]
  misc_feature (1)..(361): NCBI GI: 39940672 Blast Desc: MGG_04904 [Magnaporthe grisea 70-15] gi|145010863|gb|EDJ95519.1| MGG_04904 [Magnaporthe grisea 70-15]
  misc_feature (1)..(362): NCBI GI: 256724696 Blast Desc: NECHADRAFT_48207 [Nectria haematococca mpVI 77-13-4]
  misc_feature (1)..(359): NCBI GI: 171681563 Blast Desc: protein product [Podospora anserina] gi|170940740|emb|CAP65968.1| protein product [Podospora anserina]
  misc_feature (1)..(366): NCBI GI: 156057941 Blast Desc: SS1G_04702 [Sclerotinia sclerotiorum 1980] gi|154702487|gb|EDO02226.1| SS1G_04702 [Sclerotinia sclerotiorum 1980]
  misc_feature (1)..(336): NCBI GI: 154323316 Blast Desc: BC1G_00057 [Botryotinia fuckeliana B05.10] gi|150842286|gb|EDN17479.1| BC1G_00057 [Botryotinia fuckeliana B05.10]
  misc_feature (3)..(343): NCBI GI: 85089631 Blast Desc: NCU09451 [Neurospora crassa OR74A] gi|28919348|gb|EAA28801.1| conserved [Neurospora crassa OR74A]
  misc_feature (2)..(336): NCBI GI: 258577239 Blast Desc: conserved [Uncinocarpus reesii 1704] gi|237903067|gb|EEP77468.1| conserved [Uncinocarpus reesii 1704]
  misc_feature (2)..(325): NCBI GI: 121699050 Blast Desc: conserved [Aspergillus clavatus NRRL 1] gi|119396035|gb|EAW06467.1| conserved [Aspergillus clavatus NRRL 1]
MAEKYIIRVTAGSDYNIDHQVVVPVNSPETIKISNELIDAEINVRVQNYHGLPRNSPTTSPYFSLEPHKTNNDQYSLAIRFTPKKPVNNPRKGAGQAHAASDGGQAAQQDESEAGHSAAGQAPNATDNTDNSTSETGISGHDLQFGNDFDHAIRDRLPPGFSYAMNIVKWWIDPGLDGDPYADMPYLYGPGLSSFNAIHVGKGDFDSEKGGLSFEEGGDEAGMQARHDTGAPDSAKDRKKWALNNDSKDKWIYEYGKTYCVDFFNPYLDFNEFALRLPGFTVPIMKYWDGQGLRSHRKRSHTLRYVLRNRSTNDTYLVILFTLYLKEDVNEDGSLKPAALEATREDKLMAIEAGKMADDSGLAKEEPATTTGGDDDVD

SEQ ID NO: 3946 - DNA, 1595 bp, Muscodor strobelii
  misc_feature: SGI EST ID NO. CUFF.9988.0
  misc_feature: Variant of the nucleotide sequence at SEQ ID NO 3944
catacctctcaagtcagcattcgtcttcacttcatcgcttatcaaaattatacaatatagataatccaaattttccaaggcgaatatttcgtttcttgaacacccgttcttcgtattatttcacctcatctgccaaaatattcaccgctagctcgcgtctactgctggcaccttgctgacgttgctttgtcaacctacgaacgcgttctctttgtacgacggttgcgagaattaagtgctactttgaatcttgagaggaaactagacatatcccaatttcgttcttcctcttgctcgcagtgcggatcagctcatttgcctgaggctctcagacgagtgggcactttgagatggcggaaaagtatatcatccgtgtcacagcgggttctgactacaacatcgatcatcaggtagtggttcctgtaaactctccggagacaatcaagattagcaacgagctcattgatgcggaaatcaatgtcagggtgcagaactaccatggcctaccccgcaattcgccgacaacatctccctacttttctctagaaccacacaaaacgaacaacgatcagtacagccttgcaatacgtttcactccaaagaaaccagttaataatccccggaaaggcgcaggtcaagcacacgctgcgtcagacgggggtcaggcagctcagcaagacgagtcggaagcggggcattctgcagcggggcaggcgccaaatgcgactgacaacaccgataattcaacctcagagactggcatctcaggtcatgatctccaattcggtaacgacttcgatcatgctatcagagatagactaccaccaggcttcagctatgcgatgaacatagtgaaatggtggattgacccgggtctcgacggcgacccgtatgccgacatgccgtatctatacgggcctggattgtcttcgttcaatgctattcatgtcggaaagggagacttcgattctgaaaagggcggcctctctttcgaggaaggaggtgatgaagcaggcatgcaagcacgtcacgatactggagcacctgacagcgcaaaagaccgcaagaaatgggctttgaataacgacagcaaggacaaatggatatatgagtacggcaagacctactgtgttgatttcttcaacccttatctcgatttcaacgaatttgcgttgcgactaccaggttttacggtgccgattatgaaatactgggatggccagggcctcagatacgtgcttcgcaaccgatcgacgaacgacacgtaccttgtcatcctattcacgctgtacctcaaagaagacgtcaatgaagacggctctctcaagcctgccgcgcttgaggcaactcgcgaagataagctaatggcgatcgaggctgggaaaatggccgatgatagtggattggccaaggaggagcctgcaacaacgactggcggggatgatgatgtggactaagcacgcttgtaatctacggacgtgcgaaaaaatcggtagtacttgctatagatcagtctcagaccagtgtcctatattttgccctgggccaacaaccataatgaatagacgacaggtttcaaccccttcatatgccca

SEQ ID NO: 3947 - DNA, 1107 bp, Muscodor strobelii
  misc_feature: SGI cDNA ID NO. 560988
  misc_feature: Reduced expression when VOC is produced
  misc_feature: Encodes the peptide sequence at SEQ ID NO 3948
atggcggaaaagtatatcatccgtgtcacagcgggttctgactacaacatcgatcatcaggtagtggttcctgtaaactctccggagacaatcaagattagcaacgagctcattgatgcggaaatcaatgtcagggtgcagaactaccatggcctaccccgcaattcgccgacaacatctccctacttttctctagaaccacacaaaacgaacaacgatcagtacagccttgcaatacgtttcactccaaagaaaccagttaataatccccggaaaggcgcaggtcaagcacacgctgcgtcagacgggggtcaggcagctcagcaagacgagtcggaagcggggcattctgcagcggggcaggcgccaaatgcgactgacaacaccgataattcaacctcagagactggcatctcaggtcatgatctccaattcggtaacgacttcgatcatgctatcagagatagactaccaccaggcttcagctatgcgatgaacatagtgaaatggtggattgacccgggtctcgacggcgacccgtatgccgacatgccgtatctatacgggcctggattgtcttcgttcaatgctattcatgtcggaaagggagacttcgattctgaaaagggcggcctctctttcgaggaaggaggtgatgaagcaggcatgcaagcacgtcacgatactggagcacctgacagcgcaaaagaccgcaagaaatgggctttgaataacgacagcaaggacaaatggatatatgagtacggcaagacctactgtgttgatttcttcaacccttatctcgatttcaacgaatttgcgttgcgactaccaggttttacggtgccgattatgaaatactgggatggccagggcctcagatacgtgcttcgcaaccgatcgacgaacgacacgtaccttgtcatcctattcacgctgtacctcaaagaagacgtcaatgaagacggctctctcaagcctgccgcgcttgaggcaactcgcgaagataagctaatggcgatcgaggctgggaaaatggccgatgatagtggattggccaaggaggagcctgcaacaacgactggcggggatgatgatgtggactaa

SEQ ID NO: 3948 - protein, 368 aa, Muscodor strobelii
  misc_feature: SGI Peptide ID NO. 560988
  misc_feature (140)..(195): Pfam Id: PF08588 Pfam Desc: Domain of function (DUF1769)
  misc_feature (1)..(334): NCBI GI: 116203883 Blast Desc: CHGG_09825 [Chaetomium globosum CBS 148.51] gi|88175953|gb|EAQ83421.1| CHGG_09825 [Chaetomium globosum CBS 148.51]
  misc_feature (1)..(352): NCBI GI: 256724696 Blast Desc: NECHADRAFT_48207 [Nectria haematococca mpVI 77-13-4]
  misc_feature (1)..(355): NCBI GI: 46126265 Blast Desc: FG07510.1 [Gibberella zeae PH-1]
  misc_feature (1)..(351): NCBI GI: 39940672 Blast Desc: MGG_04904 [Magnaporthe grisea 70-15] gi|145010863|gb|EDJ95519.1| MGG_04904 [Magnaporthe grisea 70-15]
  misc_feature (1)..(349): NCBI GI: 171681563 Blast Desc: protein product [Podospora anserina] gi|170940740|emb|CAP65968.1| protein product [Podospora anserina]
  misc_feature (1)..(356): NCBI GI: 156057941 Blast Desc: SS1G_04702 [Sclerotinia sclerotiorum 1980] gi|154702487|gb|EDO02226.1| SS1G_04702 [Sclerotinia sclerotiorum 1980]
  misc_feature (1)..(326): NCBI GI: 154323316 Blast Desc: BC1G_00057 [Botryotinia fuckeliana B05.10] gi|150842286|gb|EDN17479.1| BC1G_00057 [Botryotinia fuckeliana B05.10]
  misc_feature (3)..(333): NCBI GI: 85089631 Blast Desc: NCU09451 [Neurospora crassa OR74A] gi|28919348|gb|EAA28801.1| conserved [Neurospora crassa OR74A]
  misc_feature (2)..(326): NCBI GI: 258577239 Blast Desc: conserved [Uncinocarpus reesii 1704] gi|237903067|gb|EEP77468.1| conserved [Uncinocarpus reesii 1704]
  misc_feature (2)..(315): NCBI GI: 121699050 Blast Desc: conserved [Aspergillus clavatus NRRL 1] gi|119396035|gb|EAW06467.1| conserved [Aspergillus clavatus NRRL 1]
  misc_feature: Useful for introducing or modulating the production of volatile compounds
MAEKYIIRVTAGSDYNIDHQVVVPVNSPETIKISNELIDAEINVRVQNYHGLPRNSPTTSPYFSLEPHKTNNDQYSLAIRFTPKKPVNNPRKGAGQAHAASDGGQAAQQDESEAGHSAAGQAPNATDNTDNSTSETGISGHDLQFGNDFDHAIRDRLPPGFSYAMNIVKWWIDPGLDGDPYADMPYLYGPGLSSFNAIHVGKGDFDSEKGGLSFEEGGDEAGMQARHDTGAPDSAKDRKKWALNNDSKDKWIYEYGKTYCVDFFNPYLDFNEFALRLPGFTVPIMKYWDGQGLRYVLRNRSTNDTYLVILFTLYLKEDVNEDGSLKPAALEATREDKLMAIEAGKMADDSGLAKEEPATTTGGDDDVD

SEQ ID NO: 3949 - DNA, 1595 bp, Muscodor strobelii; identical to SEQ ID NO: 3946
  misc_feature: SGI EST ID NO. CUFF.9988.0
  misc_feature: Variant of the nucleotide sequence at SEQ ID NO 3947

SEQ ID NO: 3950 - DNA, 2454 bp, Muscodor strobelii
  misc_feature: SGI cDNA ID NO. 560989
  misc_feature: Encodes the peptide sequence at SEQ ID NO 3951
atgcataaaggcaattcggaagacaaggacaaagccgcctcgtctagcatgacacagcgggctgccttcgcctcgctgcgaccgcagcccttgcccacaactacagctggcggcgcccaggttcttcgcgggattgcaagagccgccgtatcacttgcctctcccctagactttaaacccaaattccggcacaaggatcccctcgtcgttacatttgcccaaaaggagatcgacgagaagaccgacgaaatggtctcaaagaagagagccggcaagcgagccggaaagaaatctggcaacgtgcagggttccagtacagacgagtggtctgaggaccgaattacgaagtgggccatgtccggtgaagatatttatgaggaggctagtaacaatactaccggctctgccctcctgggtggtagcactcagtacaccaacgctgccatgggtggcgctgttggaaacaacatgaaccaggcaccgatgggtaccatgggatttgctgattacggtaccaatgacgtctcctccaacttgaacgatatgaactatggtaattacccgtcctccttcaaccaccatggccaaagcaacggtcattggcccaacccataccagcagggtactggcgtgaacgctggcaacccgggtgtgtacgaccagcagactcgagactacgcacgacgcaacatgatgtcgccgtatcctcgctataccaacatggacttcgctttgtctgctttccccggtggtcccgacaatgatctcgatcttgctggccccaattctgtctccgccaacaacacctctttctttcaggatccccatggcggtaagagcgctctcgcctctgatggcccaactgccggccgtgctcgccctcgcagctcgactgtcctgccagagtctgaaccgggaagtctcaacctgtcgggctccttctctaccggtattgacccggcaacccagtctgcgcctgcccaggaactcagcgactacgacccttttgccctcgggtttgaactgaagactcccccccgcagcttcaatgataactctgaacagtctttcgtctcttatggaagcaatgatgcaatgtctttcggagatcccacgtttggcggcaatagcatcatgtttgaccccatgcttgagttcgaacctggcatgactggcccgatgctcgacgacaacaacaattccatgttcggtatgttcggcaaccacgacggcgctgctgaccctatgttcgccgacatccaagacaacaaccagggcacagttgctcaacatcaagacaccgctgaacagcaattcggtcagggaaaccacaacatcaacaacgcctatcccgttgccgacaacgatggcgccatgggttccctccctattacctcagctgagcctcaccaagttgttgcacaagacgccaatggccagatcaacgttcccaacaacaaccacaatgctgacggtgtcacatctggtgatcacggaggagctgagtctgcatctgtacctaatgctcccaatgctcccgataatcccgatgctcctgctattcccggtgctcctggtgctcctgatgttcctgatgctcgtcgagcccccagtgctcccatcgtggatgacgcatctgtttttccagtcgccccagtcgcccaagtcgccactgccgccactgccgccactgccgccactgctgccactgctgccactgtccctcctagtgatcctcgtggcttcgacaatgccgaggattccgaatcgactgtgagctccagtgatgaagaagacgacggtgtggaggtcatcaatactcccatctcggttcagcctggcgaagagggatgtcccgatgttttcgatgccgacgtggtcgaggccatcgtcgagaagtgtcgcgagtacaaggcacttggacagccccagttcaacaaccctcataacattttcatgttccatcagatcttcttggcccagaagatgtatcgcgatgggtactacaaaggtcccttcctcttgatgaagggcatcattgccaggattgatgaaaacggcaggttcaacgcgcccgacgcgactctccgacggtacgaagatggcttcacttggttcaagatcagtcccgtgacgatgcaagtcaccaacgagcttcttggcaacttcgccgagctctacccggaatatctcgacctcgtggcgttcatgcagagccagcttgagcctaactattctgtcgtcgaggattacatcaaccaagtcgcgcccaacgatgtctacgagcgtgcgcttaacaaatgcctccgcatggagatccccttccacgagatgctcactcccgtcatctgggatcccattatcgacgaggacgatgaagatgaggaggacgatgaggttcattatgggtatgacgatgaggacgattgggaggatgacgatgactacgagtaa

SEQ ID NO: 3951 - protein, 817 aa, Muscodor strobelii
  misc_feature: SGI Peptide ID NO. 560989
MHKGNSEDKDKAASSSMTQRAAFASLRPQPLPTTTAGGAQVLRGIARAAVSLASPLDFKPKFRHKDPLVVTFAQKEIDEKTDEMVSKKRAGKRAGKKSGNVQGSSTDEWSEDRITKWAMSGEDIYEEASNNTTGSALLGGSTQYTNAAMGGAVGNNMNQAPMGTMGFADYGTNDVSSNLNDMNYGNYPSSFNHHGQSNGHWPNPYQQGTGVNAGNPGVYDQQTRDYARRNMMSPYPRYTNMDFALSAFPGGPDNDLDLAGPNSVSANNTSFFQDPHGGKSALASDGPTAGRARPRSSTVLPESEPGSLNLSGSFSTGIDPATQSAPAQELSDYDPFALGFELKTPPRSFNDNSEQSFVSYGSNDAMSFGDPTFGGNSIMFDPMLEFEPGMTGPMLDDNNNSMFGMFGNHDGAADPMFADIQDNNQGTVAQHQDTAEQQFGQGNHNINNAYPVADNDGAMGSLPITSAEPHQVVAQDANGQINVPNNNHNADGVTSGDHGGAESASVPNAPNAPDNPDAPAIPGAPGAPDVPDARRAPSAPIVDDASVFPVAPVAQVATAATAATAATAATAATVPPSDPRGFDNAEDSESTVSSSDEEDDGVEVINTPISVQPGEEGCPDVFDADVVEAIVEKCREYKALGQPQFNNPHNIFMFHQIFLAQKMYRDGYYKGPFLLMKGIIARIDENGRFNAPDATLRRYEDGFTWFKISPVTMQVTNELLGNFAELYPEYLDLVAFMQSQLEPNYSVVEDYINQVAPNDVYERALNKCLRMEIPFHEMLTPVIWDPIIDEDDEDEEDDEVHYGYDDEDDWEDDDDYE

SEQ ID NO: 3952 - DNA, 1440 bp, Muscodor strobelii
  misc_feature: SGI cDNA ID NO. 560990
  misc_feature: Encodes the peptide sequence at SEQ ID NO 3953
atggcgaaccttgttgagatctcgtctgaaaaggcatcacagcttcttcggaaatgttggcctgagcaatctgccactgatttggcacagcggggcagtgcggaggacatgatcaaacaaatcaggatcgcggagaaaagggtcattttctactcccaggtcttagacatcctcgctcaacaccacccagaatacgtgtctcttgtatggggggcctttaagcttactttcatggctgttttgaatcacgagactatgatcaaagagctggccaaggcaatgacacaaatcgcagatgctgtcaaaactgtgcagacacaacggcttctatatcccagtgccgaaatctcccagtgctgctcagagctgtacgctcatataatgatcttcgcgacccgagccatcgaatggtatgagaagggtaaaatcgcccatgtggttgcggcactcactagtcccttccagcttaaattccgagatattgtcgatgagatccacggcataagtcgaaaaattgaccgtcttacgatggttgaaaatcaggcagagatacgacagatccacgagaaactcatctgtacgcaaaaagaacttaaagcagcacagctagagagacgcagcatgtaccatctattaaccgaagtacgtgggtttgttctacagtatggacagctgaaccaggctggaatcctagatacaaatcagaagctgtcacaagtacaactctcacagatcttatctttcatgtcgacctcgcgcatcccacgagcggatctagtgaaacagggctacgccaggcgaagcaaccaacggcgaaaacaaggaatcgaggcattgggatatcagccatggatctcgcaaatccaagcctggggcgagatgaagatctcaggacagatattcatccaaggatctttcaagactcgacatacagcccgagacttcgcagttgatgccatcgacttgatcactgaggcaggcattcccgtaatatgggcattggacccaagtgccgagtcattacctacagcccagttcaacgcctgcgatgtacttaaatacttggcataccaagttttgaagtctgatggaatcatacaaacagagaagtatgcttcactcaatgcagctcgattccaaagcgcaacaacggagaccgaatgggttgacatccttgcctgcgtgctgcaaggcgtcggccaaatctacatcattgtagacacgaatcttgtagcacgagcaggtagcgctatcttaccttggctagaatatttctcagctatagagaacactcttgtgtctcgaaatattcaaattgtcattaaagtcgctttcgttagtacctgcaagtccgagagcgggtccatgccccagaatatgaagttgctctgcaacaagacaactaagggtacttacaagggcccagagcttagcacgtaa

SEQ ID NO: 3953 - protein, 479 aa, Muscodor strobelii
  misc_feature: SGI Peptide ID NO. 560990
  misc_feature (48)..(412): NCBI GI: 256726536 Blast Desc: NECHADRAFT_39343 [Nectria haematococca mpVI 77-13-4]
  misc_feature (47)..(447): NCBI GI: 145609736 Blast Desc: MGG_03034 [Magnaporthe grisea 70-15] gi|145017126|gb|EDK01489.1| MGG_03034 [Magnaporthe grisea 70-15]
  misc_feature (47)..(447): NCBI GI: 149210699 Blast Desc: MGCH7_ch7g822 [Magnaporthe grisea 70-15] gi|86196777|gb|EAQ71415.1| MGCH7_ch7g822 [Magnaporthe grisea 70-15]
  misc_feature (79)..(417): NCBI GI: 116204351 Blast Desc: CHGG_10059 [Chaetomium globosum CBS 148.51] gi|88176187|gb|EAQ83655.1| CHGG_10059 [Chaetomium globosum CBS 148.51]
  misc_feature (47)..(423): NCBI GI: 169604254 Blast Desc: SNOG_05138 [Phaeosphaeria nodorum SN15] gi|160706528|gb|EAT87529.2| SNOG_05138 [Phaeosphaeria nodorum SN15]
  misc_feature (94)..(448): NCBI GI: 46105202 Blast Desc: FG00229.1 [Gibberella zeae PH-1]
  misc_feature (49)..(446): NCBI GI: 189205346 Blast Desc: conserved [Pyrenophora tritici-repentis Pt-1C-BFP] gi|187986107|gb|EDU51595.1| conserved [Pyrenophora tritici-repentis Pt-1C-BFP]
  misc_feature (41)..(411): NCBI GI: 115449839 Blast Desc: [Aspergillus terreus NIH2624] gi|114187658|gb|EAU29358.1| [Aspergillus terreus NIH2624]
  misc_feature (51)..(457): NCBI GI: 256725710 Blast Desc: NECHADRAFT_81705 [Nectria haematococca mpVI 77-13-4]
  misc_feature (55)..(191): NCBI GI: 171685450 Blast Desc: protein product [Podospora anserina] gi|170942686|emb|CAP68339.1| protein product [Podospora anserina]
MANLVEISSEKASQLLRKCWPEQSATDLAQRGSAEDMIKQIRIAEKRVIFYSQVLDILAQHHPEYVSLVWGAFKLTFMAVLNHETMIKELAKAMTQIADAVKTVQTQRLLYPSAEISQCCSELYAHIMIFATRAIEWYEKGKIAHVVAALTSPFQLKFRDIVDEIHGISRKIDRLTMVENQAEIRQIHEKLICTQKELKAAQLERRSMYHLLTEVRGFVLQYGQLNQAGILDTNQKLSQVQLSQILSFMSTSRIPRADLVKQGYARRSNQRRKQGIEALGYQPWISQIQAWGEMKISGQIFIQGSFKTRHTARDFAVDAIDLITEAGIPVIWALDPSAESLPTAQFNACDVLKYLAYQVLKSDGIIQTEKYASLNAARFQSATTETEWVDILACVLQGVGQIYIIVDTNLVARAGSAILPWLEYFSAIENTLVSRNIQIVIKVAFVSTCKSESGSMPQNMKLLCNKTTKGTYKGPELST

SEQ ID NO: 3954 - DNA, 939 bp, Muscodor strobelii
  misc_feature: SGI cDNA ID NO. 560991
  misc_feature: Elevated expression when VOC is produced
  misc_feature: Encodes the peptide sequence at SEQ ID NO 3955
atggagaactcaacacccccaagccgtcgctttctgctgacagcacccctctttgtatggggattccacttcaacgaaaaactttggaaaaaactcgcaatcgcacatgtcagcgacgttgattgggacgggcaagcatttgataatcttgtcttggacccagattgtaaagacgtaatacaatcattagttgctactaaagtcaagaactccgtatctacggatctcattcgtagcaagggaaatgggataattatacttctgcacggaccccccggaacaggaaaaacgctgacggcagagagcgtggccgagcacgccaaaagacctctctatagagtcacatgtggcgacattggaacgaaacccgaagctgttgagaaataccttaagaacgtactgacgcttggaaaatcttgggattgtgtcattctcctggatgaggcggaggtttttctccaagagagatccttggaggatatcgagagaaacgcactggtatccgtgttcctgcggcaccttgaatattacgatggtattttgatactcactagcaatcgtgttgggactattgacgagggattccgctcccgcattcagttagcaatacactacccaaaattggagcaaccagaaaggcgaagaatatgggatatattcgtcagtcgactcaacgacgaccctatcgcatcactggatatcgatgttcgtaatcttcgctccaacctcaccgagctatccaaattcaaccttaacggtcgtgaaataagaaactcgattaacgtagctcgacctctagcgaaggccgaagagaggaaagtggactttgattcgttgagaaaagtgataagagttcaacagaagtttggaggatacgtcaaagatatgaacgagggtttagacgatgagctagttgcaagagaagtagggaagcgatga

SEQ ID NO: 3955 - protein, 312 aa, Muscodor strobelii
  misc_feature: SGI Peptide ID NO. 560991
  misc_feature (85)..(272): Pfam Id: PF00004 Pfam Desc: ATPase family associated with various cellular activities (AAA)
  misc_feature (1)..(312): NCBI GI: 46105200 Blast Desc: FG00228.1 [Gibberella zeae PH-1]
  misc_feature (1)..(312): NCBI GI: 171685452 Blast Desc: protein product [Podospora anserina] gi|170942687|emb|CAP68340.1| protein product [Podospora anserina]
  misc_feature (1)..(312): NCBI GI: 169619754 Blast Desc: SNOG_13075 [Phaeosphaeria nodorum SN15] gi|111058282|gb|EAT79402.1| SNOG_13075 [Phaeosphaeria nodorum SN15]
  misc_feature (6)..(312): NCBI GI: 212545270 Blast Desc: conserved [Penicillium marneffei ATCC 18224] gi|210065758|gb|EEA19852.1| conserved [Penicillium marneffei ATCC 18224]
  misc_feature (1)..(312): NCBI GI: 169615523 Blast Desc: SNOG_10919 [Phaeosphaeria nodorum SN15] gi|160702979|gb|EAT81418.2| SNOG_10919 [Phaeosphaeria nodorum SN15]
  misc_feature (10)..(312): NCBI GI: 115449835 Blast Desc: [Aspergillus terreus NIH2624] gi|114187657|gb|EAU29357.1| [Aspergillus terreus NIH2624]
  misc_feature (1)..(299): NCBI GI: 255932979 Blast Desc: Pc12g11420 [Penicillium chrysogenum Wisconsin 54-1255] gi|211582579|emb|CAP80769.1| Pc12g11420 [Penicillium chrysogenum Wisconsin 54-1255]
  misc_feature (1)..(312): NCBI GI: 212545829 Blast Desc: conserved [Penicillium marneffei ATCC 18224] gi|210064588|gb|EEA18683.1| conserved [Penicillium marneffei ATCC 18224]
  misc_feature (11)..(312): NCBI GI: 46133953 Blast Desc: FG09116.1 [Gibberella zeae PH-1]
  misc_feature (80)..(312): NCBI GI: 154293402 Blast Desc: BC1G_14327 [Botryotinia fuckeliana B05.10] gi|150845308|gb|EDN20501.1| BC1G_14327 [Botryotinia fuckeliana B05.10]
  misc_feature (41)..(274): SWISSPROT Homolog: EC 3.6.4.6 Vesicle-fusing ATPase
  misc_feature: Useful for introducing or modulating the production of volatile compounds
MENSTPPSRRFLLTAPLFVWGFHFNEKLWKKLAIAHVSDVDWDGQAFDNLVLDPDCKDVIQSLVATKVKNSVSTDLIRSKGNGIIILLHGPPGTGKTLTAESVAEHAKRPLYRVTCGDIGTKPEAVEKYLKNVLTLGKSWDCVILLDEAEVFLQERSLEDIERNALVSVFLRHLEYYDGILILTSNRVGTIDEGFRSRIQLAIHYPKLEQPERRRIWDIFVSRLNDDPIASLDIDVRNLRSNLTELSKFNLNGREIRNSINVARPLAKAEERKVDFDSLRKVIRVQQKFGGYVKDMNEGLDDELVAREVGKR

SEQ ID NO: 3956 - DNA, 1712 bp, Muscodor strobelii
  misc_feature: SGI EST ID NO. CUFF.9953.0
  misc_feature: Variant of the nucleotide sequence at SEQ ID NO 3954
ctaatgcacaattacaggtgccagggaatttctacgttttgaagtctgaaagaggagaggcttacgatagatgttatacattgaaagagtggccgacattgacacagtcctggcgtagaaactcaaatttttccgatacacagtcatacatccttcaggttactcttcagcttcatctcgaggcatggcagtttgacgggaatttcatgcaaacatcctttaaaccgacatacaaaattgatttcaccagcaatacaaagccaatttccgcccttcccatgattcccttcaatctgatcagcgaagagagacaaaaggcctttcgcaccagaggagaaatgttttggtgctgtagaaaatcgaaattcgttacctatcatggctgggactttgatagattggaattttttagtcacgaaaggttcatgattgactctgagaagagcaggggactctacagatacaatgaaaagcacccgaaagtaccactggatgaattagaggatcaccttggcccatcggcgatggagaactcaacacccccaagccgtcgctttctgctgacagcacccctctttgtatggggattccacttcaacgaaaaactttggaaaaaactcgcaatcgcacatgtcagcgacgttgattgggacgggcaagcatttgataatcttgtcttggacccagattgtaaagacgtaatacaatcattagttgctactaaagtcaagaactccgtatctacggatctcattcgtagcaagggaaatgggataattatacttctgcacggaccccccggaacaggaaaaacgctgacggcagagagcgtggccgagcacgccaaaagacctctctatagagtcacatgtggcgacattggaacgaaacccgaagctgttgagaaataccttaagaacgtactgacgcttggaaaatcttgggattgtgtcattctcctggatgaggcggaggtttttctccaagagagatccttggaggatatcgagagaaacgcactggtatccgtgttcctgcggcaccttgaatattacgatggtaggcatggtcgcgactggtctcctataccagatccatggtggccttttgaaaaggcgaatatttgtctcccttcattagtaactaaatttgagatgtcgcaggtattttgatactcactagcaatcgtgttgggactattgacgagggattccgctcccgcattcagttagcaatacactacccaaaattggagcaaccagaaaggcgaagaatatgggatatattcgtcagtcgactcaacgacgaccctatcgcatcactggatatcgatgttcgtaatcttcgctccaacctcaccgagctatccaaattcaaccttaacggtcgtgaaataagaaactcgattaacgtagctcgacctctagcgaaggccgaagagaggaaagtggactttgattcgttgagaaaagtgataagagttcaacagaagtttggaggatacgtcaaagatatgaacgagggtttagacgatgagctagttgcaagagaagtagggaagcgatgatactcaagtttgttgtgacactgtggcatcgatctagaagtccaggactggctatgtgaatttctttccagtagtcaattcaaatgatttagaagctgtacctgtccgcgtcatactcttccgtgctgtttcgtggggcactcgg

SEQ ID NO: 3957 - DNA, 1833 bp, Muscodor strobelii
  misc_feature: SGI cDNA ID NO. 560992
  misc_feature: Elevated expression when VOC is produced
  misc_feature: Encodes the peptide sequence at SEQ ID NO 3958
atgaacacacaaatggaccatggcccgtcgccctacgatgccttacctggcccgcgacacacccggctgttgagactgcattcagcagtaaccgacgacgacctatcgatttatgacctttatacggtctctatcgacaactgcccagaattcgagtctctctcctatacatggggtagtccggaagagcctcggaaacgagtatcttgtgcgagtacaggctgcgagaccctcatccagcctagacttgaaagtgctctacgatgtttacgtccgtcttcaggcactcgcatgctttgggttgatgctttatgcatcaatcaggcagattatgccgagcgcagcatccaggttaagttgatgtgtgacatcttctcccaggctgccaggaccatagtttggtttggcgacgacccgactggtgatggccgtcgtgcgatccctgtcctcgagcgaatcgcacgggagctggactccctcggcccaccagaagagttccaaatagttcgcaatcgcgagatcgaatatgagcgattcgacaaatgggtcaaagatgcgaatttgacgcgcgacgactgggcttctgtgagctgcttcttcgagttcccttggtttggccgcgcatgggtcgtgcaggagttgattctctctaaacatcccgttgtcttcctcggtgatatgacaatcgactgggagattgtgcagagagccattttgccccttggcgtatttggcgcgcatctgaacctattcccacctgaagcaacgacatccgtccaccacacatacaatgcgttgtcgctgtgtgatttccggcgggtgtggctcaatggaccagacaacatttcgagtctctctcttgtgctctcaaattccaaatgcgcctgcttggatcatcgtgataggctcttttccagtattggattggtgcgcagcagtgagaagttcgggctgtcgcaactcatcgactaccaggcttcgcttgagacattggcattagggtgggctaatgtcatactaccgcaagaaggccttcatcggctgcttgctgtgaacaatcttcagcccttagacgaccgttttcgatcttggttacccaacatcttcgccctggaacaaggtaccatggaagctatgcgcatcgcgatgcaagtacaaccactgtctcagccatctggatttatgatcaaatctgactctatgaccttggagctaacgggtaagttggtgggcaccgtggcggaggtgggcaagctcccgtatagagtcgtgtcgcgcgacacaaggctcgcggatcaagccgccggtaacccaccagggctcagcgagatgtcgtacatcctggatctcttggccgaaggcaccactgtggcatgcggtgattcacgaccggaacctaagagtgacgaagagcgcgaagtaatagccacgttgctcagagtcctctgtttggggcatatgcccgtgttctgctcctcttttgccacaatctggcagactgggatccatggaaatggcactgacgatgttgtgttgatttcaggtcttgtttggcctttgatatttcccttcgtggaacagtttcaacgctattgtgagggttctatcaataggatgctattccgtactcgtatgggaaaggtgggcgtcgctccgaggcatgcgcaaccaggagactgcatatgtaagttcgagggcatcgacgtgctttatattttaaggttctacgacgaagggcgttatcatttcatcggcgattgctttgtcgatgatgtggacatgcagcgtatagaagaggccgatcgaccgaagtacacttttgtcttggtatag

SEQ ID NO: 3958 - protein, 610 aa, Muscodor strobelii
  misc_feature: SGI Peptide ID NO. 560992
  misc_feature (51)..(213): Pfam Id: PF06985 Pfam Desc: Heterokaryon incompatibility protein (HET)
  misc_feature (12)..(610): NCBI GI: 256721216 Blast Desc: NECHADRAFT_101059 [Nectria haematococca mpVI 77-13-4]
  misc_feature (18)..(599): NCBI GI: 256731925 Blast Desc: NECHADRAFT_80792 [Nectria haematococca mpVI 77-13-4]
  misc_feature (12)..(367): NCBI GI: 116182272 Blast Desc: CHGG_01764 [Chaetomium globosum CBS 148.51] gi|88186061|gb|EAQ93529.1| CHGG_01764 [Chaetomium globosum CBS 148.51]
  misc_feature (12)..(592): NCBI GI: 116198933 Blast Desc: CHGG_07622 [Chaetomium globosum CBS 148.51] gi|88178901|gb|EAQ86369.1| CHGG_07622 [Chaetomium globosum CBS 148.51]
  misc_feature (5)..(610): NCBI GI: 256723640 Blast Desc: NECHADRAFT_52036 [Nectria haematococca mpVI 77-13-4]
  misc_feature (34)..(447): NCBI GI: 154311024 Blast Desc: BC1G_06630 [Botryotinia fuckeliana B05.10] gi|150851034|gb|EDN26227.1| BC1G_06630 [Botryotinia fuckeliana B05.10]
  misc_feature (19)..(590): NCBI GI: 238498684 Blast Desc: conserved [Aspergillus flavus NRRL3357] gi|220693851|gb|EED50196.1| conserved [Aspergillus flavus NRRL3357]
  misc_feature (1)..(367): NCBI GI: 46111023 Blast Desc: FG02393.1 [Gibberella zeae PH-1] gi|82779921|gb|ABB90278.1| heterokaryon incompatibility protein [Gibberella zeae]
  misc_feature (17)..(250): NCBI GI: 256731097 Blast Desc: NECHADRAFT_84995 [Nectria haematococca mpVI 77-13-4]
  misc_feature (12)..(589): NCBI GI: 39976177 Blast Desc: MGG_05985 [Magnaporthe grisea 70-15] gi|145011741|gb|EDJ96397.1| MGG_05985 [Magnaporthe grisea 70-15]
  misc_feature: Useful for introducing or modulating the production of volatile compounds
MNTQMDHGPSPYDALPGPRHTRLLRLHSAVTDDDLSIYDLYTVSIDNCPEFESLSYTWGSPEEPRKRVSCASTGCETLIQPRLESALRCLRPSSGTRMLWVDALCINQADYAERSIQVKLMCDIFSQAARTIVWFGDDPTGDGRRAIPVLERIARELDSLGPPEEFQIVRNREIEYERFDKWVKDANLTRDDWASVSCFFEFPWFGRAWVVQELILSKHPVVFLGDMTIDWEIVQRAILPLGVFGAHLNLFPPEATTSVHHTYNALSLCDFRRVWLNGPDNISSLSLVLSNSKCACLDHRDRLFSSIGLVRSSEKFGLSQLIDYQASLETLALGWANVILPQEGLHRLLAVNNLQPLDDRFRSWLPNIFALEQGTMEAMRIAMQVQPLSQPSGFMIKSDSMTLELTGKLVGTVAEVGKLPYRVVSRDTRLADQAAGNPPGLSEMSYILDLLAEGTTVACGDSRPEPKSDEEREVIATLLRVLCLGHMPVFCSSFATIWQTGIHGNGTDDVVLISGLVWPLIFPFVEQFQRYCEGSINRMLFRTRMGKVGVAPRHAQPGDCICKFEGIDVLYILRFYDEGRYHFIGDCFVDDVDMQRIEEADRPKYTFVLV

SEQ ID NO: 3959 - DNA, 2540 bp, Muscodor strobelii
  misc_feature: SGI EST ID NO. CUFF.9956.0
  misc_feature: Variant of the nucleotide sequence at SEQ ID NO 3957
caaagctttctcaattaggagtgtattcagatatatactgtgagatgatgtgtaggtcatgctctatttttctagctgagaggtagtccggcttccgttgatgagatggccctgtttcggccgcaacactaagtgtccgagccgactcatccgaggacgcgctgggtgctgagataggaagtattcgcaataagcaagtcgtagatcttcctctcgtcaatcaagaggatttcaaagtttgacgaagggaaaggcagaaagacgccttggctgcatcaacaaccccgcaaatctccgccagcgtttattttgtggacgtaccctgccactacacagcccgttagagcaacacgctccatggaccgtgaggtcgcccatcgctcagtcctgagcttgcgctctgtgatgtgattatggcaatataatttcagatgttggtaacgggtcgtccattcttccgagcaatggaggaatagcaaacgtattgtctagagtcaatgacttctagtcatgaacacacaaatggaccatggcccgtcgccctacgatgccttacctggcccgcgacacacccggctgttgagactgcattcagcagtaaccgacgacgacctatcgatttatgacctttatacggtctctatcgacaactgcccagaattcgagtctctctcctatacatggggtagtccggaagagcctcggaaacgagtatcttgtgcgagtacaggctgcgagaccctcatccagcctagacttgaaagtgctctacgatgtttacgtccgtcttcaggcactcgcatgctttgggttgatgctttatgcatcaatcaggcagattatgccgagcgcagcatccaggttaagttgatgtgtgacatcttctcccaggctgccaggaccatagtttggtttggcgacgacccgactggtgatggccgtcgtgcgatccctgtcctcgagcgaatcgcacgggagctggactccctcggcccaccagaagagttccaaatagttcgcaatcgcgagatcgaatatgagcgattcgacaaatgggtcaaagatgcgaatttgacgcgcgacgactgggcttctgtgagctgcttcttcgagttcccttggtttggccgcgcatgggtcgtgcaggagttgattctctctaaacatcccgttgtcttcctcggtgatatgacaatcgactgggagattgtgcagagagccattttgccccttggcgtatttggcgcgcatctgaacctattcccacctgaagcaacgacatccgtccaccacacatacaatgcgttgtcgctgtgtgatttccggcgggtgtggctcaatggaccagacaacatttcgagtctctctcttgtgctctcaaattccaaatgcgcctgcttggatcatcgtgataggctcttttccagtattggattggtgcgcagcagtgagaagttcgggctgtcgcaactcatcgactaccaggcttcgcttgagacattggcattagggtgggctaatgtcatactaccgcaagaaggccttcatcggctgcttgctgtgaacaatcttcagcccttagacgaccgttttcgatcttggttacccaacatcttcgccctggaacaaggtaccatggaagctatgcgcatcgcgatgcaagtacaaccactgtctcagccatctggatttatgatcaaatctgactctatgaccttggagctaacgggtaagttggtgggcaccgtggcggaggtgggcaagctcccgtatagagtcgtgtcgcgcgacacaaggctcgcggatcaagccgccggtaacccaccagggctcagcgagatgtcgtacatcctggatctcttggccgaaggcaccactgtggcatgcggtgattcacgaccggaacctaagagtgacgaagagcgcgaagtaatagccacgttgctcagagtcctctgtttggggcatatgcccgtgttctgctcctcttttgccacaatctggcagactgggatccatggaaatggcactgacgatgttgtgttgatttcaggtcttgtttggcctttgatatttcccttcgtggaacagtttcaacgctattgtgagggttctatcaataggatgctattccgtactcgtatgggaaaggtgggcgtcgctccgaggcatgcgcaaccaggagactgcatatgtaagttcgagggcatcgacgtgctttatattttaaggttctacgacgaagggcgttatcatttcatcggcgattgctttgtcgatgatgtggacatgcagcgtatagaagaggccgatcgaccgaagtacacttttgtcttggtatagcatagaaagagccagaagcagagttgcgcttgcgctcgactgaacccttatcggatcttccgaaacgcgtggtatattgctaatttcccagcgtaacaaggaatgatgaaacagcaagacccattgctggggaatcatcgcgtttttgaactcctcgcaattgatgcgatcatattgacataatgtgctgctgttcc

SEQ ID NO: 3960 - DNA, 1860 bp, Muscodor strobelii
  misc_feature: SGI cDNA ID NO. 560993
  misc_feature: Encodes the peptide sequence at SEQ ID NO 3961
atggctgctttaaataagatcgcagatgagttgatcgaactaggacaattcgcaaatcctaacgaggttccttacgatactccattcctttcatcatgggacgatatcaaacacgagaaaacattggaacttatttacgaagaagatggctatttttcatgtatgaaacttgccagcaatgggcgaagtagcacgtttggcaaaccgccgccggcgtcggagatttcgcgcacacacgttgttcagttgaaacctggacagtggatcgagggattcgagatgactttaggtgatccgattgagagccgcatcgcggggccagtcggtatcgtgaatgtcgacgtttggatctgtggcgcggaagttgagcgaggtagttaccgcccagaaggtcgtctcaaacggctcttcgttccagcagatggaaatgttcttgtgggagttcgcggaacgtctaagggtgataggaccaattcgtttgcccttatccaaggcgagggaaaccagggacttcagaggagagccaccaacgacgagtttacgcgcaatctgttgtggcgtaacggtctgccaccacctcatattcgcgtccatcccgatagtatcaaatggcttcaaagtgatcagcgaaattgtcttcaaatggaagctctgcttttcggtactgatgaagctcacgacgatccaaagaccagtgccgaccgcttgacacgaatatcggcttcaggtgatgcaagtcgtatcgagctcaccttcacaggcgaggctagaggacaagcgacgacgactcgagcaattggaagtcctagtatcggaaacatcatcatcaagtctctcaaaaacatggagatagacggacccggcggcgatattatcacttcggtgctcctacctccaatgccggagggcgggatgtttgactcttggttcacgccgctgtggtttggcatagtaacgaagcacggtaaacaagccatctttggggaggcgtcgaccatcagcaaagctcgtcttcttgaaccacctccgggatacgcaatcgtgggtctttttgttagtccagcgtttatgcaatactcaactgttggcgtgttgattgcaccaacagcttctgtaccttcgacacctcagatcgctcgagatgagctaggacgtatctgggatcaaacgccagccccttcgaactggagtctttgcggcttatgcatcggcaataaagacacagatttcagagtaaatgaccatgccgagttcaaagatgccagtagtgagatggcaatctgcttagatctatcgcagccagttgtctgtttccgaggtctctatgccgcgccgtattggtgtcatctaactcagcttggtggcttcgagctacagttcgcgaacaattcaagctgcttcatcggcataccccttaacagcgacaaaatccctttacacgaggaagtcagctatgaagacgcacgtgcaggacttactacggtaccagctgaaggtccgcgaatcatcggatcaaaagtccacgtcgatacgcccagcaaagcgattcagcagaacgacgggccgggcaagagctggcaacctaacggagaaacgggcgttcgaatcgttgctgtccacgtctggggtgagggatacttacatggtatacagttcgaaatggagaatgggagattctccccgaaatggggaaaagcgggcggcgagccatctgtctctttcaggacaagtattgcaactgaagcgagtagcaaatcagtcaccggagtcgtgggcttgaaatttgttgttcggcaacctaacggctggggaggtgatgcgcctagcccagtggcggttcaggcatatacacgcaactag

SEQ ID NO: 3961 - protein, 619 aa, Muscodor strobelii
  misc_feature: SGI Peptide ID NO. 560993
MAALNKIADELIELGQFANPNEVPYDTPFLSSWDDIKHEKTLELIYEEDGYFSCMKLASNGRSSTFGKPPPASEISRTHVVQLKPGQWIEGFEMTLGDPIESRIAGPVGIVNVDVWICGAEVERGSYRPEGRLKRLFVPADGNVLVGVRGTSKGDRTNSFALIQGEGNQGLQRRATNDEFTRNLLWRNGLPPPHIRVHPDSIKWLQSDQRNCLQMEALLFGTDEAHDDPKTSADRLTRISASGDASRIELTFTGEARGQATTTRAIGSPSIGNIIIKSLKNMEIDGPGGDIITSVLLPPMPEGGMFDSWFTPLWFGIVTKHGKQAIFGEASTISKARLLEPPPGYAIVGLFVSPAFMQYSTVGVLIAPTASVPSTPQIARDELGRIWDQTPAPSNWSLCGLCIGNKDTDFRVNDHAEFKDASSEMAICLDLSQPVVCFRGLYAAPYWCHLTQLGGFELQFANNSSCFIGIPLNSDKIPLHEEVSYEDARAGLTTVPAEGPRIIGSKVHVDTPSKAIQQNDGPGKSWQPNGETGVRIVAVHVWGEGYLHGIQFEMENGRFSPKWGKAGGEPSVSFRTSIATEASSKSVTGVVGLKFVVRQPNGWGGDAPSPVAVQAYTRN

SEQ ID NO: 3962 - DNA, 2805 bp, Muscodor strobelii
  misc_feature: SGI EST ID NO. CUFF.9959.0
  misc_feature: Variant of the nucleotide sequence at SEQ ID NO 3960
atcattgagctgttggacagccctcatgttattcaagataatcctcctcaagcgaagtcttcaccagcgatggatctagagtgggaataacactgttatgcttcaactgtcagtactttcagctatctagcacggtaattaatctattcatcctgtttgtcccctttgtgtcctcgtataggctcggagtccgacgcggaagggcaaatctttcagctgcagatgcactgactgggtcaacggtttctgcatatccattgatagtcgacggcaccttgacctcgcaaataggaagtccaggtagggaggtagccacccttgaacatttcgtttcgcaaccatttgcgggactagactaatgagctgaaaactgcgctatcacaaacctggcttttggctgttgaggtagtcgagaggtcgccaagacatagcggcaagatggtaggactaattgaagcgttcgtcctacgagagctatgtagaatcaagttacttattaggttggttccttgctccgtctagtctcatcagactcctagtgcttctatttgaacgcacgactgggctctctttctctctatatagagtcaaatccgcagagtattgcgaggtacttcaacttagattgagaacattattcgacaatggctgctttaaataagatcgcagatgagttgatcgaactaggacaattcgcaaatcctaacgaggttccttacgatactccattcctttcatcatgggacgatatcaaacacgagaaaacattggaacttatttacgaagaagatggctatttttcatgtatgaaacttgccagcaatgggcgaagtagcacgtttggcaaaccgccgccggcgtcggagatttcgcgcacacacgttgttcagttgaaacctggacagtggatcgagggattcgagatgactttaggtgatccgattgagagccgcatcgcggggccagtcggtatcgtgaatgtcgacgtttggatctgtggcgcggaagttgagcgaggtagttaccgcccagaaggtcgtctcaaacggctcttcgttccagcagatggaaatgttcttgtgggagttcgcggaacgtctaagggtgataggaccaattcgtttgcccttatccaaggcgagggaaaccagggacttcagaggagagccaccaacgacgagtttacgcgcaatctgttgtggcgtaacggtctgccaccacctcatattcgcgtccatcccgatagtatcaaatggcttcaaagtgatcagcgaaattgtcttcaaatggaagctctgcttttcggtactgatgaagctcacgacgatccaaagaccagtgccgaccgcttgacacgaatatcggcttcaggtgatgcaagtcgtatcgagctcaccttcacaggcgaggctagaggacaagcgacgacgactcgagcaattggaagtcctagtatcggaaacatcatcatcaagtctctcaaaaacatggagatagacggacccggcggcgatattatcacttcggtgctcctacctccaatgccggagggcgggatgtttgactcttggttcacgccgctgtggtttggcatagtaacgaagcacggtaaacaagccatctttggggaggcgtcgaccatcagcaaagctcgtcttcttgaaccacctccgggatacgcaatcgtgggtctttttgttagtccagcgtttatgcaatactcaactgttggcgtgttgattgcaccaacagcttctgtaccttcgacacctcagatcgctcgagatgagctaggacgtatctgggatcaaacgccagccccttcgaactggagtctttgcggcttatgcatcggcaataaagacacagatttcagagtaaatgaccatgccgagttcaaagatgccagtagtgagatggcaatctgcttagatctatcgcagccagttgtctgtttccgaggtctctatgccgcgccgtattggtgtcatctaactcagcttggtggcttcgagctacagttcgcgaacaattcaagctgcttcatcggcataccccttaacagcgacaaaatccctttacacgaggaagtcagctatgaagacgcacgtgcaggacttactacggtaccagctgaaggtccgcgaatcatcggatcaaaagtccacgtcgatacgcccagcaaagcgattcagcagaacgacgggccgggcaagagctggcaacctaacggagaaacgggcgttcgaatcgttgctgtccacgtctggggtgagggatacttacatggtatacagttcgaaatggagaatgggagattctccccgaaatggggaaaagcgggcggcgagccatctgtctctttcaggacaagtattgcaactgaagcgagtagcaaatcagtcaccggagtcgtgggcttgaaatttgttgttcggcaacctaacggctggggaggtgatgcgcctagcccagtggcggttcaggcatatacacgcaactagatttgagagtcgtcaacggcgaggatctatgggggcttgacaacttattacgtataacctgcaccgtccatcccgtgattagaaggggtgaggctttatcggagttcaagatccaatcccgtcttttagactttgtcacattctggatgtaaggttctttgggttacagagatgtattcgttctgtgaaggggccgaaaaacgattgcggctgttctaccaccacttaactcatttctgccatgtctgcaattccattgtggtgctcagaattttgatgaatcccaaagagatgtttgcta

SEQ ID NO: 3963 - DNA, 1188 bp, Muscodor strobelii
  misc_feature: SGI cDNA ID NO. 560994
  misc_feature: Encodes the peptide sequence at SEQ ID NO 3964
atgaatctttcaggagtggctagggcagctgtaccgctcgcgttattcattggcctctcgtggtcttttcttgctgctcgcttacactcagcctcattgttctaccaaaatgccccagcacggttcaaggagctcataaatatcccggaccccactatcaaattcagcgatcgcattcgcagctgcgaggatgtgatacttgttgagtctcgaagacttgcgattctcggctgcgatcccggccgtgagaggtggaacacagttatgggcatttttgagccagaaccagtgcccaacggagacttatatgtgtatgactacagcaaggtcgatgagctacttcatctgagattcgtcaatttcaaacatcagacgaattttcacaccttgggaatggcctatgatgaacacacttctacgttattcgtcgctaaccatcgtcgcaatgaccgccctgcgatcgaaatgtttaagctaggtcttgagcaacgaacagcaacgcatcttggctctattcaacatcccctgatccacggaccaaattccatcacgttgatcaatgaccatgaacttatggtcacaaacaacaattatttcccaatcaaagaccattggctcttgaatcgaatcgagacttatcttgcactccctttgggaactgtggtccgcgtcgattttgcagccatgctgaaggacccaaatgcgtctgtagatgctaaagtcatcgcccgtcttccttttgccaatggaattgagatgcttaatgagacgacatttgcagtcgcctcttctagcttaggctctgtacatatgtttgatctcacgacaagcaaagaactatcgcatttcagacttccatttaatccggacaatctctctgtgtccagtgacggcgctatcttcatcgcaggacatccccatatgccgacccttgcagaattttccatgacaaggcacatatgtaacgatcccaatgaactatcaaaagcagacgcaaagatgcaggagacttgcaagacattgtcagcgccatcttgggcggtgaggtggaccaaagaaggcggtgtcgaggatctttacgccagtacagagtacccgtcaagtgcctctgtggtatttgatgggacgagccgaaagggaatgatcaccggcttatatgccaaaggcattcttgtttgggacgcatga

SEQ ID NO: 3964 - protein, 395 aa, Muscodor strobelii
  misc_feature: SGI Peptide ID NO. 560994
  misc_feature (15)..(393): NCBI GI: 46127081 Blast Desc: FG07918.1 [Gibberella zeae PH-1]
  misc_feature (17)..(393): NCBI GI: 256721869 Blast Desc: NECHADRAFT_88077 [Nectria haematococca mpVI 77-13-4]
  misc_feature (10)..(393): NCBI GI: 67526203 Blast Desc: AN3559.2 [Aspergillus nidulans FGSC A4] gi|40740577|gb|EAA59767.1| AN3559.2 [Aspergillus nidulans FGSC A4] gi|259481918|tpe|CBF75888.1| TPA: conserved [Aspergillus FGSC
  misc_feature (8)..(393): NCBI GI: 169595326 Blast Desc: SNOG_00401 [Phaeosphaeria nodorum SN15] gi|160701070|gb|EAT91896.2| SNOG_00401 [Phaeosphaeria nodorum SN15]
  misc_feature (53)..(393): NCBI GI: 145615400 Blast Desc: MGG_13116 [Magnaporthe grisea 70-15] gi|145022235|gb|EDK06255.1| MGG_13116 [Magnaporthe grisea 70-15]
  misc_feature (6)..(392): NCBI GI: 189202358 Blast Desc: conserved [Pyrenophora tritici-repentis Pt-1C-BFP] gi|187984614|gb|EDU50102.1| conserved [Pyrenophora tritici-repentis Pt-1C-BFP]
  misc_feature (17)..(393): NCBI GI: 212526662 Blast Desc: paraoxonase, [Penicillium marneffei ATCC 18224] gi|210072886|gb|EEA26973.1| paraoxonase, [Penicillium marneffei ATCC 18224]
  misc_feature (1)..(391): NCBI GI: 225679880 Blast Desc: serum paraoxonase/arylesterase [Paracoccidioides brasiliensis Pb03]
  misc_feature (1)..(391): NCBI GI: 226291644 Blast Desc: conserved [Paracoccidioides brasiliensis Pb18]
  misc_feature (31)..(391): NCBI GI: 226286170 Blast Desc: conserved [Paracoccidioides brasiliensis Pb01]
  misc_feature (135)..(390): SWISSPROT Homolog: EC 3.1.8.1 Aryldialkylphosphatase
  misc_feature (135)..(390): SWISSPROT Homolog: EC 3.1.1.2 Arylesterase
MNLSGVARAAVPLALFIGLSWSFLAARLHSASLFYQNAPARFKELINIPDPTIKFSDRIRSCEDVILVESRRLAILGCDPGRERWNTVMGIFEPEPVPNGDLYVYDYSKVDELLHLRFVNFKHQTNFHTLGMAYDEHTSTLFVANHRRNDRPAIEMFKLGLEQRTATHLGSIQHPLIHGPNSITLINDHELMVTNNNYFPIKDHWLLNRIETYLALPLGTVVRVDFAAMLKDPNASVDAKVIARLPFANGIEMLNETTFAVASSSLGSVHMFDLTTSKELSHFRLPFNPDNLSVSSDGAIFIAGHPHMPTLAEFSMTRHICNDPNELSKADAKMQETCKTLSAPSWAVRWTKEGGVEDLYASTEYPSSASVVFDGTSRKGMITGLYAKGILVWDA

SEQ ID NO: 3965 - DNA, 2967 bp, Muscodor strobelii
  misc_feature: SGI EST ID NO. CUFF.9991.0
  misc_feature: Variant of the nucleotide sequence at SEQ ID NO 3963
ccgccgtgtatctatcacccatggctctaattagcacggtattgctgactcggtttgaacacattacgccgtacatgaggaagcgacacgcacagtgtcgcatcatcccaaagcttctttctattgactgtccttgactgttccttcggttgctcttggttgctcctcggccgtaagttccggctcttcaatcccatcgcattcgcttcttaccatgaacaatgaaggagcttgtctttcagggacctgggcttcttaagacgacgtctttataagatttgcttgaattaggctgctagtttttctccattgtatatccatgctcaacgtagtcgactacaactccttgcatgatgatgacgctcttctaattgcatatacctccctcgccttctcctgtgctcaccaacctaacatacataactatcttccagtcatttcaagcattcagacactcatcactgagcaactttcgacgtcatgaatctttcaggagtggctagggcagctgtaccgctcgcgttattcattggcctctcgtggtcttttcttgctgctcgcttacactcagcctcattgttctaccaaaatgccccagcacggttcaaggagctcataaatatcccggaccccactatcaaattcagcgatcgcattcgcagctgcgaggatgtgatacttgttgagtctcgaagacttgcgattctcggctgcgatcccggccgtgagaggtggaacacagttatgggcatttttgagccagaaccagtgcccaacggagacttatatgtgtatgactacagcaaggtcgatgagctacttcatctgagattcgtcaatttcaaacatcagacgaattttcacaccttgggaatggcctatgatgaacacacttctacgttattcgtcgctaaccatcgtcgcaatgaccgccctgcgatcgaaatgtttaagctaggtcttgagcaacgaacagcaacgcatcttggctctattcaacatcccctgatccacggaccaaattccatcacgttgatcaatgaccatgaacttatggtcacaaacaacaattatttcccaatcaaagaccattggctcttgaatcgaatcgagacttatcttgcactccctttgggaactgtggtccgcgtcgattttgcagccatgctgaaggacccaaatgcgtctgtagatgctaaagtcatcgcccgtcttccttttgccaatggaattgagatgcttaatgagacgacatttgcagtcgcctcttctagcttaggctctgtacatatgtttgatctcacgacaagcaaagaactatcgcatttcagacttccatttaatccggacaatctctctgtgtccagtgacggcgctatcttcatcgcaggacatccccatatgccgacccttgcagaattttccatgacaaggcacatatgtaacgatcccaatgaactatcaaaagcagacgcaaagatgcaggagacttgcaagacattgtcagcgccatcttgggcggtgaggtggaccaaagaaggcggtgtcgaggatctttacgccagtacagagtacccgtcaagtgcctctgtggtatttgatgggacgagccgaaagggaatgatcaccggcttatatgccaaaggcattcttgtttgggacgcatgacctcgaagctagagctccggggcggaattagattggggtgatcgactccaaggttcctcgattgaattgatagggcatcacacccagctgcaacgatgtgtgaggaattgacgacatatgttttggagaaaagattaccgctccgtactcaatatcttggaaggctgtgtggtagtcaggacatagggaaggtctgcaccgcacaaaattgacacgagggtcatcggagagcgaggaaggtcatgatgataaagtatacattcgcttaaccacctatgtaccaaaaatgcaaagtatatacaagaatagaatcaggtcctatatgatatccgattccatcgttctgcactctctccctctcttctatccttttttgacctcggcttcgagatcacgaagcaaagcgaacttattcgcatcatgaccaataactacttatgatcgtgcatgcacaagccgagtggcaaagcgtagagcccgtgtggagatggcggaagcgcttccacccaatgcagagacaatctgagcgaggtatccgtcgttgttgaagaaaagttggctcatgtcccaaaccataacaccaccgaagctagcgtactgcttgacgtcactgatgatggtgctcaaggtgctggcatcgacgtagccgccggagacttgagaggcgcccaggacaccgacaaggaccttgacgttcgggttcgcgctctcgcttgaagcccaggtgtcccaggtctcgaagttgaagttaccagaggagtagtcaacgacaccgcagtagttgttgtagaactggatgttaaggaagtcgaagggaacatcgctagaaaggacgtatccgagggcggcgtcggggtaggggcattgaggggcgcccgacaagtagtaggtcttactgctgtcggcatccatcagagatcgaagctctttggcgaaggcatcgaagttctggttgctggattcgagatcaagatcgaatccgtcgatgaccgcggatccgaaaggccggttggcagtatcggtaggcgtgccgaagagattccagacagtctgagcggcggttgtagcagcatcggcactggcaaatccgccttcggagtaggtagcaccaccaatagacagcatgatagtcttgccgttggcttggcaagtcttgatatcctccctgaatatcacctgtcagtttattgactttacaagcaattaaaataatgccacgtactcaatctgagggcagatcagaaggttagagccgtcggtggcggcagtgcaggagtcactggcactggcgaagttgac

SEQ ID NO: 3966 - DNA, 1035 bp, Muscodor strobelii
  misc_feature: SGI cDNA ID NO. 560995
  misc_feature: Elevated expression when VOC is produced
  misc_feature: Encodes the peptide sequence at SEQ ID NO 3967
atggctcctaacgcatctaaattggcctccgttgccagcatactcgctcttgcgccctctgctctcgccggattcgacgcctcggcctccaacaacgttgttgtctactggggccagaactctgccggacaagctggtagccaggaccgcctttcctcctactgtgactctggcaatggcattgatgtcattcctatttccttcttgtacggcatcaacaacttggccgtcaacttcgccagtgccagtgactcctgcactgccgccaccgacggctctaaccttctgatctgccctcagattgaggaggatatcaagacttgccaagccaacggcaagactatcatgctgtctattggtggtgctacctactccgaaggcggatttgccagtgccgatgctgctacaaccgccgctcagactgtctggaatctcttcggcacgcctaccgatactgccaaccggcctttcggatccgcggtcatcgacggattcgatcttgatctcgaatccagcaaccagaacttcgatgccttcgccaaagagcttcgatctctgatggatgccgacagcagtaagacctactacttgtcgggcgcccctcaatgcccctaccccgacgccgccctcggatacgtcctttctagcgatgttcccttcgacttccttaacatccagttctacaacaactactgcggtgtcgttgactactcctctggtaacttcaacttcgagacctgggacacctgggcttcaagcgagagcgcgaacccgaacgtcaaggtccttgtcggtgtcctgggcgcctctcaagtctccggcggctacgtcgatgccagcaccttgagcaccatcatcagtgacgtcaagcagtacgctagcttcggtggtgttatggtttgggacatgagccaacttttcttcaacaacgacggatacctcgctcagattgtctctgcattgggtggaagcgcttccgccatctccacacgggctctacgctttgccactcggcttgtgcatgcacgatcataa

SEQ ID NO: 3967 - protein, 344 aa, Muscodor strobelii
  misc_feature: SGI Peptide ID NO. 560995
  misc_feature (31)..(306): Pfam Id: PF00704 Pfam Desc: Glycosyl hydrolases family 18
  misc_feature (31)..(240): Pfam Id: PF00704 Pfam Desc: Glycosyl hydrolases family 18
  misc_feature (8)..(327): NCBI GI: 209916680 Blast Desc: chitinase [Hypocrea virens]
  misc_feature (7)..(321): NCBI GI: 119482842 Blast Desc: glycosyl hydrolase, family 18, [Neosartorya fischeri NRRL 181] gi|119409604|gb|EAW19552.1| glycosyl hydrolase, family 18, [Neosartorya fischeri NRRL 181]
  misc_feature (5)..(340): NCBI GI: 242792443 Blast Desc: class III chitinase, [Talaromyces stipitatus ATCC 10500] gi|218718542|gb|EED17962.1| class III chitinase, [Talaromyces stipitatus ATCC 10500]
  misc_feature (11)..(322): NCBI GI: 85083182 Blast Desc: NCU04500 [Neurospora crassa OR74A] gi|28918153|gb|EAA27833.1| NCU04500 [Neurospora crassa OR74A]
  misc_feature (19)..(321): NCBI GI: 126032263 Blast Desc: TPA: TPA_inf: chitinase 18-12 [Hypocrea jecorina]
  misc_feature (12)..(331): NCBI GI: 212535222 Blast Desc: class III chitinase, [Penicillium marneffei ATCC 18224] gi|210070166|gb|EEA24256.1| class III chitinase, [Penicillium marneffei ATCC 18224]
  misc_feature (8)..(321): NCBI GI: 209980058 Blast Desc: chitinase 33 [Hypocrea virens]
  misc_feature (19)..(321): NCBI GI: 18765875 Blast Desc: AF397018_1 class III chitinase [Hypocrea virens] gi|19072993|gb|AAL84693.1|AF395754_1 class III chitinase precursor [Hypocrea virens] gi|254305181|gb|ACT66008.1| chitinase
  misc_feature (19)..(321): NCBI GI: 1420880 Blast Desc: chitinase [Hypocrea lixii]
  misc_feature (6)..(335): NCBI GI: 121718341 Blast Desc: class III chitinase, [Aspergillus clavatus NRRL 1] gi|119404377|gb|EAW14753.1| class III chitinase, [Aspergillus clavatus NRRL 1]
  misc_feature (24)..(310): SWISSPROT Homolog: EC 3.2.1.14 Chitinase
  misc_feature: Useful for introducing or modulating the production of volatile compounds
MAPNASKLASVASILALAPSALAGFDASASNNVVVYWGQNSAGQAGSQDRLSSYCDSGNGIDVIPISFLYGINNLAVNFASASDSCTAATDGSNLLICPQIEEDIKTCQANGKTIMLSIGGATYSEGGFASADAATTAAQTVWNLFGTPTDTANRPFGSAVIDGFDLDLESSNQNFDAFAKELRSLMDADSSKTYYLSGAPQCPYPDAALGYVLSSDVPFDFLNIQFYNNYCGVVDYSSGNFNFETWDTWASSESANPNVKVLVGVLGASQVSGGYVDASTLSTIISDVKQYASFGGVMVWDMSQLFFNNDGYLAQIVSALGGSASAISTRALRFATRLVHARS

SEQ ID NO: 3968 - DNA, 2482 bp, Muscodor strobelii
  misc_feature: SGI EST ID NO. CUFF.9992.2
  misc_feature: Variant of the nucleotide sequence at SEQ ID NO 3966
agtatccaacgtggacacagtagtagctcaggcagcattctttagatagcttcacattccttttccatacttccagctcaggtagctcctagccagtctttccttaacaatggctcctaacgcatctaaattggcctccgttgccagcatactcgctcttgcgccctctgctctcgccggattcgacgcctcggcctccaacaacgttgttgtctactggggccagaactctgccggacaagctggtagccaggaccgcctttcctcctactgtgactctggcaatggcattgatgtcattcctatttccttcttgtacggcatcaacaacttggccgtcaacttcgccagtgccagtgactcctgcactgccgccaccgacggctctaaccttctgatctgccctcagattgaggaggatatcaagacttgccaagccaacggcaagactatcatgctgtctattggtggtgctacctactccgaaggcggatttgccagtgccgatgctgctacaaccgccgctcagactgtctggaatctcttcggcacgcctaccgatactgccaaccggcctttcggatccgcggtcatcgacggattcgatcttgatctcgaatccagcaaccagaacttcgatgccttcgccaaagagcttcgatctctgatggatgccgacagcagtaagacctactacttgtcgggcgcccctcaatgcccctaccccgacgccgccctcggatacgtcctttctagcgatgttcccttcgacttccttaacatccagttctacaacaactactgcggtgtcgttgactactcctctggtaacttcaacttcgagacctgggacacctgggcttcaagcgagagcgcgaacccgaacgtcaaggtccttgtcggtgtcctgggcgcctctcaagtctccggcggctacgtcgatgccagcaccttgagcaccatcatcagtgacgtcaagcagtacgctagcttcggtggtgttatggtttgggacatgagccaacttttcttcaacaacgacggatacctcgctcagattgtctctgcattgggtggaagcgcttccgccatctccacacgggctctacgctttgccactcggcttgtgcatgcacgatcataagtagttattggtcatgatgcgaataagttcgctttgcttcgtgatctcgaagccgaggtcaaaaaaggatagaagagagggagagagtgcagaacgatggaatcggatatcatataggacctgattctattcttgtatatactttgcatttttggtacataggtggttaagcgaatgtatactttatcatcatgaccttcctcgctctccgatgaccctcgtgtcaattttgtgcggtgcagaccttccctatgtcctgactaccacacagccttccaagatattgagtacggagcggtaatcttttctccaaaacatatgtcgtcaattcctcacacatcgttgcagctgggtgtgatgccctatcaattcaatcgaggaaccttggagtcgatcaccccaatctaattccgccccggagctctagcttcgaggtcatgcgtcccaaacaagaatgcctttggcatataagccggtgatcattccctttcggctcgtcccatcaaataccacagaggcacttgacgggtactctgtactggcgtaaagatcctcgacaccgccttctttggtccacctcaccgcccaagatggcgctgacaatgtcttgcaagtctcctgcatctttgcgtctgcttttgatagttcattgggatcgttacatatgtgccttgtcatggaaaattctgcaagggtcggcatatggggatgtcctgcgatgaagatagcgccgtcactggacacagagagattgtccggattaaatggaagtctgaaatgcgatagttctttgcttgtcgtgagatcaaacatatgtacagagcctaagctagaagaggcgactgcaaatgtcgtctcattaagcatctcaattccattggcaaaaggaagacgggcgatgactttagcatctacagacgcatttgggtccttcagcatggctgcaaaatcgacgcggaccacagttcccaaagggagtgcaagataagtctcgattcgattcaagagccaatggtctttgattgggaaataattgttgtttgtgaccataagttcatggtcattgatcaacgtgatggaatttggtccgtggatcaggggatgttgaatagagccaagatgcgttgctgttcgttgctcaagacctagcttaaacatttcgatcgcagggcggtcattgcgacgatggttagcgacgaataacgtagaagtgtgttcatcataggccattcccaaggtgtgaaaattcgtctgatgtttgaaattgacgaatctcagatgaagtagctcatcgaccttgctgtagtcatacacatataagtctccgttgggcactgg

SEQ ID NO: 3969 - DNA, 1779 bp, Muscodor strobelii
  misc_feature: SGI cDNA ID NO. 560996
  misc_feature: Reduced expression when VOC is produced
  misc_feature: Encodes the peptide sequence at SEQ ID NO 3970
atgggtacgggcaagaaagaaaggaaccggctcacccgccagggtaagtcgggcactagcatggacaatgtcaagataaaaggagagaacttctaccgcgatgccaagaagattcgtgccctgaacatccgcaaagataaaggtcctcaaagaaatgctgccggcgatatcgtccaagccgccgcctaccagtccagagatgcgcccaccgcgaggatagaacccaaccgacgatggttcacgaacacgagagtcatatcgcagaacagcttgacccagtttagagacgctatggctgagagggaaaaggacccctacagcgtccttctgaagagtaacaagctccccatgaccctgatcaaggacgctggagagatcaacggcctcaagaagcatgccgccaaaatgaccgtggagacccaaagctttgccgacaccttcggccccaagtcacagcgcaagcgagtcaagcttggcgtcagcactctcagcgaccttgcagatgacacggagcagagcatggacaactacaaggacagactcgagcaggcaagactgctgagtggagcctcgggcgaagaagccggtgctggcggtgagcacgccatagacgagcaagatcctctgacgatggccatcgagccggttttcaacaagggccaaagcaaacgaatatggaacgagttatacaaagttctcgacagttctgatgtcgtcttgcacatcttggacgccagaaatcccgaggggacgaggtgtcgcgctgtcgaggcctacctgaaaaaggaggctccgcataaacatctcgttttcgtccttaacaagactgacttggtccctacctccgtagctgcagcatgggtgaaacatctctccaaagaggtcccaacgttagcttttcatgcacatttgacgaatagcttcgggaagggccagttgatatcgcttttgcggcaattctcatctctacataaggacaggaaacagatcagtgttggcttgattggatatcctaacgtgggtaagagctcgattataaacactcttaaagccaaaaaggtcgcgacagtcgctccagtaccaggagagaccaaggtctggcaattcattaccttgatgaagcggatatacttgatcgattgtccaggtatcgttccgcctaacgcgaatgataagcccgaagatatattgcttcgaggtgttgtccgaatcgaaaaggttgagaatcctgagcagtacatcccggcgatgatggcgaaggtgaagcagcaccacctagagagaacgtacgaagtcaaagggttttcggatcatcacgaattccttgagatccttgcacgacgctccggccggttgcttcgtgccggcgaagttgactttgatggcacggccaagatggtcttgacagatttcatgcgtggaaggataccctggttcactcctgcaccgaaatcagaaggcaatgataacgatgaggtcatcgaaggtcgcggtggccgtttaggtgaaatgcccaagaagcgaaagagggacgaagaggacgagactgcctctatagcctcaaaacacactgccaccacagtgaagagcggtgttcaagatgaaaaagaggatgaagacgacgacgacgacttcaagggattcagcgacgatgacgagtctgaaaccggagaagctagtgtgatgcagagtaaggacgaggccgatgacgatatgatacccctaggcgacctcagctcggatgataaagaggatagtgctggtgaagaacacggttga

SEQ ID NO: 3970 - protein, 592 aa, Muscodor strobelii
  misc_feature: SGI Peptide ID NO. 560996
  misc_feature (330)..(412): Pfam Id: PF01926 Pfam Desc: GTPase of function
  misc_feature (47)..(177): Pfam Id: PF08153 Pfam Desc: NGP1NT (NUC091) domain
  misc_feature (330)..(392): Pfam Id: PF01926 Pfam Desc: GTPase of function
  misc_feature (1)..(573): NCBI GI: 46109008 Blast Desc: FG01386.1 [Gibberella zeae PH-1]
  misc_feature (1)..(557): NCBI GI: 242801241 Blast Desc: nucleolar GTPase, [Talaromyces stipitatus ATCC 10500] gi|218717066|gb|EED16487.1| nucleolar GTPase, [Talaromyces stipitatus ATCC 10500]
  misc_feature (1)..(589): NCBI GI: 154322240 Blast Desc: BC1G_01267 [Botryotinia fuckeliana B05.10] gi|150850514|gb|EDN25707.1| BC1G_01267 [Botryotinia fuckeliana B05.10]
  misc_feature (1)..(553): NCBI GI: 156060781 Blast Desc: SS1G_02533 [Sclerotinia sclerotiorum 1980] gi|154699937|gb|EDN99675.1| SS1G_02533 [Sclerotinia sclerotiorum 1980]
  misc_feature (1)..(574): NCBI GI: 239614357 Blast Desc: nucleolar GTP-binding protein 2 [Ajellomyces dermatitidis ER-3]
  misc_feature (1)..(574): NCBI GI: 261204183 Blast Desc: nucleolar GTP-binding protein 2 [Ajellomyces dermatitidis SLH14081] gi|239587090|gb|EEQ69733.1| nucleolar GTP-binding protein 2 [Ajellomyces dermatitidis SLH14081]
  misc_feature (1)..(565): NCBI GI: 240282000 Blast Desc: nucleolar GTP-binding protein [Ajellomyces capsulatus H143]
  misc_feature (1)..(559): NCBI GI: 154273605 Blast Desc: nucleolar GTP-binding protein 2 [Ajellomyces capsulatus NAm1] gi|150415262|gb|EDN10615.1| nucleolar GTP-binding protein 2 [Ajellomyces capsulatus NAm1]
  misc_feature (1)..(556): NCBI GI: 70994168 Blast Desc: nucleolar GTPase [Aspergillus fumigatus Af293] gi|66849565|gb|EAL89893.1| nucleolar GTPase, [Aspergillus fumigatus Af293] gi|159125154|gb|EDP50271.1| nucleolar GTPase,
  misc_feature (1)..(565): NCBI GI: 225559079 Blast Desc: nucleolar GTP-binding protein [Ajellomyces capsulatus G186AR]
  misc_feature: Useful for introducing or modulating the production of volatile compounds
MGTGKKERNRLTRQGKSGTSMDNVKIKGENFYRDAKKIRALNIRKDKGPQRNAAGDIVQAAAYQSRDAPTARIEPNRRWFTNTRVISQNSLTQFRDAMAEREKDPYSVLLKSNKLPMTLIKDAGEINGLKKHAAKMTVETQSFADTFGPKSQRKRVKLGVSTLSDLADDTEQSMDNYKDRLEQARLLSGASGEEAGAGGEHAIDEQDPLTMAIEPVFNKGQSKRIWNELYKVLDSSDVVLHILDARNPEGTRCRAVEAYLKKEAPHKHLVFVLNKTDLVPTSVAAAWVKHLSKEVPTLAFHAHLTNSFGKGQLISLLRQFSSLHKDRKQISVGLIGYPNVGKSSIINTLKAKKVATVAPVPGETKVWQFITLMKRIYLIDCPGIVPPNANDKPEDILLRGVVRIEKVENPEQYIPAMMAKVKQHHLERTYEVKGFSDHHEFLEILARRSGRLLRAGEVDFDGTAKMVLTDFMRGRIPWFTPAPKSEGNDNDEVIEGRGGRLGEMPKKRKRDEEDETASIASKHTATTVKSGVQDEKEDEDDDDDFKGFSDDDESETGEASVMQSKDEADDDMIPLGDLSSDDKEDSAGEEHG

SEQ ID NO: 3971 - DNA, 2107 bp, Muscodor strobelii
  misc_feature: SGI EST ID NO. CUFF.10131.0
  misc_feature: Variant of the nucleotide sequence at SEQ ID NO 3969
cgttctcccacctattcacatctctcgcccgcccgcctgcccaattcccacaacgcacggcacatcatgggtacgggcaagaaagaaaggaaccggctcacccgccagggtaagtcgggcactagcatggacaatgtcaagataaaaggagagaacttctaccgcgtacgaatgcatcgcctctatctttgcgaaaacgcatgtcaactgacatccatgtttttgagtaggatgccaagaagattcgtgccctgaacatccgcaaagataaaggtcctcaaagaaatgctgccggcgatatcgtccaagccgccgcctaccagtccagagatgcgcccaccgcgaggatagaacccaaccgacgatggttcacgaacacgagagtcatatcgcagaacagcttgacccagtttagagacgctatggctgagagggaaaaggacccctacagcgtccttctgaagagtaacaagctccccatgaccctgatcaaggacgctggagagatcaacggcctcaagaagcatgccgccaaaatgaccgtggagacccaaagctttgccgacaccttcggccccaagtcacagcgcaagcgagtcaagcttggcgtcagcactctcagcgaccttgcagatgacacggagcagagcatggacaactacaaggacagactcgagcaggcaagactgctgagtggagcctcgggcgaagaagccggtgctggcggtgagcacgccatagacgagcaagatcctctgacgatggccatcgagccggttttcaacaagggccaaagcaaacgaatatggaacgagttatacaaagttctcgacagttctgatgtcgtcttgcacatcttggacgccagaaatcccgaggggacgaggtgtcgcgctgtcgaggcctacctgaaaaaggaggctccgcataaacatctcgttttcgtccttaacaagactgacttggtccctacctccgtagctgcagcatgggtgaaacatctctccaaagaggtcccaacgttagcttttcatgcacatttgacgaatagcttcgggaagggccagttgatatcgcttttgcggcaattctcatctctacataaggacaggaaacagatcagtgttggcttgattggatatcctaacgtgggtaagagctcgattataaacactcttaaagccaaaaaggtcgcgacagtcgctccagtaccaggagagaccaaggtctggcaattcattaccttgatgaagcggatatacttgatcgattgtccaggtatcgttccgcctaacgcgaatgataagcccgaagatatattgcttcgaggtgttgtccgaatcgaaaaggttgagaatcctgagcagtacatcccggcgatgatggcgaaggtgaagcagcaccacctagagagaacgtacgaagtcaaagggttttcggatcatcacgaattccttgagatccttgcacgacgctccggccggttgcttcgtgccggcgaagttgactttgatggcacggccaagatggtcttgacagatttcatgcgtggaaggataccctggttcactcctgcaccgaaatcagaaggcaatgataacgatgaggtcatcgaaggtcgcggtggccgtttaggtgaaatgcccaagaagcgaaagagggacgaagaggacgagactgcctctatagcctcaaaacacactgccaccacagtgaagagcggtgttcaagatgaaaaagaggatgaagacgacgacgacgacttcaagggattcagcgacgatgacgagtctgaaaccggagaagctagtgtgatgcagagtaaggacgaggccgatgacgatatgatacccctaggcgacctcagctcggatgataaagaggatagtgctggtgaagaacacggttgaaataccatttttgtagatgatgggtaacagcgagcacaatgtgaacctaccgattatctacactgattggtttctatgagcgatttgattatgtgaatacgtgcatttgtctatcgagcgaaagtcgcagcttacacggtatattcctgatattccggcaagattcaagagttttgccatgcatcacgctccttccc

SEQ ID NO: 3972 - DNA, 1026 bp, Muscodor strobelii
  misc_feature: SGI cDNA ID NO. 560997
  misc_feature: Reduced expression when VOC is produced
  misc_feature: Encodes the peptide sequence at SEQ ID NO 3973
atggcttcactacgcccaaccatcgctcacacaacgaagagcacgaccatcccatccctcacccgcctcttcacgacctccctgcacctctcacaagcatccatccccccagaatcccccctatttatcaacgtgcccaacccaccacaagaccagtccatcgaagccaaacgcgacctcaagcccatccgtggcttcatcccaccgcctcgccaagtcttccgcgcaaaggactcctccaagaagtccacaacagcctaccttcgccaatccgccccagaaccatccaatgcacgctctcaactgcccccgtcttccgacctgcaagcctggaagcgccgcatggccgcctcccgccggtccaacatccgcgcgggaatcaagggcctctacgcgcgcaagacaacccgcgacacccacctctccaccatccgacgcacaaagctagcccacaacacccggctcgccaccgcgccagaaccagaagacgatcgtctaacccgctcccacatcaacacgagaaccctttccacatccgtcgccctcgacccacaccgcttcgagagtgccctagcctcccgcgagcgaacgacgaacctacacgcccaccagtcgtccctccgccgcgacgcaatccaaaccctctacatgaacgcccgctccttcatcctgtccgagtccgacctcgaggccgtaatctcgcgcgaattcgcagacgacgctttctctcgttatggaaactcgtctacttaccacagggtggagaatatatgggatgcgctgggcgagccgacgaatacccaggccatgctcaaggacctcgagcgcaggacggggaaactcgtacctgatgggatgagtgagagtatgcgcactatccgtcgccagaaacagatcgctgaggcgcttacgggcggtgggctggaggatgttaagagttggagtgcccagactgcgcaggggaaggaggggaaggatggtgcgaagagagggattgggatggatgagtatgggttgaacttgtaa

SEQ ID NO: 3973 - protein, 341 aa, Muscodor strobelii
  misc_feature: SGI Peptide ID NO. 560997
  misc_feature (34)..(308): NCBI GI: 85119622 Blast Desc: NCU02545 [Neurospora crassa OR74A] gi|28927488|gb|EAA36440.1| [Neurospora crassa OR74A]
  misc_feature (20)..(308): NCBI GI: 171695882 Blast Desc: protein product [Podospora anserina] gi|170948183|emb|CAP60347.1| protein product [Podospora anserina]
  misc_feature (22)..(308): NCBI GI: 116181462 Blast Desc: CHGG_01359 [Chaetomium globosum CBS 148.51] gi|88185656|gb|EAQ93124.1| CHGG_01359 [Chaetomium globosum CBS 148.51]
  misc_feature (37)..(308): NCBI GI: 225679851 Blast Desc: conserved [Paracoccidioides brasiliensis Pb03]
  misc_feature (37)..(308): NCBI GI: 226291609 Blast Desc: conserved [Paracoccidioides brasiliensis Pb18]
  misc_feature (35)..(308): NCBI GI: 226286131 Blast Desc: conserved [Paracoccidioides brasiliensis Pb01]
  misc_feature (22)..(308): NCBI GI: 145257464 Blast Desc: An04g03800 [Aspergillus niger] gi|134058660|emb|CAK38644.1| protein product [Aspergillus niger]
  misc_feature (22)..(308): NCBI GI: 169773389 Blast Desc: [Aspergillus oryzae RIB40] gi|238491372|ref|XP_002376923.1| conserved [Aspergillus flavus NRRL3357] gi|83769024|dbj|BAE59161.1| protein product oryzae]
  misc_feature (37)..(308): NCBI GI: 225559080 Blast Desc: conserved [Ajellomyces capsulatus G186AR]
  misc_feature (37)..(308): NCBI GI: 154273607 Blast Desc: [Ajellomyces capsulatus NAm1] gi|150415263|gb|EDN10616.1| [Ajellomyces capsulatus NAm1]
  misc_feature: Useful for introducing or modulating the production of volatile compounds
MASLRPTIAHTTKSTTIPSLTRLFTTSLHLSQASIPPESPLFINVPNPPQDQSIEAKRDLKPIRGFIPPPRQVFRAKDSSKKSTTAYLRQSAPEPSNARSQLPPSSDLQAWKRRMAASRRSNIRAGIKGLYARKTTRDTHLSTIRRTKLAHNTRLATAPEPEDDRLTRSHINTRTLSTSVALDPHRFESALASRERTTNLHAHQSSLRRDAIQTLYMNARSFILSESDLEAVISREFADDAFSRYGNSSTYHRVENIWDALGEPTNTQAMLKDLERRTGKLVPDGMSESMRTIRRQKQIAEALTGGGLEDVKSWSAQTAQGKEGKDGAKRGIGMDEYGLNL

SEQ ID NO: 3974 - DNA, 3261 bp, Muscodor strobelii
  misc_feature: SGI cDNA ID NO. 560998
  misc_feature: Reduced expression when VOC is produced
  misc_feature: Encodes the peptide sequence at SEQ ID NO 3975
atgttgtcgcgaaacacccggtcgctgttgctggtcgcgttatcgttatctcatggcgtcatcggccagcgcaactacacccaagccacagaagccgacatgcttcgcgcccagctggcattgatgggtgatagaccggctgactgccccccttgctttaattgtctcctcccggcctacgagtgcggccagtacgccgactgtaacacctacaacgggaagtgcgagtgccccgcaggttttggaggagacgactgtttagaaccaacatgcggatcgctggcgcgaggcaaagaccgaccgataagatctggcgacacttgcgactgcgatgagggctggacgggaatcaactgcaatgtctgtacgcaaaaccaagcttgtaatgcgctgatggagacgggcgaggacggtgtctgctaccagaacggcgaggtcgtcaagaacaactaccagatgtgcggcgtcaccaacgagaagatcctctccatgctcgacggcaaagtgccccaggctacattcacttgcgacaaggacacgggtttttgcgatttccaattctgggtcgatcgagtcgagtcattttactgccaccttgagaactgcgaatcgagtgccaaattcaccgacgaccagaatagcaccttctataaatgccccgatgtcaaatgcgactgtatcacagatcgcttcctctgcggtgccgatggctccatcgatctgacggatttcctcgatgagtcagtcgaggggccagcgacttttagctgtctgcaaaagaacggcggcgtcaacagctgcaagttcaaagagcccgctctcgactggatggtccagagcatcttcggagacgacagtatcctattggaatgccggtctggtgaatgtctctaccataccgaggtgcctgggtaccaacgacctgtcaagacgatcaacacgcccttgattgctggagtcattgctggctgctcattgttcctcgttgctgtcatcttgttgatatggtacctttcccgacgtcaatacaaatatggaccgattcacttggacgactccgatgacgaggccaccaagcttatgaccgaccacaagccagccacgctccatttcgaaaatgtcaactatgggctgaacggcaagtccatcctgagcggcatccgtggcatttgccatcctggggagatcacggctatcatgggtgcttctggcgcgggaaagacgagtttcctggacattttggcccgcaagaacaagcgaggccagtcatctggtgacttttacgtgaatggcgaaaaggtgaccgataccgagttcaagagcgtagttggatttgtcgatcaggaggacacgatgctccccactctcaccgtgcacgagacgattcttacgagcgcccttctccggcttccccgtagtatggggcgtgcggcgaaagagcaacgcgtatacgaagtcgagaagcaactaggcatctaccacatccgcgactcgctcatcggatcggaagagggtaagggccgaggcatctcaggtggcgagaagcgccgtgtcggtattgcctgtgaacttgtgacaagcccgtctattctgttcctggatgagcctacgagtggtctggatgcatacaatgccttcaatgtgattgagtgcttggtgacattggccaagacgtacaagcgcaccgtcatcttcacgatccaccagccccgttctaatatcgtcgccttgttcgatcgacttatcctcctggctcaaggcaagactgtctattctggaccgttcgcgcactgtcaggactattttgatgaagttggctacgcgtgcccaccgggtttcaatattgccgactatctcgtcgatctgaccatgcatgctggcagcgctggcgcctttgatgatggtagcctcttgaacgacaccgctagtagcgttgggcccagcagtacgagggcggtcaagtcggtggccagtatctccggtagcgctaccgaagatgcttcctttatcgagtcatcatcaagccggccaagaggcaagcgtacaaactcgataagagcacggcaggagcgagaactattcacgcgacggaagaataccgctgatactgctgctgacactgctgcttcgtctgatgtggaagaagaagctggagcttataagctccacaagcagacagcaggcgtcgttcctcctcagatcattgtcgaagatgttcacgatctcccgccggcggctggaacgaacctagatatcctggttcagtcatttgcggactcacagattgcgacggctatccacgacgagattcagcaggctgtgcagaccgcacatgaagcaaatggacagaacggctcctccggacccaatggcatcgttaatggtaatggcaatggcagtgcgattggtcgtggatacgctcgagttggatacctcggccagttcgtcatcctgtcgggcaggacgtggaagaatctctaccgaaatccactactcatgctgacgcactatgccattgccattctactggctgtattatccgggtacctcttctacggcttgacagacgacatccctgggttccagaaccgtctgggtctcttcttcttcctgctcgccctcttcggcttcagcacactaacgagcctgaacgtcttcgcgtccgaacgactcctgttcgtccgcgagcgagccaacgggtactactcgcccatcacctacttcgtcgccaaagtcctcttcgacatcatcccccttcgtatcatccccccaatcctaatgggcgccataatctacccgatgacaggcctcatccccgacgcaccgcacttcttcacattcatgctcatactagtgctcttcaacctggccgccgcagcaatctgtctcttcataggcatagtctgcaaagacggcagcgtagcaaacctcatcgggtccctcgtcatgctattctccctcctcttcgcgggtcttctgttaaatcatgataagattcccgacgcggcgctttggttgcagagcctgtcgattttccactacgggtttgaggcgctcattgtgaacgaggcgatcaaactcacgcttgtggataagaaatacggccttgatattacgattccgggggctgcgatcctgagtagttttgggtttaataatgcggctaagtggggggatgtattgaatttgggggtgtttgcggcggtttttgtggtccttgcttatgcggctatgcattttttgcttgtggaacggagataa

SEQ ID NO: 3975 - protein, 1086 aa, Muscodor strobelii
  misc_feature: SGI Peptide ID NO. 560998
  misc_feature (813)..(1024): Pfam Id: PF01061 Pfam Desc: ABC-2 type transporter
  misc_feature (394)..(587): Pfam Id: PF00005 Pfam Desc: ABC transporter
  misc_feature (42)..(1086): NCBI GI: 145613530 Blast Desc: MGG_01563 [Magnaporthe grisea 70-15] gi|145020594|gb|EDK04723.1| MGG_01563 [Magnaporthe grisea 70-15]
  misc_feature (23)..(1086): NCBI GI: 261355342 Blast Desc: ATP-binding cassette sub-family G member 2 [Verticillium albo-atrum VaMs.102]
  misc_feature (7)..(1086): NCBI GI: 46109012 Blast Desc: FG01388.1 [Gibberella zeae PH-1]
  misc_feature (34)..(1086): NCBI GI: 116181460 Blast Desc: CHGG_01358 [Chaetomium globosum CBS 148.51] gi|88185655|gb|EAQ93123.1| CHGG_01358 [Chaetomium globosum CBS 148.51]
  misc_feature (47)..(1086): NCBI GI: 171695880 Blast Desc: protein product [Podospora anserina] gi|170948182|emb|CAP60346.1| protein product [Podospora anserina]
  misc_feature (52)..(1086): NCBI GI: 156060765 Blast Desc: SS1G_02525 [Sclerotinia sclerotiorum 1980] gi|154699929|gb|EDN99667.1| SS1G_02525 [Sclerotinia sclerotiorum 1980]
  misc_feature (20)..(1086): NCBI GI: 70991545 Blast Desc: ABC transporter (Adp1) [Aspergillus fumigatus Af293] gi|66848254|gb|EAL88583.1| ABC transporter (Adp1), [Aspergillus fumigatus Af293] gi|159124179|gb|EDP49297.1| ABC transporter
  misc_feature (23)..(1086): NCBI GI: 119468316 Blast Desc: ABC transporter (Adp1), [Neosartorya fischeri NRRL 181] gi|119405999|gb|EAW15950.1| ABC transporter (Adp1), [Neosartorya fischeri NRRL 181]
  misc_feature (2)..(1086): NCBI GI: 115390757 Blast Desc: conserved [Aspergillus terreus NIH2624] gi|114193807|gb|EAU35507.1| conserved [Aspergillus terreus NIH2624]
  misc_feature (10)..(1086): NCBI GI: 121699020 Blast Desc: ABC transporter (Adp1), [Aspergillus clavatus NRRL 1] gi|119396022|gb|EAW06454.1| ABC transporter (Adp1), [Aspergillus clavatus NRRL 1]
  misc_feature: Useful for introducing or modulating the production of volatile compounds
MLSRNTRSLLLVALSLSHGVIGQRNYTQATEADMLRAQLALMGDRPADCPPCFNCLLPAYECGQYADCNTYNGKCECPAGFGGDDCLEPTCGSLARGKDRPIRSGDTCDCDEGWTGINCNVCTQNQACNALMETGEDGVCYQNGEVVKNNYQMCGVTNEKILSMLDGKVPQATFTCDKDTGFCDFQFWVDRVESFYCHLENCESSAKFTDDQNSTFYKCPDVKCDCITDRFLCGADGSIDLTDFLDESVEGPATFSCLQKNGGVNSCKFKEPALDWMVQSIFGDDSILLECRSGECLYHTEVPGYQRPVKTINTPLIAGVIAGCSLFLVAVILLIWYLSRRQYKYGPIHLDDSDDEATKLMTDHKPATLHFENVNYGLNGKSILSGIRGICHPGEITAIMGASGAGKTSFLDILARKNKRGQSSGDFYVNGEKVTDTEFKSVVGFVDQEDTMLPTLTVHETILTSALLRLPRSMGRAAKEQRVYEVEKQLGIYHIRDSLIGSEEGKGRGISGGEKRRVGIACELVTSPSILFLDEPTSGLDAYNAFNVIECLVTLAKTYKRTVIFTIHQPRSNIVALFDRLILLAQGKTVYSGPFAHCQDYFDEVGYACPPGFNIADYLVDLTMHAGSAGAFDDGSLLNDTASSVGPSSTRAVKSVASISGSATEDASFIESSSSRPRGKRTNSIRARQERELFTRRKNTADTAADTAASSDVEEEAGAYKLHKQTAGVVPPQIIVEDVHDLPPAAGTNLDILVQSFADSQIATAIHDEIQQAVQTAHEANGQNGSSGPNGIVNGNGNGSAIGRGYARVGYLGQFVILSGRTWKNLYRNPLLMLTHYAIAILLAVLSGYLFYGLTDDIPGFQNRLGLFFFLLALFGFSTLTSLNVFASERLLFVRERANGYYSPITYFVAKVLFDIIPLRIIPPILMGAIIYPMTGLIPDAPHFFTFMLILVLFNLAAAAICLFIGIVCKDGSVANLIGSLVMLFSLLFAGLLLNHDKIPDAALWLQSLSIFHYGFEALIVNEAIKLTLVDKKYGLDITIPGAAILSSFGFNNAAKWGDVLNLGVFAAVFVVLAYAAMHFLLVERR

SEQ ID NO: 3976 - DNA, 6521 bp, Muscodor strobelii
  misc_feature: SGI EST ID NO. CUFF.11358.1
  misc_feature: Variant of the nucleotide sequence at SEQ ID NO 3974
gagactttatatgttccatccttttaagcaagcctatcctgttactgacaatctatcgcgtaaagaatgtacaacctatgattgtataacctcaactgcatgaacggtatagattactactgtatatgagaagacggttgaatgcgcttgcatttcgaataaggaataacaacacactatgacaattcatcgcgtatcagagcttcgtagggttacagagatgaaatgaatgaatccgcatgttcgtttcaataactcgaactggcggcccgaacgagtcatgggaaaacaggggaattactaataaattagattctctaaactgttctagtcttgcaaacgtagtatacgacggcgatgattgatatatgtagcgtgcatatgcctttcccaccacgtttggatttcagacgattggctcacagcaatgtaccttactttgttgtcgattaatatcgtcgagacaaatcgccttataaatggtcctcatcaggccatctctttaagagtctgacgtgaaggattcttcgaggaacactcagatctgtcctcgatggattggaggattatcaagggatttcgggtctgtatgtgctgcatctgtttaagatatactaaaggtagtattggtcttaagttcagatcgtctctctaggcagaacagcaatagctcagatatcgcctgcgctagaatagcagccaaaaataagcttgaccttttgcgggatcgtggggccatgttttcgtcatgcagcagttctccaggccttctatcggcgtgtaatcctaccccggcatgtttcaaccgatcaatcccagcctccaaggttgaggtcacctgttgcgtgcggtatcttgattgctgttcagctgttgtcgcctccaaacatcgaatcgcaatcggccggaagccactcacaccactcatacgccgtgccgagtccgagcagcttcactctctcaagctgtcgagctgcaactgtcatcaagagctgtgcatcccgtgcatcttactggttgtaccaccttcctttctacgaatctatgcggcgtggtcctatgcaatacgtcgtcacaacgtgcacttcctaggctccagctatctcgacgagctgtgctgcgaccagtgcgatcgatcgacccatcaatcaacccatcgtccatattgttgtctgcacactcgtgtcggatcataggttaggtatccagcgctgcgcaccactctacgctgttatcgactgccatccgatctcaacatttactgttgacacacgaaccgaatagtccctgtcatccgaattacggtctaatgaggtaacatatcgccgctgattgtcgactatcaccgaccgacctacctgccgatcccggcttcatctcgaaagaagcgccagcttcgaacctccgccatgttgtcgcgaaacacccggtcgctgttgctggtcgcgttatcgttatctcatggcgtcatcggccagcgcaactacacccaagccacagaagccgacatgcttcgcgcccagctggcattgatgggtgatagaccggctgactgccccccttgctttaattgtctcctcccggcctacgagtgcggccagtacgccgactgtaacacctacaacgggaagtgcgagtgccccgcaggttttggaggagacgactgtttagaaccaagtttgttattccaacaattccatctatccacctgtcgctgacccatcacacagcatgcggatcgctggcgcgaggcaaagaccgaccgataagatctggcgacacttgcgactgcgatgagggctggacgggaatcaactgcaatgtctgtacgcaaaaccaagcttgtaatgcgctgatggagacgggcgaggacggtgtctgctaccagaacggcgaggtcgtcaagaacaactaccagatgtgcggcgtcaccaacgagaagatcctctccatgctcgacggcaaagtgccccaggctacattcacttgcgacaaggacacgggtttttgcgatttccaattctgggtcgatcgagtcgagtcattttactgccaccttgagaactgcgaatcgagtgccaaattcaccgacgaccagaatagcaccttctataaatgccccgatgtcaaatgcgactgtatcacagatcgcttcctctgcggtgccgatggctccatcgatctgacggatttcctcgatgagtcagtcgaggggccagcgacttttagctgtctgcaaaagaacggcggcgtcaacagctgcaagttcaaagagcccgctctcgactggatggtccagagcatcttcggagacgacagtatcctattggaatgccggtctggtgaatgtctctaccataccgaggtgcctgggtaccaacgacctgtcaagacgatcaacacgcccttgattgctggagtcattgctggctgctcattgttcctcgttgctgtcatcttgttgatatggtacctttcccgacgtcaatacaaatatggaccgattcacttggacgactccgatgacgaggccaccaagcttatgaccgaccacaagccagccacgctccatttcgaaaatgtcaactatgggctgaacggcaagtccatcctgagcggcatccgtggcatttgccatcctggggagatcacggctatcatgggtgcttctggcgcgggaaagacgagtttcctggacattttggcccgcaagaacaagcgaggccagtcatctggtgacttttacgtgaatggcgaaaaggtgaccgataccgagttcaagagcgtagttggatttgtcgatcaggaggacacgatgctccccactctcaccgtgcacgagacgattcttacgagcgcccttctccggcttccccgtagtatggggcgtgcggcgaaagagcaacgcgtatacgaagtcgagaagcaactaggcatctaccacatccgcgactcgctcatcggatcggaagagggtaagggccgaggcatctcaggtggcgagaagcgccgtgtcggtattgcctgtgaacttgtgacaagcccgtctattctgttcctggatgagcctacgagtggtctggatgcatacaatgccttcaatgtgattgagtgcttggtgacattggccaagacgtacaagcgcaccgtcatcttcacgatccaccagccccgttctaatatcgtcgccttgttcgatcgacttatcctcctggctcaaggcaagactgtctattctggaccgttcgcgcactgtcaggactattttgatgaagttggctacgcgtgcccaccgggtttcaatattgccgactatctcgtcgatctgaccatgcatgctggcagcgctggcgcctttgatgatggtagcctcttgaacgacaccgctagtagcgttgggcccagcagtacgagggcggtcaagtcggtggccagtatctccggtagcgctaccgaagatgcttcctttatcgagtcatcatcaagccggccaagaggcaagcgtacaaactcgataagagcacggcaggagcgagaactattcacgcgacggaagaataccgctgatactgctgctgacactgctgcttcgtctgatgtggaagaagaagctggagcttataagctccacaagcagacagcaggcgtcgttcctcctcagatcattgtcgaagatgttcacgatctcccgccggcggctggaacgaacctagatatcctggttcagtcatttgcggactcacagattgcgacggctatccacgacgagattcagcaggctgtgcagaccgcacatgaagcaaatggacagaacggctcctccggacccaatggcatcgttaatggtaatggcaatggcagtgcgattggtcgtggatacgctcgagttggatacctcggccagttcgtcatcctgtcgggcaggacgtggaagaatctctaccgaaatccactactcatgctgacgcactatgccattgccattctactggctgtattatccgggtacctcttctacggcttgacagacgacatccctgggttccagaaccgtctgggtctcttcttcttcctgctcgccctcttcggcttcagcacactaacgagcctgaacgtcttcgcgtccgaacgactcctgttcgtccgcgagcgagccaacgggtactactcgcccatcacctacttcgtcgccaaagtcctcttcgacatcatcccccttcgtatcatccccccaatcctaatgggcgccataatctacccgatgacaggcctcatccccgacgcaccgcacttcttcacattcatgctcatactagtgctcttcaacctggccgccgcagcaatctgtctcttcataggcatagtctgcaaagacggcagcgtagcaaacctcatcgggtccctcgtcatgctattctccctcctcttcgcgggtcttctgttaaatcatgataagattcccgacgcggcgctttggttgcagagcctgtcgattttccactacgggtttgaggcgctcattgtgaacgaggcgatcaaactcacgcttgtggataagaaatacggccttgatattacgattccgggggctgcgatcctgagtagttttgggtttaataatgcggctaagtggggggatgtattgaatttgggggtgtttgcggcggtttttgtggtccttgcttatgcggctatgcattttttgcttgtggaacggagataatgctcactgcccaggggatgggaagatgggaaggggtggtggtggtatggaagaaagggaagggaagtgggagtggggagtggttcgcttcttgttatatgtgttgcatgagagactgcccagactgcccggcagtttttatctatctgggcgagagagagcatatgaaagaggtgtttggcgttttgtgtatatcgactacggctcttttcttttctttacttggaattctggaatatagtataatacagtgaagactacagcgataaacatttttatttatttatttatttttgatcagacaacaccgactgcgcagactgcgcagatcagatgagatcgggtaatgtaacggaaggtattggatttgttatatacatatagtaagtacataggtaggtaggtaggtaggtctagtatttatgacacttgttttatatctcctcacatatctctaacatgctcttagctcaccctcttgtctcatttactttacacatcacctctctcctctctttctatgctatcccacaccatcccatttcacatacaagttacaagttcaacccatactcatccatcccaatccctctcttcgcaccatccttcccctccttcccctgcgcagtctgggcactccaactcttaacatcctccagcccaccgcccgtaagcgcctcagcgatctgtttctggcgacggatagtgcgcatactctcactcatcccatcaggtacgagtttccccgtcctgcgctcgaggtccttgagcatggcctgggtattcgtcggctcgcccagcgcatcccatatattctccaccctgtggtaagtagacgagtttccataacgagagaaagcgtcgtctgcgaattcgcgcgagattacggcctcgaggtcggactcggacaggatgaaggagcgggcgttcatgtagagggtttggattgcgtcgcggcggagggacgactggtgggcgtgtaggttcgtcgttcgctcgcgggaggctagggcactctcgaagcggtgtgggtcgagggcgacggatgtggaaagggttctcgtgttgatgtgggagcgggttagacgatcgtcttctggttctggcgcggtggcgagccgggtgttgtgggctagctttgtgcgtcggatggtggagaggtgggtgtcgcgggttgtcttgcgcgcgtagaggcccttgattcccgcgcggatgttggaccggcgggaggcggccatgcggcgcttccaggcttgcaggtcggaagacgggggcagttgagagcgtgcattggatggttctggggcggattggcgaaggtaggctgttgtggacttcttggaggagtcctttgcgcggaagacttggcgaggcggtgggatgaagccacggatgggcttgaggtcgcgtttggcttcgatggactggtcttgtggtgggttgggcacgttgataaataggggggattctggggggatggatgcttgtgagaggtgcagggaggtcgtgaagaggcgggtgagggatgggatggtcgtgctcttcgttgtgtgagcgatggttgggcgtagtgaagccatcgtgatggtcgtttcgtgcgccttcgaggcacgaagatggccttatggatggctttttatcgacaaatcgtggttttgggatacttccactgatgctgacttccaatgtgatccccaaccgattatatgtgtgtcgtcgtcgtggcctccatccagtgatgcaagtgctggaggtgctgcgagtttgatactagaaaaagtttagaggtcaattggca

SEQ ID NO: 3977 - DNA, 1908 bp, Muscodor strobelii
  misc_feature: SGI cDNA ID NO. 560999
  misc_feature: Reduced expression when VOC is produced
  misc_feature: Encodes the peptide sequence at SEQ ID NO 3978
atgctccccactctcaccgtgcacgagacgattcttacgagcgcccttctccggcttccccgtagtatggggcgtgcggcgaaagagcaacgcgtatacgaagtcgagaagcaactaggcatctaccacatccgcgactcgctcatcggatcggaagagggtaagggccgaggcatctcaggtggcgagaagcgccgtgtcggtattgcctgtgaacttgtgacaagcccgtctattctgttcctggatgagcctacgagtggtctggatgcatacaatgccttcaatgtgattgagtgcttggtgacattggccaagacgtacaagcgcaccgtcatcttcacgatccaccagccccgttctaatatcgtcgccttgttcgatcgacttatcctcctggctcaaggcaagactgtctattctggaccgttcgcgcactgtcaggactattttgatgaagttggctacgcgtgcccaccgggtttcaatattgccgactatctcgtcgatctgaccatgcatgctggcagcgctggcgcctttgatgatggtagcctcttgaacgacaccgctagtagcgttgggcccagcagtacgagggcggtcaagtcggtggccagtatctccggtagcgctaccgaagatgcttcctttatcgagtcatcatcaagccggccaagaggcaagcgtacaaactcgataagagcacggcaggagcgagaactattcacgcgacggaagaataccgctgatactgctgctgacactgctgcttcgtctgatgtggaagaagaagctggagcttataagctccacaagcagacagcaggcgtcgttcctcctcagatcattgtcgaagatgttcacgatctcccgccggcggctggaacgaacctagatatcctggttcagtcatttgcggactcacagattgcgacggctatccacgacgagattcagcaggctgtgcagaccgcacatgaagcaaatggacagaacggctcctccggacccaatggcatcgttaatggtaatggcaatggcagtgcgattggtcgtggatacgctcgagttggatacctcggccagttcgtcatcctgtcgggcaggacgtggaagaatctctaccgaaatccactactcatgctgacgcactatgccattgccattctactggctgtattatccgggtacctcttctacggcttgacagacgacatccctgggttccagaaccgtctgggtctcttcttcttcctgctcgccctcttcggcttcagcacactaacgagcctgaacgtcttcgcgtccgaacgactcctgttcgtccgcgagcgagccaacgggtactactcgcccatcacctacttcgtcgccaaagtcctcttcgacatcatcccccttcgtatcatccccccaatcctaatgggcgccataatctacccgatgacaggcctcatccccgacgcaccgcacttcttcacattcatgctcatactagtgctcttcaacctggccgccgcagcaatctgtctcttcataggcatagtctgcaaagacggcagcgtagcaaacctcatcgggtccctcgtcatgctattctccctcctcttcgcgggtcttctgttaaatcatgataagattcccgacgcggcgctttggttgcagagcctgtcgattttccactacgggtttgaggcgctcattgtgaacgaggcgatcaaactcacgcttgtggataagaaatacggccttgatattacgattccgggggctgcgatcctgagtagttttgggtttaataatgcggctaagtggggggatgtattgaatttgggggtgtttgcggcggtttttgtggtccttgcttatgcggctatgcattttttgcttgtggaacggagataa

SEQ ID NO: 3978 - protein, 635 aa, Muscodor strobelii
  misc_feature: SGI Peptide ID NO. 560999
  misc_feature (362)..(573): Pfam Id: PF01061 Pfam Desc: ABC-2 type transporter
  misc_feature (3)..(136): Pfam Id: PF00005 Pfam Desc: ABC transporter
  misc_feature (1)..(635): NCBI GI: 85119618 Blast Desc: NCU02544 [Neurospora crassa OR74A] gi|28927487|gb|EAA36439.1| NCU02544 [Neurospora crassa OR74A]
  misc_feature (1)..(635): NCBI GI: 145613530 Blast Desc: MGG_01563 [Magnaporthe grisea 70-15] gi|145020594|gb|EDK04723.1| MGG_01563 [Magnaporthe grisea 70-15]
  misc_feature (1)..(635): NCBI GI: 116181460 Blast Desc: CHGG_01358 [Chaetomium globosum CBS 148.51] gi|88185655|gb|EAQ93123.1| CHGG_01358 [Chaetomium globosum CBS 148.51]
  misc_feature (1)..(635): NCBI GI: 256730640 Blast Desc: [Nectria haematococca mpVI 77-13-4]
  misc_feature (1)..(635): NCBI GI: 261355342 Blast Desc: ATP-binding cassette sub-family G member 2 [Verticillium albo-atrum VaMs.102]
  misc_feature (1)..(635): NCBI GI: 171695880 Blast Desc: protein product [Podospora anserina] gi|170948182|emb|CAP60346.1| protein product [Podospora anserina]
  misc_feature (1)..(635): NCBI GI: 46109012 Blast Desc: FG01388.1 [Gibberella zeae PH-1]
  misc_feature (1)..(635): NCBI GI: 154322256 Blast Desc: BC1G_01275 [Botryotinia fuckeliana B05.10] gi|150850522|gb|EDN25715.1| BC1G_01275 [Botryotinia fuckeliana B05.10]
  misc_feature (1)..(635): NCBI GI: 156060765 Blast Desc: SS1G_02525 [Sclerotinia sclerotiorum 1980] gi|154699929|gb|EDN99667.1| SS1G_02525 [Sclerotinia sclerotiorum 1980]
  misc_feature (1)..(635): NCBI GI: 121699020 Blast Desc: ABC transporter (Adp1), [Aspergillus clavatus NRRL 1] gi|119396022|gb|EAW06454.1| ABC transporter (Adp1), [Aspergillus clavatus NRRL 1]
  misc_feature: Useful for introducing or modulating the production of volatile compounds
MLPTLTVHETILTSALLRLPRSMGRAAKEQRVYEVEKQLGIYHIRDSLIGSEEGKGRGISGGEKRRVGIACELVTSPSILFLDEPTSGLDAYNAFNVIECLVTLAKTYKRTVIFTIHQPRSNIVALFDRLILLAQGKTVYSGPFAHCQDYFDEVGYACPPGFNIADYLVDLTMHAGSAGAFDDGSLLNDTASSVGPSSTRAVKSVASISGSATEDASFIESSSSRPRGKRTNSIRARQERELFTRRKNTADTAADTAASSDVEEEAGAYKLHKQTAGVVPPQIIVEDVHDLPPAAGTNLDILVQSFADSQIATAIHDEIQQAVQTAHEANGQNGSSGPNGIVNGNGNGSAIGRGYARVGYLGQFVILSGRTWKNLYRNPLLMLTHYAIAILLAVLSGYLFYGLTDDIPGFQNRLGLFFFLLALFGFSTLTSLNVFASERLLFVRERANGYYSPITYFVAKVLFDIIPLRIIPPILMGAIIYPMTGLIPDAPHFFTFMLILVLFNLAAAAICLFIGIVCKDGSVANLIGSLVMLFSLLFAGLLLNHDKIPDAALWLQSLSIFHYGFEALIVNEAIKLTLVDKKYGLDITIPGAAILSSFGFNNAAKWGDVLNLGVFAAVFVVLAYAAMHFLLVERR

SEQ ID NO: 3979 - DNA, 6521 bp, Muscodor strobelii; identical to SEQ ID NO: 3976
  misc_feature: SGI EST ID NO. CUFF.11358.1
  misc_feature: Variant of the nucleotide sequence at SEQ ID NO 3977

SEQ ID NO: 3980 - DNA, 420 bp, Muscodor strobelii
  misc_feature: SGI cDNA ID NO. 561000
  misc_feature: Encodes the peptide sequence at SEQ ID NO 3981
atgctcatactagtgctcttcaacctggccgccgcagcaatctgtctcttcataggcatagtctgcaaagacggcagcgtagcaaacctcatcgggtccctcgtcatgctattctccctcctcttcgcgggtcttctgttaaatcatgataagattcccgacgcggcgctttggttgcagagcctgtcgattttccactacgggtttgaggcgctcattgtgaacgaggcgatcaaactcacgcttgtggataagaaatacggccttgatattacgattccgggggctgcgatcctgagtagttttgggtttaataatgcggctaagtggggggatgtattgaatttgggggtgtttgcggcggtttttgtggtccttgcttatgcggctatgcattttttgcttgtggaacggagataa

SEQ ID NO: 3981 - protein, 139 aa, Muscodor strobelii
  misc_feature: SGI Peptide ID NO. 561000
  misc_feature (1)..(77): Pfam Id: PF01061 Pfam Desc: ABC-2 type transporter
  misc_feature (1)..(139): NCBI GI: 46109012 Blast Desc: FG01388.1 [Gibberella zeae PH-1]
  misc_feature (1)..(139): NCBI GI: 256730640 Blast Desc: [Nectria haematococca mpVI 77-13-4]
  misc_feature (1)..(139): NCBI GI: 116181460 Blast Desc: CHGG_01358 [Chaetomium globosum CBS 148.51] gi|88185655|gb|EAQ93123.1| CHGG_01358 [Chaetomium globosum CBS 148.51]
  misc_feature (3)..(139): NCBI GI: 145613530 Blast Desc: MGG_01563 [Magnaporthe grisea 70-15] gi|145020594|gb|EDK04723.1| MGG_01563 [Magnaporthe grisea 70-15]
  misc_feature (1)..(139): NCBI GI: 85119618 Blast Desc: NCU02544 [Neurospora crassa OR74A] gi|28927487|gb|EAA36439.1| NCU02544 [Neurospora crassa OR74A]
  misc_feature (1)..(139): NCBI GI: 171695880 Blast Desc: protein product [Podospora anserina] gi|170948182|emb|CAP60346.1| protein product [Podospora anserina]
  misc_feature (1)..(139): NCBI GI: 212540944 Blast Desc: ABC transporter (Adp1), [Penicillium marneffei ATCC 18224] gi|210067926|gb|EEA22018.1| ABC transporter (Adp1), [Penicillium marneffei ATCC 18224]
  misc_feature (1)..(139): NCBI GI: 261355342 Blast Desc: ATP-binding cassette sub-family G member 2 [Verticillium albo-atrum VaMs.102]
  misc_feature (1)..(139): NCBI GI: 240104824 Blast Desc: ABC-2 type transporter family protein [Coccidioides posadasii C735 delta SOWgp]
  misc_feature (1)..(139): NCBI GI: 119178326 Blast Desc: CIMG_08008 [Coccidioides immitis RS]
MLILVLFNLAAAAICLFIGIVCKDGSVANLIGSLVMLFSLLFAGLLLNHDKIPDAALWLQSLSIFHYGFEALIVNEAIKLTLVDKKYGLDITIPGAAILSSFGFNNAAKWGDVLNLGVFAAVFVVLAYAAMHFLLVERR

SEQ ID NO: 3982 - DNA, 6521 bp, Muscodor strobelii; identical to SEQ ID NO: 3976
  misc_feature: SGI EST ID NO. CUFF.11358.1
  misc_feature: Variant of the nucleotide sequence at SEQ ID NO 3980

SEQ ID NO: 3983 - DNA, 1194 bp, Muscodor strobelii
  misc_feature: SGI cDNA ID NO. 561001
  misc_feature: Encodes the peptide sequence at SEQ ID NO 3984
atggtgaaaatcccagccttcgaagtcgagcaatggatggatgcatatgagacgacacccggtgtcctcaacatcgccgaaacatgctgctcatccatctccctcacagaacttgaagggttccacagctccccagacacagcaaagcccttgcttgatccctcgacacggatgacatacggcgccatccggggatcacaagagctccggcagaacatcgccgctacctatgccgcgaatgggacaataatagacacagataatattcttgtgacgcaaggcgcgattgcggcgaaccatctcgtgttctactcactcgtcggacctggagatcacgtagtctgtgtcttcccgacatatcaacagctctatgagatacccaaaagtctaggtgccgaagtctcgctatggaagctagaggagaaagatggatatgtgccgagcatcgagaagctcgagggacttatcaaggagaatacgaagatgatcgtaataaacaacccgaacaaccccacaggcgtaacaacacctctgcccatcctccgcgacataatctccctagcaaaaaaacacgacataatcctcctagcagacgaagtctacacaccactctatcactctctcccctcatcccaaatccccccaccctcagccctctcactaggctacgataaagtcatagccacatcctcaatgtccaaagcctgggccctggccgggattcgactaggctgggtcgcctcccagtcatctcaacttatctcgacactcgcaaaagcgagagattacacaacaataagcgtctcacagctcgatgacgccatagcgcgcttcgcgcttagtgatgatgtccgaccgaatttactggagaggaataaggaacttgctaggactaacttggcattgctcgaggaatttgtgaatgagcatagggatatggtgaagtgggtcaagcctacggctggtactacggcttttattaagtttttaaaaggggggaagcctgtggatgacgtacagttctgtagggatgtgttggacaagacgaaggttatgtttgtccctggggagttgtgctttgggcatgggttggactttgatgggtttgtgaggattgggtatgtttgtgagacggatgtgttgagggaggcgctggagagactgggagggtatgttagggagaacttggtttag

SEQ ID NO: 3984 - protein, 397 aa, Muscodor strobelii
  misc_feature: SGI Peptide ID NO. 561001
  misc_feature (36)..(388): Pfam Id: PF00155 Pfam Desc: Aminotransferase class I and II
  misc_feature (51)..(201): Pfam Id: PF00155 Pfam Desc: Aminotransferase class I and II
  misc_feature (222)..(261): Pfam Id: PF00155 Pfam Desc: Aminotransferase class I and II
  misc_feature (1)..(397): NCBI GI: 171695878 Blast Desc: protein product [Podospora anserina] gi|170948181|emb|CAP60345.1| protein product [Podospora anserina]
  misc_feature (1)..(396): NCBI GI: 256730865 Blast Desc: NECHADRAFT_89855 [Nectria haematococca mpVI 77-13-4]
  misc_feature (1)..(396): NCBI GI: 154322258 Blast Desc: BC1G_01276 [Botryotinia fuckeliana B05.10] gi|150850523|gb|EDN25716.1| BC1G_01276 [Botryotinia fuckeliana B05.10]
  misc_feature (1)..(397): NCBI GI: 46109014 Blast Desc: FG01389.1 [Gibberella zeae PH-1]
  misc_feature (1)..(397): NCBI GI: 116181458 Blast Desc: CHGG_01357 [Chaetomium globosum CBS 148.51] gi|88185654|gb|EAQ93122.1| CHGG_01357 [Chaetomium globosum CBS 148.51]
  misc_feature (1)..(396): NCBI GI: 156060763 Blast Desc: SS1G_02524 [Sclerotinia sclerotiorum 1980] gi|154699928|gb|EDN99666.1| SS1G_02524 [Sclerotinia sclerotiorum 1980]
  misc_feature (1)..(392): NCBI GI: 145238690 Blast Desc: An07g09180 [Aspergillus niger] gi|134076487|emb|CAK39683.1| protein product [Aspergillus niger]
  misc_feature (1)..(396): NCBI GI: 256720344 Blast Desc: NECHADRAFT_56076 [Nectria haematococca mpVI 77-13-4]
  misc_feature (1)..(395): NCBI GI: 121699016 Blast Desc: aminotransferase, [Aspergillus clavatus NRRL 1] gi|119396021|gb|EAW06453.1| aminotransferase, [Aspergillus clavatus NRRL 1]
  misc_feature (1)..(394): NCBI GI: 238484965 Blast Desc: aspartate aminotransferase, [Aspergillus flavus NRRL3357] gi|220701771|gb|EED58109.1| aspartate aminotransferase, [Aspergillus flavus NRRL3357]
  misc_feature (45)..(392): SWISSPROT Homolog: EC 2.6.1.1 Aspartate transaminase
MVKIPAFEVEQWMDAYETTPGVLNIAETCCSSISLTELEGFHSSPDTAKPLLDPSTRMTYGAIRGSQELRQNIAATYAANGTIIDTDNILVTQGAIAANHLVFYSLVGPGDHVVCVFPTYQQLYEIPKSLGAEVSLWKLEEKDGYVPSIEKLEGLIKENTKMIVINNPNNPTGVTTPLPILRDIISLAKKHDIILLADEVYTPLYHSLPSSQIPPPSALSLGYDKVIATSSMSKAWALAGIRLGWVASQSSQLISTLAKARDYTTISVSQLDDAIARFALSDDVRPNLLERNKELARTNLALLEEFVNEHRDMVKWVKPTAGTTAFIKFLKGGKPVDDVQFCRDVLDKTKVMFVPGELCFGHGLDFDGFVRIGYVCETDVLREALERLGGYVRENLV

SEQ ID NO: 3985 - DNA, 1573 bp, Muscodor strobelii
  misc_feature: SGI EST ID NO. CUFF.10056.0
  misc_feature: Variant of the nucleotide sequence at SEQ ID NO 3983
agcagctagactaccacttcgccataacgatcagattgtctagacacttctagaaggtagacggtgtatctcggaggtggggacagctcgctgtcgacttcctatttgccccgcgctactaataaggtacctatgccaaagccatacgtaactgatactatgatgtacgccctccgatgctgcaagttgtcaaagatcaaactttgactgggcacatataatttgatattcaacataatttgaacatataaagagagttatctgccgaagaaaatcgaattattagaccgagtcaactgcacattctctcataacaccgcagtatcagagttaaggccatcacaaaaatggtgaaaatcccagccttcgaagtcgagcaatggatggatgcatatgagacgacacccggtgtcctcaacatcgccgaaacatgctgctcatccatctccctcacagaacttgaagggttccacagctccccagacacagcaaagcccttgcttgatccctcgacacggatgacatacggcgccatccggggatcacaagagctccggcagaacatcgccgctacctatgccgcgaatgggacaataatagacacagataatattcttgtgacgcaaggcgcgattgcggcgaaccatctcgtgttctactcactcgtcggacctggagatcacgtagtctgtgtcttcccgacatatcaacagctctatgagatacccaaaagtctaggtgccgaagtctcgctatggaagctagaggagaaagatggatatgtgccgagcatcgagaagctcgagggacttatcaaggagaatacgaagatgatcgtaataaacaacccgaacaaccccacaggcgtaacaacacctctgcccatcctccgcgacataatctccctagcaaaaaaacacgacataatcctcctagcagacgaagtctacacaccactctatcactctctcccctcatcccaaatccccccaccctcagccctctcactaggctacgataaagtcatagccacatcctcaatgtccaaagcctgggccctggccgggattcgactaggctgggtcgcctcccagtcatctcaacttatctcgacactcgcaaaagcgagagattacacaacaataagcgtctcacagctcgatgacgccatagcgcgcttcgcgcttagtgatgatgtccgaccgaatttactggagaggaataaggaacttgctaggactaacttggcattgctcgaggaatttgtgaatgagcatagggatatggtgaagtgggtcaagcctacggctggtactacggcttttattaagtttttaaaaggggggaagcctgtggatgacgtacagttctgtagggatgtgttggacaagacgaaggttatgtttgtccctggggagttgtgctttgggcatgggttggactttgatgggtttgtgaggattgggtatgtttgtgagacggatgtgttgagggaggcgctggagagactgggagggtatgttagggagaacttggtttagatagtgatatctgagatgtgaacgtaaacccc

SEQ ID NO: 3986 - DNA, 663 bp, Muscodor strobelii
  misc_feature: SGI cDNA ID NO. 561002
  misc_feature: Encodes the peptide sequence at SEQ ID NO 3987
atggctcctaagatcgcaatcgtctattactccatgtacggccatatcggcaagctcgcgcaagccgaagaaaatggtatcaaggccggcatcaaggaggcggccgagaaggctggcgtaagcgaagccgaggctggaagcgtcaagctcttccaaatcccagagacacttccccaggaagttctcaccaagatgcatgcccctggccaggacaccagcatcgagctcctcgagagcccggacacccttcaagagtacgatggcttcctgctgggcatcccaactagatacggaaatttccctgcacagtggaagaccttctgggacaagactggcaagcagtgggccactgggggttatcacggcaagatggccggcctgttcatctcgactggctctcccggcggtggtcaggaatcgacagctcttgcttccatgtctactctcgctcaccacggcatcatctacgtgcctttcggctacgccaaggagttcgctaagctgactaacctcgatgaggtacacggcggtagcccctggggagctggcacctacgccggtggtgatggatctcgccagcctactcagctcgagctcgatctcgcatttacacagggcaaggtattctacgagactgttgccaagtacgccggccagaagtga

SEQ ID NO: 3987 - protein, 220 aa, Muscodor strobelii
  misc_feature: SGI Peptide ID NO. 561002
  misc_feature (7)..(153): Pfam Id: PF00258 Pfam Desc: Flavodoxin
  misc_feature (78)..(153): Pfam Id: PF00258 Pfam Desc: Flavodoxin
  misc_feature (1)..(216): NCBI GI: 261355357 Blast Desc: conserved [Verticillium albo-atrum VaMs.102]
  misc_feature (1)..(218): NCBI GI: 116181438 Blast Desc: CHGG_01347 [Chaetomium globosum CBS 148.51] gi|88185644|gb|EAQ93112.1| CHGG_01347 [Chaetomium globosum CBS 148.51]
  misc_feature (1)..(218): NCBI GI: 256730635 Blast Desc: [Nectria haematococca mpVI 77-13-4]
  misc_feature (1)..(218): NCBI GI: 46109042 Blast Desc: FG01403.1 [Gibberella zeae PH-1]
  misc_feature (1)..(215): NCBI GI: 171695866 Blast Desc: protein product [Podospora anserina] gi|170948175|emb|CAP60339.1| protein product [Podospora anserina]
  misc_feature (1)..(215): NCBI GI: 154297652 Blast Desc: BC1G_12671 [Botryotinia fuckeliana B05.10] gi|150858494|gb|EDN33686.1| BC1G_12671 [Botryotinia fuckeliana B05.10]
  misc_feature (1)..(215): NCBI GI: 1168402 Blast Desc: ALTA7_ALTAL RecName: Full=Minor allergen Alt a 7; AltName: Full=Allergen Alt a VII; AltName: Allergen=Alt a 7 gi|467619|emb|CAA55069.1| minor allergen [Alternaria alternata]
  misc_feature (1)..(215): NCBI GI: 189203651 Blast Desc: minor allergen Alt a 7 [Pyrenophora tritici-repentis Pt-1C-BFP] gi|187985260|gb|EDU50748.1| minor allergen Alt a 7 [Pyrenophora tritici-repentis Pt-1C-BFP]
  misc_feature (1)..(218): NCBI GI: 156031009 Blast Desc: SS1G_14285 [Sclerotinia sclerotiorum 1980] gi|154700676|gb|EDO00415.1| SS1G_14285 [Sclerotinia sclerotiorum 1980]
  misc_feature (1)..(215): NCBI GI: 169602503 Blast Desc: SNOG_04253 [Phaeosphaeria nodorum SN15] gi|111066893|gb|EAT88013.1| SNOG_04253 [Phaeosphaeria nodorum SN15]
MAPKIAIVYYSMYGHIGKLAQAEENGIKAGIKEAAEKAGVSEAEAGSVKLFQIPETLPQEVLTKMHAPGQDTSIELLESPDTLQEYDGFLLGIPTRYGNFPAQWKTFWDKTGKQWATGGYHGKMAGLFISTGSPGGGQESTALASMSTLAHHGIIYVPFGYAKEFAKLTNLDEVHGGSPWGAGTYAGGDGSRQPTQLELDLAFTQGKVFYETVAKYAGQK

SEQ ID NO: 3988 - DNA, 2492 bp, Muscodor strobelii
  misc_feature: SGI EST ID NO. CUFF.10105.2
  misc_feature: Variant of the nucleotide sequence at SEQ ID NO 3986
tgatttgtgtgtgattatctgcgagattgcgtagcctttaccaagggatgaagtttgcgaaatgtatactcggtgatgtgccaggtctagaccttttccctaaaaggtgtttcttaccataagctacctggggattgatcacattgacacgtttagcgccgtaacatttccgtactcactctatccgccgcgtgtaaccacataagcaatcgcaagagcattaaatcccgtagcgtttcatagatcaatagttactgtaatatacgcgctgtccaatacacagagagtacttattggggccagactcaccgaaccctgaagagcgggatcgacttggcatgcgggtttggcctggttgggaaggttaggtcgcaatgatctgaaagtcggtaaccgggacgagacgcgctgtaacccactgctggaactccaacatcaaattaacacatgcaaacagtaataacaacgacgaagcgatgcaatgaatttgaacctcggcccaccacttgctatcagagtgttctcttctcgctgagatatatcatcgagattcgtctcttatgaggaaactgggtcgttgatcatcgacatgaaacatcatagctcatatagatagacacgatatataatgctttgtcacagatcgcacttgatgacagtcgtgccaaatcgttgtcgagcggcaactctagtggggtggagggttcacgagggttatctttttcctcctggctactgcaggtcacagctagcgtcaccagttagtccctgacctagcgaactctcgacatcgtaagccattattcagctggtctccgtctcgaatctgttccatgcatgattgttaccagctagaagctcgtagcccagacgaactgactcgtatcgaccttcccggcgcctcgtactgaaaacataggagaatttgcaacaattgaaaggacctcgcgtcaacgtattgtgcgtatttgtccgctcttccccgttgtgggggtgtttcggtcgaagccagcaagggagttgcgcttacgctagaagccttgtccatacccatttgtaacacctcgcacgattttgataatcagggaataagcagattcagtggtgatatgctatacacaatcatcacgacaaaagtgtgttaatgctacgtcacacgtcacagaattcgcgcatggctcagcatgcaaagcaccgggtaacaatatcgctgagacgcaatgaccccatcagctagggaggagattcaagatctgtctcatgagtctaggacaattggtaagtgattacagaatcgctatgtgaagttccatacaggtccctgcttggcgtacatgatatcgacatttgggtattggtgatgaggctagcatgtatgtaatcatatgcatgaagtgaaaagcgagatgagcaatgcatcatcacacattcaccagcctgccgacgacccctcttgcatttagcgcgatgccactcagactgggcgtgggtaacggttataagctttcatcatatgtggcacctatgttccagaactatataatcttgcactcgcccttccgattcattgtctgctctgttcatcaccagtaaacactttaacatcactatatccttatcatcttacagcattcttacacaatggctcctaagatcgcaatcgtctattactccatgtacggccatatcggcaagctcgcgcaagccgaagaaaatggtatcaaggccggcatcaaggaggcggccgagaaggctggcgtaagcgaagccgaggctggaagcgtcaagctcttccaaatcccagagacacttccccaggaagttctcaccaagatgcatgcccctggccaggacaccagcatcgagctcctcgagagcccggacacccttcaagagtacgatggcttcctgctgggcatcccaactagatacggaaatttccctgcacagtggaagaccttctgggacaagactggcaagcagtgggccactgggggttatcacggcaagatggccggcctgttcatctcgactggctctcccggcggtggtcaggaatcgacagctcttgcttccatgtctactctcgctcaccacggcatcatctacgtgcctttcggctacgccaaggagttcgctaagctgactaacctcgatgaggtacacggcggtagcccctggggagctggcacctacgccggtggtgatggatctcgccagcctactcagctcgagctcgatctcgcatttacacagggcaaggtattctacgagactgttgccaagtacgccggccagaagtgactacaaggcggcaagaatggggttgctacgaagaaggaggaaccggcacaagccgcgtctagcggaacgcagtcccggacacccgcagcggctccgcaacagaagaagaataaagagggaccttgtgggcttccgtccaaatgcgttgtcttatgagatatcctagaagaaaataaaatataaacaaa

SEQ ID NO: 3989 - DNA, 1329 bp, Muscodor strobelii
  misc_feature: SGI cDNA ID NO. 561003
  misc_feature: Encodes the peptide sequence at SEQ ID NO 3990
atggagaaaacgaattcgaatatcgacgcgaatagcgtctcgaatggaggagatacgggcaaggacactgacaccgatacttcgagagacaatgtcccggttcttcccagtaatccgccgccagatggaggtttagaggcatggctggtattagtcggagcgttcgtcatcatggtctatacctacggccttgtaaacagttttggtgtgtttcagacgtattacgagaccgatttattgacagaccgttcgtcctcggatatcagctgggttggatcgctgcaagccgctcttctcagtctgacagggatcgtgagcgggccattatgtgatatgggatacgccaggcctatggttgctgctgggttattcctggagttgctgggcatgttcacaacaagtctgtgcaaagagtattggcaagtgatcattgcacaaggtctcaccgttggcttgggttcgggtctgtgttttctcccgtccgctgctgtattgagccagtactttgcccgtcgccgtgctctcgttctcggtatccagtccgtcggatcacctctcgctggaatcgtattccctatcattttcggaagactgcaacctcttgtcggcttcggatgggcaactcggatcatcgctttcatccttctcgctctcgcacctctgcccctccttttcttgaaaccaagattgccgccacaggctaagggtcgtggattcatcgatcggagcgcactcaccgacataccattcatactctttggtattgcctcattcttcgccttccttggtttatacgtccctgtcttttacgtgcagctatactccattcgctacaatatcgtaagcgaggacttctcgccctacctcgtgacgttgctgaataccgggagcgtgtttggccgtcttctgccgaatttcttcgcggacaaatggggatccatggaaatgctcattgcgacgatgttcggtgcttcggttcttgctttcggttggttcgggatacacaatgcggcaggcatcatcgtcttcgtgctgctcttcggtttcttcaacggcggcgtaacaagtttaccgccaagcgcgattgcatcgcttacaccggatttcagtcgtcttggtactcgattgggcatggtttttgtgcctttgggcatatctgtgctcattggcaacccaatcgcaggtgcgattttagggaactcgtacgtcctggctgggtggcagggcgtcattgcgttttcgggggccacgctgttgataggctcattcttcatgttctggtcgaagttctttgacaataagcgaaagagggctgcggcccctgcttaa

SEQ ID NO: 3990 - protein, 442 aa, Muscodor strobelii
  misc_feature: SGI Peptide ID NO. 561003
  misc_feature (49)..(391): Pfam Id: PF07690 Pfam Desc: Major Facilitator Superfamily
  misc_feature (49)..(368): Pfam Id: PF07690 Pfam Desc: Major Facilitator Superfamily
  misc_feature (37)..(436): NCBI GI: 116181436 Blast Desc: CHGG_01346 [Chaetomium globosum CBS 148.51] gi|88185643|gb|EAQ93111.1| CHGG_01346 [Chaetomium globosum CBS 148.51]
  misc_feature (2)..(436): NCBI GI: 171695864 Blast Desc: protein product [Podospora anserina] gi|170948174|emb|CAP60338.1| protein product [Podospora anserina]
  misc_feature (14)..(435): NCBI GI: 116208398 Blast Desc: CHGG_03492 [Chaetomium globosum CBS 148.51] gi|88184089|gb|EAQ91557.1| CHGG_03492 [Chaetomium globosum CBS 148.51]
  misc_feature (1)..(429): NCBI GI: 242817124 Blast Desc: monocarboxylate transporter, [Talaromyces stipitatus ATCC 10500] gi|218713354|gb|EED12778.1| monocarboxylate transporter, [Talaromyces stipitatus ATCC 10500]
  misc_feature (3)..(419): NCBI GI: 156048833 Blast Desc: SS1G_08123 [Sclerotinia sclerotiorum 1980] gi|154692522|gb|EDN92260.1| SS1G_08123 [Sclerotinia sclerotiorum 1980]
  misc_feature (1)..(422): NCBI GI: 238840867 Blast Desc: monocarboxylate permease-like protein [Microsporum canis CBS 113480]
  misc_feature (41)..(421): NCBI GI: 145613520 Blast Desc: MGG_01568 [Magnaporthe grisea 70-15] gi|145020587|gb|EDK04716.1| MGG_01568 [Magnaporthe grisea 70-15]
  misc_feature (42)..(398): NCBI GI: 121711934 Blast Desc: MFS monocarboxylate transporter, [Aspergillus clavatus NRRL 1] gi|119401734|gb|EAW12156.1| MFS monocarboxylate transporter, [Aspergillus clavatus NRRL 1]
  misc_feature (22)..(435): NCBI GI: 255952965 Blast Desc: Pc21g01690 [Penicillium chrysogenum Wisconsin 54-1255] gi|211588946|emb|CAP95066.1| Pc21g01690 [Penicillium chrysogenum Wisconsin 54-1255]
  misc_feature (4)..(440): NCBI GI: 145229117 Blast Desc: An01g04400 [Aspergillus niger] gi|134054966|emb|CAK36975.1| protein product [Aspergillus niger]
MEKTNSNIDANSVSNGGDTGKDTDTDTSRDNVPVLPSNPPPDGGLEAWLVLVGAFVIMVYTYGLVNSFGVFQTYYETDLLTDRSSSDISWVGSLQAALLSLTGIVSGPLCDMGYARPMVAAGLFLELLGMFTTSLCKEYWQVIIAQGLTVGLGSGLCFLPSAAVLSQYFARRRALVLGIQSVGSPLAGIVFPIIFGRLQPLVGFGWATRIIAFILLALAPLPLLFLKPRLPPQAKGRGFIDRSALTDIPFILFGIASFFAFLGLYVPVFYVQLYSIRYNIVSEDFSPYLVTLLNTGSVFGRLLPNFFADKWGSMEMLIATMFGASVLAFGWFGIHNAAGIIVFVLLFGFFNGGVTSLPPSAIASLTPDFSRLGTRLGMVFVPLGISVLIGNPIAGAILGNSYVLAGWQGVIAFSGATLLIGSFFMFWSKFFDNKRKRAAAPA

SEQ ID NO: 3991 - DNA, 4953 bp, Muscodor strobelii
  misc_feature: SGI EST ID NO. CUFF.10105.3
  misc_feature: Variant of the nucleotide sequence at SEQ ID NO 3989
tacacatcctcgctaggtaacgatttatttcgtcacagaaacttgccgtgagatagattctctataatatgaactcgttgaggcataatcaaatgcttcttgtcaccgatgagtgccgttagttccattgagcttcgtggcatggtacagaagtcgtcaatcgccgacgaaatatgggggccaagcccaagcgatgaggagacgcaagcaaggctcgacaccctgtcatcattcttcgcgcacgttgagcaagagcaaaaattcgagcaagcgtatgagcatgacttgatcgccgcgatacgcctcttgaggcagtttcccgaaaagcggaagtccgaactcagaacgggccaggtatcgacaccagtacaaagctctacaactagctcgcctccgtcagaagtgttgctcttcgaccttgccgtccgatgcatgttcctcgtagcgtgctcgcctgccggctcctcaacaatgggcggcgggagtagtatcttccggcccaattggaaggagtctgagactcttgagcgctatctcgcgcgcatcttccccatgacacgcgccccgcaacaggatctggccagctttaggctaggcaaactcagcgcaagctacctacggtcgtttgccaatgttcaaatcaggtggactgatcatctcaccgaccatctcatcttgcttaaaggcgaaggctggaagagcctgtatttgtttcggcacccgggctttctcaaggtgtcgctcgaggcgctcagcaacgctgacgaggatatgctgtatacgcctctggaggcgctaagactaggatgtttgtcaccaaatctactgaaggagacgctgatgacccttgatatcatatttcccgtcataggcaataatgcttcgcgtagcatcctagaaaaggaggtggagaggaatgggcttgataaatatttcttggatcgcttctatctagactctagagaccacgagcgaccatcggatgccgtggatcccagcgatgtaaggtcattatatgagaagtacccctattgggcggacagactgttcgatatctggcgagaagctgacgatccgacaccaacaacaagcatagagcggtggaccgaagcaaggagaaaccctcgcttcacgtactggtgcactgtcgtgtcgattctcattgctatctccttcggcatgatcgctacagcattgaccgccgtacaagtatggatttcttggtgtgattggatagacaacccctcggcggcacagtgtggctacaagaagagttcttgaatgactaagtaatccatatcgcccttttttctgacttagctgggtacactgtaagtatacgtatgagaagggtctggcagtctaggtcggtaagttatctattgggccatgtcagtgccgaccgccattatcgaaggggcgcagcacgcatggtgcattgctgtatgcaggctggcagaataaggagtttggcatccattcggagtgatcgcagttaactccctctattggtctgcatttttatgctgaaccctggcttcctcgccggcgctttcgcaaaggcctacctacaatgggcggtacctggatagcgattagttccacttagcacagtggcagcggtacgcagaagatatatgctctcgcaagttaattatgccaatatcagctgtctctgggcttcgggtggcggatgtaatttgatgcaggctacgaggtatgctagaggcagaggcttctaggcggggcacgagaccgacatggaatcccatcaagcaaaatatcacatcgcgtcacgtcgcgtcgtatgacgctcccaacccgcacgcctcttcacctgcccgacgaggccatgagcacaagagatgggactcgaaaaaccggttgttttaagtagttcttccacatacaccacaatctgtacctaggtctatacaaataaacaatcagttataaaattcaccataataaagtagggtattgatttttaaaagattataaaaaatggatttatagttgagttaaaaagtatttaaagtaaatagcataggcgtagcgaatttggtagcatgtggttgagttggaatcccatctcttgtgctcatggcctcgcccgactcctcccaccagtagacaatacaaacaatcttgtgatttgacctcaatcgctcaatagactgtgacgccaccaggtcatctctacgtcgtgtcggggaccggtgtgtcaaggagcgacgcgatgaattcctcggtcaatactctaggccccgttcattcctgtcagctttgccatttactacggctagatgttggcaatgagtacatcaaggtagccctaccatttatcaaggtgttcaccaacgctgaggcagggtgcctttttctacaagagaggctaaagcaattcgctccgcccgattcgtggttgtacgagggcagcacttctgcccggctagctctacttttaaaatactcgatagtatttgatgatatcttgttggaacttgctacttacttcgatcgtggccgctgttgcgttgaatgccagtggtcacattcgaacgatgatgcttacgttcctctgctctaggcctagaatcagaaaacacgcaaagcgctggaaagatggtctccgtacccagaaaggtccgacagttactactaaagctttgactatcaagtttcagcggcgcacatatacgtggatgtcgtgtatttcaagaactatactccaatgccttaataattaggcacattagtaaatctccggtagatctatgtcgtgcttggcacataaaacacacgccatctcggtgataggattgttcactaatccaccatgtgaaatccggccagaattccggttacaatccggctgcagaagggcgtacatgacaacttttttgacaagtctgacaagaatttgtaagctgtcggccgacaatgagctagtagatagcgggagaatagacctgaccggaaatgatcacctgcccactatcgccgatgcgggccggccaggactcactaatatgtaatcacgatatgagatgtgggaactctatcgccgccatggaataggaataagtataagtcggttcagcgacccgactgctttgtttttcgtgtatttgtgtttactgatcagtgtgcttttgaatagagggtttgttaatcattatcttgtttgcgcgaatatcacagcattgaattgcgttatacaacactagagttgcagtttcgaccattttggagccacggcatcatcaggatcaagacttaccaggattctccaatactttgggatctcctcatattcacccaaggcgtttgccacataatccaggcgcattgcactcctatcgagcaatacaacgactgtgcgatatatcctgacattctgttcgaataagaaagcgaacaatcgtagactacagccgaatggagaaaacgaattcgaatatcgacgcgaatagcgtctcgaatggaggagatacgggcaaggacactgacaccgatacttcgagagacaatgtcccggttcttcccagtaatccgccgccagatggaggtttagaggcatggctggtattagtcggagcgttcgtcatcatggtctatacctacggccttgtaaacagttttggtgtgtttcagacgtattacgagaccgatttattgacagaccgttcgtcctcggatatcagctgggttggatcgctgcaagccgctcttctcagtctgacagggatcgtgagcgggccattatgtgatatgggatacgccaggcctatggttgctgctgggttattcctggagttgctgggcatgttcacaacaagtctgtgcaaagagtattggcaagtgatcattgcacaaggtctcaccgttggcttgggttcgggtctgtgttttctcccgtccgctgctgtattgagccagtactttgcccgtcgccgtgctctcgttctcggtatccagtccgtcggatcacctctcgctggaatcgtattccctatcattttcggaagactgcaacctcttgtcggcttcggatgggcaactcggatcatcgctttcatccttctcgctctcgcacctctgcccctccttttcttgaaaccaagattgccgccacaggctaagggtcgtggattcatcgatcggagcgcactcaccgacataccattcatactctttggtattgcctcattcttcgccttccttggtttatacgtccctgtcttttacgtgcagctatactccattcgctacaatatcgtaagcgaggacttctcgccctacctcgtgacgttgctgaataccgggagcgtgtttggccgtcttctgccgaatttcttcgcggacaaatggggatccatggaaatgctcattgcgacgatgttcggtgcttcggttcttgctttcggttggttcgggatacacaatgcggcaggcatcatcgtcttcgtgctgctcttcggtttcttcaacggcggcgtaacaagtttaccgccaagcgcgattgcatcgcttacaccggatttcagtcgtcttggtactcgattgggcatggtttttgtgcctttgggcatatctgtgctcattggcaacccaatcgcaggtgcgattttagggaactcgtacgtcctggctgggtggcagggcgtcattgcgttttcgggggccacgctgttgataggctcattcttcatgttctggtcgaagttctttgacaataagcgaaagagggctgcggcccctgcttaaacatggggcgagagagacggctcaaaatgatgagatgtcaatttattcctaaacgatacccagatagattttttgcatatagactgaatatcggaagatagttacacttcacggtacttttctttgacggagtgacgcgctgtgtgccgttcttgtcgtgatatagagcacagtattatacgc

SEQ ID NO: 3992 - DNA, 1173 bp, Muscodor strobelii
  misc_feature: SGI cDNA ID NO. 561004
  misc_feature: Encodes the peptide sequence at SEQ ID NO 3993
atgagtgccgttagttccattgagcttcgtggcatggtacagaagtcgtcaatcgccgacgaaatatgggggccaagcccaagcgatgaggagacgcaagcaaggctcgacaccctgtcatcattcttcgcgcacgttgagcaagagcaaaaattcgagcaagcgtatgagcatgacttgatcgccgcgatacgcctcttgaggcagtttcccgaaaagcggaagtccgaactcagaacgggccaggtatcgacaccagtacaaagctctacaactagctcgcctccgtcagaagtgttgctcttcgaccttgccgtccgatgcatgttcctcgtagcgtgctcgcctgccggctcctcaacaatgggcggcgggagtagtatcttccggcccaattggaaggagtctgagactcttgagcgctatctcgcgcgcatcttccccatgacacgcgccccgcaacaggatctggccagctttaggctaggcaaactcagcgcaagctacctacggtcgtttgccaatgttcaaatcaggtggactgatcatctcaccgaccatctcatcttgcttaaaggcgaaggctggaagagcctgtatttgtttcggcacccgggctttctcaaggtgtcgctcgaggcgctcagcaacgctgacgaggatatgctgtatacgcctctggaggcgctaagactaggatgtttgtcaccaaatctactgaaggagacgctgatgacccttgatatcatatttcccgtcataggcaataatgcttcgcgtagcatcctagaaaaggaggtggagaggaatgggcttgataaatatttcttggatcgcttctatctagactctagagaccacgagcgaccatcggatgccgtggatcccagcgatgtaaggtcattatatgagaagtacccctattgggcggacagactgttcgatatctggcgagaagctgacgatccgacaccaacaacaagcatagagcggtggaccgaagcaaggagaaaccctcgcttcacgtactggtgcactgtcgtgtcgattctcattgctatctccttcggcatgatcgctacagcattgaccgccgtacaagtatggatttcttggtgtgattggatagacaacccctcggcggcacagtgtggctacaagaagagttcttga

SEQ ID NO: 3993 - protein, 390 aa, Muscodor strobelii
  misc_feature: SGI Peptide ID NO. 561004
  misc_feature (15)..(375): NCBI GI: 171682624 Blast Desc: protein product [Podospora anserina] gi|170941271|emb|CAP66921.1| protein product [Podospora anserina]
  misc_feature (105)..(378): NCBI GI: 256725458 Blast Desc: NECHADRAFT_83107 [Nectria haematococca mpVI 77-13-4]
  misc_feature (133)..(360): NCBI GI: 116208408 Blast Desc: CHGG_03497 [Chaetomium globosum CBS 148.51] gi|88184094|gb|EAQ91562.1| CHGG_03497 [Chaetomium globosum CBS 148.51]
  misc_feature (72)..(372): NCBI GI: 256734970 Blast Desc: NECHADRAFT_75762 [Nectria haematococca mpVI 77-13-4]
  misc_feature (103)..(390): NCBI GI: 169601684 Blast Desc: SNOG_03713 [Phaeosphaeria nodorum SN15] gi|160705991|gb|EAT88918.2| SNOG_03713 [Phaeosphaeria nodorum SN15]
  misc_feature (13)..(369): NCBI GI: 189199848 Blast Desc: conserved [Pyrenophora tritici-repentis Pt-1C-BFP] gi|187983360|gb|EDU48848.1| conserved [Pyrenophora tritici-repentis Pt-1C-BFP]
  misc_feature (135)..(372): NCBI GI: 116202897 Blast Desc: CHGG_09333 [Chaetomium globosum CBS 148.51] gi|88177851|gb|EAQ85319.1| CHGG_09333 [Chaetomium globosum CBS 148.51]
  misc_feature (59)..(214): NCBI GI: 46138075 Blast Desc: FG10552.1 [Gibberella zeae PH-1]
  misc_feature (130)..(361): NCBI GI: 169618469 Blast Desc: SNOG_12425 [Phaeosphaeria nodorum SN15] gi|111059118|gb|EAT80238.1| SNOG_12425 [Phaeosphaeria nodorum SN15]
  misc_feature (161)..(369): NCBI GI: 156033223 Blast Desc: SS1G_13687 [Sclerotinia sclerotiorum 1980] gi|154699090|gb|EDN98828.1| SS1G_13687 [Sclerotinia sclerotiorum 1980]
MSAVSSIELRGMVQKSSIADEIWGPSPSDEETQARLDTLSSFFAHVEQEQKFEQAYEHDLIAAIRLLRQFPEKRKSELRTGQVSTPVQSSTTSSPPSEVLLFDLAVRCMFLVACSPAGSSTMGGGSSIFRPNWKESETLERYLARIFPMTRAPQQDLASFRLGKLSASYLRSFANVQIRWTDHLTDHLILLKGEGWKSLYLFRHPGFLKVSLEALSNADEDMLYTPLEALRLGCLSPNLLKETLMTLDIIFPVIGNNASRSILEKEVERNGLDKYFLDRFYLDSRDHERPSDAVDPSDVRSLYEKYPYWADRLFDIWREADDPTPTTSIERWTEARRNPRFTYWCTVVSILIAISFGMIATALTAVQVWISWCDWIDNPSAAQCGYKKSS

SEQ ID NO: 3994 - DNA, 4953 bp, Muscodor strobelii; identical to SEQ ID NO: 3991
  misc_feature: SGI EST ID NO. CUFF.10105.3
  misc_feature: Variant of the nucleotide sequence at SEQ ID NO 3992

SEQ ID NO: 3995 - DNA, 3846 bp, Muscodor strobelii
  misc_feature: SGI cDNA ID NO. 561005
  misc_feature: Encodes the peptide sequence at SEQ ID NO 3996
atgtccattacattgacaatctcaaaggccggattgaagctgtcgaggcatcgagccactgagattgaagataatgtcgacgaaactgggctggagtcgggaaagccagacatcacctccttggaaaatttcgcttcaaaagttcgattctttaaacgacaagagaataaggaccacgatgatccaagcaagcagtctggtgctggtgctgcggccaccggctcagagaagaatcacaacacctcgctgcaaggagaagcgccagagcctgcaggccatctttcacttacagggctgcccggccaaggtctagagtcagagaccgtaggaactgcacactcagctcatgtatcgcggccgacacccgctccattcgcgaatgaggtgcgcgcgaatgagcctaccgtaactaggcaaggtgaaagcactggattagatagcttgagcacgaaggcgccatccggaacaggaaccacgatcactacagcaacttcaagcaccattggccgggactcgactcagacgaacctgactatcccagaaaatgcccagtgcgacagtggtgtcgacgtcggaaatggctctaacttgcagagtgagaacagagaaagcatctctcagaagtcaccaatccagacacctgaccagtcggtagcgcgcacgagcctgttgtcacgctttgctaataagagacctgctcaggtccatattccgggaagcaagcttaacttgctgaagaaaatcaagactgcgactcacgacactgtcaagaccgaagatgcgtcgttctatggtgcggacagagaaaagctacgaaatttctctcgcatcctcgcgtcgaagaaagaccagattgaactttttggcaaggaacttcctctctgtagagtctttcttgtccaagtgaccaaagggaaagcgaaacctggcacatacatctgcatccagggactaaaaaacgctgcggatatcacgcgaatccattcgaccatgtcccataagcgatacagaccgctatatgaaccattgagactctgctatgacacttcggacttaacacatgtgggaaagcctgaaacaactgaagcatctcagtcttcatcatcatccggttcaatgttcggttcaggcttgcccactggataccttagtccgataccagagcctggggagcctccagacttcttgttgcccaccgacttcgattctggcaagcaaacatcttaccagtttttgccgatttctgatgataggacatactgtggtgcgctctctcggttgccagtcaacggaaaaactagcttatttacgatcgggggcttggtcgaggtacatggcatgccttgtctcatgacatgtgaacataattcctgggagccttctgcgatgtcggcaaactctttgtcagagacattggtggaaagtgatatcccctcaggtgtggaggggcctcttgtattctgctcaggggagcttcccgaagactctagcaacgatatcgaaacctcgaagacatacacagaggcggcaattacccggttaggcagttttggggatacggaatggcaagatcttagcgtggcgggcgccctaagaaaagggcgtgaatggtgcctcgtccccatagaaagatactcagtccttcccaatttcatcgagaaatcggctagtaaaaagggaaagagcgttgataagccagaagtattctacgttgacgcggtcgcggatcctaaacctgggcaaccggtctacattgctaatgccgggcactgctctggtattgtgtcagaaaacacgtcctttttgatagggggtgccacagatggagtcatggaggtctggactgttgacattgattctgttcaaggccttcagaaaggcgactctggctcgtgggtccttgacacctctgtcccatcaagatacaaggcggtaggctctatcatcgcatcatcgcagcaaacagcccacttcgttgctttgaaagatcagttctctgagatagaaggaggcgcggtggacatggggagaagcccgccaatttgtcttccaccagcgtttcgatcccttgttcaatgcgccttcatggccttcaaacgcaatgaccctacagccacatggttcatagatgaagcactatccttgggcgcgttgaagcagatgagcaatggctggtatctgccagtcatcaaagcccttcttggtgtagtagacttcaaagatgacatgccgccaggggttaatattccattatcgcagttggaaactgagcatctgaaaggtgtcctgctacgctatggtacagccatcttggacggcctcgaatatgactcccatatgtctgcaaaggatttcggaaagctgaatatacaagagtggcggattcttgatatactaaaaagagccactgctaaactatcttatgaggcaagaattgaacgtcaacctgagcattatatctctggacgaaaaaagaatacaaaacacgccaacagcaactcaatctgggaacaccgtcaccgtagagactcgctggttacgaatgctcgtgagcacgttgttagcccacaatatgaggcctctggattcttgtttgagcgcagagcagatggtccatcgtctatcacgctcttgatcatattaccaatggttgctttcggaagcctgataggcattgccgctgcaatcgtacttcgcgaggccgagaaacgcaatactcacagccttttccctactaatacagccaaagctgcttccctcggtgcagcgcttggggccatctccgcaaccccattgatcctccagatagcactcgtctattttcaccgcaagtattactgggctatctacgccttggaccttcacctatcatccgcagaccctcgtgtaaggaaacctgttgtattttttgcgactgttattatgacactggtgatcattgcctcaagctttgcacgagctatcttgcccgcactctacctcgctagagacgttggcattaccgatactcgcgctctggtgatcgcagcggcagcggcagcggcaccaatgctactgtctacagcgtcaccgacaatactatggatgttgatcaaagcagagactacgagaatggtctggagctacgggtttgcttggtggcaattatctacaggactggacgcgcttgctggatacgtcttcgcgagagttgctcagaatcaaggcgtcaattttattcagccatcctcgggtgctgctagctttggtttcttcggcggactcatgattttgtggcctttccttttgctgctacccttcattccctgtatcattcccctcttgttgtatcgtaggaggaggctcatatccaaacggaaaccgagcaacgaagaggccttgaaaggcgaaaatgcgggaaatggcattcgcgactcaactgcacctaaatccacagagatgaccggcgctctcgcgtcttcgctgaagacgcggacagagaggcaatgggctgattctccactggtgcattacggccttccgccggagttgtcatactggagcacaccctcatacggcgggtctactgcagtcgggacgacatcatcgtacagagggctgactgtccatatatctccccctagccatcttagtaatcgaggcccgtccttcccagaattgcccacggaaccacccgagcaccgtgaccaggaagtaccgagaaacctttccatatcagatcctctccctcccgatccggcattatccaatatcggagattggctggtacacgaacctgcttacgacattgctgcaaggcaaggtgacctttattctccaagcaacgaggatgagtggtggacttag

SEQ ID NO: 3996 - protein, 1281 aa, Muscodor strobelii
  misc_feature: SGI Peptide ID NO. 561005
MSITLTISKAGLKLSRHRATEIEDNVDETGLESGKPDITSLENFASKVRFFKRQENKDHDDPSKQSGAGAAATGSEKNHNTSLQGEAPEPAGHLSLTGLPGQGLESETVGTAHSAHVSRPTPAPFANEVRANEPTVTRQGESTGLDSLSTKAPSGTGTTITTATSSTIGRDSTQTNLTIPENAQCDSGVDVGNGSNLQSENRESISQKSPIQTPDQSVARTSLLSRFANKRPAQVHIPGSKLNLLKKIKTATHDTVKTEDASFYGADREKLRNFSRILASKKDQIELFGKELPLCRVFLVQVTKGKAKPGTYICIQGLKNAADITRIHSTMSHKRYRPLYEPLRLCYDTSDLTHVGKPETTEASQSSSSSGSMFGSGLPTGYLSPIPEPGEPPDFLLPTDFDSGKQTSYQFLPISDDRTYCGALSRLPVNGKTSLFTIGGLVEVHGMPCLMTCEHNSWEPSAMSANSLSETLVESDIPSGVEGPLVFCSGELPEDSSNDIETSKTYTEAAITRLGSFGDTEWQDLSVAGALRKGREWCLVPIERYSVLPNFIEKSASKKGKSVDKPEVFYVDAVADPKPGQPVYIANAGHCSGIVSENTSFLIGGATDGVMEVWTVDIDSVQGLQKGDSGSWVLDTSVPSRYKAVGSIIASSQQTAHFVALKDQFSEIEGGAVDMGRSPPICLPPAFRSLVQCAFMAFKRNDPTATWFIDEALSLGALKQMSNGWYLPVIKALLGVVDFKDDMPPGVNIPLSQLETEHLKGVLLRYGTAILDGLEYDSHMSAKDFGKLNIQEWRILDILKRATAKLSYEARIERQPEHYISGRKKNTKHANSNSIWEHRHRRDSLVTNAREHVVSPQYEASGFLFERRADGPSSITLLIILPMVAFGSLIGIAAAIVLREAEKRNTHSLFPTNTAKAASLGAALGAISATPLILQIALVYFHRKYYWAIYALDLHLSSADPRVRKPVVFFATVIMTLVIIASSFARAILPALYLARDVGITDTRALVIAAAAAAAPMLLSTASPTILWMLIKAETTRMVWSYGFAWWQLSTGLDALAGYVFARVAQNQGVNFIQPSSGAASFGFFGGLMILWPFLLLLPFIPCIIPLLLYRRRRLISKRKPSNEEALKGENAGNGIRDSTAPKSTEMTGALASSLKTRTERQWADSPLVHYGLPPELSYWSTPSYGGSTAVGTTSSYRGLTVHISPPSHLSNRGPSFPELPTEPPEHRDQEVPRNLSISDPLPPDPALSNIGDWLVHEPAYDIAARQGDLYSPSNEDEWWT

SEQ ID NO: 3997 - DNA, 4195 bp, Muscodor strobelii
  misc_feature: SGI EST ID NO. CUFF.10002.0
  misc_feature: Variant of the nucleotide sequence at SEQ ID NO 3995
gggccacgcgcgtctcgctgtcctcacacttttcaacaccagctgcaatccgcgatgtcatcttggtcgcgcatcatattagataagtgagttcaagatgagtcagatatgtccattacattgacaatctcaaaggccggattgaagctgtcgaggcatcgagccactgagattgaagataatgtcgacgaaactgggctggagtcgggaaagccagacatcacctccttggaaaatttcgcttcaaaagttcgattctttaaacgacaagagaataaggaccacgatgatccaagcaagcagtctggtgctggtgctgcggccaccggctcagagaagaatcacaacacctcgctgcaaggagaagcgccagagcctgcaggccatctttcacttacagggctgcccggccaaggtctagagtcagagaccgtaggaactgcacactcagctcatgtatcgcggccgacacccgctccattcgcgaatgaggtgcgcgcgaatgagcctaccgtaactaggcaaggtgaaagcactggattagatagcttgagcacgaaggcgccatccggaacaggaaccacgatcactacagcaacttcaagcaccattggccgggactcgactcagacgaacctgactatcccagaaaatgcccagtgcgacagtggtgtcgacgtcggaaatggctctaacttgcagagtgagaacagagaaagcatctctcagaagtcaccaatccagacacctgaccagtcggtagcgcgcacgagcctgttgtcacgctttgctaataagagacctgctcaggtccatattccgggaagcaagcttaacttgctgaagaaaatcaagactgcgactcacgacactgtcaagaccgaagatgcgtcgttctatggtgcggacagagaaaagctacgaaatttctctcgcatcctcgcgtcgaagaaagaccagattgaactttttggcaaggaacttcctctctgtagagtctttcttgtccaagtgaccaaagggaaagcgaaacctggcacatacatctgcatccagggactaaaaaacgctgcggatatcacgcgaatccattcgaccatgtcccataagcgatacagaccgctatatgaaccattgagactctgctatgacacttcggacttaacacatgtgggaaagcctgaaacaactgaagcatctcagtcttcatcatcatccggttcaatgttcggttcaggcttgcccactggataccttagtccgataccagagcctggggagcctccagacttcttgttgcccaccgacttcgattctggcaagcaaacatcttaccagtttttgccgatttctgatgataggacatactgtggtgcgctctctcggttgccagtcaacggaaaaactagcttatttacgatcgggggcttggtcgaggtacatggcatgccttgtctcatgacatgtgaacataattcctgggagccttctgcgatgtcggcaaactctttgtcagagacattggtggaaagtgatatcccctcaggtgtggaggggcctcttgtattctgctcaggggagcttcccgaagactctagcaacgatatcgaaacctcgaagacatacacagaggcggcaattacccggttaggcagttttggggatacggaatggcaagatcttagcgtggcgggcgccctaagaaaagggcgtgaatggtgcctcgtccccatagaaagatactcagtccttcccaatttcatcgagaaatcggctagtaaaaagggaaagagcgttgataagccagaagtattctacgttgacgcggtcgcggatcctaaacctgggcaaccggtctacattgctaatgccgggcactgctctggtattgtgtcagaaaacacgtcctttttgatagggggtgccacagatggagtcatggaggtctggactgttgacattgattctgttcaaggccttcagaaaggcgactctggctcgtgggtccttgacacctctgtcccatcaagatacaaggcggtaggctctatcatcgcatcatcgcagcaaacagcccacttcgttgctttgaaagatcagttctctgagatagaaggaggcgcggtggacatggggagaagcccgccaatttgtcttccaccagcgtttcgatcccttgttcaatgcgccttcatggccttcaaacgcaatgaccctacagccacatggttcatagatgaagcactatccttgggcgcgttgaagcagatgagcaatggctggtatctgccagtcatcaaagcccttcttggtgtagtagacttcaaagatgacatgccgccaggggttaatattccattatcgcagttggaaactgagcatctgaaaggtgtcctgctacgctatggtacagccatcttggacggcctcgaatatgactcccatatgtctgcaaaggatttcggaaagctgaatatacaagagtggcggattcttgatatactaaaaagagccactgctaaactatcttatgaggcaagaattgaacgtcaacctgagcattatatctctggacgaaaaaagaatacaaaacacgccaacagcaactcaatctgggaacaccgtcaccgtagagactcgctggttacgaatgctcgtgagcacgttgttagcccacaatatgaggcctctggattcttgtttgagcgcagagcagatggtccatcgtctatcacgctcttgatcatattaccaatggttgctttcggaagcctgataggcattgccgctgcaatcgtacttcgcgaggccgagaaacgcaatactcacagccttttccctactaatacagccaaagctgcttccctcggtgcagcgcttggggccatctccgcaaccccattgatcctccagatagcactcgtctattttcaccgcaagtattactgggctatctacgccttggaccttcacctatcatccgcagaccctcgtgtaaggaaacctgttgtattttttgcgactgttattatgacactggtgatcattgcctcaagctttgcacgagctatcttgcccgcactctacctcgctagagacgttggcattaccgatactcgcgctctggtgatcgcagcggcagcggcagcggcaccaatgctactgtctacagcgtcaccgacaatactatggatgttgatcaaagcagagactacgagaatggtctggagctacgggtttgcttggtggcaattatctacaggactggacgcgcttgctggatacgtcttcgcgagagttgctcagaatcaaggcgtcaattttattcagccatcctcgggtgctgctagctttggtttcttcggcggactcatgattttgtggcctttccttttgctgctacccttcattccctgtatcattcccctcttgttgtatcgtaggaggaggctcatatccaaacggaaaccgagcaacgaagaggccttgaaaggcgaaaatgcgggaaatggcattcgcgactcaactgcacctaaatccacagagatgaccggcgctctcgcgtcttcgctgaagacgcggacagagaggcaatgggctgattctccactggtgcattacggccttccgccggagttgtcatactggagcacaccctcatacggcgggtctactgcagtcgggacgacatcatcgtacagagggctgactgtccatatatctccccctagccatcttagtaatcgaggcccgtccttcccagaattgcccacggaaccacccgagcaccgtgaccaggaagtaccgagaaacctttccatatcagatcctctccctcccgatccggcattatccaatatcggagattggctggtacacgaacctgcttacgacattgctgcaaggcaaggtgacctttattctccaagcaacgaggatgagtggtggacttagaagtagggtcatagagacagggtaccgggtatgccttttttcagtattaatacaaaatttcagactacagttatacagtgaagtcataaacttcggagtgctcatacgataagacatggacaagtgcagcaactgtgcgggttaaatatgacagatctaaaatttccacacatcttcaagacgcctgtaagacggcgttgcgggtttctggtggtatttcaatgcgattttctacgtgcgc

SEQ ID NO: 3998 - DNA, 273 bp, Muscodor strobelii
  misc_feature: SGI cDNA ID NO. 561006
  misc_feature: Encodes the peptide sequence at SEQ ID NO 3999
atgatggcgtatgaagagtatctgcaaagggagctacccacgcggaatcttgatgatgggctggaaccatggcgccccgaaccgcccttcgagtgggatcttgatggattcgatggcgagcttttcgacttcagtgaagtggcattcgaccacgaacctggagattcagcgtatggaacaacgtctgctggtactggcagcgccaacaagaatctcaccaacaccgcgcaaacgggaggagcgttcggaatatttgataactttgatgaataa

SEQ ID NO: 3999 - protein, 90 aa, Muscodor strobelii
  misc_feature: SGI Peptide ID NO. 561006
MMAYEEYLQRELPTRNLDDGLEPWRPEPPFEWDLDGFDGELFDFSEVAFDHEPGDSAYGTTSAGTGSANKNLTNTAQTGGAFGIFDNFDE

SEQ ID NO: 4000 - DNA, 1101 bp, Muscodor strobelii
  misc_feature: SGI cDNA ID NO. 561007
  misc_feature: Encodes the peptide sequence at SEQ ID NO 4001
atgcctacctaccaacccaatttctataatcgatggtgtctgttcgcactgaccgtgttctgcaagccgatcgtcgctgcgcagaccccaagactcttcaaccaatggtacaaactataccaggcgcaaattgaagatatcatcagaggtccatgcgccccgacactcgatcgttatttcaatggcagcttagcgtccgaatgcaccgtccgcgtaacgtcatgtgaaacgggtctggtcgcatcatgcattttggatcgtctcaccgaaatagacaaggcgaatttcgcggccgccgggattcttttcggcctaatgccaacggcgctctccctcctgggttccagcactgtcgacgtcggcgtcctatcgctccatcgacctctcctcgccttcttcttgggcactggatcgcctgctacgtcccctgttcggaccttggactatcgggatcctgaagaccttttatcgtccacagccggtcggttggctttggtgaccccgaaacgcttcacaaatgttatcagtttaattgaatatctcgtggcaatcgcctcggttgcgaatttggcacataatacatgggaactgtcgttcaaaaccgtgtgcagctatgctcctgatacagtatttcagccattgctatggacatttctgtctgtgattgtccacttactcggtaccattgctgtgaggctgcgtgtgggattgagaggaaagtcatccggatcgcgtagatggtgggctcatgaattccagctttcggtctatcacccggtcgaacgcctcgaaatgatacccgaaacctctctgttcctcttcgtatcgtggtgcacatctacttccatcgttctacacatcatcttcggaacagtggccttgggtagcttgctgttcgtgagtgctcttgatgctttggtagtcaccgcgcgattcctggcgtcttgcttggcctgtcggcttattcttgtgtatgaaatcgctggtatgagaagcaacgtcatcacagatgctgatctgcacttaacaatggaaccggctcgagccccccacggagccgctgctatggcacgcgagaaaaggtcacaaactgcggcatga

SEQ ID NO: 4001 - protein, 366 aa, Muscodor strobelii
  misc_feature: SGI Peptide ID NO. 561007
  misc_feature (30)..(332): NCBI GI: 238490752 Blast Desc: conserved [Aspergillus flavus NRRL3357] gi|220697026|gb|EED53367.1| conserved [Aspergillus flavus NRRL3357]
  misc_feature (30)..(332): NCBI GI: 169772847 Blast Desc: [Aspergillus oryzae RIB40] gi|83768753|dbj|BAE58890.1| protein product [Aspergillus oryzae]
  misc_feature (26)..(332): NCBI GI: 256726714 Blast Desc: NECHADRAFT_25871 [Nectria haematococca mpVI 77-13-4]
  misc_feature (33)..(352): NCBI GI: 116199195 Blast Desc: CHGG_07753 [Chaetomium globosum CBS 148.51] gi|88179032|gb|EAQ86500.1| CHGG_07753 [Chaetomium globosum CBS 148.51]
  misc_feature (10)..(334): NCBI GI: 171686992 Blast Desc: protein product [Podospora anserina] gi|170943457|emb|CAP69110.1| protein product [Podospora anserina]
  misc_feature (40)..(333): NCBI GI: 256732224 Blast Desc: NECHADRAFT_93753 [Nectria haematococca mpVI 77-13-4]
  misc_feature (83)..(331): NCBI GI: 256732899 Blast Desc: NECHADRAFT_5957 [Nectria haematococca mpVI 77-13-4]
  misc_feature (33)..(345): NCBI GI: 46127805 Blast Desc: FG08280.1 [Gibberella zeae PH-1]
  misc_feature (27)..(363): NCBI GI: 256722868 Blast Desc: NECHADRAFT_52892 [Nectria haematococca mpVI 77-13-4]
  misc_feature (92)..(339): NCBI GI: 145609221 Blast Desc: MGG_07429 [Magnaporthe grisea 70-15] gi|145016612|gb|EDK01042.1| MGG_07429 [Magnaporthe grisea 70-15]
MPTYQPNFYNRWCLFALTVFCKPIVAAQTPRLFNQWYKLYQAQIEDIIRGPCAPTLDRYFNGSLASECTVRVTSCETGLVASCILDRLTEIDKANFAAAGILFGLMPTALSLLGSSTVDVGVLSLHRPLLAFFLGTGSPATSPVRTLDYRDPEDLLSSTAGRLALVTPKRFTNVISLIEYLVAIASVANLAHNTWELSFKTVCSYAPDTVFQPLLWTFLSVIVHLLGTIAVRLRVGLRGKSSGSRRWWAHEFQLSVYHPVERLEMIPETSLFLFVSWCTSTSIVLHIIFGTVALGSLLFVSALDALVVTARFLASCLACRLILVYEIAGMRSNVITDADLHLTMEPARAPHGAAAMAREKRSQTAA

SEQ ID NO: 4002 - DNA, 1933 bp, Muscodor strobelii
  misc_feature: SGI EST ID NO. CUFF.10017.0
  misc_feature: Variant of the nucleotide sequence at SEQ ID NO 4000
gtcggcgtgcattgcctttcgatatcgatgacagtattcatcaatgcctgccatagcgaaccctttgatttcggaacgtcctggcggggacttgcattagtgaggggcggggtgcaacgtgcctaacatgctgagcaaatagagcctaccatccacatccccaccgtcccgttgcgacgcgttaagatggcatcgggaagtctgtgtaatgtccactgctgacctcagtctgacgcctgaggctgaagtcgcgatgaaatccatccttttgatcagtcaaggatctgcaggtctctcccattccatttcacgaataatatgaatgcttaaacttagacgaataaagcgatggtcaacctttgggtaccggagaacgtccctcctttgagatcagttccttctcttgtcctcatctcatctgatcagtgttgtcctgtcgcgtcctacgatcacgaccaattcatcttacctaccaatcacatgttgacatacgcgccttgttcatgcatacgtcttatcccctattcctcatctacccttggtctccagaatgttggtctgtacagttacgatgcgagcgaacaagaatcgccactgtgaaaggctcaatcaacacacctagcccgaaattcagcatgcctacctaccaacccaatttctataatcgatggtgtctgttcgcactgaccgtgttctgcaagccgatcgtcgctgcgcagaccccaagactcttcaaccaatggtacaaactataccaggcgcaaattgaagatatcatcagaggtccatgcgccccgacactcgatcgttatttcaatggcagcttagcgtccgaatgcaccgtccgcgtaacgtcatgtgaaacgggtctggtcgcatcatgcattttggatcgtctcaccgaaatagacaaggcgaatttcgcggccgccgggattcttttcggcctaatgccaacggcgctctccctcctgggttccagcactgtcgacgtcggcgtcctatcgctccatcgacctctcctcgccttcttcttgggcactggatcgcctgctacgtcccctgttcggaccttggactatcgggatcctgaagaccttttatcgtccacagccggtcggttggctttggtgaccccgaaacgcttcacaaatgttatcagtttaattgaatatctcgtggcaatcgcctcggttgcgaatttggcacataatacatgggaactgtcgttcaaaaccgtgtgcagctatgctcctgatacagtatttcagccattgctatggacatttctgtctgtgattgtccacttactcggtaccattgctgtgaggctgcgtgtgggattgagaggaaagtcatccggatcgcgtagatggtgggctcatgaattccagctttcggtctatcacccggtcgaacgcctcgaaatgatacccgaaacctctctgttcctcttcgtatcgtggtgcacatctacttccatcgttctacacatcatcttcggaacagtggccttgggtagcttgctgttcgtgagtgctcttgatgctttggtagtcaccgcgcgattcctggcgtcttgcttggcctgtcggcttattcttgtgtatgaaatcgctggtatgagaagcaacgtcatcacagatgctgatctgcacttaacaatggaaccggctcgagccccccacggagccgctgctatggcacgcgagaaaaggtcacaaactgcggcatgatctttggactccgttcgcaaatctagaaccgaggcaatcgaagttgtcgcctacacgcagaaattagcaattttaggccgtcaacaattttgccgatcatcgatatcattaattaccgtcgcttctttggagtatgttcatttgcattattggtctaacgagaatatgagatctctatgctgtatcagatgtcgcag

SEQ ID NO: 4003 - DNA, 777 bp, Muscodor strobelii
  misc_feature: SGI cDNA ID NO. 561008
  misc_feature: Encodes the peptide sequence at SEQ ID NO 4004
atggcgacctcactcacatcgtttactgcactctcttttgatgtttacgctactctcatcgactgggaatctggcatttacactgctcttgatcagttgaatgaacgactgcccgagagtcatgcgctcaagaataataagcgcgggcttttagagctttatacacatttcgagggtgttctcgagcatcgccatccggacatgaagtacgcgcaattactaggcgaagtatacatggagatggcaacacacttaggcattcctttggacccctcactcccgacgaccaacgaagaaaaagcagcatttgggagcacggtcgggatctggccagcctttcccgacactgtggaggctctaaaggtccttggacagagatataagctcattgtcttatcgaatgtagacagagaatcttttgagcgcacaagaacaggaccgttgaaaggaatcaagtttgatgctgtgtatactgcgcaggagattggatcttacaaacccgacgtgaggaatttcgattacatgattgagcacgcgagtaccgatcttggggtacacaaagaggggttccttcacactgcgcaggctctcaaacatgatcacgtaccggcaaagaaggcgggtttgcaaagctgttggattgagagggctggcgatgaagctgtcgttggtggcaagcttgatgattttggggatgatgtcaaattagcttacaggtttaaaactttgggggacatggccgaagcagtggaaaaggctttcagcaatgcggaatag

SEQ ID NO: 4004 - protein, 258 aa, Muscodor strobelii
  misc_feature: SGI Peptide ID NO. 561008
  misc_feature (1)..(251): NCBI GI: 242771895 Blast Desc: haloalkanoic acid dehalogenase, [Talaromyces stipitatus ATCC 10500] gi|218721552|gb|EED20970.1| haloalkanoic acid dehalogenase, [Talaromyces stipitatus ATCC 10500]
  misc_feature (5)..(252): NCBI GI: 225558261 Blast Desc: HAD-superfamily hydrolase [Ajellomyces capsulatus G186AR]
  misc_feature (5)..(251): NCBI GI: 238838991 Blast Desc: haloacid dehalogenase [Microsporum canis CBS 113480]
  misc_feature (3)..(252): NCBI GI: 169764579 Blast Desc: [Aspergillus oryzae RIB40] gi|83764615|dbj|BAE54759.1| protein product [Aspergillus oryzae]
  misc_feature (3)..(255): NCBI GI: 256732436 Blast Desc: NECHADRAFT_38525 [Nectria haematococca mpVI 77-13-4]
  misc_feature (3)..(251): NCBI GI: 119473346 Blast Desc: haloalkanoic acid dehalogenase, [Neosartorya fischeri NRRL 181] gi|119406726|gb|EAW16677.1| haloalkanoic acid dehalogenase, [Neosartorya fischeri NRRL 181]
  misc_feature (3)..(252): NCBI GI: 238504160 Blast Desc: conserved [Aspergillus flavus NRRL3357] gi|220690783|gb|EED47132.1| conserved [Aspergillus flavus NRRL3357]
  misc_feature (3)..(251): NCBI GI: 121700422 Blast Desc: haloalkanoic acid dehalogenase, [Aspergillus clavatus NRRL 1] gi|119396618|gb|EAW07050.1| haloalkanoic acid dehalogenase, [Aspergillus clavatus NRRL 1]
  misc_feature (3)..(251): NCBI GI: 70992943 Blast Desc: haloalkanoic acid dehalogenase [Aspergillus fumigatus Af293] gi|66848953|gb|EAL89282.1| haloalkanoic acid dehalogenase, [Aspergillus fumigatus Af293] gi|159130228|gb|EDP55341.1| acid
  misc_feature (5)..(243): NCBI GI: 240277216 Blast Desc: HAD-superfamily hydrolase [Ajellomyces capsulatus H143]
MATSLTSFTALSFDVYATLIDWESGIYTALDQLNERLPESHALKNNKRGLLELYTHFEGVLEHRHPDMKYAQLLGEVYMEMATHLGIPLDPSLPTTNEEKAAFGSTVGIWPAFPDTVEALKVLGQRYKLIVLSNVDRESFERTRTGPLKGIKFDAVYTAQEIGSYKPDVRNFDYMIEHASTDLGVHKEGFLHTAQALKHDHVPAKKAGLQSCWIERAGDEAVVGGKLDDFGDDVKLAYRFKTLGDMAEAVEKAFSNAE

SEQ ID NO: 4005 - DNA, 1092 bp, Muscodor strobelii
  misc_feature: SGI EST ID NO. CUFF.10020.0
  misc_feature: Variant of the nucleotide sequence at SEQ ID NO 4003
ggcgctagccatttgcaaccgaaataatggcgacctcactcacatcgtttactgcactctcttttgatgtttacgctactctcatcgactgggaatctggcatttacactgctcttgatcagttgaatgaacgactgcccgagagtcatgcgctcaagaataataagcgcgggcttttagagctttatacacatttcgagggtgttctcgagcatcgccatccggacatgaagtacgcgcaattactaggcgaagtatacatggagatggcaacacacttaggcattcctttggacccctcactcccgacgaccaacgaagaaaaagcagcatttgggagcacggtcgggatctggccagcctttcccgacactgtggaggctctaaaggtccttggacagagatataagctcattgtcttatcgaatgtagacagagaatcttttgagcgcacaagaacaggaccgttgaaaggaatcaagtttgatgctgtgtatactgcgcaggagattggatcttacaaacccgacgtgaggaatttcgattacatgattgagcacgcgagtaccgatcttggggtacacaaagaggggttccttcacactgcgcaggctctcaaacatgatcacgtaccggcaaagaaggcgggtttgcaaagctgttggattgagagggctggcgatgaagctgtcgttggtggcaagcttgatgattttggggatgatgtcaaattagcttacaggtttaaaactttgggggacatggccgaagcagtggaaaaggctttcagcaatgcggaatagcataggcttcgcaaaagattgaaatattccatgcatctcattccatctccctctttcagcgagatgtttcttgctctttgtctcttccctctacagcccacatattgccggacccaagatgcctcccagcatccttgacactcggtgaatctgtgcgaaaagtccgaccattgacgcatgaatgccggaaccgaatgaaacccgactaccggtcaagagacgtctcttcacgtccgacgagtctaatccacaatcaaaatgttctctactatctatcaaagtgttgtag

SEQ ID NO: 4006 - DNA, 1665 bp, Muscodor strobelii
  misc_feature: SGI cDNA ID NO. 561009
  misc_feature: Encodes the peptide sequence at SEQ ID NO 4007
atgggccgtatacgcgatcggacattcacgcgaggtgctgatttggggagcgttagggatgctggaagtgtcgacagcgcaaagacgatagtcaaatgcgacgagggcaaaccaggatgctcaaaatgcaaacgtatcggtgttacgtgcgcgggttatgacccgagctttatttgggtcaacgataatgatcatgtctaccagtcgactggtcgtcgggttctcgattgtgagaaaacatggggaggatttcaactactttcatcagatatggcagactatctcattgccgaatgcgattccaacgaagatgaatcatttgtagaagtggccaggaacatgcagcacacagctcacaatcccttttctgtgttttctgttacaatgcgtcctttatacgatagccctccgataggcttgcatgtcgtatcgccgataccgcgggcagtatctgacttacccgattccagtgttgtagaaaagatgttgtttcaccattatgttactcatgtggctagtatcatgatgccttacgaccaccctcgtaacccatggcggcttcactatccggctactgctttaagtcgggctgcgtctgaacagcaggctctctataacgcaatgctcgcacaggctgcgttcaatctggcgcagctgaaaggcgaagacctcgaattgatggcgactggatcaaaatactaccgcgccggcataggaaagctccttccaatcatcagcggccagagcaatgactacggggcactgagcgcgtctatcatgacaatcatgttttcagagacaaaggtatatagcggtcggtcttcgacttggcgccagcattttgaaggtgcttggtcactgttcaagaagcaccgcaactcggagccctggaaagtcacggatttcgtgtgcgtgtcaatacaaagcttacatattatcaaaatcattggtggtacttcgaaacgaattcaaacgcttgagttgatcggagttcagactgaagatcacgatgatgtcgcaaagcttgacttgatactagatacgtcagaatttggcttcacaattggggcctcgcgagacattttgcactgtatctggaccattgatgagttccgagctagatgcgaccgcagcgagaggccattagaagtcgacgccgtgctggcggacgtgcttacacggctgaatgaatgccgaaaaaacgcagtagaagccgatccgaatgtcacctcagatgctactatcgtccgtgagaatgcaatggagtcgaaggctcaagcggagtcattcattcacgcaacttacgtctatctctatcgtactctcctcgacgtcccaccaaaggcagtagaagcacacgtctcaaagaccttggacgaagtcattacattcttcgctaatagtcaaggaaacttctccatttggccggctttcatcgctgcgaccgaggcctacacccccgaagatatagcgaaagccagtttctggctcgatttgatgacatcgtttggtattgggagccgaatacaggcgagacaggttgtcgaagaagtatggcggcgtcgcgatctggtttcatgttcatctgggctcagtgctggcatgatcgtgatagactggagagagatcatgcatgaactcggtttcgacatactgctcatctga

SEQ ID NO: 4007 - protein, 554 aa, Muscodor strobelii
  misc_feature: SGI Peptide ID NO. 561009
  misc_feature (3)..(554): NCBI GI: 242771900 Blast Desc: TSTA_082040 [Talaromyces stipitatus ATCC 10500] gi|218721553|gb|EED20971.1| TSTA_082040 [Talaromyces stipitatus ATCC 10500]
  misc_feature (76)..(554): NCBI GI: 121712395 Blast Desc: ACLA_063510 [Aspergillus clavatus NRRL 1] gi|119401961|gb|EAW12383.1| ACLA_063510 [Aspergillus clavatus NRRL 1]
  misc_feature (162)..(554): NCBI GI: 259486915 Blast Desc: TPA: Zn(II)2Cys6 transcription factor (Eurofung) [Aspergillus nidulans FGSC A4]
  misc_feature (162)..(554): NCBI GI: 67522254 Blast Desc: AN1584.2 [Aspergillus nidulans FGSC A4] gi|40745135|gb|EAA64291.1| AN1584.2 [Aspergillus nidulans FGSC A4]
  misc_feature (162)..(554): NCBI GI: 255935489 Blast Desc: Pc13g03330 [Penicillium chrysogenum Wisconsin 54-1255] gi|211583391|emb|CAP91402.1| Pc13g03330 [Penicillium chrysogenum Wisconsin 54-1255]
  misc_feature (16)..(553): NCBI GI: 256728012 Blast Desc: NECHADRAFT_101178 [Nectria haematococca mpVI 77-13-4]
  misc_feature (156)..(520): NCBI GI: 256720407 Blast Desc: [Nectria haematococca mpVI 77-13-4]
  misc_feature (22)..(483): NCBI GI: 119498985 Blast Desc: C6 transcription factor, [Neosartorya fischeri NRRL 181] gi|119414414|gb|EAW24353.1| C6 transcription factor, [Neosartorya fischeri NRRL 181]
  misc_feature (121)..(553): NCBI GI: 46109510 Blast Desc: FG01637.1 [Gibberella zeae PH-1]
  misc_feature (160)..(554): NCBI GI: 238488463 Blast Desc: conserved [Aspergillus flavus NRRL3357] gi|220697857|gb|EED54197.1| conserved [Aspergillus flavus NRRL3357]
MGRIRDRTFTRGADLGSVRDAGSVDSAKTIVKCDEGKPGCSKCKRIGVTCAGYDPSFIWVNDNDHVYQSTGRRVLDCEKTWGGFQLLSSDMADYLIAECDSNEDESFVEVARNMQHTAHNPFSVFSVTMRPLYDSPPIGLHVVSPIPRAVSDLPDSSVVEKMLFHHYVTHVASIMMPYDHPRNPWRLHYPATALSRAASEQQALYNAMLAQAAFNLAQLKGEDLELMATGSKYYRAGIGKLLPIISGQSNDYGALSASIMTIMFSETKVYSGRSSTWRQHFEGAWSLFKKHRNSEPWKVTDFVCVSIQSLHIIKIIGGTSKRIQTLELIGVQTEDHDDVAKLDLILDTSEFGFTIGASRDILHCIWTIDEFRARCDRSERPLEVDAVLADVLTRLNECRKNAVEADPNVTSDATIVRENAMESKAQAESFIHATYVYLYRTLLDVPPKAVEAHVSKTLDEVITFFANSQGNFSIWPAFIAATEAYTPEDIAKASFWLDLMTSFGIGSRIQARQVVEEVWRRRDLVSCSSGLSAGMIVIDWREIMHELGFDILLI

SEQ ID NO: 4008 - DNA, 595 bp, Muscodor strobelii
  misc_feature: SGI EST ID NO. CUFF.10023.0
  misc_feature: Variant of the nucleotide sequence at SEQ ID NO 4006
cgacagcgcaaagtcaaatgcgacgagggcaaaccaggatgctcaaaatgcaaacgtatcggtgttacgtgcgcgggttatgacccgagctttatttgggtcaacgataatgatcatgtctaccagtcgactggtcgtcgggttctcgattgtgagaaaacatggggaggatttcaactactttcatcagatatggcagactatctcattgccgaatgcgattccaacgaagatgaatcatttgtagaagtggccaggaacatgcagcacacagctcacaatcccttttctgtgttttctgttacaatgcgtcctttatacgatagccctccgataggcttgcatgtcgtatcgccgataccgcgggcagtatctgacttacccgattccagtgttgtagaaaagatgttgtttcaccattatgttactcatgtggctagtatcatgatgccttacgaccaccctcgtaacccatggcggcttcactatccggctactgctttaagtcgggctgcgtctgaacagcaggctctctataacgcaatgctcgcacaggctgcgttcaatctggcgcagctgaaaggcgaagacctcg

SEQ ID NO: 4009 - DNA, 2406 bp, Muscodor strobelii
  misc_feature: SGI cDNA ID NO. 561010
  misc_feature: Encodes the peptide sequence at SEQ ID NO 4010
atgagtgacgttccggttctagtagagactttacgcgatggtgtcgtgaagatcgtgctcaatcgacccaaagctctcaacgcgatcagtgcagatctactcgacgggctcatcaaagcactacgcgaacatcagaatgctcgcgtactggtactcgagggtgcaggtgaccgctcattctgcgcaggagaggatctgaagcagaccctcgcgccaaggactggttcacccgaagagctcagagacgctttccataagctccaagacattacacggctgacgtcctcctctcgtgctgtggtcgtctctgcagttcaggggtttgccataggtggcggcgcagagattgctctagctgcagacttcgtgatcggcggtcctggggcgaagttcagatttcctgaagtaacgctgggtcatgctgctactggtggcatcaccttgcggctaacttcaatggtcggcttgctcaaggcaaagcagctgctcatgactggacgatgggtttccagtgaggaagctcttaacctggggatgctcaatgagatcaatgaggatccaaaacagcgagctttggagcttgcgtttgagttagcccaactacctgcaatcgctttgtcctcatctaagacttcaattgagcggcaggtctttaccaacatggagtcctgtcttgcggatgaagtcaatgtggcaagctattgctttgcccagaatgacgcagagatggctttctctaatttccgtgctcgcaaagcccccgacacgggtaatgagagcgcctcgaaagtcgccggtgcagataacaatggaaacccaaatcagagactcgagacagtggaccaaagcgcgagcacatcacgtcccaagttccgggacattaacacagctttagtctatgtagcgaagaaatttcctgatcggccgtttatccgtttcgcaggacaggacgtcacctttgggcaagccgatgaagagattggcagattggcagctggactcaaaaagggtggtatcgaccgagatgatcgcgtgttggtgatgatgcgcaatagcgttgagatggtctattcgtggatggcagccaatagactaggagcagtatgggtgccgatcaatgtcgaactcaaatccatctctttgaaacatgtggtcgaagcggcacaagcgaagttggcaattatagaccacgagttcagggaaacttttgaagctctcggcttcgtctcaaaggacgcaacatttgttaagggcgatgaagaggattccccgaataacctcattcgtctcttcgaaaatgaaggtgtcgcagagcccgtcgaggtcacaccaggcacagtagctgctttcctctacacgagcgggacaacagggaagtccaaaccctgtgttctatctcacgaatatttcattctccaggcagaaacattgattagcggctgcggaattcgcgaagacgatgtcttgtactgtccatttcctctcttccatgctgatgccactgcactgaccatcattccggccattttgctaggcgccgtcgctgcattgtcagtgcgctttagtgctagcaagttttgggatgagatcagggcaacggaggcgacagtgtatgatttcatgggcgcgacgttggctttgacatataagatgccgcctagtcttcgagatcgcgaccataaagtacggctaagttggggcgtacccatccctcaatttgccaaggattatgaacagagatttgggcatcggttaatcacgctgtatggcagcgtggaagccagcctaccagtatttcagcaaggtaatctcccagcaggctcatgcggccgcgtgagaaaaggttatcagcttcgcatcgcgaatgagatggacgaggaggtgccgccaaacactccaggccatcttctcctgcgaagcgatatacccaatgctttcttcaaaggctatttcaatgaccctgtcaacactgcgagtgcatttgccggactgtggctgcacactggagacctggctaaaattgacaaggagggcaatgtctatctagtcggtcgcgtcaaggacgtcattcgtagacgtggagagaacgtgaatgcatccgaagtggaagaagaattcctgctccatcctgacgttgtaattgctgctgcctacggcattccatcgcagctaggatcagggacagaggaggatgtgaaggttgcgctacagatgcgacctgggagtacagtggatgagaggagcctgtgggagtgggcggctcagcacatggcgcgttttcaggtgccaagcgtcattgagtttgtcccggtcatcaagaggactccaactgggaaaatgcagaaacacgagttgtctatagaaggcggccaacgtttcgacattcgcacaacacctggtagatag

SEQ ID NO: 4010 - protein, 801 aa, Muscodor strobelii
  misc_feature: SGI Peptide ID NO. 561010
  misc_feature (319)..(717): Pfam Id: PF00501 Pfam Desc: AMP-binding enzyme
  misc_feature (16)..(185): Pfam Id: PF00378 Pfam Desc: Enoyl-CoA hydratase/isomerase family
  misc_feature (1)..(800): NCBI GI: 242771910 Blast Desc: coenzyme A synthetase, [Talaromyces stipitatus ATCC 10500] gi|218721555|gb|EED20973.1| coenzyme A synthetase, [Talaromyces stipitatus ATCC 10500]
  misc_feature (302)..(785): NCBI GI: 119952402 Blast Desc: coenzyme A ligase [Arthrobacter aurescens TC1] gi|119951532|gb|ABM10442.1| coenzyme A ligase [Arthrobacter aurescens TC1]
  misc_feature (294)..(794): NCBI GI: 219847758 Blast Desc: AMP-dependent synthetase and ligase [Chloroflexus aggregans DSM 9485] gi|219542017|gb|ACL23755.1| AMP-dependent synthetase and ligase [Chloroflexus aggregans DSM 9485]
  misc_feature (303)..(789): NCBI GI: 229030643 Blast Desc: Long-chain-fatty-acid--CoA ligase [Bacillus cereus AH1271] gi|228730669|gb|EEL81616.1| Long-chain-fatty-acid--CoA ligase [Bacillus cereus AH1271]
  misc_feature (303)..(789): NCBI GI: 118478294 Blast Desc: crotonobetaine/carnitine-CoA ligase [Bacillus thuringiensis str. Al Hakam] gi|196042920|ref|ZP_03110159.1| crotonobetaine/carnitine-CoA ligase [Bacillus cereus 03BB108] Al
  misc_feature (303)..(789): NCBI GI: 228934222 Blast Desc: Long-chain-fatty-acid--CoA ligase [Bacillus thuringiensis serovar andalousiensis BGSC 4AW1] gi|228825390|gb|EEM71184.1| Long-chain-fatty-acid--CoA ligase
  misc_feature (303)..(789): NCBI GI: 52142555 Blast Desc: long-chain-fatty-acid--CoA ligase [Bacillus cereus E33L] gi|51976024|gb|AAU17574.1| long-chain-fatty-acid--CoA ligase [Bacillus cereus E33L]
  misc_feature (303)..(789): NCBI GI: 196032347 Blast Desc: long-chain-fatty-acid--CoA ligase [Bacillus cereus W] gi|228950032|ref|ZP_04112219.1| Long-chain-fatty-acid--CoA ligase [Bacillus thuringiensis serovar monterrey BGSC 4AJ1] ligase W]
  misc_feature (303)..(789): NCBI GI: 228928010 Blast Desc: Long-chain-fatty-acid--CoA ligase [Bacillus thuringiensis serovar pondicheriensis BGSC 4BA1] gi|229122507|ref|ZP_04251719.1| Long-chain-fatty-acid--CoA ligase
  misc_feature (303)..(789): NCBI GI: 229091965 Blast Desc: Long-chain-fatty-acid--CoA ligase [Bacillus cereus Rock3-42] gi|228691332|gb|EEL45093.1| Long-chain-fatty-acid--CoA ligase [Bacillus cereus Rock3-42]
  misc_feature (302)..(785): SWISSPROT Homolog: EC 6.2.1.3 Long-chain-fatty-acid--CoA ligase
MSDVPVLVETLRDGVVKIVLNRPKALNAISADLLDGLIKALREHQNARVLVLEGAGDRSFCAGEDLKQTLAPRTGSPEELRDAFHKLQDITRLTSSSRAVVVSAVQGFAIGGGAEIALAADFVIGGPGAKFRFPEVTLGHAATGGITLRLTSMVGLLKAKQLLMTGRWVSSEEALNLGMLNEINEDPKQRALELAFELAQLPAIALSSSKTSIERQVFTNMESCLADEVNVASYCFAQNDAEMAFSNFRARKAPDTGNESASKVAGADNNGNPNQRLETVDQSASTSRPKFRDINTALVYVAKKFPDRPFIRFAGQDVTFGQADEEIGRLAAGLKKGGIDRDDRVLVMMRNSVEMVYSWMAANRLGAVWVPINVELKSISLKHVVEAAQAKLAIIDHEFRETFEALGFVSKDATFVKGDEEDSPNNLIRLFENEGVAEPVEVTPGTVAAFLYTSGTTGKSKPCVLSHEYFILQAETLISGCGIREDDVLYCPFPLFHADATALTIIPAILLGAVAALSVRFSASKFWDEIRATEATVYDFMGATLALTYKMPPSLRDRDHKVRLSWGVPIPQFAKDYEQRFGHRLITLYGSVEASLPVFQQGNLPAGSCGRVRKGYQLRIANEMDEEVPPNTPGHLLLRSDIPNAFFKGYFNDPVNTASAFAGLWLHTGDLAKIDKEGNVYLVGRVKDVIRRRGENVNASEVEEEFLLHPDVVIAAAYGIPSQLGSGTEEDVKVALQMRPGSTVDERSLWEWAAQHMARFQVPSVIEFVPVIKRTPTGKMQKHELSIEGGQRFDIRTTPGR

SEQ ID NO: 4011 - DNA, 1673 bp, Muscodor strobelii
  misc_feature: SGI EST ID NO. CUFF.10026.0
  misc_feature: Variant of the nucleotide sequence at SEQ ID NO 4009
ggcaaagcagctgctcatgactggacgatgggtttccagtgaggaagctcttaacctggggatgctcaatgagatcaatgaggatccaaaacagcgagctttggagcttgcgtttgagttagcccaactacctgcaatcgctttgtcctcatctaagacttcaattgagcggcaggtctttaccaacatggagtcctgtcttgcggatgaagtcaatgtggcaagctattgctttgcccagaatgacgcagagatggctttctctaatttccgtgctcgcaaagcccccgacacgggtaatgagagcgcctcgaaagtcgccggtgcagataacaatggaaacccaaatcagagactcgagacagtggaccaaagcgcgagcacatcacgtcccaagttccgggacattaacacagctttagtctatgtagcgaagaaatttcctgatcggccgtttatccgtttcgcaggacaggacgtcacctttgggcaagccgatgaagagattggcagattggcagctggactcaaaaagggtggtatcgaccgagatgatcgcgtgttggtgatgatgcgcaatagcgttgagatggtctattcgtggatggcagccaatagactaggagcagtatgggtgccgatcaatgtcgaactcaaatccatctctttgaaacatgtggtcgaagcggcacaagcgaagttggcaattatagaccacgagttcagggaaacttttgaagctctcggcttcgtctcaaaggacgcaacatttgttaagggcgatgaagaggattccccgaataacctcattcgtctcttcgaaaatgaaggtgtcgcagagcccgtcgaggtcacaccaggcacagtagctgctttcctctacacgagcgggacaacagggaagtccaaaccctgtgttctatctcacgaatatttcattctccaggcagaaacattgattagcggctgcggaattcgcgaagacgatgtcttgtactgtccatttcctctcttccatgctgatgccactgcactgaccatcattccggccattttgctaggcgccgtcgctgcattgtcagtgcgctttagtgctagcaagttttgggatgagatcagggcaacggaggcgacagtgtatgatttcatgggcgcgacgttggctttgacatataagatgccgcctagtcttcgagatcgcgaccataaagtacggctaagttggggcgtacccatccctcaatttgccaaggattatgaacagagatttgggcatcggttaatcacgctgtatggcagcgtggaagccagcctaccagtatttcagcaaggtaatctcccagcaggctcatgcggccgcgtgagaaaaggttatcagcttcgcatcgcgaatgagatggacgaggaggtgccgccaaacactccaggccatcttctcctgcgaagcgatatacccaatgctttcttcaaaggctatttcaatgaccctgtcaacactgcgagtgcatttgccggactgtggctgcacactggagacctggctaaaattgacaaggagggcaatgtctatctagtcggtcgcgtcaaggacgtcattcgtagacgtggagagaacgtgaatgcatccgaagtggaagaagaattcctgctccatcctgacgttgtaattgctg

SEQ ID NO: 4012 - DNA, 981 bp, Muscodor strobelii
  misc_feature: SGI cDNA ID NO. 561011
  misc_feature: Encodes the peptide sequence at SEQ ID NO 4013
atgatgaaatctctcctacttctggccctcggggccgcttcttgctttgctgcgcccgccgagctccagaagcggacgggccgtactagtgctccaagcggttgtctcagtgttaagcccggcacgactacgagcggctggtacacgactttaacagccgcgctggcctcgctatctgggtcttcggcggcatgcattttcttgtatcagggaacatactcggagcaggttacgattacctacggcggtgcgctgacgatctatggatacacaacagatatcggcacctacaagagcaacactgtcactatcacgcacacaatttcttcgcctgaagctggcactcttgatgcgagtagcacagtccaagtcaagagtgctaactttaagatgtacaacatcaatgtcgtcaatggttacggcaaaggtgcacaggctgttgccctgactgcaaacggggataagcaagggtattatgggtgctcatttgacggctatcaggatacactatacgcgaaatctggctaccagtactacagtaactgctatatcgccggcgcaactgattatatctttggcgatgctgcagcttggttcggagagtgcactatcgcttccaaggccggtggcgccatcacggccaattcgcgtgaaacgacgtctgatttgagctggtacgttatcgaccattcaacgatcacctccgtttcgggtgtcagtctgtccgaaagtgtctatctcggccggccgtggcgtgtcctcgcccgcgttatttatcaaaacagtcagctaacgggcgttgtggcaccgaaagggtggacgaccctcgctgacaacgctacacctatcttcgaggaatacaacaacacaggcgacggctccgatacttcagaacgcgtcacggagacgcaagctacggcagcagtcacaaagagcgtactttggccgaatggatatagctggatcgacacatcgtactag

SEQ ID NO: 4013 - protein, 326 aa, Muscodor strobelii
  misc_feature: SGI Peptide ID NO. 561011
  misc_feature (45)..(317): Pfam Id: PF01095 Pfam Desc: Pectinesterase
  misc_feature (145)..(273): Pfam Id: PF01095 Pfam Desc: Pectinesterase
  misc_feature (4)..(326): NCBI GI: 156057639 Blast Desc: SS1G_04551 [Sclerotinia sclerotiorum 1980] gi|154702336|gb|EDO02075.1| SS1G_04551 [Sclerotinia sclerotiorum 1980]
  misc_feature (6)..(326): NCBI GI: 67525865 Blast Desc: AN3390.2 [Aspergillus nidulans FGSC A4] gi|40744178|gb|EAA63358.1| AN3390.2 [Aspergillus nidulans FGSC A4] gi|95025899|gb|ABF50865.1| pectin methyl esterease nidulans]
  misc_feature (2)..(326): NCBI GI: 154297872 Blast Desc: BC1G_11910 [Botryotinia fuckeliana B05.10] gi|150858351|gb|EDN33543.1| BC1G_11910 [Botryotinia fuckeliana B05.10]
  misc_feature (19)..(326): NCBI GI: 145259295 Blast Desc: An04g09690 [Aspergillus niger] gi|134074947|emb|CAK47976.1| protein product [Aspergillus niger]
  misc_feature (17)..(326): NCBI GI: 119485757 Blast Desc: pectinesterase family protein [Neosartorya fischeri NRRL 181] gi|119410377|gb|EAW20324.1| pectinesterase family protein [Neosartorya fischeri NRRL 181]
  misc_feature (17)..(326): NCBI GI: 70983922 Blast Desc: pectin methylesterase [Aspergillus fumigatus Af293] gi|66845113|gb|EAL85449.1| pectin methylesterase, [Aspergillus fumigatus Af293] gi|159123533|gb|EDP48652.1| pectin [Aspergillus
  misc_feature (5)..(322): NCBI GI: 255946099 Blast Desc: Pc20g13370 [Penicillium chrysogenum Wisconsin 54-1255] gi|211588552|emb|CAP86666.1| Pc20g13370 [Penicillium chrysogenum Wisconsin 54-1255]
  misc_feature (1)..(326): NCBI GI: 169775585 Blast Desc: [Aspergillus oryzae RIB40] gi|83770994|dbj|BAE61126.1| protein product [Aspergillus oryzae]
  misc_feature (1)..(326): NCBI GI: 238502217 Blast Desc: pectin methylesterase, [Aspergillus flavus NRRL3357] gi|220691152|gb|EED47500.1| pectin methylesterase, [Aspergillus flavus NRRL3357]
  misc_feature (7)..(326): NCBI GI: 169772171 Blast Desc: [Aspergillus oryzae RIB40] gi|83768414|dbj|BAE58553.1| protein product [Aspergillus oryzae]
  misc_feature (28)..(326): SWISSPROT Homolog: EC 3.1.1.11 Pectinesterase
MMKSLLLLALGAASCFAAPAELQKRTGRTSAPSGCLSVKPGTTTSGWYTTLTAALASLSGSSAACIFLYQGTYSEQVTITYGGALTIYGYTTDIGTYKSNTVTITHTISSPEAGTLDASSTVQVKSANFKMYNINVVNGYGKGAQAVALTANGDKQGYYGCSFDGYQDTLYAKSGYQYYSNCYIAGATDYIFGDAAAWFGECTIASKAGGAITANSRETTSDLSWYVIDHSTITSVSGVSLSESVYLGRPWRVLARVIYQNSQLTGVVAPKGWTTLADNATPIFEEYNNTGDGSDTSERVTETQATAAVTKSVLWPNGYSWIDTSY

SEQ ID NO: 4014 - DNA, 1143 bp, Muscodor strobelii
  misc_feature: SGI EST ID NO. CUFF.10030.0
  misc_feature: Variant of the nucleotide sequence at SEQ ID NO 4012
tgaagctggcactcttgatgcgagtagcacagtccaagtcaagagtgctaactttaagatgtacaacatcaatgtcgtcaatggttacggcaaaggtgcacaggctgttgccctgactgcaaacggggataagcaagggtattatgggtgctcatttgacggctatcaggatacactatacgcgaaatctggctaccagtactacagtaactgctatatcgccggcgcaactgattatatctttggcgatgctgcagcttggttcggagagtgcactatcgcttccaaggccggtggcgccatcacggccaattcgcgtgaaacgacgtctgatttgagctggtacgttatcgaccattcaacggtaagtagtggtttcatctcgcttttcgccaaagaggcggtatagtgttgacatgctgacctgacggacaacaagatcacctccgtttcgggtgtcagtctgtccgaaagtgtctatctcggccggccgtggcgtgtcctcgcccgcgttatttatcaaaacagtcagctaacgggcgttgtggcaccgaaagggtggacgaccctcgctgacaacgctacacctatcttcgaggaatacaacaacacaggcgacggctccgatacttcagaacgcgtcacggagacgcaagctacggcagcagtcacaaagagcgtactttggccgaatggatatagctggatcgacacatcgtactaggagctgattgcatctgcggcgtgttcaatatttcatgctcaagatggtgagaaagtgataaacctcgatgagtggaggggaacgagcagggtgacagctataaccgcgtcacgggtcaaggatgaaatgtggggtaacagtgcatgcaacagaacaaacaaagcaataacacgatgattcagacctcgtgcactgcagaacgaggaaacaccaatgatctatctgtttctctatctaccaggtgttgtgcgaatgtcgaaacgttggccgccttctatagacaactcgtgtttctgcattttcccagttggagtcctcttgatgaccgggacaaactcaatgacgcttggcacctgaaaacgcgccatgtgctgagccgcccactcccacaggctcctctcatccactgtactcccagg

SEQ ID NO: 4015 - DNA, 1209 bp, Muscodor strobelii
  misc_feature: SGI cDNA ID NO. 561012
  misc_feature: Encodes the peptide sequence at SEQ ID NO 4016
atgcatttttcaactggcagtatttttgtcgctgccggcctcgcaagccttgcgagcgctgtgccctcgcccgtcgttgagcgcgcgtcgacctgcacgcctgccgctggtggtagcggctcgaccgacgatgtgccagctatccaatcggccatcgcctcatgtgcgtctgggaccatcgtgattcccgccgggaagacatattacatcaattctcctctgagcttcgctggttgcgcaggatgcacgatgcagatcgagggaactctgaaagtctcaagcgacacagattactggaacgggaaaccgaacatcttcacgatgagcggcatcaagactgccaaagtctactcttcgacaggcactggcgtgatagatggcaacggacagaacgcgtgggatgtgttcgcttcggactcatcgtatgatcgaccgacgctatggagcatcagtggtggaagcggcatcactatccaaaatttgcttttcaagaatgcgcccaatgtctttcactcggtctcgggcagcgcgacgaatgtgaactacattgacgtgacgcttaccgccgtcagcaagagctccaatctgcccaagaacacagacgggtgggatgttggggcttcgacttacgttaccatcacaggcgccaaggtcactaacgacgatgactgtgtcgctttcaagcccggggccaattatgtaaccgtgactgatatcacctgcaccggttcccatggcttgtcggtaggaagcttggggtcgaagtatggcaccacagacacagttcagaatgtttacgtgaagggcgcaactatgattgacagcgctaaggccgcaggcatcaaactgtacccagcgggatcttcacacgggagtgccatcgttaaaaatgtcacttgggatggaattgttgtcgataactcagactatgctttccagatccagtcgtgctacaacgaagacgcatcgtactgtagctcaacgcccagcactgctcagctctcaggtatcgttgtgaagaatgtgtcaggcactacgagttccaaatactcaccaaccactatgaacctcaactgtcctgctggcggcagctgtggcgttactatgagcggcatcactgtcaagccaccaagcggaacggcaaagattctctgcgcgaatacgccaagctcaattggtgttacttgctcgagcggcgcctcgggttga

SEQ ID NO: 4016 - protein, 402 aa, Muscodor strobelii
  misc_feature: SGI Peptide ID NO. 561012
  misc_feature (55)..(398): Pfam Id: PF00295 Pfam Desc: Glycosyl hydrolases family 28
  misc_feature (1)..(402): NCBI GI: 154297870 Blast Desc: BC1G_11909 [Botryotinia fuckeliana B05.10] gi|150858350|gb|EDN33542.1| BC1G_11909 [Botryotinia fuckeliana B05.10]
  misc_feature (3)..(402): NCBI GI: 238502219 Blast Desc: extracellular exo-polygalacturonase, [Aspergillus flavus NRRL3357] gi|220691153|gb|EED47501.1| extracellular exo-polygalacturonase, [Aspergillus flavus NRRL3357]
  misc_feature (3)..(402): NCBI GI: 169775587 Blast Desc: [Aspergillus oryzae RIB40] gi|83770995|dbj|BAE61127.1| protein product [Aspergillus oryzae]
  misc_feature (7)..(402): NCBI GI: 6686870 Blast Desc: endo-xylogalacturonan hydrolase [Aspergillus tubingensis]
  misc_feature (16)..(402): NCBI GI: 145259298 Blast Desc: An04g09700 [Aspergillus niger] gi|89113920|gb|ABD61571.1| endo-xylogalacturonan hydrolase A [Aspergillus niger] gi|134074948|emb|CAK47977.1| protein product
  misc_feature (28)..(402): NCBI GI: 255946097 Blast Desc: Pc20g13360 [Penicillium chrysogenum Wisconsin 54-1255] gi|211588551|emb|CAP86665.1| Pc20g13360 [Penicillium chrysogenum Wisconsin 54-1255]
  misc_feature (22)..(402): NCBI GI: 159123532 Blast Desc: extracellular exo-polygalacturonase, [Aspergillus fumigatus A1163]
  misc_feature (22)..(402): NCBI GI: 70983924 Blast Desc: extracellular exo-polygalacturonase [Aspergillus fumigatus Af293] gi|66845114|gb|EAL85450.1| extracellular exo-polygalacturonase, [Aspergillus fumigatus Af293]
  misc_feature (22)..(402): NCBI GI: 119485759 Blast Desc: extracellular exo-polygalacturonase, [Neosartorya fischeri NRRL 181] gi|119410378|gb|EAW20325.1| extracellular exo-polygalacturonase, [Neosartorya fischeri NRRL 181]
  misc_feature (9)..(381): NCBI GI: 67525863 Blast Desc: AN3389.2 [Aspergillus nidulans FGSC A4] gi|40744177|gb|EAA63357.1| AN3389.2 [Aspergillus nidulans FGSC A4] gi|259485625|tpe|CBF82806.1| TPA: xylogalacturonan hydrolase
  misc_feature (28)..(387): SWISSPROT Homolog: EC 3.2.1.67 Galacturan 1,4-alpha-galacturonidase
MHFSTGSIFVAAGLASLASAVPSPVVERASTCTPAAGGSGSTDDVPAIQSAIASCASGTIVIPAGKTYYINSPLSFAGCAGCTMQIEGTLKVSSDTDYWNGKPNIFTMSGIKTAKVYSSTGTGVIDGNGQNAWDVFASDSSYDRPTLWSISGGSGITIQNLLFKNAPNVFHSVSGSATNVNYIDVTLTAVSKSSNLPKNTDGWDVGASTYVTITGAKVTNDDDCVAFKPGANYVTVTDITCTGSHGLSVGSLGSKYGTTDTVQNVYVKGATMIDSAKAAGIKLYPAGSSHGSAIVKNVTWDGIVVDNSDYAFQIQSCYNEDASYCSSTPSTAQLSGIVVKNVSGTTSSKYSPTTMNLNCPAGGSCGVTMSGITVKPPSGTAKILCANTPSSIGVTCSSGASG

SEQ ID NO: 4017 - DNA, 1178 bp, Muscodor strobelii
  misc_feature: SGI EST ID NO. CUFF.10038.0
  misc_feature: Variant of the nucleotide sequence at SEQ ID NO 4015
gtcaacggggaaatcgtgatgcataaatacaggcattgcgacattttcagagccaagacgccgagaatgggtactatttcgtactgaagttgacctctcccacttttagcaatcgcaagatgcatttttcaactggcagtatttttgtcgctgccggcctcgcaagccttgcgagcgctgtgccctcgcccgtcgttgagcgcgcgtcgacctgcacgcctgccgctggtggtagcggctcgaccgacgatgtgccagctatccaatcggccatcgcctcatgtgcgtctgggaccatcgtgattcccgccgggaagacatattacatcaattctcctctgagcttcgctggttgcgcaggatgcacgatgcagatcgagggaactctgaaagtctcaagcgacacagattactggaacgggaaaccgaacatcttcacgatgagcggcatcaagactgccaaagtctactcttcgacaggcactggcgtgatagatggcaacggacagaacgcgtgggatgtgttcgcttcggactcatcgtatgatcgaccgacgctatggagcatcagtggtggaagcggcatcactatccaaaatttgcttttcaagaatgcgcccaatgtctttcactcggtctcgggcagcgcgacgaatgtgaactacattgacgtgacgcttaccgccgtcagcaagagctccaatctgcccaagaacacagacgggtgggatgttggggcttcgacttacgttaccatcacaggcgccaaggtcactaacgacgatgactgtgtcgctttcaagcccggggccaattatgtaaccgtgactgatatcacctgcaccggttcccatggcttgtcggtaggaagcttggggtcgaagtatggcaccacagacacagttcagaatgtttacgtgaagggcgcaactatgattgacagcgctaaggccgcaggcatcaaactgtacccagcgggatcttcacacgggagtgccatcgttaaaaatgtcacttgggatggaattgttgtcgataactcagactatgctttccagatccagtcgtgctacaacgaagacgcatcgtactgtagctcaacgcccagcactgctcagctctcaggtatcgttgtgaagaatgtgtcaggcactacgagttccaaatactcaccaacc

SEQ ID NO: 4018 - DNA, 567 bp, Muscodor strobelii
  misc_feature: SGI cDNA ID NO. 561013
  misc_feature: Encodes the peptide sequence at SEQ ID NO 4019
atgaagcttcttgcaaccattctgctcggcttgaacgtcattggcggggctctgggaaccacggtgccagcacagttccagaacgcgccccagggacccatgtacgttggtccgcgtgtgaacgacaccgcttacatctatcttcgctgcatccgcggcagtgagcctggctacgtaagttactaccgcgatgaacgtaccgacgacttccgacgtttcgccgtgtgggtcccggaagcggagaaggagcagaatgcattcatcttcaccgtctggactcatggaggtggtattgtctggttggaaggcaaccgtaggaatggaaatccgactggtggatacattggtgaccgcccacttcacttcggcaaggactacgtcgacttcgaagacacgcatacgcagaccgaatatgatctctggatcaaaccgaatggtcgcatgcagttcgacgcgggcggaaccgaggtgtacatcgctagcggtgggaaagcagacaggagacttaatgtgatgtcgtcaggcgacccggcatacttctatgctgaacctgccccgaaaccttag

SEQ ID NO: 4019 - protein, 188 aa, Muscodor strobelii
  misc_feature: SGI Peptide ID NO. 561013
MKLLATILLGLNVIGGALGTTVPAQFQNAPQGPMYVGPRVNDTAYIYLRCIRGSEPGYVSYYRDERTDDFRRFAVWVPEAEKEQNAFIFTVWTHGGGIVWLEGNRRNGNPTGGYIGDRPLHFGKDYVDFEDTHTQTEYDLWIKPNGRMQFDAGGTEVYIASGGKADRRLNVMSSGDPAYFYAEPAPKP

SEQ ID NO: 4020 - DNA, 911 bp, Muscodor strobelii
  misc_feature: SGI EST ID NO. CUFF.10047.0
  misc_feature: Variant of the nucleotide sequence at SEQ ID NO 4018
aaaaaacgaccagcatctcgaacaggaatctcttcatctttgaaaatttgccctttccaatctacaaaatgaagcttcttgcaaccattctgctcggcttgaacgtcattggcggggctctgggaaccacggtgccagcacagttccagaacgcgccccagggacccatgtacgttggtccgcgtgtgaacgacaccgcttacatctatcttcgctgcatccgcggcagtgagcctggctacgtaagttactaccgcgatgaacgtaccgacgacttccgacgtttcgccgtgtgggtcccggaagcggagaaggagcagaatgcattcatcttcaccgtctggactcatggaggtggtattgtctggttggaaggcaaccgtaggaatggaaatccgactggtggatacattggtgaccgcccacttcacttcggcaaggactacgtcgacttcgaagacacgcatacgcagaccgaatatgatctctggatcaaaccgaatggtcgcatgcagttcgacgcgggcggaaccgaggtgtacatcgctagcggtgggaaagcagacaggagacttaatgtgatgtcgtcaggcgacccggcatacttctatgctgaacctgccccgaaaccttagacaagtgacattggcctcttatactcagcttctgggatatgtagcctgcttggactacagcgaccaaaaaatatctaccctcaataagaccctatggcggctagaatctcatgtgacaggctgcatggtccaacaaagtctgtcactctaagctgtatctaggcaaagagaaggctccgagagatcaattttggctatgttggtctggcctttacgtagccatcatgtttgcacatcgtatgtagcctcaattaaaatgaagcggattagttgtcg

SEQ ID NO: 4021 - DNA, 612 bp, Muscodor strobelii
  misc_feature: SGI cDNA ID NO. 561014
  misc_feature: Encodes the peptide sequence at SEQ ID NO 4022
atggacgaagttccattagaagcagcaaatgtacgaggactttttactaaggacgacaagaatgatgacacaagcgaaattgtgggcaaaagcaaagagtcgaaaaactcattagctccagaagagattgagaaagcggaggcagtggccaaggatctcatatctcaatcgatcagtcgcaaagccccattctaccaattcatatacaaaagccaaagccaggatcgcgacgccgcgcttgctgcattagacgctctcgtcattaaagcaaccgagacagaagtcctacttgggcagctgatagtgtcacaagacaacccaaaacggaaagaggatatacgtcgcgctttgatgccctacaagttgaaagtagcagctgtgcaagagcttgtgaagaccattccgatacctcggagtgttacgaaagcgcggagtttggtcaaagatctgacatcgcaaatggggcttcgatggtttggatttgtgctcggcgttctaccccagcttatcaagctcttcggcagctctggtatcccacttgtccaagcgtgcggtgcaatcgaggagctgggcggcgaccagtgcgctggcgattacgccactctggattaa

SEQ ID NO: 4022 - protein, 203 aa, Muscodor strobelii
  misc_feature: SGI Peptide ID NO. 561014
MDEVPLEAANVRGLFTKDDKNDDTSEIVGKSKESKNSLAPEEIEKAEAVAKDLISQSISRKAPFYQFIYKSQSQDRDAALAALDALVIKATETEVLLGQLIVSQDNPKRKEDIRRALMPYKLKVAAVQELVKTIPIPRSVTKARSLVKDLTSQMGLRWFGFVLGVLPQLIKLFGSSGIPLVQACGAIEELGGDQCAGDYATLD

SEQ ID NO: 4023 - DNA, 1317 bp, Muscodor strobelii
  misc_feature: SGI cDNA ID NO. 561015
  misc_feature: Encodes the peptide sequence at SEQ ID NO 4024
atggattgcatcactgacacgactcatctccgcatcctctcggcaccacccatcacggcgcccactgtgctgccaggctgcaacaccttcccgagcttctctcgcctcccggtcgagttgcaactcatggtctggtcggccgcattggcttcactgcctcagcagatgatcaaggtgaagttgcgtgcgccgcagggtcccgccgacaatggcttccgagctgtcatttggatgcgagaccagaatctcggccaagtcttcttcgtcaacaaagtatctcgcgcagctgccttggaagtctatcgggtgcagattccctgctggtccggaaatagcggaatgccaaagacggtctacttttgtcccgagcgagactttgtccaactaagaggagaccgaaccgtagtgccggactttctccatgatctgagaagcaatgaccctcgacatgtcggcgtcctcaatcttgctatcagcgacgatcttattgacgaagcatggcgagcatggtttacgcctgaagtcatgaacttagaccgaatgccgacgaaccccgctgtgtcacaaagcttccaagcaaccatccgacagctacgccatatttatctcgtgcacttcttggagtgggaccgcagagtcacgaagtttcggtggcgcactggcctaggcgatcgggacctactcaacacctcccaaccggttgcagctgaagttcccggcttcactgtgataggtgccgatcctcgagatatcagccgccatctaaaacggtaccgcctctttgctccgcccaacctcttgattacccattgggaaaattacatccgtcgctacgaccctaactacgagggcatcgctccgacaactcagtgccggattgtattcacatcttcgccccgcgctttctaccagagtagaggcggaattggcatgcaccctgacgaactccgcgagatgcccgagggtttgtcgagccccgatgggtggaatgtgcgatcccgtgagagagcccaactagtcctacaagctgaaacaaagatgctggtggcagaccgacagattgtatttgagaaagataaagtcaacgggagagtcaatgacgatgctgagttttcgacaagcccggaatactctggttgtgttgacgtggttgggtctcctgtgaacgcggcctttggcttctggctcttccctgctgcggcattcgagaatcttccaccgcccaatgaggatggcaattactggcttcccggtcttcacggaatagatgtcgacctcagtgagttttggccagagcttgcgttgatggatatctaa

SEQ ID NO: 4024 - protein, 438 aa, Muscodor strobelii
  misc_feature: SGI Peptide ID NO. 561015
  misc_feature (4)..(438): NCBI GI: 256724034 Blast Desc: NECHADRAFT_86393 [Nectria haematococca mpVI 77-13-4]
  misc_feature (5)..(438): NCBI GI: 256728994 Blast Desc: NECHADRAFT_79831 [Nectria haematococca mpVI 77-13-4]
  misc_feature (1)..(249): NCBI GI: 171677780 Blast Desc: protein product [Podospora anserina] gi|170936958|emb|CAP61617.1| protein product [Podospora anserina]
  misc_feature (28)..(164): NCBI GI: 149210945 Blast Desc: MGCH7_ch7g942 [Magnaporthe grisea 70-15] gi|86196897|gb|EAQ71535.1| MGCH7_ch7g942 [Magnaporthe grisea 70-15]
  misc_feature (23)..(204): NCBI GI: 116207304 Blast Desc: [Chaetomium globosum CBS 148.51] gi|88183542|gb|EAQ91010.1| [Chaetomium globosum CBS 148.51]
  misc_feature (61)..(164): NCBI GI: 145609592 Blast Desc: [Magnaporthe grisea 70-15] gi|145017009|gb|EDK01372.1| [Magnaporthe grisea 70-15]
  misc_feature (30)..(134): NCBI GI: 156043335 Blast Desc: [Sclerotinia sclerotiorum 1980] gi|154695058|gb|EDN94796.1| [Sclerotinia sclerotiorum 1980]
  misc_feature (9)..(158): NCBI GI: 46139773 Blast Desc: FG11401.1 [Gibberella zeae PH-1]
  misc_feature (33)..(213): NCBI GI: 116197619 Blast Desc: CHGG_06965 [Chaetomium globosum CBS 148.51] gi|88178244|gb|EAQ85712.1| CHGG_06965 [Chaetomium globosum CBS 148.51]
MDCITDTTHLRILSAPPITAPTVLPGCNTFPSFSRLPVELQLMVWSAALASLPQQMIKVKLRAPQGPADNGFRAVIWMRDQNLGQVFFVNKVSRAAALEVYRVQIPCWSGNSGMPKTVYFCPERDFVQLRGDRTVVPDFLHDLRSNDPRHVGVLNLAISDDLIDEAWRAWFTPEVMNLDRMPTNPAVSQSFQATIRQLRHIYLVHFLEWDRRVTKFRWRTGLGDRDLLNTSQPVAAEVPGFTVIGADPRDISRHLKRYRLFAPPNLLITHWENYIRRYDPNYEGIAPTTQCRIVFTSSPRAFYQSRGGIGMHPDELREMPEGLSSPDGWNVRSRERAQLVLQAETKMLVADRQIVFEKDKVNGRVNDDAEFSTSPEYSGCVDVVGSPVNAAFGFWLFPAAAFENLPPPNEDGNYWLPGLHGIDVDLSEFWPELALMDI

SEQ ID NO: 4025 - DNA, 1083 bp, Muscodor strobelii
  misc_feature: SGI cDNA ID NO. 561016
  misc_feature: Encodes the peptide sequence at SEQ ID NO 4026
atgtcgggcggcctggccgacacgggtagcgcgtatgctcggcagagtctagttccgaatatcattgcttgcatcgcaattactggtgtggcatcaatcgtgtttattggtctgcggatttggtcaagaagaatcacttacggtcatctgcggtgtgagacgagtgactggctcctacttgtcgcttgggttttctacgcgttgcaggctgtcgcgctcggtattgccacgaaatatggtactggtcatcatgttcaggtgataactgacccgaagtcattccatgtctgggggactgtgtcagaagtggtctatttcagcacactcgcgtttttgaagcttagcgtgcttagcttttacggacgcatatttccgcagcaatcttttcattactgggtgtgggcagtctccggcatcatagtggcatgggacattgcttttaccttctcgactatcttccaatgcgtccctatctcctacgcctgggatcagaatcaaccgggaacctgtatcaacactggcattcaacaattagcatctggtataatcaatataataaccgatttcgtcatcctcgcacttcctattcccttgatttggaaactcaacattcccaagcgcgagaagcgaagggccgcattcactctcgcttttgggtgcgctgcatgtcttgtcagtattgttagactcgcattcgcgcaaacgattgatttggcagatggaagctggaccggtgttggcatcacatatatctcgatagtcgagaccactgtaggaattttggcagtgtcgataccgacctacaaaccgctctatgtgcgactctttgggccaaaacggcggccaactaacactggtgctgagtcgagttccggcgggtcgcacaaaagatcgatacctttatcggcacaagaggatctcagaagtccgcatattcgcatcactcatcaaattgaattagtgagacacgccaatcgagggggagcttgggtggaagtgcccgacgaggacgagagatgggaacatgacactagtcaaaatcgcagtcggcgaccgagtagcatagatcagtatcctgattaa

SEQ ID NO: 4026 - protein, 360 aa, Muscodor strobelii
  misc_feature: SGI Peptide ID NO. 561016
  misc_feature (11)..(354): NCBI GI: 67525875 Blast Desc: AN3395.2 [Aspergillus nidulans FGSC A4] gi|40744183|gb|EAA63363.1| AN3395.2 [Aspergillus nidulans FGSC A4] gi|259485618|tpe|CBF82793.1| TPA: conserved [Aspergillus FGSC
  misc_feature (19)..(351): NCBI GI: 255941498 Blast Desc: Pc16g12190 [Penicillium chrysogenum Wisconsin 54-1255] gi|211586141|emb|CAP93889.1| Pc16g12190 [Penicillium chrysogenum Wisconsin 54-1255]
  misc_feature (31)..(329): NCBI GI: 189192284 Blast Desc: [Pyrenophora tritici-repentis Pt-1C-BFP] gi|187974087|gb|EDU41586.1| [Pyrenophora tritici-repentis Pt-1C-BFP]
  misc_feature (27)..(279): NCBI GI: 67901574 Blast Desc: AN7774.2 [Aspergillus nidulans FGSC A4] gi|40742372|gb|EAA61562.1| AN7774.2 [Aspergillus nidulans FGSC A4] gi|259484126|tpe|CBF80080.1| TPA: integral membrane protein
  misc_feature (19)..(295): NCBI GI: 169772333 Blast Desc: [Aspergillus oryzae RIB40] gi|83768496|dbj|BAE58633.1| protein product [Aspergillus oryzae]
  misc_feature (19)..(276): NCBI GI: 261200579 Blast Desc: integral membrane protein [Ajellomyces dermatitidis SLH14081] gi|239593762|gb|EEQ76343.1| integral membrane protein [Ajellomyces dermatitidis SLH14081]
  misc_feature (30)..(293): NCBI GI: 115383676 Blast Desc: conserved [Aspergillus terreus NIH2624] gi|114196077|gb|EAU37777.1| conserved [Aspergillus terreus NIH2624]
  misc_feature (14)..(347): NCBI GI: 154298376 Blast Desc: BC1G_11643 [Botryotinia fuckeliana B05.10] gi|150858096|gb|EDN33288.1| BC1G_11643 [Botryotinia fuckeliana B05.10]
  misc_feature (13)..(335): NCBI GI: 121711771 Blast Desc: conserved [Aspergillus clavatus NRRL 1] gi|119401652|gb|EAW12075.1| conserved [Aspergillus clavatus NRRL 1]
  misc_feature (29)..(279): NCBI GI: 119483170 Blast Desc: NFIA_027900 [Neosartorya fischeri NRRL 181] gi|119409768|gb|EAW19716.1| conserved [Neosartorya fischeri NRRL 181]
MSGGLADTGSAYARQSLVPNIIACIAITGVASIVFIGLRIWSRRITYGHLRCETSDWLLLVAWVFYALQAVALGIATKYGTGHHVQVITDPKSFHVWGTVSEVVYFSTLAFLKLSVLSFYGRIFPQQSFHYWVWAVSGIIVAWDIAFTFSTIFQCVPISYAWDQNQPGTCINTGIQQLASGIINIITDFVILALPIPLIWKLNIPKREKRRAAFTLAFGCAACLVSIVRLAFAQTIDLADGSWTGVGITYISIVETTVGILAVSIPTYKPLYVRLFGPKRRPTNTGAESSSGGSHKRSIPLSAQEDLRSPHIRITHQIELVRHANRGGAWVEVPDEDERWEHDTSQNRSRRPSSIDQYPD

SEQ ID NO: 4027 - DNA, 1741 bp, Muscodor strobelii
  misc_feature: SGI EST ID NO. CUFF.10111.0
  misc_feature: Variant of the nucleotide sequence at SEQ ID NO 4025
gcgagcggagaatgctgcaccaaacggatagacgaactccttcgagcaacaaaagtcagcgaatacccacctagagatacaggggcaagttccctattccgatcattccgcgcagaactttgagacggaatattgcgaacagcaccttgcgcccttggccctcgcaatgcttatctagacaactacgagtatctcattggccaaggacgacacacaatactccaaacatcagaaatagacggatacccagcttacttacatacatacatacctgagtcgaccaaatgtgttcaatctccggtacagacccatacacatcgacatcctctatgcacagatgatgcacagcaacccaccactcggcatttgaatgtcttggtgaagtgcggcccgttattagttagatctagggccccgtccacctgtgccaagatgactcttcctcttcttctcagtcgtccaacaggcaccttgtgtcaaacgcaattgcccgttcgtgcatacataaggccagatccgccatgtcgggcggcctggccgacacgggtagcgcgtatgctcggcagagtctagttccgaatatcattgcttgcatcgcaattactggtgtggcatcaatcgtgtttattggtctgcggatttggtcaagaagaatcacttacggtcatctgcggtgtgagacgagtgactggctcctacttgtcgcttgggttttctacgcgttgcaggctgtcgcgctcggtattgccacgaaatatggtactggtcatcatgttcaggtgataactgacccgaagtcattccatgtcgtaagtttggcaaagttgtcccgtcattggatctatcactatcactgctgacagtctcgcgagcagtgggggactgtgtcagaagtggtctatttcagcacactcgcgtttttgaagcttagcgtgcttagcttttacggacgcatatttccgcagcaatcttttcattactgggtgtgggcagtctccggcatcatagtggcatgggacattgcttttaccttctcgactatcttccaatgcgtccctatctcctacgcctgggatcagaatcaaccgggaacctgtatcaacactggcattcaacaattagcatctggtataatcaatataataaccgatttcgtcatcctcgcacttcctattcccttgatttggaaactcaacattcccaagcgcgagaagcgaagggccgcattcactctcgcttttgggtgcgctgcatgtcttgtcagtattgttagactcgcattcgcgcaaacgattgatttggcagatggaagctggaccggtgttggcatcacatatatctcgatagtcgagaccactgtaggaattttggcagtgtcgataccgacctacaaaccgctctatgtgcgactctttgggccaaaacggcggccaactaacactggtgctgagtcgagttccggcgggtcgcacaaaagatcgatacctttatcggcacaagaggatctcagaagtccgcatattcgcatcactcatcaaattgaattagtgagacacgccaatcgagggggagcttgggtggaagtgcccgacgaggacgagagatgggaacatgacactagtcaaaatcgcagtcggcgaccgagtagcatagatcagtatcctgattaagtgcgtagaaaaagtaataatgggacgactttctacctagcttccgaataaactggcgaataacgcctata

SEQ ID NO: 4028 - DNA, 1035 bp, Muscodor strobelii
  misc_feature: SGI cDNA ID NO. 561017
  misc_feature: Encodes the peptide sequence at SEQ ID NO 4029
atgtcgcaaagtcaccaaagtgtttacgccaatctggcggtaccgttgccaccgagagagatggagtacactcgactcggagaatccggacttaaggtatcaaagatcattctgggcgccatgtcatacggtagcaaggattggcaaccatgggtcttagaggaagatgaggcactcccgttattggagcacgcctacaacgtgggcgttaacacatgggatacggcagatgtctactccgatggccgttctgaggagatcattgccaaagcactggaagtatgcgtgcccggagagcctcggttaccgttgtttgcgtcctatgtcaatgacgggaggatggtcaaccgtgctggtttatcaagaaaacatatttttgacgccgttcagcacagtgtcagacgccttgggacgtacatcgatgtattgcaggttcaccgtatagatcgcgatgtgccctacgaagagattatgagggcactgaacgatgtgattgagaaaggttgggtgcgatatattggcgcgagctcgatgcccgcgtgggagtttcagatgcttcaaaacatagcagagaagaacggttggcacaaattcgtcagcatgcagaactactacaacctcctatatcgagaagaagagcgagagatgataccttattgcaagaaaactggagttggcctgattccttggtcacccaatgctcgtggacttctcgcgcgcccgtggaactccaacaatagctcttcgcttcgtgccgatacagactttgccatgtctgtccttttcgagaaagacgatccgatcaatcaggcgattgtaaatgtggttgaagagattgcaaaagagcgaattctccccatggcgactattgcaatggcttggtgtctttgtaagggggtcaatcccatagttggactgaacagtaaagaacgtattgacgaagtcgctaaagcagtgaaggtggttctcactgaggaggaggtcaccagattggaggctgcttatgtacccaggggcattatagggtttcagtag

SEQ ID NO: 4029 - protein, 344 aa, Muscodor strobelii
  misc_feature: SGI Peptide ID NO. 561017
  misc_feature (27)..(336): Pfam Id: PF00248 Pfam Desc: Aldo/keto reductase family
  misc_feature (119)..(336): Pfam Id: PF00248 Pfam Desc: Aldo/keto reductase family
  misc_feature (27)..(93): Pfam Id: PF00248 Pfam Desc: Aldo/keto reductase family
  misc_feature (1)..(343): NCBI GI: 115387060 Blast Desc: conserved [Aspergillus terreus NIH2624] gi|114191069|gb|EAU32769.1| conserved [Aspergillus terreus NIH2624]
  misc_feature (20)..(344): NCBI GI: 238485994 Blast Desc: aldo-keto reductase, [Aspergillus flavus NRRL3357] gi|220699114|gb|EED55453.1| aldo-keto reductase, [Aspergillus flavus NRRL3357]
  misc_feature (18)..(343): NCBI GI: 154312236 Blast Desc: BC1G_06151 [Botryotinia fuckeliana B05.10] gi|150850114|gb|EDN25307.1| BC1G_06151 [Botryotinia fuckeliana B05.10]
  misc_feature (20)..(344): NCBI GI: 145257964 Blast Desc: An04g05380 [Aspergillus niger] gi|134074506|emb|CAK38800.1| protein product [Aspergillus niger]
  misc_feature (18)..(344): NCBI GI: 169771445 Blast Desc: [Aspergillus oryzae RIB40] gi|83768051|dbj|BAE58190.1| protein product [Aspergillus oryzae]
  misc_feature (16)..(343): NCBI GI: 169607222 Blast Desc: SNOG_06666 [Phaeosphaeria nodorum SN15] gi|160707179|gb|EAT86497.2| SNOG_06666 [Phaeosphaeria nodorum SN15]
  misc_feature (20)..(340): NCBI GI: 115391257 Blast Desc: ATEG_03955 [Aspergillus terreus NIH2624] gi|114194057|gb|EAU35757.1| ATEG_03955 [Aspergillus terreus NIH2624]
  misc_feature (20)..(340): NCBI GI: 75859032 Blast Desc: AN9474.2 [Aspergillus nidulans FGSC A4] gi|40747633|gb|EAA66789.1| AN9474.2 [Aspergillus nidulans FGSC A4] gi|259484925|tpe|CBF81562.1| TPA: aldo-keto reductase, FGSC
  misc_feature (1)..(344): NCBI GI: 119500340 Blast Desc: aldo-keto reductase, [Neosartorya fischeri NRRL 181] gi|119415092|gb|EAW25030.1| aldo-keto reductase, [Neosartorya fischeri NRRL 181]
  misc_feature (20)..(344): NCBI GI: 255947762 Blast Desc: Pc22g06170 [Penicillium chrysogenum Wisconsin 54-1255] gi|211591665|emb|CAP97905.1| Pc22g06170 [Penicillium chrysogenum Wisconsin 54-1255]
  misc_feature (14)..(312): SWISSPROT Homolog: EC 1.1.1.91 Aryl-alcohol dehydrogenase (NADP(+))
MSQSHQSVYANLAVPLPPREMEYTRLGESGLKVSKIILGAMSYGSKDWQPWVLEEDEALPLLEHAYNVGVNTWDTADVYSDGRSEEIIAKALEVCVPGEPRLPLFASYVNDGRMVNRAGLSRKHIFDAVQHSVRRLGTYIDVLQVHRIDRDVPYEEIMRALNDVIEKGWVRYIGASSMPAWEFQMLQNIAEKNGWHKFVSMQNYYNLLYREEEREMIPYCKKTGVGLIPWSPNARGLLARPWNSNNSSSLRADTDFAMSVLFEKDDPINQAIVNVVEEIAKERILPMATIAMAWCLCKGVNPIVGLNSKERIDEVAKAVKVVLTEEEVTRLEAAYVPRGIIGFQ

SEQ ID NO: 4030 - DNA, 1081 bp, Muscodor strobelii
  misc_feature: SGI EST ID NO. CUFF.10068.0
  misc_feature: Variant of the nucleotide sequence at SEQ ID NO 4028
agagaacgtcgtgcttttaactaaagtccgatggggcaccagcgtgcccggagagcctcggttaccgttgtttgcgtcctatgtcaatgacgggaggatggtcaaccgtgctggtttatcaagaaaacatatttttgacgccgttcagcacagtgtcagacgccttgggacgtacatcgatgtattgcaggttcaccgtatagatcgcgatgtgccctacgaagagattatgagggcactgaacgatgtgattgagaaaggttgggtgcgatatattggcgcgagctcgatgcccgcgtgggagtttcagatgcttcaaaacatagcagagaagaacggttggcacaaattcgtcagcatgcagaactactacaacctcctatatcgagaagaagagcgagagatgataccttattgcaagaaaactggagttggcctgattccttggtcacccaatgctcgtggacttctcgcgcgcccgtggaactccaacaatagctcttcgcttcgtgccgatacagactttgccatgtctgtccttttcgagaaagacgatccgatcaatcaggcgattgtaaatgtggttgaagagattgcaaaagagcgaattctccccatggcgactattgcaatggcttggtgtctttgtaagggggtcaatcccatagttggactgaacagtaaagaacgtattgacgaagtcgctaaagcagtgaaggtggttctcactgaggaggaggtcaccagattggaggctgcttatgtacccaggggcattatagggtttcagtagacctatgtcattgggtaagagactaacccaaacataatgaggaagaccccatttaaacacgtcgatgggacatcgtcaatagtatttatcctctccgtatgcagccgagtcttccatgtcatgatgcggcaaggatgtcgaattacacccgggaagaacattccggaatggaacgaggaagatattttcagtaaggtttatgagacggactcgcgaaaagccagcagaagcccaagggttgacttgacctgacaatttcgcatcaatcatgcacatatactattgatg

SEQ ID NO: 4031 - DNA, 795 bp, Muscodor strobelii
  misc_feature: SGI cDNA ID NO. 561018
  misc_feature: Encodes the peptide sequence at SEQ ID NO 4032
atgagttcttcagagcaagataatgggctgaaggtcatcacgggaagcttctaccgaatgggcaccagatctctcggggaagctctgagcatacttggttacaatgtgcatcatggccttgatgatatccggaataacccatgggaagtaatggagcatgccgcggaggcaaaatggccgcgcaatggctactcaagacctccattaacgagggaggagtgggacacagcttggaaatcattcgacgcagtcacagatctggctacaccgtatacagtgaatctggccagtgtgtacccagaagcgaaagtggtcatagtccagagagatttcgacacctggtggccaagcttcaagcaagagtgccttgatccaattttcaacccttggacagtcgctctcagcactatcgcaagctacattatcgggaccaattcgatacaagccatgcaaaaaacacactgcggcttcttcgacgcgaacaatgtgcaggagattgaagccaatgcccgtgcatcatatgacagacatttccaggagttgcgggcgcttattccacaggaaagacggcttgagtacaaaatgggctccggttgggagccgttgtgcgaattcttaggtcggccgatccctgatgtgtcgtttccacgtagcaataatcgaaaggagcacaataagcagatggagtcgaatttcaagagtcgttacgcgcaggtcctaaatggtgctatgcccttgattctagccggtgcgaccgctgggttgactgcttatcaactagggaaaggcagatga

SEQ ID NO: 4032 - protein, 264 aa, Muscodor strobelii
  misc_feature: SGI Peptide ID NO. 561018
  misc_feature (70)..(253): NCBI GI: 116179296 Blast Desc: CHGG_00276 [Chaetomium globosum CBS 148.51] gi|88184573|gb|EAQ92041.1| CHGG_00276 [Chaetomium globosum CBS 148.51]
  misc_feature (3)..(245): NCBI GI: 256728993 Blast Desc: NECHADRAFT_93184 [Nectria haematococca mpVI 77-13-4]
  misc_feature (3)..(258): NCBI GI: 46116006 Blast Desc: FG03845.1 [Gibberella zeae PH-1]
  misc_feature (2)..(260): NCBI GI: 46120546 Blast Desc: FG04920.1 [Gibberella zeae PH-1]
  misc_feature (10)..(227): NCBI GI: 238837557 Blast Desc: conserved [Microsporum canis CBS 113480]
  misc_feature (4)..(241): NCBI GI: 154304931 Blast Desc: BC1G_09051 [Botryotinia fuckeliana B05.10] gi|150853913|gb|EDN29105.1| BC1G_09051 [Botryotinia fuckeliana B05.10]
  misc_feature (1)..(255): NCBI GI: 116198675 Blast Desc: CHGG_07493 [Chaetomium globosum CBS 148.51] gi|88178772|gb|EAQ86240.1| CHGG_07493 [Chaetomium globosum CBS 148.51]
  misc_feature (10)..(259): NCBI GI: 189196286 Blast Desc: conserved [Pyrenophora tritici-repentis Pt-1C-BFP] gi|187980360|gb|EDU46986.1| conserved [Pyrenophora tritici-repentis Pt-1C-BFP]
  misc_feature (10)..(264): NCBI GI: 145607804 Blast Desc: MGG_10067 [Magnaporthe grisea 70-15] gi|145015300|gb|EDJ99836.1| MGG_10067 [Magnaporthe grisea 70-15]
  misc_feature (31)..(231): NCBI GI: 169605543 Blast Desc: SNOG_05797 [Phaeosphaeria nodorum SN15] gi|160706786|gb|EAT86861.2| SNOG_05797 [Phaeosphaeria nodorum SN15]
MSSSEQDNGLKVITGSFYRMGTRSLGEALSILGYNVHHGLDDIRNNPWEVMEHAAEAKWPRNGYSRPPLTREEWDTAWKSFDAVTDLATPYTVNLASVYPEAKVVIVQRDFDTWWPSFKQECLDPIFNPWTVALSTIASYIIGTNSIQAMQKTHCGFFDANNVQEIEANARASYDRHFQELRALIPQERRLEYKMGSGWEPLCEFLGRPIPDVSFPRSNNRKEHNKQMESNFKSRYAQVLNGAMPLILAGATAGLTAYQLGKGR

SEQ ID NO: 4033 - DNA, 869 bp, Muscodor strobelii
  misc_feature: SGI EST ID NO. CUFF.10071.0
  misc_feature: Variant of the nucleotide sequence at SEQ ID NO 4031
tccatagtcaacatgagttcttcagagcaagataatgggctgaaggtcatcacgggaagcttctaccgaatgggcaccagatctctcggggaagctctgagcatacttggttacaatgtgcatcatggccttgatgatatccggaataacccatgggaagtaatggagcatgccgcggaggcaaaatggccgcgcaatggctactcaagacctccattaacgagggaggagtgggacacagcttggaaatcattcgacgcagtcacagatctggctacaccgtatacagtgaatctggccagtgtgtacccagaagcgaaagtggtcatagtccagagagatttcgacacctggtggccaagcttcaagcaagagtgccttgatccaattttcaacccttggacagtcgctctcagcactatcgcaagctacattatcgggaccaattcgatacaagccatgcaaaaaacacactgcggcttcttcgacgcgaacaatgtgcaggagattgaagccaatgcccgtgcatcatatgacagacatttccaggagttgcgggcgcttattccacaggaaagacggcttgagtacaaaatgggctccggttgggagccgttgtgcgaattcttaggtcggccgatccctgatgtgtcgtttccacgtagcaataatcgaaaggagcacaataagcagatggagtcgaatttcaagagtcgttacgcgcaggtcctaaatggtgctatgcccttgattctagccggtgcgaccgctgggttgactgcttatcaactagggaaaggcagatgatgtatggacacggagtttcggatagaaaatcgttttactcttcatgctgaagagcccattta

SEQ ID NO: 4034 - DNA, 798 bp, Muscodor strobelii
  misc_feature: SGI cDNA ID NO. 561019
  misc_feature: Encodes the peptide sequence at SEQ ID NO 4035
atgaagtactctgcccttctctctggcctggccgtcgccggcgccgctgccaagccttgtggcaagcgggatctacccactaccaagatcgccaacattgaggttgtcaacactccgctcgtgcaagatgctgtcgagctcatcaagcagttcattcctctgcagccttatctttacaaccatttgatgcgttcatggttgtttggagctgctgctttcaacaacaacgagacgttgaaggctcagatcgatctcgagggccacgctatcggcgctctgttgcacgatctgggatgggacatgcgtgatgacagcccgtggcacaacccgaaccgtccctttgaagttgacagtggtctcggtgccatggccttcgtgaaggagagcgatgatgccgccaactgggacgagacccgtctggagaagatctacgacggcattaccctccagggtgtcggagcctacgttgttggcaagaacctccaggtgcagtggattgttcagagtgttgagtttgagttccccggtccacgtgacccccgtatccgcaacgaggactatgacagcattctcgctgagttccccaacgacactgttttccgtggcaccaacgaaacatttacctggctcacgatgactaagcccaatggaactagaaacagcttcattgactacttcggaactgcttatgttcctggctacggtcctcagagccatctcgctttcgatctcatcactggtggagttgccgccgagattgcgcagtaccccaacgctaactggacttccaacctctaa

SEQ ID NO: 4035 - protein, 265 aa, Muscodor strobelii
  misc_feature: SGI Peptide ID NO. 561019
  misc_feature (4)..(243): NCBI GI: 116200323 Blast Desc: CHGG_08317 [Chaetomium globosum CBS 148.51] gi|88179596|gb|EAQ87064.1| CHGG_08317 [Chaetomium globosum CBS 148.51]
  misc_feature (15)..(243): NCBI GI: 256721693 Blast Desc: NECHADRAFT_44823 [Nectria haematococca mpVI 77-13-4]
  misc_feature (26)..(245): NCBI GI: 171681192 Blast Desc: protein product [Podospora anserina] gi|170940554|emb|CAP65782.1| protein product [Podospora anserina]
  misc_feature (30)..(247): NCBI GI: 116202473 Blast Desc: CHGG_09121 [Chaetomium globosum CBS 148.51] gi|88177639|gb|EAQ85107.1| CHGG_09121 [Chaetomium globosum CBS 148.51]
  misc_feature (26)..(251): NCBI GI: 171693093 Blast Desc: protein product [Podospora anserina] gi|170946495|emb|CAP73296.1| protein product [Podospora anserina]
  misc_feature (30)..(218): NCBI GI: 116204295 Blast Desc: CHGG_10031 [Chaetomium globosum CBS 148.51] gi|88176159|gb|EAQ83627.1| CHGG_10031 [Chaetomium globosum CBS 148.51]
  misc_feature (25)..(223): NCBI GI: 242795716 Blast Desc: conserved [Talaromyces stipitatus ATCC 10500] gi|218719237|gb|EED18657.1| conserved [Talaromyces stipitatus ATCC 10500]
  misc_feature (30)..(246): NCBI GI: 260460254 Blast Desc: conserved [Mesorhizobium opportunistum WSM2075] gi|259033899|gb|EEW35158.1| conserved [Mesorhizobium opportunistum WSM2075]
  misc_feature (27)..(245): NCBI GI: 13471098 Blast Desc: mlr0982 [Mesorhizobium loti MAFF303099] gi|14021842|dbj|BAB48453.1| mlr0982 [Mesorhizobium loti MAFF303099]
  misc_feature (69)..(233): NCBI GI: 116178824 Blast Desc: CHGG_00040 [Chaetomium globosum CBS 148.51] gi|88184337|gb|EAQ91805.1| CHGG_00040 [Chaetomium globosum CBS 148.51]
MKYSALLSGLAVAGAAAKPCGKRDLPTTKIANIEVVNTPLVQDAVELIKQFIPLQPYLYNHLMRSWLFGAAAFNNNETLKAQIDLEGHAIGALLHDLGWDMRDDSPWHNPNRPFEVDSGLGAMAFVKESDDAANWDETRLEKIYDGITLQGVGAYVVGKNLQVQWIVQSVEFEFPGPRDPRIRNEDYDSILAEFPNDTVFRGTNETFTWLTMTKPNGTRNSFIDYFGTAYVPGYGPQSHLAFDLITGGVAAEIAQYPNANWTSNL

SEQ ID NO: 4036 - DNA, 1279 bp, Muscodor strobelii
  misc_feature: SGI EST ID NO. CUFF.10077.0
  misc_feature: Variant of the nucleotide sequence at SEQ ID NO 4034
gagctgacgagcatagcattgtcttcgcgaaatgcgcccagtttcatggcgctctatttttgtgccttggccatgtcagctcatctcgccttacccatcccattgagcatttgtacgatatcatatcacaatggaagatacagcatcgatgcgccgagtcttgattactgtgcgtttcttcacggtaaaccccgtgggttaacgagggtagtcgtgtatactacgagatggatatatctagatagcctccacctccgcatttcattgtttgttttcagcctcatcacttcccttcactcgtcgctcattgcctccgacggtttaatcctagtcattccctcgacatgaagtactctgcccttctctctggcctggccgtcgccggcgccgctgccaagccttgtggcaagcgggatctacccactaccaagatcgccaacattgaggttgtcaacactccgctcgtgcaagatgctgtcgagctcatcaagcagttcattcctctgcagccttatctttacaaccatttgatgcgttcatggttgtttggagctgctgctttcaacaacaacgagacgttgaaggctcagatcgatctcgagggccacgctatcggcgctctgttgcacgatctgggatgggacatgcgtgatgacagcccgtggcacaacccgaaccgtccctttgaagttgacagtggtctcggtgccatggccttcgtgaaggagagcgatgatgccgccaactgggacgagacccgtctggagaagatctacgacggcattaccctccagggtgtcggagcctacgttgttggcaagaacctccaggtgcagtggattgttcagagtgttgagtttgagttccccggtccacgtgacccccgtatccgcaacgaggactatgacagcattctcgctgagttccccaacgacactgttttccgtggcaccaacgaaacatttacctggctcacgatgactaagcccaatggaactagaaacagcttcattgactacttcggaactgcttatgttcctggctacggtcctcagagccatctcgctttcgatctcatcactggtggagttgccgccgagattgcgcagtaccccaacgctaactggacttccaacctctaaattagcgtagtcagatttgtggggacatataaaaagcatgtctcgatgacatggcaattctcggctgagaacaattataatgccgatgtatatagattctctttcacttgaacatagactctttacagccctgagga

SEQ ID NO: 4037 - DNA, 1866 bp, Muscodor strobelii
  misc_feature: SGI cDNA ID NO. 561020
  misc_feature: Encodes the peptide sequence at SEQ ID NO 4038
atggcggctatttcttttctaggccaattggcctctttctctagtctgtcacctgctgcagtgatcgggttagcttcgcttgcttttgttatcatcaagtatagcattgacgtgctactattccattatgctcaaacattcggtggcaacactaagggagaactcccaccaagatatccgtcttttgtcccatggctaggcgagatatttcagcttgctgttaaccacaagcgcctaacagacaatgtctcatggtataagggcaaattaacctccaacagagttgagatattcggcttctcatacttcgttttccaggatcgggagaccctcatcaaactattcaagagcaaggctttggccagtgcaattgatatgtacgagtttagcaacaacaacattttgggatgctccaaggagtcgtcaaaggtttacagagcagatacctccggccctatgccacagccggatcctagaagcaacgtcctgccccacaaccgcgttgattccatcacacactctcttgcatttcgggggttcaccggcccaggaatgcagccagcaacgagacgcttcgctagagatgtacctttgcaattagcggcaaagggcatcactacagagtggaaagaaatccccgactttgcgcagtttttcagagagagcattggtccctcgtccatccaatgcattttcgggcctacgctacttcgattacaccccacctttgtgaaagacattttcgaattcgacagaatcatgcctcagttcactgctggtatgccaaaggttttgatgccagaacagtacaaattcagagactcgatcgcggagaagttgaagagttggtatgtctacgcaagggaacacttcgatccatcaatgattgaagccgatggagatggagacccgatatggggatcagcgatgattcgcaaccgacaagagcaacttctgaaagccgatgcgcatgacgatgacgttcttgctcatcttgatctcggactggcctgggcgacgattggcaatttggtcatctcgtgcatgttcggcgcataccatatcttgcaggacaagactcttttaaaacgcgtgcgacaagaactccaggactacttaggtgaccggaccatacatgaggttgatcctcatcagctcgggagagatattccgctactctcctcaatctatgcagaaaccatgcgccttcacattaagatttactcagcctatagttcaccacacgaggacgtcgaccttggcaaatggactctgcctcggggagccctagctctggtgaactcggcgccatcgcacatggacaaatcgttctggaacacgaagggcggacagtaccctgttgacacattctgggccgaccgcttcatcgtcgacccagccgatgacgaaagtggccccataaatccagaggtccgtaggtcgatgaaccgtgtagagaagaaacggccggatatgaagccttacttctcaatggatggctgtgagggtgcctggattccatacggaggtggattttctatgtgcccagggcgctttatcgcaaaggcttttatgatattttcagcaactcttttggcgagtgaatacgaggtcgaattccacaatgacacaattgagatctctgactatagatatggtatgggcgtagacgacgttggcaagccaatccccttccacattcgtaagagagcgaatgctgatgtagccatctccgacagccatacacgaggcactatgcaagagactggccctgcccgagcacagcagtggcttcaacagcgcaccgtgacgtccaatgtcgagctcgtcgacctgcgtatggtcggcttcagtggctccacctaa

SEQ ID NO: 4038 - protein, 621 aa, Muscodor strobelii
  misc_feature: SGI Peptide ID NO. 561020
  misc_feature (30)..(573): NCBI GI: 189195766 Blast Desc: conserved [Pyrenophora tritici-repentis Pt-1C-BFP] gi|187980100|gb|EDU46726.1| conserved [Pyrenophora tritici-repentis Pt-1C-BFP]
  misc_feature (53)..(570): NCBI GI: 242764799 Blast Desc: conserved [Talaromyces stipitatus ATCC 10500] gi|218724041|gb|EED23458.1| conserved [Talaromyces stipitatus ATCC 10500]
  misc_feature (2)..(575): NCBI GI: 212528994 Blast Desc: Pfs, NACHT and Ankyrin domain protein [Penicillium marneffei ATCC 18224] gi|210074052|gb|EEA28139.1| Pfs, NACHT and Ankyrin domain protein [Penicillium marneffei ATCC 18224]
  misc_feature (50)..(575): NCBI GI: 169785174 Blast Desc: [Aspergillus oryzae RIB40] gi|83775795|dbj|BAE65915.1| protein product [Aspergillus oryzae]
  misc_feature (38)..(572): NCBI GI: 242813620 Blast Desc: conserved [Talaromyces stipitatus ATCC 10500] gi|218714542|gb|EED13965.1| conserved [Talaromyces stipitatus ATCC 10500]
  misc_feature (38)..(572): NCBI GI: 242813615 Blast Desc: conserved [Talaromyces stipitatus ATCC 10500] gi|218714541|gb|EED13964.1| conserved [Talaromyces stipitatus ATCC 10500]
  misc_feature (56)..(569): NCBI GI: 145246720 Blast Desc: An12g05400 [Aspergillus niger] gi|134080330|emb|CAK46252.1| protein product [Aspergillus niger]
  misc_feature (50)..(510): NCBI GI: 238507576 Blast Desc: conserved [Aspergillus flavus NRRL3357] gi|220688508|gb|EED44860.1| conserved [Aspergillus flavus NRRL3357]
  misc_feature (134)..(570): NCBI GI: 156062376 Blast Desc: SS1G_01304 [Sclerotinia sclerotiorum 1980] gi|154696640|gb|EDN96378.1| SS1G_01304 [Sclerotinia sclerotiorum 1980]
  misc_feature (2)..(540): NCBI GI: 256724156 Blast Desc: NECHADRAFT_51576 [Nectria haematococca mpVI 77-13-4]
  misc_feature (249)..(556): SWISSPROT Homolog: EC 1.14.13.17 Cholesterol 7-alpha-monooxygenase
MAAISFLGQLASFSSLSPAAVIGLASLAFVIIKYSIDVLLFHYAQTFGGNTKGELPPRYPSFVPWLGEIFQLAVNHKRLTDNVSWYKGKLTSNRVEIFGFSYFVFQDRETLIKLFKSKALASAIDMYEFSNNNILGCSKESSKVYRADTSGPMPQPDPRSNVLPHNRVDSITHSLAFRGFTGPGMQPATRRFARDVPLQLAAKGITTEWKEIPDFAQFFRESIGPSSIQCIFGPTLLRLHPTFVKDIFEFDRIMPQFTAGMPKVLMPEQYKFRDSIAEKLKSWYVYAREHFDPSMIEADGDGDPIWGSAMIRNRQEQLLKADAHDDDVLAHLDLGLAWATIGNLVISCMFGAYHILQDKTLLKRVRQELQDYLGDRTIHEVDPHQLGRDIPLLSSIYAETMRLHIKIYSAYSSPHEDVDLGKWTLPRGALALVNSAPSHMDKSFWNTKGGQYPVDTFWADRFIVDPADDESGPINPEVRRSMNRVEKKRPDMKPYFSMDGCEGAWIPYGGGFSMCPGRFIAKAFMIFSATLLASEYEVEFHNDTIEISDYRYGMGVDDVGKPIPFHIRKRANADVAISDSHTRGTMQETGPARAQQWLQQRTVTSNVELVDLRMVGFSGST

SEQ ID NO: 4039 - DNA, 5635 bp, Muscodor strobelii
  misc_feature: SGI EST ID NO. CUFF.10319.0
  misc_feature: Variant of the nucleotide sequence at SEQ ID NO 4037
cctcatcaaactattcaagagcaaggctttggccagtgcaattgatatgtacgagtttagcaacaacaacattttgggatgctccaaggagtcgtcaaaggtttacagagcagatacctccggccctatgccacagccggatcctagaagcaacgtcctgccccacaaccgcgttgattccatcacacactctcttgcatttcgggggttcaccggcccaggaatgcagccagcaacgagacgcttcgctagagatgtacctttgcaattagcggcaaagggcatcactacagagtggaaagaaatccccgactttgcgcagtttttcagagagagcattggtccctcgtccatccaatgcattttcgggcctacgctacttcgattacaccccacctttgtgaaagacattttcgaattcgacagaatcatgcctcagttcactgctggtatgccaaaggttttgatgccagaacagtacaaattcagagactcgatcgcggagaagttgaagagttggtatgtctacgcaagggaacacttcgatccatcaatgattgaagccgatggagatggagacccgatatggggatcagcgatgattcgcaaccgacaagagcaacttctgaaagccgatgcgcatgacgatgacgttcttgctcatcttgatctcggactggcctgggcgtgagtttcctagcggacgatattgcagagcgttactgacacctacccctaggacgattggcaatttggtcatctcgtgcatgttcggcgcataccatatcttgcaggacaagactcttttaaaacgcgtgcgacaagaactccaggactacttaggtgaccggaccatacatgaggttgatcctcatcagctcgggagagatattccgctactctcctcaatctatgcagaaaccatgcgccttcacattaagatttactcagcctatagttcaccacacgaggacgtcgaccttggcaaatggactctgcctcggggagccctagctctggtgaactcggcgccatcgcacatggacaaatcgttctggaacacgaagggcggacagtaccctgttgacacattctgggccgaccgcttcatcgtcgacccagccgatgacgaaagtggccccataaatccagaggtccgtaggtcgatgaaccgtgtagagaagaaacggccggatatgaagccttacttctcaatggatggctgtgagggtgcctggattccatacggaggtggattttctatgtgcccagggcgctttatcgcaaaggcttttatgatattttcagcaactcttttggcgagtgaatacgaggtcgaattccacaatgacacaattgagatctctgactatagatatggtatgggcgtagacgacgttggcaagccaatccccttccacattcgtaagagagcgaatgtggcataagctagcgttatttgatttcacagagcgtttgatacctttttcttacatagccaacctgcaacggggcatgattagacagcgattagaccatagaattaagtatgatctacttataatcaattgtcaatacgttgtgattgctagcttctgcgtttgatgatgcgaattcgtcgcccataggctgatgtagccatctccgacagccatacacgaggcactatgcaagagactggccctgcccgagcacagcagtggcttcaacagcgcaccgtgacgtccaatgtcgagctcgtcgacctgcgtatggtcggcttcagtggctccacctaaccgttcagtggccgctcggatgaacgtgttgctacggcatattcatggtagtttcatttgccgtccggtgccgttgttgttggtgttggggtccggaggtgtcacgtgttccgggctcttacggaagctttcccgctattccgctttgtgctacaagatcatccacatgtagatgaggctgcccgcccgacgacatccgccagtagtaaccgatcgcagaaatcctgtttgttgttagccgaacaaggccgcgcacaatcactaccaatttcggaatacgagaagcccaaccccgcatcacggcgtataggcgaagtggtggcgcattgcgtacgatgggaaccgaccctatcacctcgctgctcgatagcctatcttcgcactggcaagtcagatgctgacccagtgaacgtggtgtgcatgggagctgaatcgtaattccaaatatcacagtgctctccgcgcttcaacttattggcggcacacacgagagtatagtagtctgacgaatgaaaatgccacagcgttgtcgcatcaagtgccctttgggacaattctcttcaattaatgtcatctgaaatatcaggtataattagaatgaactaaagcgatacctaagcacgagatgtgcgagtgcatcatctgatctaagtgaagactaagagacttccttctcgctatcagcacgaacaagtttatcctcagacttggtggaggcgaagtcctcttcgcgggtcatgaaaacctcctcgtcgacatggcgatggcggaaccagaaaatgaccttttttgaatcagcatgcttcaagtagaatctggcgcgggaatggaagaataaaggtgagacgtaccgtctgaacagtaagggcgatagcgggcgcagcccaaccccagatgatgttaggatcgttgagcgcaggaagaagaatctctcccaaggcattagccaaagcagtcataaataagaacagagcggtaatggtagctcgcatattcggaggagcgcgagcgtaggccatctcataacccgtagtgaagacgaagacctcagaaatcgcaccaaggaggacattcgggatctgccaccaaatgctaataggcgaaacatcatcacaagtactggcgtaatacccgctgtttcgagttagagggatgccagaattagcgtgtttgctcaattgagacttaccaaggactagtcttgtacacgtagtattgcacgacagcaccagcgataccggaaagaatggccaggaagaaaccgaacatcatacgactgatgggaccacacttgatacctcggctccggaggaagggatagaccacctgtgccataaacggcgagaagacgataatgactaaggggttgaagttgttgatcaagtcgttaggcgcgccgttcgaggtcatcgcagcaccctgattactcgagacacttcctacaccaccatcgttaatgctccaaataggcacgtactattgaataatcatagtcagaacatgctcgcagataaaacgcattcatcaaaagaaccgttggccctattgtacgtaccaggaagattgcaacggcctcccaggttcgctggcagtcggcgacatccttctcagaatattggactgatccaccagtctctgcgacagccgaaggcttcacgttgtaccagaagttcttcgagaaaaagtttcctttgctcttcttgattgctgatatcgtgatttttgtgaaacgagtgagatcagagccttgtggaggcaatctgatcattcgcttgtaaactaggcatcgcgtgaggtgtcagtgagacagctagggcaaaaatcacatttctcgatgggcgatagaggcacttacgaacagccagcaagaccggtagcagaaagtacagaactccagcgagcaggaaagcctgccagaagcccttgtatttctcaatatacacagcaggaatctggaagaaagcaccgatgttgacgaatgcatagaagataagacacagtctgttgatcgtaacctcggggtccacaataaccttctcgccggacttgagggtcttcgtatattcgtactgatgttgatactggtcaagcagcgtcggtgagatattgggcttgaaaataccagcgcccaaggcgagaagcaatagactgatgatgaagggcgcgacaccctggcccttcgccaacaaagcgggagcggcaccgccaactgagccgcgttagttattcattctttcaatatttggttcaggacaggctggtcattcccgtcaattgggaacgacatactcataataacgtgcgatacaccagcgatgatgacaccccacacaatggcggtccatttaccaactttgacatctgcccaccaagcgcctccaatcgggacgacataggccaggaagctgaacaacaacacaagagcagatgaagcctgcagaccaaggtcaagagcaccagcgtggccattagggttgttcccattgatggctccggttcccggaccgccttctgggagagggaactggactatcaagttacgctcattagtacgctaatcgcatccagacatgcctcattggcgcaaatgcaatgacaatgagatatgtagattgaaatgaaacgcactgtagttattgaaaacggttttcgcgccatagtatgaagctcgctctgccaattcgacgaagcaaatcaaccaggcagtccagggaatgttgtcgtgcactttccgaagcgtctttcgctcctcctcggtgggaggcgggtacttctcgaggtcgacgatacggccggactcagagccagctccagactcaggatcttgggcgctcgctgtcacactcacacgacgggccacatcagcagattgatgggccttctcagcgagaatctcggcatcgtcatgagtggccggttcaacaacgtctcggacggtgagagcggtgacgttctcggcacccaatccggttgtcgctatatagaacctacagtcagatgactagtcgtgagaagatgtcagtgatttgaaacatacccattgcggtggtttgaggctagagcaaaccggaagtattagcttcgattaatgtgtacgacgaagctgagagaagctgtaccatgatcgtgctacgcagacctaggatagagacattggctcctattatacgctgtcctgcgaccacaagcgactccaacgaacattcaattgatagggacccttgcttgcccagcccgagtccagtctgcccagagtcgcccagacgcaccaaatcgcaggggtaacacgacgatgctaccttacgtgcgagcacacagggatgacgccaaccagtagcatgtctccccacgtagattatgttaccattacggaaggtgggttggtctagtattggacaaccccattggaagctgggtcgagagtctgcgcgacatgtggcccatcaagaaattcgtgacgatgggtgataacggcattatgataagccgacgaagctctcgcgtgataacgaccatgcatggcaccttgtaatatatacattcagcccgaatggcacaggccaattgcacgaaaagagattcgtgccgactggccgggtgagcatgggtgcccatgaaaattgaaagcttccatgtcaccttgtacgagagcagagaaagttcggaacgttgcgtgccgctaacaagcgaggcaatctcgaccttgccaccagtacaaagaagcgcatcccacctattgtatcagcgttgactacccgactcggggcttgatggcagagctgacgcatgttcgcacaattagggatgctcaaggacgcgaaatcatctggtgaacaagacagagtcttgcatctggg

SEQ ID NO: 4040 - DNA, 1866 bp, Muscodor strobelii
  misc_feature: SGI cDNA ID NO. 561021
  misc_feature: Reduced expression when VOC is produced
  misc_feature: Encodes the peptide sequence at SEQ ID NO 4041
atggcgacaaccggattgggtgccgagaacgtcaccgctctcaccgtccgagacgttgttgaaccggccactcatgacgatgccgagattctcgctgagaaggcccatcaatctgctgatgtggcccgtcgtgtgagtgtgacagcgagcgcccaagatcctgagtctggagctggctctgagtccggccgtatcgtcgacctcgagaagtacccgcctcccaccgaggaggagcgaaagacgcttcggaaagtgcacgacaacattccctggactgcctggttgatttgcttcgtcgaattggcagagcgagcttcatactatggcgcgaaaaccgttttcaataactacatccagttccctctcccagaaggcggtccgggaaccggagccatcaatgggaacaaccctaatggccacgctggtgctcttgaccttggtctgcaggcttcatctgctcttgtgttgttgttcagcttcctggcctatgtcgtcccgattggaggcgcttggtgggcagatgtcaaagttggtaaatggaccgccattgtgtggggtgtcatcatcgctggtgtatcgcacgttattatgattggcggtgccgctcccgctttgttggcgaagggccagggtgtcgcgcccttcatcatcagtctattgcttctcgccttgggcgctggtattttcaagcccaatatctcaccgacgctgcttgaccagtatcaacatcagtacgaatatacgaagaccctcaagtccggcgagaaggttattgtggaccccgaggttacgatcaacagactgtgtcttatcttctatgcattcgtcaacatcggtgctttcttccagattcctgctgtgtatattgagaaatacaagggcttctggcaggctttcctgctcgctggagttctgtactttctgctaccggtcttgctggctgttctttacaagcgaatgatcagattgcctccacaaggctctgatctcactcgtttcacaaaaatcacgatatcagcaatcaagaagagcaaaggaaactttttctcgaagaacttctggtacaacgtgaagccttcggctgtcgcagagactggtggatcagtccaatattctgagaaggatgtcgccgactgccagcgaacctgggaggccgttgcaatcttcctgtacgtgcctatttggagcattaacgatggtggtgtaggaagtgtctcgagtaatcagggtgctgcgatgacctcgaacggcgcgcctaacgacttgatcaacaacttcaaccccttagtcattatcgtcttctcgccgtttatggcacaggtggtctatcccttcctccggagccgaggtatcaagtgtggtcccatcagtcgtatgatgttcggtttcttcctggccattctttccggtatcgctggtgctgtcgtgcaatactacgtgtacaagactagtccttgcgggtattacgccagtacttgtgatgatgtttcgcctattagcatttggtggcagatcccgaatgtcctccttggtgcgatttctgaggtcttcgtcttcactacgggttatgagatggcctacgctcgcgctcctccgaatatgcgagctaccattaccgctctgttcttatttatgactgctttggctaatgccttgggagagattcttcttcctgcgctcaacgatcctaacatcatctggggttgggctgcgcccgctatcgcccttactgttcagacggtcattttctggttccgccatcgccatgtcgacgaggaggttttcatgacccgcgaagaggacttcgcctccaccaagtctgaggataaacttgttcgtgctgatagcgagaaggaagtctcttag

SEQ ID NO: 4041 - protein, 621 aa, Muscodor strobelii
  misc_feature: SGI Peptide ID NO. 561021
  misc_feature (180)..(546): Pfam Id: PF00854 Pfam Desc: POT family
  misc_feature (380)..(546): Pfam Id: PF00854 Pfam Desc: POT family
  misc_feature (180)..(265): Pfam Id: PF00854 Pfam Desc: POT family
  misc_feature (21)..(610): NCBI GI: 256728818 Blast Desc: NECHADRAFT_79827 [Nectria haematococca mpVI 77-13-4]
  misc_feature (51)..(599): NCBI GI: 46127187 Blast Desc: FG07971.1 [Gibberella zeae PH-1]
  misc_feature (66)..(617): NCBI GI: 238504757 Blast Desc: MFS peptide transporter, [Aspergillus flavus NRRL3357] gi|220689723|gb|EED46073.1| MFS peptide transporter, [Aspergillus flavus NRRL3357]
  misc_feature (67)..(609): NCBI GI: 242818853 Blast Desc: MFS peptide transporter, [Talaromyces stipitatus ATCC 10500] gi|218713664|gb|EED13088.1| MFS peptide transporter, [Talaromyces stipitatus ATCC 10500]
  misc_feature (38)..(602): NCBI GI: 121704473 Blast Desc: oligopeptide transporter [Aspergillus clavatus NRRL 1] gi|119398645|gb|EAW09074.1| oligopeptide transporter [Aspergillus clavatus NRRL 1]
  misc_feature (67)..(602): NCBI GI: 70981688 Blast Desc: MFS peptide transporter [Aspergillus fumigatus Af293] gi|66843995|gb|EAL84335.1| MFS peptide transporter, [Aspergillus fumigatus Af293]
  misc_feature (67)..(602): NCBI GI: 119501607 Blast Desc: oligopeptide transporter [Neosartorya fischeri NRRL 181] gi|119415726|gb|EAW25663.1| oligopeptide transporter [Neosartorya fischeri NRRL 181]
  misc_feature (23)..(599): NCBI GI: 212530390 Blast Desc: MFS peptide transporter, [Penicillium marneffei ATCC 18224] gi|210074750|gb|EEA28837.1| MFS peptide transporter, [Penicillium marneffei ATCC 18224]
  misc_feature (27)..(620): NCBI GI: 145251517 Blast Desc: An15g07510 [Aspergillus niger] gi|134082806|emb|CAK48580.1| protein product [Aspergillus niger]
  misc_feature (67)..(613): NCBI GI: 255951186 Blast Desc: Pc22g24720 [Penicillium chrysogenum Wisconsin 54-1255] gi|211593377|emb|CAP99760.1| Pc22g24720 [Penicillium chrysogenum Wisconsin 54-1255]
  misc_feature: Useful for introducing or modulating the production of volatile compounds
MATTGLGAENVTALTVRDVVEPATHDDAEILAEKAHQSADVARRVSVTASAQDPESGAGSESGRIVDLEKYPPPTEEERKTLRKVHDNIPWTAWLICFVELAERASYYGAKTVFNNYIQFPLPEGGPGTGAINGNNPNGHAGALDLGLQASSALVLLFSFLAYVVPIGGAWWADVKVGKWTAIVWGVIIAGVSHVIMIGGAAPALLAKGQGVAPFIISLLLLALGAGIFKPNISPTLLDQYQHQYEYTKTLKSGEKVIVDPEVTINRLCLIFYAFVNIGAFFQIPAVYIEKYKGFWQAFLLAGVLYFLLPVLLAVLYKRMIRLPPQGSDLTRFTKITISAIKKSKGNFFSKNFWYNVKPSAVAETGGSVQYSEKDVADCQRTWEAVAIFLYVPIWSINDGGVGSVSSNQGAAMTSNGAPNDLINNFNPLVIIVFSPFMAQVVYPFLRSRGIKCGPISRMMFGFFLAILSGIAGAVVQYYVYKTSPCGYYASTCDDVSPISIWWQIPNVLLGAISEVFVFTTGYEMAYARAPPNMRATITALFLFMTALANALGEILLPALNDPNIIWGWAAPAIALTVQTVIFWFRHRHVDEEVFMTREEDFASTKSEDKLVRADSEKEVS

SEQ ID NO: 4042 - DNA, 5087 bp, Muscodor strobelii
  misc_feature: SGI EST ID NO. CUFF.10320.1
  misc_feature: Variant of the nucleotide sequence at SEQ ID NO 4040
cccagatgcaagactctgtcttgttcaccagatgatttcgcgtccttgagcatccctaattgtgcgaacatgcgtcagctctgccatcaagccccgagtcgggtagtcaacgctgatacaataggtgggatgcgcttctttgtactggtggcaaggtcgagattgcctcgcttgttagcggcacgcaacgttccgaactttctctgctctcgtacaaggtgacatggaagctttcaattttcatgggcacccatgctcacccggccagtcggcacgaatctcttttcgtgcaattggcctgtgccattcgggctgaatgtatatattacaaggtgccatgcatggtcgttatcacgcgagagcttcgtcggcttatcataatgccgttatcacccatcgtcacgaatttcttgatgggccacatgtcgcgcagactctcgacccagcttccaatggggttgtccaatactagaccaacccaccttccgtaatggtaacataatctacgtggggagacatgctactggttggcgtcatccctgtgtgctcgcacgtaaggtagcatcgtcgtgttacccctgcgatttggtgcgtctgggcgactctgggcagactggactcgggctgggcaagcaagggtccctatcaattgaatgttcgttggagtcgcttgtggtcgcaggacagcgtataataggagccaatgtctctatcctaggtctgcgtagcacgatcatggtacagcttctctcagcttcgtcgtacacattaatcgaagctaatacttccggtttgctctagcctcaaaccaccgcaatggcgacaaccggattgggtgccgagaacgtcaccgctctcaccgtccgagacgttgttgaaccggccactcatgacgatgccgagattctcgctgagaaggcccatcaatctgctgatgtggcccgtcgtgtgagtgtgacagcgagcgcccaagatcctgagtctggagctggctctgagtccggccgtatcgtcgacctcgagaagtacccgcctcccaccgaggaggagcgaaagacgcttcggaaagtgcacgacaacattccctggactgcctggttgatttgcttcgtcgaattggcagagcgagcttcatactatggcgcgaaaaccgttttcaataactacatccagttccctctcccagaaggcggtccgggaaccggagccatcaatgggaacaaccctaatggccacgctggtgctcttgaccttggtctgcaggcttcatctgctcttgtgttgttgttcagcttcctggcctatgtcgtcccgattggaggcgcttggtgggcagatgtcaaagttggtaaatggaccgccattgtgtggggtgtcatcatcgctggtgtatcgcacgttattatgattggcggtgccgctcccgctttgttggcgaagggccagggtgtcgcgcccttcatcatcagtctattgcttctcgccttgggcgctggtattttcaagcccaatatctcaccgacgctgcttgaccagtatcaacatcagtacgaatatacgaagaccctcaagtccggcgagaaggttattgtggaccccgaggttacgatcaacagactgtgtcttatcttctatgcattcgtcaacatcggtgctttcttccagattcctgctgtgtatattgagaaatacaagggcttctggcaggctttcctgctcgctggagttctgtactttctgctaccggtcttgctggctgttcgtaagtgcctctatcgcccatcgagaaatgtgatttttgccctagctgtctcactgacacctcacgcgatgcctagtttacaagcgaatgatcagattgcctccacaaggctctgatctcactcgtttcacaaaaatcacgatatcagcaatcaagaagagcaaaggaaactttttctcgaagaacttctggtacaacgtgaagccttcggctgtcgcagagactggtggatcagtccaatattctgagaaggatgtcgccgactgccagcgaacctgggaggccgttgcaatcttcctgtacgtgcctatttggagcattaacgatggtggtgtaggaagtgtctcgagtaatcagggtgctgcgatgacctcgaacggcgcgcctaacgacttgatcaacaacttcaaccccttagtcattatcgtcttctcgccgtttatggcacaggtggtctatcccttcctccggagccgaggtatcaagtgtggtcccatcagtcgtatgatgttcggtttcttcctggccattctttccggtatcgctggtgctgtcgtgcaatactacgtgtacaagactagtccttgcgggtattacgccagtacttgtgatgatgtttcgcctattagcatttggtggcagatcccgaatgtcctccttggtgcgatttctgaggtcttcgtcttcactacgggttatgagatggcctacgctcgcgctcctccgaatatgcgagctaccattaccgctctgttcttatttatgactgctttggctaatgccttgggagagattcttcttcctgcgctcaacgatcctaacatcatctggggttgggctgcgcccgctatcgcccttactgttcagacggtcattttctggttccgccatcgccatgtcgacgaggaggttttcatgacccgcgaagaggacttcgcctccaccaagtctgaggataaacttgttcgtgctgatagcgagaaggaagtctcttagtcttcacttagatcagatgatgcactcgcacatctcgtgcttaggtatcgctttagttcattctaattatacctgatatttcagatgacattaattgaagagaattgtcccaaagggcacttgatgcgacaacgctgtggcattttcattcgtcagactactatactctcgtgtgtgccgccaataagttgaagcgcggagagcactgtgatatttggaattacgattcagctcccatgcacaccacgttcactgggtcagcatctgacttgccagtgcgaagataggctatcgagcagcgaggtgatagggtcggttcccatcgtacgcaatgcgccaccacttcgcctatacgccgtgatgcggggttgggcttctcgtattccgaaattggtagtgattgtgcgcggccttgttcggctaacaacaaacaggatttctgcgatcggttactactggcggatgtcgtcgggcgggcagcctcatctacatgtggatgatcttgtagcacaaagcggaatagcgggaaagcttccgtaagagcccggaacacgtgacacctccggaccccaacaccaacaacaacggcaccggacggcaaatgaaactaccatgaatatgccgtagcaacacgttcatccgagcggccactgaacggttaggtggagccactgaagccgaccatacgcaggtcgacgagctcgacattggacgtcacggtgcgctgttgaagccactgctgtgctcgggcagggccagtctcttgcatagtgcctcgtgtatggctgtcggagatggctacatcagcctatgggcgacgaattcgcatcatcaaacgcagaagctagcaatcacaacgtattgacaattgattataagtagatcatacttaattctatggtctaatcgctgtctaatcatgccccgttgcaggttggctatgtaagaaaaaggtatcaaacgctctgtgaaatcaaataacgctagcttatgccacattcgctctcttacgaatgtggaaggggattggcttgccaacgtcgtctacgcccataccatatctatagtcagagatctcaattgtgtcattgtggaattcgacctcgtattcactcgccaaaagagttgctgaaaatatcataaaagcctttgcgataaagcgccctgggcacatagaaaatccacctaaagagtgtcagtcggcgtgatgaagaaatgtagtgttcaggatattctcacctccgtatggaatccaggcaccctcacagccatccattgagaagtaaggcttcatatccggccgtttcttctctacacggttcatcgacctacggacctctggatttatggggccactttcgtcatcggctgggtcgacgatgaagcggtcggcccagaatgtgtcaacagggtactgtccgcccttcgtgttccagaacgatttgtccatgtgcgatggcgccgagttcaccagagctagggctccccgaggcagagtccatttgccaaggtcgacgtcctcgtgtggtgaactataggctgagtaaatcttaatgtgaaggcgcatggtttctgcatagattgaggagagtagcggaatatctctcccgagctgatgaggatcaacctcatgtatggtccggtcacctaagtagtcctggagttcttgtcgcacgcgttttaaaagagtcttgtcctgcaagatatggtatgcgccgaacatgcacgagatgaccaaattgccaatcgtcctaggggtaggtgtcagtaacgctctgcaatatcgtccgctaggaaactcacgcccaggccagtccgagatcaagatgagcaagaacgtcatcgtcatgcgcatcggctttcagaagttgctcttgtcggttgcgaatcatcgctgatccccatatcgggtctccatctccatcggcttcaatcattgatggatcgaagtgttcccttgcgtagacataccaactcttcaacttctccgcgatcgagtctctgaatttgtactgttctggcatcaaaacctttggcataccagcagtgaactgaggcatgattctgtcgaattcgaaaatgtctttcacaaaggtggggtgtaatcgaagtagcgtaggcccgaaaatgcattggatggacgagggaccaatgctctctctgaaaaactgcgcaaagtcggggatttctttccactctgtagtgatgccctttgccgctaattgcaaaggtacatctctagcgaagcgtctcgttgctggctgcattcctgggccggtgaacccccgaaatgcaagagagtgtgtgatggaatcaacgcggttgtggg

SEQ ID NO: 4043 - DNA, 612 bp, Muscodor strobelii
  misc_feature: SGI cDNA ID NO. 561022
  misc_feature: Encodes the peptide sequence at SEQ ID NO 4044
atggctcctggcaatgatatagtcgctccaaactttctattgatcttgtatgttcaccaagattttccaagtgaacacgcgcagccagctatcgggccactcttctggaaagttgacaccgagaactgggacgttttgaaacgggttagaacatgtccaggttacaactgtgaagccaaggatcataccccattctatgataatactgagcgagacgagtcggacgcccgtgctcagagaggtctcgtggtctgggataacacaatggtcctcggtgccaaaatggacttctataagaaacaccctgagtttgaccgcgatgcaaaagtcggtatcaagattctctcggagaaggtcgtctggagaaagtcaatcgaatgtaagggggagcacgatcattcgatcactcttgggcatctcgcgctggggagtaactttagcgctgttgagcagatcatcgttgaatactcgacgacgactaggaccagaccgtcgcatttacgtcgtacgaccacgacgcatgtggataagatcaggcacggaatcagcccattcgctaagacaagtgaggccgcggacgagacgttgccaatcactctgtatttcggatag

SEQ ID NO: 4044 - protein, 203 aa, Muscodor strobelii
  misc_feature: SGI Peptide ID NO. 561022
MAPGNDIVAPNFLLILYVHQDFPSEHAQPAIGPLFWKVDTENWDVLKRVRTCPGYNCEAKDHTPFYDNTERDESDARAQRGLVVWDNTMVLGAKMDFYKKHPEFDRDAKVGIKILSEKVVWRKSIECKGEHDHSITLGHLALGSNFSAVEQIIVEYSTTTRTRPSHLRRTTTTHVDKIRHGISPFAKTSEAADETLPITLYFG

SEQ ID NO: 4045 - DNA, 837 bp, Muscodor strobelii
  misc_feature: SGI cDNA ID NO. 561023
  misc_feature: Encodes the peptide sequence at SEQ ID NO 4046
atgtcggatgtgtatacagatcatatgacacgggtgccgaaggaggggcaaagactgaacaaacaatgtgatttgatgacggaatgtatcggctacgttttgaaccccgcgttttccctccccaaaccacctcgaattgtcgacatcggcaccggtactgcccggtttctcatgcaagtccatccgacagtatcttctgacgcaactctcgaaggctacgacatatcctcagctcaattccctcctaaagaggttctgcccgcaaatataacgcttggagagcgcgatgtaaaacaacctttccccgaggatatgcacgggcaatatgacgtggtgcatctgcggatgcttgtcgcggcaatggaccccgatgattgggaaggcgcagtcaacaacgttgttcagctcatcaagccaggcggctatttacagtgggaagagtgcgacttcatcactgctaaatggattagcagtactgccgattctgagagaccagaggacgttggggagaagctgatccgagtgatgaaagcctctctgggcaagaaactggagaacggatggaacacccttcccggtctcatgcaaaaagcaggcctcacgccagtcgccaatgacattgtgacaacggacaagactcctactacgcgcaagggtttcaccgacatcatcttgactctgacgctcttatttgcacgtctcacggcatcgcgaggaacgccggctttcgacaaagatgccgatgagttggaaaaggcagcgtacgaggaagtcgaggcgggttgccactacccatataacattcatgtcgcttgcgcacagaagcctttggcgtaa

SEQ ID NO: 4046 - protein, 278 aa, Muscodor strobelii
  misc_feature: SGI Peptide ID NO. 561023
  misc_feature (47)..(143): Pfam Id: PF08242 Pfam Desc: Methyltransferase domain
  misc_feature (1)..(276): NCBI GI: 255950778 Blast Desc: Pc22g22620 [Penicillium chrysogenum Wisconsin 54-1255] gi|211593173|emb|CAP99550.1| Pc22g22620 [Penicillium chrysogenum Wisconsin 54-1255]
  misc_feature (9)..(208): NCBI GI: 169596262 Blast Desc: SNOG_00888 [Phaeosphaeria nodorum SN15] gi|160701267|gb|EAT92383.2| SNOG_00888 [Phaeosphaeria nodorum SN15]
  misc_feature (9)..(278): NCBI GI: 238487734 Blast Desc: LaeA-like methyltransferase, [Aspergillus flavus NRRL3357] gi|220699984|gb|EED56323.1| LaeA-like methyltransferase, [Aspergillus flavus NRRL3357]
  misc_feature (9)..(145): NCBI GI: 226286195 Blast Desc: conserved [Paracoccidioides brasiliensis Pb01]
  misc_feature (9)..(147): NCBI GI: 226291659 Blast Desc: conserved [Paracoccidioides brasiliensis Pb18]
  misc_feature (7)..(276): NCBI GI: 145612725 Blast Desc: MGG_07346 [Magnaporthe grisea 70-15] gi|145019863|gb|EDK04091.1| MGG_07346 [Magnaporthe grisea 70-15]
  misc_feature (15)..(276): NCBI GI: 121701965 Blast Desc: conserved [Aspergillus clavatus NRRL 1] gi|119397390|gb|EAW07821.1| conserved [Aspergillus clavatus NRRL 1]
  misc_feature (18)..(276): NCBI GI: 115384358 Blast Desc: [Aspergillus terreus NIH2624] gi|114196418|gb|EAU38118.1| [Aspergillus terreus NIH2624]
  misc_feature (2)..(211): NCBI GI: 119489916 Blast Desc: NFIA_061810 [Neosartorya fischeri NRRL 181] gi|119411077|gb|EAW21020.1| conserved [Neosartorya fischeri NRRL 181]
  misc_feature (18)..(163): NCBI GI: 121712493 Blast Desc: conserved [Aspergillus clavatus NRRL 1] gi|119402010|gb|EAW12432.1| conserved [Aspergillus clavatus NRRL 1]
MSDVYTDHMTRVPKEGQRLNKQCDLMTECIGYVLNPAFSLPKPPRIVDIGTGTARFLMQVHPTVSSDATLEGYDISSAQFPPKEVLPANITLGERDVKQPFPEDMHGQYDVVHLRMLVAAMDPDDWEGAVNNVVQLIKPGGYLQWEECDFITAKWISSTADSERPEDVGEKLIRVMKASLGKKLENGWNTLPGLMQKAGLTPVANDIVTTDKTPTTRKGFTDIILTLTLLFARLTASRGTPAFDKDADELEKAAYEEVEAGCHYPYNIHVACAQKPLA

SEQ ID NO: 4047 - DNA, 1676 bp, Muscodor strobelii
  misc_feature: SGI EST ID NO. CUFF.10124.2
  misc_feature: Variant of the nucleotide sequence at SEQ ID NO 4045
gttgcattagaggatgaccgtcagcagcagaaggggcaatgatgccaccgttgcaagggaggcggctgcaggtactccaactgaaccccaagggcccagaccataggggatgccacgctgaccgaatgctatatcaatcatcggaacggctcgagtgaaacctaaactcttttacccccttgttagtcagactattgatctgagttactttggctcttcgtctacgatgtcggatgtgtatacagatcatatgacacgggtgccgaaggaggggcaaaggtaccatttgcacacggcaagaaacacattctggatgtttaactgacttacatgaaagactgaacaaacaatgtgatttgatgacggaatgtatcggctacgttttgaaccccgcgttttccctccccaaaccacctcgaattgtcgacatcggcaccggtactgcccggtttctcatgcaagtccatccgacagtatcttctgacgcaactctcgaaggctacgacatatcctcagctcaattccctcctaaagaggttctgcccgcaaatataacgcttggagagcgcgatgtaaaacaacctttccccgaggatatgcacgggcaatatgacgtggtgcatctgcggatgcttgtcgcggcaatggaccccgatgattgggaaggcgcagtcaacaacgttgttcagctcatcaagccaggcggctatttacagtgggaagagtgcgacttcatcactgctaaatggattagcagtactgccgattctgagagaccagaggacgttggggagaagctgatccgagtgatgaaagcctctctgggcaagaaactggagaacggatggaacacccttcccggtctcatgcaaaaagcaggcctcacgccagtcgccaatgacattgtgacaacggacaagactcctactacgcgcaagggtttcaccgacatcatcttgactctgacgctcttatttgcacgtctcacggcatcgcgaggaacgccggctttcgacaaagatgccgatgagttggaaaaggcagcgtacgaggaagtcgaggcgggttgccactacccatataacattcatgtcgcttgcgcacagaagcctttggcgtaattgttcattatatagaaagcggccctacatcgtcggcaatcgggtcacctacaccctacccatgtgtaaatgttagaagacaatgtcaatcatctacctgattgtcgtttgcagaaatagaaatgggggtgaaagatgatctcactgcgtggtccttctcgcaaggcccctgttagagcctgtatttagaagtgctagattccaatatccctgcatcggccgacggccgcatgtacaaatcaagttacttacattgcctagatagcctatggcttatcacatatctgcacatacagccctctccgctccactgattggccattccgcaatgtagtggcatgtatgtgccgcttagagacatgaagggaatggtcccttcaaagtggcgctcgggtggcgcttagtggccctcatacgattgacgattgaagcgaaattcgcaggaatcgtcggtggttagagtatttccgcgctcacacttccactcaggagtcagaaccgtaattcaggatgcttgccgactcgcttgaccaccacggcaaatcgaagtgtgat

SEQ ID NO: 4048 - DNA, 1173 bp, Muscodor strobelii
  misc_feature: SGI cDNA ID NO. 561024
  misc_feature: Encodes the peptide sequence at SEQ ID NO 4049
atgccgggagagatggaagatccgcacgaaattccggcgctcaaggctccagacggcttccataccgatttcaacgacccgaccagcatccattacgtacaggtagccgttgcgtcggcggcccttggggtgacgacccttgccgtcttgtcacgcacgtatgtaagagcgagggtgttgaagaaattcgatttcaccgatttctcactgttactatcactctcaatctttgtcgtattcgtcgccctcgctgtagtcacagggagatatggacaaggaaaacatcaatggaatgtgcgattgagcgatttcatgcaactcttgaaggttggtggaatcaatagtcgttggggtttgggcgcatttaaattgaccagcagctcgagacagattgtcaacgtactggagattctctattcgcccttggtattcttcgcaaagtatgtcgtcatacgccaaatcgagacgacattttttcagcatcagtcgagaagctggagctattgggctctccaaggcctgatctgggcgaacctattcttctatacagcctttttcttttcatttatcttcgcgtgcacgccgcgcgagaggatatggaatgtcctattgacagagggcacgtgcatcgacaattcagcagcgctgatctcatccagtgggattaatctcgtatccgatacgacgattctcattttaccattagcgacaattttcaaattgcagatgtcggcaaaaaacaggattcaggtcgccggagtgtttgcaattggtctgctggcgattgttgcgagtgccgtccgactctactacacagtcaaactgactgagagccacgacgtcacatacgtggttgagccatttggctactggtcggagatcgaatatacctccatcattctcgtcgcttgcttcccactatttccactgctattcagacatatatcccagcagggacagaaaatgactactcgaagtaagggtagttcgcaaacccctgactacggaacatatggtcaaaatagcttcacgaagctacgcgacgacagacaacgcgacaccgaaactggtcgagatattgaaatgggcaaacctcaaggcagcgctacgcaccctacccaagctcacatcaccccgagtgctcacgacaggtcagagccgataatggagtag

SEQ ID NO: 4049 - protein, 390 aa, Muscodor strobelii
  misc_feature: SGI Peptide ID NO. 561024
  misc_feature (35)..(332): NCBI GI: 16945439 Blast Desc: related to integral membrane protein PTH11 [Neurospora crassa]
  misc_feature (80)..(331): NCBI GI: 67528508 Blast Desc: AN4452.2 [Aspergillus nidulans FGSC A4] gi|40741027|gb|EAA60217.1| AN4452.2 [Aspergillus nidulans FGSC A4] gi|259482731|tpe|CBF77490.1| TPA: 60S ribosomal protein L36
  misc_feature (12)..(381): NCBI GI: 256727941 Blast Desc: NECHADRAFT_26479 [Nectria haematococca mpVI 77-13-4]
  misc_feature (136)..(332): NCBI GI: 164423873 Blast Desc: NCU07769 [Neurospora crassa OR74A] gi|157070267|gb|EAA29027.2| [Neurospora crassa OR74A]
  misc_feature (13)..(309): NCBI GI: 156057637 Blast Desc: SS1G_04550 [Sclerotinia sclerotiorum 1980] gi|154702335|gb|EDO02074.1| SS1G_04550 [Sclerotinia sclerotiorum 1980]
  misc_feature (12)..(314): NCBI GI: 46118221 Blast Desc: FG04693.1 [Gibberella zeae PH-1]
  misc_feature (77)..(315): NCBI GI: 238489453 Blast Desc: conserved [Aspergillus flavus NRRL3357] gi|220698352|gb|EED54692.1| conserved [Aspergillus flavus NRRL3357]
  misc_feature (14)..(292): NCBI GI: 121706810 Blast Desc: ribosomal protein L36e, [Aspergillus clavatus NRRL 1] gi|119399784|gb|EAW10210.1| ribosomal protein L36e, [Aspergillus clavatus NRRL 1]
  misc_feature (33)..(356): NCBI GI: 115398095 Blast Desc: conserved [Aspergillus terreus NIH2624] gi|114192830|gb|EAU34530.1| conserved [Aspergillus terreus NIH2624]
  misc_feature (12)..(359): NCBI GI: 145607555 Blast Desc: MGG_04339 [Magnaporthe grisea 70-15] gi|145015080|gb|EDJ99648.1| MGG_04339 [Magnaporthe grisea 70-15]
MPGEMEDPHEIPALKAPDGFHTDFNDPTSIHYVQVAVASAALGVTTLAVLSRTYVRARVLKKFDFTDFSLLLSLSIFVVFVALAVVTGRYGQGKHQWNVRLSDFMQLLKVGGINSRWGLGAFKLTSSSRQIVNVLEILYSPLVFFAKYVVIRQIETTFFQHQSRSWSYWALQGLIWANLFFYTAFFFSFIFACTPRERIWNVLLTEGTCIDNSAALISSSGINLVSDTTILILPLATIFKLQMSAKNRIQVAGVFAIGLLAIVASAVRLYYTVKLTESHDVTYVVEPFGYWSEIEYTSIILVACFPLFPLLFRHISQQGQKMTTRSKGSSQTPDYGTYGQNSFTKLRDDRQRDTETGRDIEMGKPQGSATHPTQAHITPSAHDRSEPIME

SEQ ID NO: 4050 - DNA, 1379 bp, Muscodor strobelii
  misc_feature: SGI EST ID NO. CUFF.10108.0
  misc_feature: Variant of the nucleotide sequence at SEQ ID NO 4048
ccgcaaataattggccacctaccgacttgcgcggaagtcggggtcggagtaagatttcttatagagcattactgtccgatccacgcaagcgcatcgcatttgttctctacctacattttgttcgcaactttgcgacgaaacacctataatacccaaaatgccgggagagatggaagatccgcacgaaattccggcgctcaaggctccagacggcttccataccgatttcaacgacccgaccagcatccattacgtacaggtagccgttgcgtcggcggcccttggggtgacgacccttgccgtcttgtcacgcacgtatgtaagagcgagggtgttgaagaaattcgatttcaccgatttctcactgttactatcactctcaatctttgtcgtattcgtcgccctcgctgtagtcacagggagatatggacaaggaaaacatcaatggaatgtgcgattgagcgatttcatgcaactcttgaagattgtcaacgtactggagattctctattcgcccttggtattcttcgcaaagtatgtcgtcatacgccaaatcgagacgacattttttcagcatcagtcgagaagctggagctattgggctctccaaggcctgatctgggcgaacctattcttctatacagcctttttcttttcatttatcttcgcgtgcacgccgcgcgagaggatatggaatgtcctattgacagagggcacgtgcatcgacaattcagcagcgctgatctcatccagtgggattaatctcgtatccgatacgacgattctcattttaccattagcgacaattttcaaattgcagatgtcggcaaaaaacaggattcaggtcgccggagtgtttgcaattggtctgctggcgattgttgcgagtgccgtccgactctactacacagtcaaactgactgagagccacgacgtcacatacgtggttgagccatttggctactggtcggagatcgaatatacctccatcattctcgtcgcttgcttcccactatttccactgctattcagacatatatcccagcagggacagaaaatgactactcgaagtaagggtagttcgcaaacccctgactacggaacatatggtcaaaatagcttcacgaagctacgcgacgacagacaacgcgacaccgaaactggtcgagatattgaaatgggcaaacctcaaggcagcgctacgcaccctacccaagctcacatcaccccgagtgctcacgacaggtcagagccgataatggagtagatggaccagacctaattttcatgtaaaaatgattacctactaagcatgtatataagttaagtcttaaataatgaaatttatgatgatatagactacaattgatgactgaggc

SEQ ID NO: 4051 - DNA, 792 bp, Muscodor strobelii
  misc_feature: SGI cDNA ID NO. 561025
  misc_feature: Encodes the peptide sequence at SEQ ID NO 4052
atggccaaggcaattgcccgccaagttctgtgtgcccttgacttcttgaagcatattaacgtgacccatggtgatattgcatccaggaatatcctcttcaccgtgcctgggcactggaatactcttaccgaaaaggagttcattaaccagcttggttctccccaaactggcgctatgaggatggtagacggctcgagtctgcatgggcatatggtagagtatctggtcgaaccggttgacttccttcgcaaaggtgacactatcaatatgttcgaggcttgtccgattaaggttatcgatttacgggcctcattcctaccagaccaatctccaaaaatgtcgcacaatgcccttgtcctgcggcctccggaggctattttcggtgatcgcttggacaccgggacagatttgtggacaatgggttgtttgctattcgagttattcacggctcagccaccgtttgacccgcgcggcaactcagccgatgtaatctccaatgcaatcggcattttaaccagtcctagcaacgagctaccggagagatggagagggaaatggcgctcaatgaaggaaaaacagaaaaatcgatcaacatttggaaccgaagaccaatggccagttcttcgagactgtttgacacagtgctatcatttcgatagcgagcgggaatgtgagctcactaatgaggacttggcaacgctcgcggatctagtagcgagactactaaggtttgagcccgcgaatagggcatcggccagggacatcatggatgacccttggcttaagaactga

SEQ ID NO: 4052 - protein, 263 aa, Muscodor strobelii
  misc_feature: SGI Peptide ID NO. 561025
  misc_feature (121)..(261): Pfam Id: PF00069 Pfam Desc: Protein kinase domain
  misc_feature (1)..(261): NCBI GI: 258567688 Blast Desc: conserved [Uncinocarpus reesii 1704] gi|237906034|gb|EEP80435.1| conserved [Uncinocarpus reesii 1704]
  misc_feature (1)..(263): NCBI GI: 225555998 Blast Desc: protein kinase [Ajellomyces capsulatus G186AR]
  misc_feature (1)..(263): NCBI GI: 115433206 Blast Desc: conserved [Aspergillus terreus NIH2624] gi|114189592|gb|EAU31292.1| conserved [Aspergillus terreus NIH2624]
  misc_feature (1)..(261): NCBI GI: 239612901 Blast Desc: serine protein kinase [Ajellomyces dermatitidis ER-3]
  misc_feature (1)..(262): NCBI GI: 145237674 Blast Desc: An07g04020 [Aspergillus niger] gi|134075958|emb|CAK48152.1| protein product [Aspergillus niger]
  misc_feature (1)..(263): NCBI GI: 255932475 Blast Desc: Pc12g09680 [Penicillium chrysogenum Wisconsin 54-1255] gi|211582413|emb|CAP80595.1| Pc12g09680 [Penicillium chrysogenum Wisconsin 54-1255]
  misc_feature (1)..(263): NCBI GI: 240278514 Blast Desc: protein kinase [Ajellomyces capsulatus H143]
  misc_feature (1)..(261): NCBI GI: 261189847 Blast Desc: serine protein kinase [Ajellomyces dermatitidis SLH14081] gi|239591570|gb|EEQ74151.1| serine protein kinase [Ajellomyces dermatitidis SLH14081]
  misc_feature (1)..(259): NCBI GI: 212544338 Blast Desc: serine protein kinase, [Penicillium marneffei ATCC 18224] gi|210065292|gb|EEA19386.1| serine protein kinase, [Penicillium marneffei ATCC 18224]
  misc_feature (1)..(231): NCBI GI: 154282139 Blast Desc: conserved [Ajellomyces capsulatus NAm1] gi|150412061|gb|EDN07449.1| conserved [Ajellomyces capsulatus NAm1]
  misc_feature (121)..(262): SWISSPROT Homolog: EC 2.7.11.1 Non-specific serine/threonine protein kinase
MAKAIARQVLCALDFLKHINVTHGDIASRNILFTVPGHWNTLTEKEFINQLGSPQTGAMRMVDGSSLHGHMVEYLVEPVDFLRKGDTINMFEACPIKVIDLRASFLPDQSPKMSHNALVLRPPEAIFGDRLDTGTDLWTMGCLLFELFTAQPPFDPRGNSADVISNAIGILTSPSNELPERWRGKWRSMKEKQKNRSTFGTEDQWPVLRDCLTQCYHFDSERECELTNEDLATLADLVARLLRFEPANRASARDIMDDPWLKN

SEQ ID NO: 4053 - DNA, 2622 bp, Muscodor strobelii
  misc_feature: SGI cDNA ID NO. 561026
  misc_feature: Encodes the peptide sequence at SEQ ID NO 4054
atgcaatctcaacctaacatcttcgtgcatggtaatcagctcgtgaaggatctcgtgaaattccgaaacgatggcgatacgaatcagcggccaattgttttcatcgcgcaatctatcggaggcgtcattgtgaaagaggctgatgctagcagagagacatctctgcaagacatactgacctccaccgctgcgactctctttctcggctgtccacatcggggcgccgaggaaactgttctttgggacattgttcggtcaatggtaaagacatctttggacactaatatagacgaactgacgttgttttcactatgcggtgtcgaggatctccggtggcggcttggtcaagaggcgttcatcaagatttggcataatctcaactttgcagtgaagacatattacgaagcgtctactgtatcgactgattgcgaagtcaacactttgacctcgagcaggattggcgacgcgcgagagcaggctgagagactcccggtgggtcatggaaccatgggccggttcagatcggccgacgacgacgggtttgggtcactgctcaagattgtgagacgcgtcgccaaaaatgaaaggaataaggaacaatggctcagtgcaaacgaataccgatgcttgcaagggctctcgggtttcttgagctccgcggtagatcatcctcgagtagctcataaaaaaggtaatacaagcacgtgtaggagactcatggactccattgagttcaacaaatggtatcgacgatgcgacgggatcgagaaccgtgtgctttggcttactggagacgccggttcaggcaagtcaacgctgctgagacatatccaaacccgtatcgagaggcactggaaacgtacgaccacacctattatatgctgtaccgcggagggccgatgtcttgatcgagtcttcgtttcgggatcgaagctgagaattgcgcaatccacgacagccattcgcggtatcttggctcgattgctccctcatgacccaaccctccgtagatctctgtgctcttaccttgatggaacctatgagcatgcaaaattggctcggttcttccttgacatctatgttgagaatgagatccagctaatcgaaagaagagcttttgttctggtagacgctggagattgttgtgagaacgcacacatccaggatatgctgtactgtttcagtcaaatggccaggaactcggatatcagcatcatctttagtagtcgacatattattggcggtatctcgaaccaagtgacaagcttgagtatcgaggagtataactacgaagatgttgaggtgtcagtacgggcccgactgcgcgcaagttgggaagaaagtatggtccttgtgaagaagattatcgacaaagctagaggaaattttctctgggctgagctcactacaacactgatcaacgaactcatcgaaggcggagcagcgcaagatctagtggatcaagttgtagaagagctaccagctgaattggatggcttgtacgattggatattggggacgttgtcattgaaagagaagactgatgctgcgatccttacgcggtgggtcatgctagcttgcgagcctatgtcactcaatgacttgagcatggccgttagattgacgcatccgaactctctgcaatgtcgcaattcgaacgtagcttttagcgttgggccgccatgctctgtgcaggaactgcagaggacaggcaagcagtttgatacgccagctcagttccatcaatggatgcgatcccgaacatatgggcttttggaggccaaaccacctgtgcgaagtgggcacgcagagcagtcactcgggcttcgacacgttcaacccgtgcatgattctgtcaaatcgttcttcctctcgggcaggggcttcgctgccttaagtccgagtcgaaaagtaggagtcatgtgcgagtccgcatccatcgatgagggtcattatagcctggtgcgcaccatcttggcgtatcttaacacactggatttctctcctctggtgagtggacagacactgcagcagagtgaatcaagcaactcatcccgaaacaaatcgccttcttggcgacaaacggtagccgaccagcgcaagctcatcatgtcgtcatatcctttcctacggtacgcggtagagaacttgctctatcacatgttggctccgcgggcgatgagatatttccttccgcaacaatcactcttccgtgtgttgtacgcgaataattgccgaatatggcgacgctggacagctttattgggcgagacggatccattggagattctgtcccggtgtccgtatgccgaggagtttctgcatcccgagtatggggctgtgtataggttagagcgagtcttccatgccttgaacaagatcgtgagcggggagagctggctatcgccaaagcaaccgaagcctctcgacttgctaagaatagatatcgaagagctcaaaaagatgatgcagatacctaaagacaacggtccttctcacataccagtcacgaagagaggggctaagtcacgaggcacagtgataataagcaagagggagagaccgacaagtagcaagagcaaagaagtaccgttgggacatttaacagtgtccacggcatga

SEQ ID NO: 4054 - protein, 873 aa, Muscodor strobelii
  misc_feature: SGI Peptide ID NO. 561026
  misc_feature (1)..(794): NCBI GI: 171678952 Blast Desc: protein product [Podospora anserina] gi|170937547|emb|CAP62204.1| protein product [Podospora anserina]
  misc_feature (3)..(800): NCBI GI: 116179470 Blast Desc: CHGG_00363 [Chaetomium globosum CBS 148.51] gi|88184660|gb|EAQ92128.1| CHGG_00363 [Chaetomium globosum CBS 148.51]
  misc_feature (425)..(804): NCBI GI: 145615802 Blast Desc: [Magnaporthe grisea 70-15] gi|145022941|gb|EDK06636.1| [Magnaporthe grisea 70-15]
  misc_feature (3)..(674): NCBI GI: 116204449 Blast Desc: CHGG_10108 [Chaetomium globosum CBS 148.51] gi|88176236|gb|EAQ83704.1| CHGG_10108 [Chaetomium globosum CBS 148.51]
  misc_feature (6)..(674): NCBI GI: 116197903 Blast Desc: CHGG_07107 [Chaetomium globosum CBS 148.51] gi|88178386|gb|EAQ85854.1| CHGG_07107 [Chaetomium globosum CBS 148.51]
  misc_feature (6)..(681): NCBI GI: 256722577 Blast Desc: NECHADRAFT_96544 [Nectria haematococca mpVI 77-13-4]
  misc_feature (6)..(672): NCBI GI: 171685416 Blast Desc: protein product [Podospora anserina] gi|170942669|emb|CAP68321.1| protein product [Podospora anserina]
  misc_feature (6)..(662): NCBI GI: 46117406 Blast Desc: FG04545.1 [Gibberella zeae PH-1]
  misc_feature (52)..(727): NCBI GI: 238844696 Blast Desc: ankyrin repeat protein [Microsporum canis CBS 113480]
  misc_feature (57)..(662): NCBI GI: 261353766 Blast Desc: ankyrin repeat and protein kinase domain-containing protein [Verticillium albo-atrum VaMs.102]
MQSQPNIFVHGNQLVKDLVKFRNDGDTNQRPIVFIAQSIGGVIVKEADASRETSLQDILTSTAATLFLGCPHRGAEETVLWDIVRSMVKTSLDTNIDELTLFSLCGVEDLRWRLGQEAFIKIWHNLNFAVKTYYEASTVSTDCEVNTLTSSRIGDAREQAERLPVGHGTMGRFRSADDDGFGSLLKIVRRVAKNERNKEQWLSANEYRCLQGLSGFLSSAVDHPRVAHKKGNTSTCRRLMDSIEFNKWYRRCDGIENRVLWLTGDAGSGKSTLLRHIQTRIERHWKRTTTPIICCTAEGRCLDRVFVSGSKLRIAQSTTAIRGILARLLPHDPTLRRSLCSYLDGTYEHAKLARFFLDIYVENEIQLIERRAFVLVDAGDCCENAHIQDMLYCFSQMARNSDISIIFSSRHIIGGISNQVTSLSIEEYNYEDVEVSVRARLRASWEESMVLVKKIIDKARGNFLWAELTTTLINELIEGGAAQDLVDQVVEELPAELDGLYDWILGTLSLKEKTDAAILTRWVMLACEPMSLNDLSMAVRLTHPNSLQCRNSNVAFSVGPPCSVQELQRTGKQFDTPAQFHQWMRSRTYGLLEAKPPVRSGHAEQSLGLRHVQPVHDSVKSFFLSGRGFAALSPSRKVGVMCESASIDEGHYSLVRTILAYLNTLDFSPLVSGQTLQQSESSNSSRNKSPSWRQTVADQRKLIMSSYPFLRYAVENLLYHMLAPRAMRYFLPQQSLFRVLYANNCRIWRRWTALLGETDPLEILSRCPYAEEFLHPEYGAVYRLERVFHALNKIVSGESWLSPKQPKPLDLLRIDIEELKKMMQIPKDNGPSHIPVTKRGAKSRGTVIISKRERPTSSKSKEVPLGHLTVSTA

SEQ ID NO: 4055 - DNA, 4551 bp, Muscodor strobelii
  misc_feature: SGI cDNA ID NO. 561027
  misc_feature: Reduced expression when VOC is produced
  misc_feature: Encodes the peptide sequence at SEQ ID NO 4056
atggaagaagacgagaatcacagctcccaactcggcgagggaggaggagagtccctcgagcagatgtcgatgatacagctaccgcaaacgcctcccgccgaggagagcagcctccccgacatcacgcgcattaagaatgaagacgactataatgactcgatggccgacgaggaccgtgttcgcgcccacctgcaggacgacgtcgagtccagcttcctcccgcctctttcgcccaccatccccgtcgatggccccaacgctggaatcgacgacacctacttgttcgatgccgcaccgcgcaaggccgtcacgcccgcacccgcacctccagcttcgacgacacctaaatctgaagggaagcctccaacgcctctctctgtacccatcaaggacgagtcccagtccaacatatctcataccgcagcgtcagcctcgaaagagcgtccatctcctctactggcgccaccagaccagccttcagatgaaccggagccatcatttctatctgaaccccagcgcaacgtatcttatcacgacaacgacacgacgcgaacgacatccgatgcaccctcctcgccaacacctgctgttgcggctcgtgctgttgcatcaaaagcagcttaccttcctcccagtgtcatggatcaggaaccacccagcgagtatgagaacaccgacccatcgatacatccagacacctccttcgctaccagcaaccctactctacatcacaagagctccgacaccaacgtgaataggctgtctgtcggtacagcggcctcgggtaactcgctacacgtcacgaagcggcccaagtttctgcgctcgaggaacactagtcagcgatcctcgacttcctccttcttgaccaatgacgatgttgagagcgatgtgaccgtgagcctaggtgccgactatgctctacagtctgggggcgcagcccctgcctttggcctccagcgcagtgccagcaacaccctggcgcggtccatcagcatgggcagcatattatctggcttcgacgacagtgccgagcttggggctaacggcctcgagactcttgaagaagtcgagagtcccgtgcgcgaccggcatcccgacaccaattttgcgacacccaaggcaaagaacggtccgctcagtgcacccactgacactgtcattgcccgccatgttcaaagtgtagaagtgcccgagagcttggcgagggaatacaagacgaagggcggtttgtccacgccgatacagtcgctacggaaagagtacacaccggctcctggcacggcgcgtggtaggaacatgacgctgaaggagcagtcgagtacgatagaacggctgtcaaaggagaactttgacctcaagctgaaggtcatgtttctgtcggaccgactggacaggatctcccaagataatattaaggaaacaatttcggagaatgtcgagttgaagatgtcgctggccgtcatgcagagagacaacaagatgctcaggcgccaggtcaaggagctcgagaagaagctacacgacgacgaaggccgcccgagtacggcacggagcggcttctcatcagacgggagaacgacgccgaccttcaaccctgcaacacaagctgctgaagaagaggtctacgtcctgcgagagcaagtcgaggaatacgtccgggaaatcgagcggttgaggaccgacaacttgacaagcgaggtggagaagaggaaactggccgagaccgtaaagaccatgggcgatagggctgcccagcgattcggagacacccaaggacgccaggacgaaactgatctatggaaggatttactcgaccaagagacggtccgccgtgaacaggcagacgaggagaaccagaagcttcgcgatgagatcttccgcttgaagcaggatgcaaacggctcagccgctccgggtggcgcaatgcatcacactactaatatctacaacatcacacgaaagcccagaccggcctcaccttctcgttctcgtccggtgaccagcctgtcgggcgacgttgacccaacaaatgctatgagccagtcttctactctggtcgaggatctccgtcgggagagcgaacgactgcgccacgagaatacggaattacagcgggctgttagctcccagaccgccatgcttacatcacgaatccgcgagaaggagggtctgagccaggagattgaggatctgaagctggcactacggcgaggcggcccggcaccctccaccctagatagtctcttagataggtctgcttctcgctccggggcccgtgaccgtcccatttctagaggaagtgggcagtcgaagttgaccatgaccatcgaagaccccgaacgcgaagagtttgaaaataagatggctgcacagcgcgacaagatcaacgaactcaagctcaagaaccaggaacttcaacgggagttccataacgctatgactaacttggaattggctacagaggctaaagcggccgcccaagcccaggctgccgatttatatgatgagaatcaaaataatgtaaatgacatcatggtcatgcaaaaggagcgggacgaagtgctcgaggatctggctgagaaagaaaacgaattcaatatgttacgagaggaagcccaagaggagctcgacaaactcggcgaagaaaacgacgccctcattcaggatattgaacacctcagatttgagctccaagatagatctgagaattttgactcgctccaagccgagatgcggaacatgaccgagtcactgatagcgttagaggacgatcaaatcaggacgcagaagcggattgaacagctggagacagaacttgcagactctaacaaggagctcgaagatctagagggccagcttctagagtccaacgagaagggacaacgtcttgaggtgcagctagagtccagccagggcgaaattgccttcctgcgcgaagagcaagaaggagacaaagtccggatcggagacctggagcaacagttgtccaatgtagaacgcactcttaaggaagagcacgatcgggccagagaactcgatcagcgacttgcgaacgaacggaaacagcgcgagatcattgcgaaccgcgaaaaggaagaagtccagcaggtcgtcaatgaactcaatcgcgaagcctctgctgctaaagaagaagtcagggttgtgcgtaagagcttaagccgacgagaagtggaggcgactgaatggaaggagcgactcatcgagcttgagaacaatctgcgagaagcacttggcgatcttaatgggactaggtcaagtctattgggctctattgcgaaactccagcgtgagcttgagaacaccgtccgtgagctggacactgccaagaactccgtgctggagaaagatcgcatcattaagcagcgcgacaacttgcttgagacacatggtcttgaatctcgcaaactcggcgacatgctcgagaaagaaaaacaggcccaccgcaacaccaagaaccagtttgagactttccagcgcacacatcaacacgtgtctcgtacggttactagccaagacactcgcatcgtagagttggagactacgcgtgcaacagacaggaagaggatcgctcaactcgagcatgcctttaaggaacagctcgcggagcggaacaatctcctcttagtattgtggacgagactgtcggcactctgtggctcggattggacgcataacaatagcctgatcaatggtcgggcattaccatccctcgagtcgatatccacaatgctcccgggattcagcaagaatctgttagcagctatcaaaaccatcgagtcgatacttggcggcttccagtcccggataaagtccgtggagcgcgacttatggaaagagtaccagacgctagagagcacactcgaggcgcggtctaagaaactggatcgtctcgagactcttgtcagatctggtgtcgcggcgggaaacttcgactcgcagaataagatcgctcagctggagactagtctcagagcgctgaaaatagaaaatgcgacgctccagagggctcatgatgctaggactaggggcatggctatggggctcggtgggtatgagcatagtcttgcgggcagatcgaataagggttcgagagagaacttgatcgagacggggagtccgagtcctaatgtgcccactggcccgcatgggagggaatcaaagattccgcaacggagtaagactagtagtcaacttgagacaacccgcaccagcaccatgacgcgaaccacatcctcgtcctcccagccgattccaaatacgcaggaactagagagagttggcacggcgcatgggagtggcagggacagtggaggcagtggaggcagtggtatgggagcggggagagatgagacggtgttgctgatgaggctaagggagatggagtataagattaaacaggaacgagaggcgagggaactggatcgtgcggcggcgagacaacgaatcagggatagtgaacggcagaataatgagctgcaggctgagttgcttagggctagacggaaggctgagacgtctgagggatag

SEQ ID NO: 4056 - protein, 1516 aa, Muscodor strobelii
  misc_feature: SGI Peptide ID NO. 561027
  misc_feature (446)..(508): Pfam Id: PF07989 Pfam Desc: Microtubule associated
  misc_feature (24)..(1507): NCBI GI: 256728850 Blast Desc: NECHADRAFT_39939 [Nectria haematococca mpVI 77-13-4]
  misc_feature (230)..(1510): NCBI GI: 145615786 Blast Desc: MGG_10857 [Magnaporthe grisea 70-15] gi|145022929|gb|EDK06624.1| MGG_10857 [Magnaporthe grisea 70-15]
  misc_feature (178)..(1507): NCBI GI: 46138911 Blast Desc: FG10970.1 [Gibberella zeae PH-1]
  misc_feature (249)..(1426): NCBI GI: 171678847 Blast Desc: protein product [Podospora anserina] gi|170937494|emb|CAP62151.1| protein product [Podospora anserina]
  misc_feature (30)..(1508): NCBI GI: 156042948 Blast Desc: SS1G_11273 [Sclerotinia sclerotiorum 1980] gi|154695658|gb|EDN95396.1| SS1G_11273 [Sclerotinia sclerotiorum 1980]
  misc_feature (267)..(1341): NCBI GI: 85093756 Blast Desc: NCU02332 [Neurospora crassa OR74A] gi|28921210|gb|EAA30522.1| [Neurospora crassa OR74A]
  misc_feature (351)..(1512): NCBI GI: 154313378 Blast Desc: BC1G_05386 [Botryotinia fuckeliana B05.10] gi|150849455|gb|EDN24648.1| BC1G_05386 [Botryotinia fuckeliana B05.10]
  misc_feature (118)..(1121): NCBI GI: 116179482 Blast Desc: CHGG_00369 [Chaetomium globosum CBS 148.51] gi|88184666|gb|EAQ92134.1| CHGG_00369 [Chaetomium globosum CBS 148.51]
  misc_feature (269)..(1508): NCBI GI: 154281159 Blast Desc: anucleate primary sterigmata protein B [Ajellomyces capsulatus NAm1] gi|150411571|gb|EDN06959.1| anucleate primary sterigmata protein B [Ajellomyces capsulatus NAm1]
  misc_feature (269)..(1508): NCBI GI: 225559562 Blast Desc: anucleate primary sterigmata protein B [Ajellomyces capsulatus G186AR]
  misc_feature: Useful for introducing or modulating the production of volatile compounds
MEEDENHSSQLGEGGGESLEQMSMIQLPQTPPAEESSLPDITRIKNEDDYNDSMADEDRVRAHLQDDVESSFLPPLSPTIPVDGPNAGIDDTYLFDAAPRKAVTPAPAPPASTTPKSEGKPPTPLSVPIKDESQSNISHTAASASKERPSPLLAPPDQPSDEPEPSFLSEPQRNVSYHDNDTTRTTSDAPSSPTPAVAARAVASKAAYLPPSVMDQEPPSEYENTDPSIHPDTSFATSNPTLHHKSSDTNVNRLSVGTAASGNSLHVTKRPKFLRSRNTSQRSSTSSFLTNDDVESDVTVSLGADYALQSGGAAPAFGLQRSASNTLARSISMGSILSGFDDSAELGANGLETLEEVESPVRDRHPDTNFATPKAKNGPLSAPTDTVIARHVQSVEVPESLAREYKTKGGLSTPIQSLRKEYTPAPGTARGRNMTLKEQSSTIERLSKENFDLKLKVMFLSDRLDRISQDNIKETISENVELKMSLAVMQRDNKMLRRQVKELEKKLHDDEGRPSTARSGFSSDGRTTPTFNPATQAAEEEVYVLREQVEEYVREIERLRTDNLTSEVEKRKLAETVKTMGDRAAQRFGDTQGRQDETDLWKDLLDQETVRREQADEENQKLRDEIFRLKQDANGSAAPGGAMHHTTNIYNITRKPRPASPSRSRPVTSLSGDVDPTNAMSQSSTLVEDLRRESERLRHENTELQRAVSSQTAMLTSRIREKEGLSQEIEDLKLALRRGGPAPSTLDSLLDRSASRSGARDRPISRGSGQSKLTMTIEDPEREEFENKMAAQRDKINELKLKNQELQREFHNAMTNLELATEAKAAAQAQAADLYDENQNNVNDIMVMQKERDEVLEDLAEKENEFNMLREEAQEELDKLGEENDALIQDIEHLRFELQDRSENFDSLQAEMRNMTESLIALEDDQIRTQKRIEQLETELADSNKELEDLEGQLLESNEKGQRLEVQLESSQGEIAFLREEQEGDKVRIGDLEQQLSNVERTLKEEHDRARELDQRLANERKQREIIANREKEEVQQVVNELNREASAAKEEVRVVRKSLSRREVEATEWKERLIELENNLREALGDLNGTRSSLLGSIAKLQRELENTVRELDTAKNSVLEKDRIIKQRDNLLETHGLESRKLGDMLEKEKQAHRNTKNQFETFQRTHQHVSRTVTSQDTRIVELETTRATDRKRIAQLEHAFKEQLAERNNLLLVLWTRLSALCGSDWTHNNSLINGRALPSLESISTMLPGFSKNLLAAIKTIESILGGFQSRIKSVERDLWKEYQTLESTLEARSKKLDRLETLVRSGVAAGNFDSQNKIAQLETSLRALKIENATLQRAHDARTRGMAMGLGGYEHSLAGRSNKGSRENLIETGSPSPNVPTGPHGRESKIPQRSKTSSQLETTRTSTMTRTTSSSSQPIPNTQELERVGTAHGSGRDSGGSGGSGMGAGRDETVLLMRLREMEYKIKQEREARELDRAAARQRIRDSERQNNELQAELLRARRKAETSEG

SEQ ID NO: 4057 - DNA, 6085 bp, Muscodor strobelii
  misc_feature: SGI EST ID NO. CUFF.10151.0
  misc_feature: Variant of the nucleotide sequence at SEQ ID NO 4055
tgaggactgagcaccgagcaccagcagcgtgcccctgccgggggtcacgattaagcaagaaatttcccatttccaaggaccaggaattcggactgcgttttcattcacgatgcaagcggattggtctgctgaattggatgccactacccgaaaagaattgagcgaagagatatgcaattgcagtatgcacccagtgccgttgtcgtgcactcgcgtggcagctcagggatcgaggggcgctactgcccgcgggtgtccaccaagacggggcgctgacccagcaacaacagtggagtcgagacttccaccagggcccgccagggtgggacgataacagcagtacttagtggatactgggcatctgacagggcttgaatcgcgcgtctgtgttgggcgcgtttgcggtaggtacctctcagcgacgacggcactgatatctgatatcaacggttccgtccagtcttggtcacccacttcgcgtagagaagttgtcatcgtgttgtaataatcacgtgtcaaaccttccccttacatgtacgggatcacacatcagtttgctctgctccaattgaaatatagtgcaacaataaatgtttcggtcgtgcctgacattgttgggctgcgtttgctttttcaagtctgagtagggatccgtagactgacgccataccctggtcaatatcgcagcctctattccgtaacccgtaaacctggcaccacttggccgtgtcaacacttatcaacttcgcatcttgcgatccgcagcagcaccaacagcttcggctactgtatatactagtaaacaacatcggacccgacacgattacctatcgcatacatattctcatatacacgcactaggccgagcacgacaagagcttctaaacaaacaccaaatacgcatatcacaatcagcagacggcatacggtaggcgtcttcaccacatagctgccattgccatcgacgtcggtcctaccacgcagcttcgacttccacccacttgcgcacatgtagtgcgagttattgtcgtcgccttttatcattgcatcctaatgacaggtcatcttagatagcgaacctgcctaatccaagtttatagacgtggagtgttggagtggtgcagtcccgcttcgctatggaagaagacgagaatcacagctcccaactcggcgagggaggaggagagtccctcgagcagatgtcgatgatacagctaccgcaaacgcctcccgccgaggagagcagcctccccgacatcacgcgcattaagaatgaagacgactataatgactcgatggccgacgaggaccgtgttcgcgcccacctgcaggacgacgtcgagtccagcttcctcccgcctctttcgcccaccatccccgtcgatggccccaacgctggaatcgacgacacctacttgttcgatgccgcaccgcgcaaggccgtcacgcccgcacccgcacctccagcttcgacgacacctaaatctgaagggaagcctccaacgcctctctctgtacccatcaaggacgagtcccagtccaacatatctcataccgcagcgtcagcctcgaaagagcgtccatctcctctactggcgccaccagaccagccttcagatgaaccggagccatcatttctatctgaaccccagcgcaacgtatcttatcacgacaacgacacgacgcgaacgacatccgatgcaccctcctcgccaacacctgctgttgcggctcgtgctgttgcatcaaaagcagcttaccttcctcccagtgtcatggatcaggaaccacccagcgagtatgagaacaccgacccatcgatacatccagacacctccttcgctaccagcaaccctactctacatcacaagagctccgacaccaacgtgaataggctgtctgtcggtacagcggcctcgggtaactcgctacacgtcacgaagcggcccaagtttctgcgctcgaggaacactagtcagcgatcctcgacttcctccttcttgaccaatgacgatgttgagagcgatgtgaccgtgagcctaggtgccgactatgctctacagtctgggggcgcagcccctgcctttggcctccagcgcagtgccagcaacaccctggcgcggtccatcagcatgggcagcatattatctggcttcgacgacagtgccgagcttggggctaacggcctcgagactcttgaagaagtcgagagtcccgtgcgcgaccggcatcccgacaccaattttgcgacacccaaggcaaagaacggtccgctcagtgcacccactgacactgtcattgcccgccatgttcaaagtgtagaagtgcccgagagcttggcgagggaatacaagacgaagggcggtttgtccacgccgatacagtcgctacggaaagagtacacaccggctcctggcacggcgcgtggtaggaacatgacgctgaaggagcagtcgagtacgatagaacggctgtcaaaggagaactttgacctcaagctgaaggtcatgtttctgtcggaccgactggacaggatctcccaagataatattaaggaaacaatttcggagaatgtcgagttgaagatgtcgctggccgtcatgcagagagacaacaagatgctcaggcgccaggtcaaggagctcgagaagaagctacacgacgacgaaggccgcccgagtacggcacggagcggcttctcatcagacgggagaacgacgccgaccttcaaccctgcaacacaagctgctgaagaagaggtctacgtcctgcgagagcaagtcgaggaatacgtccgggaaatcgagcggttgaggaccgacaacttgacaagcgaggtggagaagaggaaactggccgagaccgtaaagaccatgggcgatagggctgcccagcgattcggagacacccaaggacgccaggacgaaactgatctatggaaggatttactcgaccaagagacggtccgccgtgaacaggcagacgaggagaaccagaagcttcgcgatgagatcttccgcttgaagcaggatgcaaacggctcagccgctccgggtggcgcaatgcatcacactactaatatctacaacatcacacgaaagcccagaccggcctcaccttctcgttctcgtccggtgaccagcctgtcgggcgacgttgacccaacaaatgctatgagccagtcttctactctggtcgaggatctccgtcgggagagcgaacgactgcgccacgagaatacggaattacagcgggctgttagctcccagaccgccatgcttacatcacgaatccgcgagaaggagggtctgagccaggagattgaggatctgaagctggcactacggcgaggcggcccggcaccctccaccctagatagtctcttagataggtctgcttctcgctccggggcccgtgaccgtcccatttctagaggaagtgggcagtcgaagttgaccatgaccatcgaagaccccgaacgcgaagagtttgaaaataagatggctgcacagcgcgacaagatcaacgaactcaagctcaagaaccaggaacttcaacgggagttccataacgctatgactaacttggaattggctacagaggctaaagcggccgcccaagcccaggctgccgatttatatgatgagaatcaaaataatgtaaatgacatcatggtcatgcaaaaggagcgggacgaagtgctcgaggatctggctgagaaagaaaacgaattcaatatgttacgagaggaagcccaagaggagctcgacaaactcggcgaagaaaacgacgccctcattcaggatattgaacacctcagatttgagctccaagatagatctgagaattttgactcgctccaagccgagatgcggaacatgaccgagtcactgatagcgttagaggacgatcaaatcaggacgcagaagcggattgaacagctggagacagaacttgcagactctaacaaggagctcgaagatctagagggccagcttctagagtccaacgagaagggacaacgtcttgaggtgcagctagagtccagccagggcgaaattgccttcctgcgcgaagagcaagaaggagacaaagtccggatcggagacctggagcaacagttgtccaatgtagaacgcactcttaaggaagagcacgatcgggccagagaactcgatcagcgacttgcgaacgaacggaaacagcgcgagatcattgcgaaccgcgaaaaggaagaagtccagcaggtcgtcaatgaactcaatcgcgaagcctctgctgctaaagaagaagtcagggttgtgcgtaagagcttaagccgacgagaagtggaggcgactgaatggaaggagcgactcatcgagcttgagaacaatctgcgagaagcacttggcgatcttaatgggactaggtcaagtctattgggctctattgcgaaactccagcgtgagcttgagaacaccgtccgtgagctggacactgccaagaactccgtgctggagaaagatcgcatcattaagcagcgcgacaacttgcttgagacacatggtcttgaatctcgcaaactcggcgacatgctcgagaaagaaaaacaggcccaccgcaacaccaagaaccagtttgagactttccagcgcacacatcaacacgtgtctcgtacggttactagccaagacactcgcatcgtagagttggagactacgcgtgcaacagacaggaagaggatcgctcaactcgagcatgcctttaaggaacagctcgcggagcggaacaatctcctcttagtattgtggacgagactgtcggcactctgtggctcggattggacgcataacaatagcctgatcaatggtcgggcattaccatccctcgagtcgatatccacaatgctcccgggattcagcaagaatctgttagcagctatcaaaaccatcgagtcgatacttggcggcttccagtcccggataaagtccgtggagcgcgacttatggaaagagtaccagacgctagagagcacactcgaggcgcggtctaagaaactggatcgtctcgagactcttgtcagatctggtgtcgcggcgggaaacttcgactcgcagaataagatcgctcagctggagactagtctcagagcgctgaaaatagaaaatgcgacgctccagagggctcatgatgctaggactaggggcatggctatggggctcggtgggtatgagcatagtcttgcgggcagatcgaataagggttcgagagagaacttgatcgagacggggagtccgagtcctaatgtgcccactggcccgcatgggagggaatcaaagattccgcaacggagtaagactagtagtcaacttgagacaacccgcaccagcaccatgacgcgaaccacatcctcgtcctcccagccgattccaaatacgcaggaactagagagagttggcacggcgcatgggagtggcagggacagtggaggcagtggaggcagtggtatgggagcggggagagatgagacggtgttgctgatgaggctaagggagatggagtataagattaaacaggaacgagaggcgagggaactggatcgtgcggcggcgagacaacgaatcagggatagtgaacggcagaataatgagctgcaggctgagttgcttagggctagacggaaggctgagacgtctgagggatagggactgagagggttgcgttggtgttgaggttgggggtaaagggtgtgcgttgttttcgaaaggcttgaactatgtacgaggggctgcgccaatggcaggtgtataaaaagcatggcgtacgggcactttggtgtgtttatggagttcgggttgatatctatactaaggtatttggctatgaagctatgagtgcgttgtttaaactgactcctatcgacatttattcgcccctgatatgacatgacaatgtgataatacctatctattttatttgctgaactgtataacaacaccgtatatgaaaggagggtcccaatatgcacgtatttcggataaggaagaagacgctatgagtacctatctatctccctatctttctgcctgttacttctccgaga

SEQ ID NO: 4058 - DNA, 312 bp, Muscodor strobelii
  misc_feature: SGI cDNA ID NO. 561028
  misc_feature: Encodes the peptide sequence at SEQ ID NO 4059
atgacgcgaaccacatcctcgtcctcccagccgattccaaatacgcaggaactagagagagttggcacggcgcatgggagtggcagggacagtggaggcagtggaggcagtggtatgggagcggggagagatgagacggtgttgctgatgaggctaagggagatggagtataagattaaacaggaacgagaggcgagggaactggatcgtgcggcggcgagacaacgaatcagggatagtgaacggcagaataatgagctgcaggctgagttgcttagggctagacggaaggctgagacgtctgagggatag

SEQ ID NO: 4059 - protein, 103 aa, Muscodor strobelii
  misc_feature: SGI Peptide ID NO. 561028
  misc_feature (33)..(100): NCBI GI: 261355010 Blast Desc: anucleate primary sterigmata protein B [Verticillium albo-atrum VaMs.102]
  misc_feature (50)..(99): NCBI GI: 154313378 Blast Desc: BC1G_05386 [Botryotinia fuckeliana B05.10] gi|150849455|gb|EDN24648.1| BC1G_05386 [Botryotinia fuckeliana B05.10]
  misc_feature (50)..(95): NCBI GI: 156042948 Blast Desc: SS1G_11273 [Sclerotinia sclerotiorum 1980] gi|154695658|gb|EDN95396.1| SS1G_11273 [Sclerotinia sclerotiorum 1980]
  misc_feature (28)..(94): NCBI GI: 256728850 Blast Desc: NECHADRAFT_39939 [Nectria haematococca mpVI 77-13-4]
MTRTTSSSSQPIPNTQELERVGTAHGSGRDSGGSGGSGMGAGRDETVLLMRLREMEYKIKQEREARELDRAAARQRIRDSERQNNELQAELLRARRKAETSEG

SEQ ID NO: 4060 - DNA, 6085 bp, Muscodor strobelii; identical to SEQ ID NO: 4057
  misc_feature: SGI EST ID NO. CUFF.10151.0
  misc_feature: Variant of the nucleotide sequence at SEQ ID NO 4058

SEQ ID NO: 4061 - DNA, 822 bp, Muscodor strobelii
  misc_feature: SGI cDNA ID NO. 561029
  misc_feature: Encodes the peptide sequence at SEQ ID NO 4062
atgttctacaatagcttgtcggcccccgagaagagccacatgaccgccgcgttcgcattcgagcttgaccattgcgaggatccaattgtctacgaacgcatgtcgcaaagacttgccgatattgacgtcgaccttgcaaaagctgtcgcggaattggtcggtggccccaagcctagtgaacccagtcgacagaatcacggcaagaaagccaagaatcttagtcagacagaagttcagccggacacgcctactatcgcaagtcgtcgcgtagctgttatcattgccgatggtttcgataagcttgcttatagtggcgtaacgacggcgctcaagactttaggcgccttaccgttcacaatcggtattcgaaggtctgagatcttcccctccggagttatacaacagtcgggtaacggtgtccagccagatcatcacttggagggcatgagatcaacaatgttcgacgctatcttcgtccccggtggtgccgaatctattgagaagcttatgaagagtggccgagccgtgcactgggcgcgcgaggcattcggccatttaaaggctattggtgctacggccgaaggtatccagctgctgaaggctgcgttttcgttacctggggttgagttctcgagtgatgagaacgttttagagtctaatggggtcgtgacaatggcgaagcagtctccggaaagtttcacagaggtcgccaagattactaaagagactgtcgggtttctgccgacgttcttcagaggtattgcccagcacagaaattttgatcgagagttggaggggtttagctcccaggtggcatattga

SEQ ID NO: 4062 - protein, 273 aa, Muscodor strobelii
  misc_feature: SGI Peptide ID NO. 561029
  misc_feature (5)..(58): Pfam Id: PF06628 Pfam Desc: Catalase-related
  misc_feature (123)..(245): Pfam Id: PF01965 Pfam Desc: DJ-1/PfpI family
  misc_feature (140)..(235): Pfam Id: PF01965 Pfam Desc: DJ-1/PfpI family
  misc_feature (1)..(273): NCBI GI: 12407461 Blast Desc: AF222056_1 CAT2 catalase [Passalora fulva]
  misc_feature (1)..(273): NCBI GI: 38326689 Blast Desc: catalase [Cochliobolus heterostrophus]
  misc_feature (1)..(273): NCBI GI: 57015319 Blast Desc: CAT1_NEUCR RecName: Full=Catalase-1 gi|49425321|gb|AAK15808.2| Catalase-1 [Neurospora crassa]
  misc_feature (1)..(273): NCBI GI: 56553786 Blast Desc: CAT1_NEUCR RecName: Full=Catalase-1 gi|49425321|gb|AAK15808.2| Catalase-1 [Neurospora crassa]
  misc_feature (1)..(273): NCBI GI: 85078809 Blast Desc: catalase 1 [Neurospora crassa OR74A] gi|28917288|gb|EAA26998.1| catalase 1 [Neurospora crassa OR74A]
  misc_feature (1)..(273): NCBI GI: 169621841 Blast Desc: SNOG_14133 [Phaeosphaeria nodorum SN15] gi|111057250|gb|EAT78370.1| SNOG_14133 [Phaeosphaeria nodorum SN15]
  misc_feature (1)..(273): NCBI GI: 189197479 Blast Desc: catalase A [Pyrenophora tritici-repentis Pt-1C-BFP] gi|187981025|gb|EDU47651.1| catalase A [Pyrenophora tritici-repentis Pt-1C-BFP]
  misc_feature (1)..(273): NCBI GI: 261354208 Blast Desc: catalase-1 [Verticillium albo-atrum VaMs.102]
  misc_feature (1)..(273): NCBI GI: 46124353 Blast Desc: FG06554.1 [Gibberella zeae PH-1]
  misc_feature (1)..(273): NCBI GI: 216408355 Blast Desc: catalase [Gibberella moniliformis]
  misc_feature (1)..(273): SWISSPROT Homolog: EC 1.11.1.6 Catalase
MFYNSLSAPEKSHMTAAFAFELDHCEDPIVYERMSQRLADIDVDLAKAVAELVGGPKPSEPSRQNHGKKAKNLSQTEVQPDTPTIASRRVAVIIADGFDKLAYSGVTTALKTLGALPFTIGIRRSEIFPSGVIQQSGNGVQPDHHLEGMRSTMFDAIFVPGGAESIEKLMKSGRAVHWAREAFGHLKAIGATAEGIQLLKAAFSLPGVEFSSDENVLESNGVVTMAKQSPESFTEVAKITKETVGFLPTFFRGIAQHRNFDRELEGFSSQVAY

SEQ ID NO: 4063 - DNA, 756 bp, Muscodor strobelii
  misc_feature: SGI cDNA ID NO. 561030
  misc_feature: Elevated expression when VOC is produced
  misc_feature: Encodes the peptide sequence at SEQ ID NO 4064
atgtcaaacttcagggaatatcttgattactttgcgcagcggctccaactactcaatcaacagattgcgatcccgagatccttcgcgaaattcaaaatcgacttctcccacgaactgcatcttcaccagctaaaaggaaagatccaccacgctcgatgcattctagtcaacacaaagaacactatcacaaccatcgctgagcacgaaacaaccatgacgctcgcagcgagcttgagctccgcaactcacgaagacttccaacggaacttacgaagtatctcccgcgaagtcgatacatacatcgaaacgacacacaaactcctctgtctgtctgatgatctaaagtcaatgtacagcaacatcctcacccaccacagcgcagaactccaacacgaaacgagtctcaaactagcctacctagcacaagacgacgtagcaggcaacaaagacatggccgtgcttgcagacctcacatacaaagactcacgatcaatgcgcatcgcaacagcaatcgccatgttctacctccccgtgaatctcgtcctgtcattcttcagcaccgagctagtatggtacgggtcacctgccgatgtcgcggaagctggcaacacgaagattcatgttagaagcgatgtatggattgcgagtctcgctgctatcgtactggctgtcggcaccgtgtattggtctacgtggtggaattggagagagaacaggaaatccggcccggtaggcactcaaattgcaagaccataa

SEQ ID NO: 4064 - protein, 251 aa, Muscodor strobelii
  misc_feature: SGI Peptide ID NO. 561030
  misc_feature (48)..(244): NCBI GI: 255945355 Blast Desc: Pc20g09490 [Penicillium chrysogenum Wisconsin 54-1255] gi|211588180|emb|CAP86278.1| Pc20g09490 [Penicillium chrysogenum Wisconsin 54-1255]
  misc_feature: Useful for introducing or modulating the production of volatile compounds
MSNFREYLDYFAQRLQLLNQQIAIPRSFAKFKIDFSHELHLHQLKGKIHHARCILVNTKNTITTIAEHETTMTLAASLSSATHEDFQRNLRSISREVDTYIETTHKLLCLSDDLKSMYSNILTHHSAELQHETSLKLAYLAQDDVAGNKDMAVLADLTYKDSRSMRIATAIAMFYLPVNLVLSFFSTELVWYGSPADVAEAGNTKIHVRSDVWIASLAAIVLAVGTVYWSTWWNWRENRKSGPVGTQIARP

SEQ ID NO: 4065 - DNA, 5257 bp, Muscodor strobelii
  misc_feature: SGI EST ID NO. CUFF.10471.1
  misc_feature: Variant of the nucleotide sequence at SEQ ID NO 4063
gcgaccaccacatcaacagctctaaatgcgctggaaccgatgcgctcaaggtgcgtgagcggaagaatagtgttccttggtatgtggtgaagacacgtcgacatgccttcagggaaaacgtaggcaaaaatgcccattgattcacctgggctagtcgacgaccagttatgcgattggttatcatcactgcgtcatcttcagtcaagggaagatgactatctagcttgtcgtatttccggaaatttattatataatttggccagtcgttatatatgagcattgcgaaaacgttacgtccttcgtcgtatattggttccgctaacttgatacgatcgcttggctcgcagcccaattcggacactgctttcttgataccatcaagtatcaatatgtcgctcagtttattcgccggcaggaaatactgcccagaaatcgatcggactaagctatcttgtatctgatctttgagattttcggtgtgtccagcaccagcggggatagctgacgccatggttacgagactctataacattagactggaatgatctgaacaagcgtaaagatcaaaccagtgttgaagaacggctttttacctgcagaggatacatatgcaagcagtacttcgcccaccagcgcccaggcatcactcagccatgtacctcagccccaacacctgcatccaatgctacagttgacgcccaatcaatatatgtgcgcaggtatggtaccgacgaacacagccaccaccgtgagaacaaagctcatctagctgccagccgcgatacagcaatgcatataaagagtgttagggagcgcggtgcaagtataaggtagtgttctccacagcaacaaattcacgtattcctatataaattgaactttcttccttcaatcaagatgatcacttcttatttagtcgcccttatgtcgctcggccgaatttaacgtattgctgagggaaattttcggtttagattacagtgtatcggtgggtgctaatgcgacgaaatggcctgcagcttttgttgatgactcaaaggctttcgaaaacacagtagcagtcgagacagagagtgctcttacggaggcgagaacgtcaaataatcgaggtatctcctacctctaaggcgaaaactaaattttcatatacgaaaagcagcggtccgtaactgtgacgaagcgctctgccgggaacccgtcttggcgtggtttcgacaggggtttgggcgagacggggatggaagcttgctgcatcagattactgccatcctatcgaaaacgcccggggaaatatctcgctattgaaaagctctactatgcgaatgattgcgccttagtgatctttcgggcaaggcattcagctcctctttttgccaatggaatgccttgtaccccgcacgtgctatgcaggctctcgaggcagaagctgcatattaatgagggagggcacttgtctggtagagcctcactcatccctctcaaaaaaagctgttgacgatcacaggtagtattaatggatattcaaatacgtaacacagtaatcttgatacaaatgactactgttaccacccagaattgagaaacttgtgtcgcatggttcgtgagcacgactcacagcctcttttcgaagaatttgtcgtcaaaatcccccttctgtttgtcgatgaccccgtacagagcagagttggggtagttagcgatggccatgacgaagtgcaatgggctagaacaccaaaagagatctgtgaatctgtgacggagaagtcatcagcattgtttgttctcacccgttataactcatggagccagatcgatgtcaccttcgattccttctccatcatatgcggcatcgctagcatatcccccgagtctctacattttgtagttggaatgggccagaggttcacagtcaaagatgaagacttcatagcatgctatagcacgactacgtcaaaggaaccctgtcaacccgccgtaacagagaagccaaatcagctagacttgtcactatgttacaacatccgccacttcgagcagcatggtcgagatctagaagatccgtggtcttgccgccagtccgctattcatcattacttttctccgacacgacatcgttctgtctgggttctcatacaggcaccagatgttttggaactaatgatagagtctgagacgcatccaatgcttctacatctgcgataccttcgcgctgcgatgtcaaacttcagggaatatcttgattactttgcgcagcggctccaactactcaatcaacagattgcgatcccgagatccttcgcgaaattcaaaatcgacttctcccacgaactgcatcttcaccagctaaaaggaaagatccaccacgctcgatgcattctagtcaacacaaagaacactatcacaaccatcgctgagcacgaaacaaccatgacgctcgcagcgagcttgagctccgcaactcacgaagacttccaacggaacttacgaagtatctcccgcgaagtcgatacatacatcgaaacgacacacaaactcctctgtctgtctgatgatctaaagtcaatgtacagcaacatcctcacccaccacagcgcagaactccaacacgaaacgagtctcaaactagcctacctagcacaagacgacgtagcaggcaacaaagacatggccgtgcttgcagacctcacatacaaagactcacgatcaatgcgcatcgcaacagcaatcgccatgttctacctccccgtgaatctcgtcctgtcattcttcagcaccgagctagtatggtacgggtcacctgccgatgtcgcggaagctggcaacacgaagattcatgttagaagcgatgtatggattgcgagtctcgctgctatcgtactggctgtcggcaccgtgtattggtctacgtggtggaattggagagagaacaggaaatccggcccggtaggcactcaaattgcaagaccataaaacaatccggttccagagtttaccaagattagctatacacatatcctagtaggtcgcgatatcatgagctgggcggtaattagcctcattatttcataacaccaatcgaattgtactttgacttctgcaaaaccgtagacttaggtgcgaagacttaggatgtgcctgacctgaatacaatgatgacttcctagaggacgtatctatcatcttacactttactgagaagccctgtttcactcgcgccacaatccccaaaattcatgattcggcaccaatcttgtactcctcagacaatcgcggaatcatacaaggctttcgacaagccgctaaaaactaagagccccgatctatcaatatgccacctgggagctaaacccctccaactctcgatcaaaatttctgtgctgggcaatacctctgaagaacgtcggcagaaacccgacagtctctttagtaatcttggcgacctctgtgaaactttccggagactgcttcgccattgtcacgaccccattagactctaaaacgttctcatcactcgagaactcaaccccaggtaacgaaaacgcagccttcagcagctggataccttcggccgtagcaccaatagcctttaaatggccgaatgcctcgcgcgcccagtgcacggctcggccactcttcataagcttctcaatagattcggcaccaccggggacgaagatagcgtcgaacattgttgatctcatgccctccaagtgatgatctggctggacaccgttacccgactgttgtataactccggaggggaagatctcagaccttcgaataccgattgtgaacggtaaggcgcctaaagtcttgagcgccgtcgttacgccactataagcaagcttatcgaaaccatcggcaatgataacagctacgcgacgacttgcgatagtaggcgtgtccggctgaacttctgtctgactaagattcttggctttcttgccgtgattctgtcgactgggttcactaggcttggggccaccgaccaattccgcgacagcttttgcaaggtcgacgtcaatatcggcaagtctttgcgacatgcgttcgtagacaattggatcctcgcaatggtcaagctcgaatgcgaacgcggcggtcatgtggctcttctcgggggccgacaagctattgtagaacatctgggcctgattaaagtgttccttgaactttgcactcgtcttacgttcctttatgccttgtacggataccttggactcgggatacgcgccttcgtgttccgcagctggtggccgtgcctcgaatcggttcggccagtagttcaccgtgcctctgttgatcgtgtggcggccttggccgtcacgattgaaattcatcacaggacagacaggcttattgacagggagttcctgccagttaatccccagccgagatagctgtgtgtcaaaatggctgaagcttcgtccttgcaagagcggatcatccgagtgaccgatgccaggcaccatgtgggcagtgcagaaggcgacttgttcggtctgggtgaagtactcgtcgacgtttcgattcagttccagctcgccgatatagcgcactggaatgaggtcttcgggccacagcttcgtagcatccagtatgtcgaagtcaaagtcatgctcctgcgcctctggaataacctggatgccaaatttccacttcgggtacgctccgttctcgatggcttcccacaagtccttgcgatggaaatcaggatcttgtcccgcaagcttcaaggcctcatcccagactaaggagtgaactccaagttcgggggtaaagtgaaacttgacgaacgatcgctcgccattctcgttgacgagagtgaaagtatttactccaaacccttgcatcatacgatacgatcgtgggattgcgcggtcagacatggtccacatatacatgtgcctcgcctcctcgtgcatgtaaacgaaatcccagaagttgttgtgagcgctctgcgcctggggcacctcattgtgcggttccggtttgaccgcgtgaactatgtcgggaaacttgatgctatcctgaatgaagaagactgggatgttgttgccgacgatatcccaattaccttcttgcgtgtagaacttaaccgcaaaccccctcacatcgcggacagtgtcagcactaccccttgagccttgcacagtagaaaaacgtacgaaaactggtgtctcacgcgatgtgtccgtgaggacaccggcacaagtgacgtcctcagcactttcatacaacttgaagttgccgaaag

SEQ ID NO: 4066 - DNA, 2991 bp, Muscodor strobelii
  misc_feature: SGI cDNA ID NO. 561031
  misc_feature: Elevated expression when VOC is produced
  misc_feature: Encodes the peptide sequence at SEQ ID NO 4067
atgtcgggttcgaaaactccaaaagagtcattggctggcattctacggagatggaacgatgaaaagcagaaggggggccaagaaacactagctcttcaagcccttctcgaccagcacaaggataccatcgaaaatgataagacctgtcttctccaaattgtctcgctgggacgtagtgaaggaaaaggaactcatgatgaagacgactgctacatagatgccttgaagataattctgaagatggggagcgttaaaaccaacatcagcaatcgcgacgatgagggaaaatcacctctacaccatgcttgtcttgggggtaagcgtcgaatggctggagaactcctgaagttcctggacggtggggcaaaggtcgacgaactttcatcagccttagcgctcgtggtcgccgctgacgatccgaagcgattcgttatcaagtggctcctggagaacggggcaaatggaactgcgctgttgcgcgaagcatcggataccggaaacgccaacgtcgtagagcttctgcttaagcaaggaaaaactctgcccgagcaagagaacatcgccttcagccggcagcttacggaaggcggggccgcccccttctttgtagctacatccaagggttgtgaaaaaattgtccagctctttctcaagcacaaaaatatcgatgtgaaccagagggatgataacaccgggtttacgccattgcatgaagcagtttccaagggtcatgaacaaattgtgaagctcctcctcggccatgagaacatcaatgtaaatcagaaggatattaccaaagatttgaccacatcgtaccacgcaacaagcggtggagatggagaaacaatcaaaccacaggtcaaggacgacaagaacgatcacaaagccgaaagccaagaagataacacgccattgcaccttgcaatactcaaaggtggtggcagtattgtcaagctgctagtcaactacaaggatatagatttggacgcgaagaaccgagttggggatacgccactcattttggcgagcaaaatgggcatggcaactattgcccggtacttacttgctaggggagcgaaggtcgacgttgatgccaatggctatacaccacttcactttgctgccctgggagggtttcttgagacagctcacactttgatcgaatatggggctggctctccgtcaaacgagaaccacaataatgagccgaactccactcccacggcacttactcctacggctttagcggaagagaatgggttcactgacattgtcgatctactagcgactaagggcaaagcgtacaaattctccctgcaggagtttgacccagcggcgaagagcattcttcaggaaatctacggcttcgaatggccagctcggagggatttgcgagagtattcatcgaacccaagtgtctatgatattctctacgacacgaagtctccagatcacatcaaaaagagcggggcgaatggtccaagatggatccatctgccagcgaataacataacatggatcaaggacgccgtcgggcagattgttcccgataccctacaatatacagtacttcgatttatatcggagaattttgaagagatggccatctcgcgtagtcagggctactatgcgactacattcgagggcctcgatgagacggtggaaatcagtgcatttgctcttccattaattgatgtcgatatgctggtgccagggtaccataaatccgagaacgcaaaggtaaagcaggacgccacaacttctcagagtctacatcttaaacgggatcacgttgaaagggatagcagtattccggggcctcatgagatcatccactgccaacacaccctagatttcccgttcgatgcaccacccgaaaagcttaatgtatctgaggtgaatggaagccaagttctatcgcgttacactggtgacctacagcagtccagaacggccagttccagctccgataacaatagggtggaagagagcggcggcacgtcaaattctgatcatccacctactgatgggcggcaacacgattcccaggattccttcgattctgagagtcaaaggcctactccagtgcgacccgataggtcttcgtggcagtggtctgcacatacaatattgactacctttcccaagcgttgggaccctaggaagaaccagacgctacagaatcatattcgcaagtgtgttgctgattcgtcgacgaaaatcaaaagctccaatgacctgctgctaaaagttatacaaagttgtatgggatttcaagcacggtttctagacggagaaaaaagaaaagactatttcgacgccttctcaggcgaaacgtccgagctctcgagtaacgccgtaaagcgctatggcaagtacaaaactgatttaggccaaatagacacgccgcgagactttagcgaggctgtcagaaaagagacgacgtatctcatcactattgatgacgtggaagctgagctgtccttaattaaacaaatcagagagcaccaattccagcttctggagactctaccaccgaatcaattcaacgagaagacgttcaaggatctcaaaaaatcccgtaacactgatcacgttttgacgaaagtggaacagcttcacaaagaggctaaaagagttcgggcgtctatcattaccttactccagatgagacaacgccaagcaatgacggaaaatgcgatcaactcagccttccaatcaaatgtattgtttatattcactaccgccacagttatcttcgcgcctctttcatggatcacaagccttttagcccttgatattgatgactttaccccagcttcatggagcatcgggcaagcagccgcagcatcaaccgtcactgtggtatcgaccattctaattgcctgggcaatctataaggtttttggattcttcgaaaggcgcagaaaagaagccagggagagaaaaaataatatagactccgtcataagtcagaatgcagaatattaa

SEQ ID NO: 4067 - protein, 996 aa, Muscodor strobelii
  misc_feature: SGI Peptide ID NO. 561031
  misc_feature (231)..(264): Pfam Id: PF00023 Pfam Desc: Ankyrin repeat
  misc_feature (300)..(333): Pfam Id: PF00023 Pfam Desc: Ankyrin repeat
  misc_feature (334)..(366): Pfam Id: PF00023 Pfam Desc: Ankyrin repeat
  misc_feature (366)..(391): Pfam Id: PF00023 Pfam Desc: Ankyrin repeat
  misc_feature (334)..(363): Pfam Id: PF00023 Pfam Desc: Ankyrin repeat
  misc_feature (75)..(434): NCBI GI: 159123470 Blast Desc: Ankyrin repeat protein [Aspergillus fumigatus A1163]
  misc_feature (75)..(441): NCBI GI: 157106389 Blast Desc: ankyrin 2,3/unc44 [Aedes aegypti] gi|108868849|gb|EAT33074.1| ankyrin 2,3/unc44 [Aedes aegypti]
  misc_feature (69)..(432): NCBI GI: 189501781 Blast Desc: Aasi_0340 [Candidatus Amoebophilus asiaticus 5a2] gi|189497222|gb|ACE05769.1| Aasi_0340 [Candidatus Amoebophilus asiaticus 5a2]
  misc_feature (69)..(428): NCBI GI: 157106769 Blast Desc: ankyrin 2,3/unc44 [Aedes aegypti] gi|108868779|gb|EAT33004.1| ankyrin 2,3/unc44 [Aedes aegypti]
  misc_feature (74)..(431): NCBI GI: 242821429 Blast Desc: ankyrin repeat-containing protein, [Talaromyces stipitatus ATCC 10500] gi|218712600|gb|EED12025.1| ankyrin repeat-containing protein, [Talaromyces stipitatus ATCC 10500]
  misc_feature (71)..(433): NCBI GI: 242821429 Blast Desc: ankyrin repeat-containing protein, [Talaromyces stipitatus ATCC 10500] gi|218712600|gb|EED12025.1| ankyrin repeat-containing protein, [Talaromyces stipitatus ATCC 10500]
  misc_feature (69)..(428): NCBI GI: 157106769 Blast Desc: ankyrin 2,3/unc44 [Aedes aegypti] gi|108868779|gb|EAT33004.1| ankyrin 2,3/unc44 [Aedes aegypti]
  misc_feature (85)..(437): NCBI GI: 238837864 Blast Desc: ankyrin-1 [Microsporum canis CBS 113480]
  misc_feature (75)..(466): NCBI GI: 159123470 Blast Desc: Ankyrin repeat protein [Aspergillus fumigatus A1163]
  misc_feature (75)..(428): NCBI GI: 242827419 Blast Desc: ankyrin repeat-containing protein, [Talaromyces stipitatus ATCC 10500] gi|218711987|gb|EED11416.1| ankyrin repeat-containing protein, [Talaromyces stipitatus ATCC 10500]
  misc_feature: Useful for introducing or modulating the production of volatile compounds
MSGSKTPKESLAGILRRWNDEKQKGGQETLALQALLDQHKDTIENDKTCLLQIVSLGRSEGKGTHDEDDCYIDALKIILKMGSVKTNISNRDDEGKSPLHHACLGGKRRMAGELLKFLDGGAKVDELSSALALVVAADDPKRFVIKWLLENGANGTALLREASDTGNANVVELLLKQGKTLPEQENIAFSRQLTEGGAAPFFVATSKGCEKIVQLFLKHKNIDVNQRDDNTGFTPLHEAVSKGHEQIVKLLLGHENINVNQKDITKDLTTSYHATSGGDGETIKPQVKDDKNDHKAESQEDNTPLHLAILKGGGSIVKLLVNYKDIDLDAKNRVGDTPLILASKMGMATIARYLLARGAKVDVDANGYTPLHFAALGGFLETAHTLIEYGAGSPSNENHNNEPNSTPTALTPTALAEENGFTDIVDLLATKGKAYKFSLQEFDPAAKSILQEIYGFEWPARRDLREYSSNPSVYDILYDTKSPDHIKKSGANGPRWIHLPANNITWIKDAVGQIVPDTLQYTVLRFISENFEEMAISRSQGYYATTFEGLDETVEISAFALPLIDVDMLVPGYHKSENAKVKQDATTSQSLHLKRDHVERDSSIPGPHEIIHCQHTLDFPFDAPPEKLNVSEVNGSQVLSRYTGDLQQSRTASSSSDNNRVEESGGTSNSDHPPTDGRQHDSQDSFDSESQRPTPVRPDRSSWQWSAHTILTTFPKRWDPRKNQTLQNHIRKCVADSSTKIKSSNDLLLKVIQSCMGFQARFLDGEKRKDYFDAFSGETSELSSNAVKRYGKYKTDLGQIDTPRDFSEAVRKETTYLITIDDVEAELSLIKQIREHQFQLLETLPPNQFNEKTFKDLKKSRNTDHVLTKVEQLHKEAKRVRASIITLLQMRQRQAMTENAINSAFQSNVLFIFTTATVIFAPLSWITSLLALDIDDFTPASWSIGQAAAASTVTVVSTILIAWAIYKVFGFFERRRKEARERKNNIDSVISQNAEY

SEQ ID NO: 4068 - DNA, 2280 bp, Muscodor strobelii
  misc_feature: SGI EST ID NO. CUFF.10136.0
  misc_feature: Variant of the nucleotide sequence at SEQ ID NO 4066
ttctctttccccagtgtatctacattacctgtgccatccatcgccaagtctgccatcaagtgttgaaatgtcgggttcgaaaactccaaaagagtcattggctggcattctacggagatggaacgatgaaaagcagaaggggggccaagaaacactagctcttcaagcccttctcgaccagcacaaggataccatcgaaaatgataagacctgtcttctccaaattgtctcgctgggacgtagtgaaggaaaaggaactcatgatgaagacgactgctacatagatgccttgaagataattctgaagatggggagcgttaaaaccaacatcagcaatcgcgacgatgagggaaaatcacctctacaccatgcttgtcttgggggtaagcgtcgaatggctggagaactcctgaagttcctggacggtggggcaaaggtcgacgaactttcatcagccttagcgctcgtggtcgccgctgacgatccgaagcgattcgttatcaagtggctcctggagaacggggcaaatggaactgcgctgttgcgcgaagcatcggataccggaaacgccaacgtcgtagagcttctgcttaagcaaggaaaaactctgcccgagcaagagaacatcgccttcagccggcagcttacggaaggcggggccgcccccttctttgtagctacatccaagggttgtgaaaaaattgtccagctctttctcaagcacaaaaatatcgatgtgaaccagagggatgataacaccgggtttacgccattgcatgaagcagtttccaagggtcatgaacaaattgtgaagctcctcctcggccatgagaacatcaatgtaaatcagaaggatattaccaaagatttgaccacatcgtaccacgcaacaagcggtggagatggagaaacaatcaaaccacaggtcaaggacgacaagaacgatcacaaagccgaaagccaagaagataacacgccattgcaccttgcaatactcaaaggtggtggcagtattgtcaagctgctagtcaactacaaggatatagatttggacgcgaagaaccgagttggggatacgccactcattttggcgagcaaaatgggcatggcaactattgcccggtacttacttgctaggggagcgaaggtcgacgttgatgccaatggctatacaccacttcactttgctgccctgggagggtttcttgagacagctcacactttgatcgaatatggggctggctctccgtcaaacgagaaccacaataatgagccgaactccactcccacggcacttactcctacggctttagcggaagagaatgggttcactgacattgtcgatctactagcgactaagggcaaagcgtacaaattctccctgcaggagtttgacccagcggcgaagagcattcttcaggaaatctacggcttcgaatggccagctcggagggatttgcgagagtattcatcgaacccaagtgtctatgatattctctacgacacgaagtctccagatcacatcaaaaagagcggggcgaatggtccaagatggatccatctgccagcgaataacataacatggatcaaggacgccgtcgggcagattgttcccgataccctacaatatacagtacttcgatttatatcggagaattttgaagagatggccatctcgcgtagtcagggctactatgcgactacattcgagggcctcgatgagacggtggaaatcagtgcatttgctcttccattaattgatgtcgatatgctggtgccagggtaccataaatccgagaacgcaaaggtaaagcaggacgccacaacttctcagagtctacatcttaaacgggatcacgttgaaagggatagcagtattccggggcctcatgagatcatccactgccaacacaccctagatttcccgttcgatgcaccacccgaaaagcttaatgtatctgaggtgaatggaagccaagttctatcgcgttacactggtgacctacagcagtccagaacggccagttccagctccgataacaatagggtggaagagagcggcggcacgtcaaattctgatcatccacctactgatgggcggcaacacgattcccaggattccttcgattctgagagtcaaaggcctactccagtgcgacccgataggtcttcgtggcagtggtctgcacgtatagccatgatacgtaccagtatctgcaactacatctcgaatattagctggcaaccgaattcgccggctcaggcagtacataagtctca

SEQ ID NO: 4069 - DNA, 1212 bp, Muscodor strobelii
  misc_feature: SGI cDNA ID NO. 561032
  misc_feature: Encodes the peptide sequence at SEQ ID NO 4070
atggcacaagacttcggtgttgtacctgcggatactccgtctacgcctgagccattcacatttcgtgtatctgacaaggacttggaagagttcagaaggctgttagaactatcaaagattggtcctgctacatggtggaaccagcaaagggaaagaaacctcggtgtcactcgcgaatggctaatcaaagccaaggacgcctggctgaacaattttgactggcgcaagcacgaggagtacatcaacagttttccgaactttaagcttcacatcaaagacccggaggcagacgacattgacatccattttgcagccctgttttctaagaaaaaggatgcggtacccattgtatttatgcacgggttcccagcttctttcaccgagtttctgccgatgctggagttattggctaagaagtacacgcctgagacgctcccataccatgttataatcccttcacttcccgactttggactttcaggaagctcaagtcgaggtgttgagatgacattggttcaagcagcgcgcattttgaatcagctgatgatcgacctcggttttggaaagggatatgtcgcccaaggcggtgatatgggaagcatgctagctcggatcatggctgcggaatatgacgcctgcaaggcatttcatatcaatatgttcatgcttgacccaacacaaacagcgccctctatggacttgctgactcctgaagagtcccaaatcatgaaacgagttgcaacttggcagcaaaccggccttgctttcactctccaacacggcacccgtccggcgacggttgggcttgcaatctcatccaatccgctcgctttactggcttgggttggcgagaaactactcgaatggactgatccacgacaacagttctccatggagactatcttgaattggattacattctactggttcacgaatacattgcctcgtggcctctaccacgcaacaatcgccatgagtcttgcagcgggcaagccgtatcctatatcgatggaaaagcccttttgctactctttcttcccgtatgatcttgtcgtactcccgaaagcctgggctgagcgactgtatcccaatctaaagctattcagagcacatacgaagggcggtcatttcgcacccctcgaagagccagctgcatttctggatgatgtcgaggagttcattgcgaagattggcaatcaatgtcagagttga

SEQ ID NO: 4070 - protein, 403 aa, Muscodor strobelii
  misc_feature: SGI Peptide ID NO. 561032
  misc_feature (17)..(133): Pfam Id: PF06441 Pfam Desc: Epoxide hydrolase N terminus
  misc_feature (147)..(216): Pfam Id: PF00561 Pfam Desc: alpha/beta hydrolase fold
  misc_feature (1)..(373): NCBI GI: 119501413 Blast Desc: epoxide hydrolase family protein [Neosartorya fischeri NRRL 181] gi|119415629|gb|EAW25566.1| epoxide hydrolase family protein [Neosartorya fischeri NRRL 181]
  misc_feature (1)..(396): NCBI GI: 256722348 Blast Desc: NECHADRAFT_44291 [Nectria haematococca mpVI 77-13-4]
  misc_feature (5)..(394): NCBI GI: 85078779 Blast Desc: NCU08783 [Neurospora crassa OR74A] gi|28917280|gb|EAA26990.1| NCU08783 [Neurospora crassa OR74A]
  misc_feature (5)..(397): NCBI GI: 171679216 Blast Desc: protein product [Podospora anserina] gi|170937680|emb|CAP62337.1| protein product [Podospora anserina]
  misc_feature (5)..(394): NCBI GI: 189208684 Blast Desc: epoxide hydrolase 1 [Pyrenophora tritici-repentis Pt-1C-BFP] gi|187976768|gb|EDU43394.1| epoxide hydrolase 1 [Pyrenophora tritici-repentis Pt-1C-BFP]
  misc_feature (1)..(395): NCBI GI: 225681549 Blast Desc: conserved [Paracoccidioides brasiliensis Pb03]
  misc_feature (4)..(395): NCBI GI: 239606792 Blast Desc: epoxide hydrolase hyl1 [Ajellomyces dermatitidis ER-3]
  misc_feature (1)..(397): NCBI GI: 146323372 Blast Desc: epoxide hydrolase [Aspergillus fumigatus Af293] gi|129558323|gb|EAL92682.2| epoxide hydrolase, [Aspergillus fumigatus Af293] gi|159127729|gb|EDP52844.1| epoxide hydrolase,
  misc_feature (1)..(397): NCBI GI: 119492149 Blast Desc: epoxide hydrolase, [Neosartorya fischeri NRRL 181] gi|119411705|gb|EAW21648.1| epoxide hydrolase, [Neosartorya fischeri NRRL 181]
  misc_feature (1)..(397): NCBI GI: 145247392 Blast Desc: An12g08930 [Aspergillus niger] gi|134080680|emb|CAK41344.1| protein product [Aspergillus niger]
  misc_feature (9)..(395): SWISSPROT Homolog: EC 3.3.2.9 Microsomal epoxide hydrolase
MAQDFGVVPADTPSTPEPFTFRVSDKDLEEFRRLLELSKIGPATWWNQQRERNLGVTREWLIKAKDAWLNNFDWRKHEEYINSFPNFKLHIKDPEADDIDIHFAALFSKKKDAVPIVFMHGFPASFTEFLPMLELLAKKYTPETLPYHVIIPSLPDFGLSGSSSRGVEMTLVQAARILNQLMIDLGFGKGYVAQGGDMGSMLARIMAAEYDACKAFHINMFMLDPTQTAPSMDLLTPEESQIMKRVATWQQTGLAFTLQHGTRPATVGLAISSNPLALLAWVGEKLLEWTDPRQQFSMETILNWITFYWFTNTLPRGLYHATIAMSLAAGKPYPISMEKPFCYSFFPYDLVVLPKAWAERLYPNLKLFRAHTKGGHFAPLEEPAAFLDDVEEFIAKIGNQCQS

SEQ ID NO: 4071 - DNA, 1481 bp, Muscodor strobelii
  misc_feature: SGI EST ID NO. CUFF.10164.0
  misc_feature: Variant of the nucleotide sequence at SEQ ID NO 4069
gcatgtctgccagtcggtcaacgaagtatctccagacctttcaatcacgtcataaacatatcaaatatacctagacaatcatggcacaagacttcggtgttgtacctgcggatactccgtctacgcctgagccattcacatttcgtgtatctgacaaggacttggaagagttcagaaggctgttagaactatcaaagattggtcctgctacatggtggaaccagcaaagggaaagaaacctcggtgtcactcgcgaatggctaatcaaagccaaggacgcctggctgaacaattttgactggcgcaagcacgaggagtacatcaacagttttccgaactttaagcttcacatcaaagacccggaggcagacgacattgacatccattttgcagccctgttttctaagaaaaaggatgcggtacccattgtatttatgcacgggttcccagcttctttcaccgagtttctgccgatgctggagttattggctaagaagtacacgcctgagacgctcccataccatgttataatcccttcacttcccgactttggactttcaggaagctcaagtcgaggtgttgagatgacattggttcaagcagcgcgcattttgaatcagctgatgatcgacctcggttttggaaagggatatgtcgcccaaggcggtgatatgggaagcatgctagctcggatcatggctgcggaatatgacgcctgcaaggcatttcatatcaatatgttcatgcttgacccaacacaaacagcgccctctatggacttgctgactcctgaagagtcccaaatcatgaaacgagttgcaacttggcagcaaaccggccttgctttcactctccaacacggcacccgtccggcgacggttgggcttgcaatctcatccaatccgctcgctttactggcttgggttggcgagaaactactcgaatggactgatccacgacaacagttctccatggagactatcttgaattggattacattctactggttcacgaatacattgcctcgtggcctctaccacgcaacaatcgccatgagtcttgcagcgggcaagccgtatcctatatcgatggaaaagcccttttgctactctttcttcccgtatgatcttgtcgtactcccgaaagcctgggctgagcgactgtatcccaatctaaagctattcagagcacatacgaagggcggtcatttcgcacccctcgaagagccagctgcatttctggatgatgtcgaggagttcattgcgaagattggcaatcaatgtcagagttgaatcgagtggcctgaagcgcagaagataattgaatgtccggtgtaggagcgacactacacaacgactggaagtgtcatcggcatagctgtctatctgcagaaaactggaatgcaaaccgcttttgaatgaatcgttactcacgtcctacgctccatgctcttgtcgaatttgctttaaggtgaacctgcg

SEQ ID NO: 4072 - DNA, 2376 bp, Muscodor strobelii
  misc_feature: SGI cDNA ID NO. 561033
  misc_feature: Encodes the peptide sequence at SEQ ID NO 4073
atgccaaatgctgaggtgcgaagtcagcaagagggcccgaccggagttcatgaatccaccacgcccccacggccaaagcctcagagaagggttcggaaaggaacccgtagttgctgggagtgtcgacatcggaaaatcaaatgtgtctttcgctcctcttcagacaaagtctgtttccgctgcacacgacgcggcgccaaatgtgtcagccaagagcatccggaggtcgtatcggctactctagacaggaacctccaaatgggtgaccgtgtcgtcagaatcgaatcacttgtggatcaactgctgagagagattccgaaagactctgcccgctcacttccttctccgccagagctcgatggagaaaaacgccatgatgtcttcgcctcaactggatcatgtaggggtggtaatggcgagggctcgttgtcggcatcagacaatgccggattccagatattccagcgtaactcaagctgttcgcttgagggagcaagcaaatccatgcccgctgattcttcaaggtacacgagtctttctcaaacactttgtcaatctctgccgcccatagcggatgtgcggtcgatagtcaaagcatgtggcaacacttcttcaatgttttttgaaatgcagggcattccgtatgacgctctagacaaaagcaagagccttgagacgattttcgaagaaccagggcccgatgctcacccagtgatcattgcgaggcacatgatccatatcgctacagcattacagcatctccacccggattaccacgaggaaattagaagcctctcaacgccacctctcgaaatgatgcgcagactggtaaggattacaaatgagaaagtgaccacgagagatgacctcatcgacaatatcgaaggcttagacttaatcggaaaagagagctggtaccatgccaacaatggagatctacggaaagccttgcttaccgttcggagagccgtaacaatagctcaggtaatgggacttcaccgagccggtaacacgcgctgcaaggtcgctagttcggataccaaagcatatccggaggtcttatggtttcgaatcgtaactcttgagcgctatctatgtctcatgcttggcttaccccaggttactattgatcaaaccatgacatccaaagaaatactcgaacgtgatacgccaatgggtaggctcgagcgtgcgcattgcgccatcgcagctcaggttctcgagcgcaaccagtcagatccgcaagccaacgattatgccttgacgcgggaagtggacgaacagctcctacaagccgctgagcgtatgccatcagactggtggctcacgccgaacctggctaccactgtcgagcagccagatgcattattcctgtacatgcgacagctcttcaatcatctgttccactacagtctcctcatacaactccatcttccgtatatgctccgttcctgtgttagcatacagcgatacgattactcgtgggtgacatgtgtcacatcggcgcgtgagatcctttcacgactggtcatgtaccacagttttaatcgaattgcattttgctgtcggactcttgatttctttggcctaatggcgtcaattgctctcttgattgcgcatattgagaagcaccggctcaaatccctttcaagtattgcttcggaacgagaagcatcccataccagtatggtagatggactattgtctcaccaaagactctgcgacagggctctcgtagagaaggctctgcgtcctatggaggatgcgagccggtttaccacagatgccatgggtaccagatgctcggctcttctgcgacagcttttggcactggaaagcgaagcagcttgctctacaacgcgtgaccgtgtctcaaatacgggtgttagcccgtccgtgtcgaacaaagatgccgagcttcagttgacggctccctttttcggcatgattaccattacatccaagggcatcactctcaaacagccgaacggcaccatcgcggcgtccgacaacgcatgcaagactccacttcggaggacaatgacatccgaccaatcccaacgccatgcccaggttctttctaactcatttgattcagacgtgcctgcccaaatgccaacatacaccatccatacaattagcaacacgcccgcatatcccacaatcttgtcgcatgatacgcaggaaatcgattcaggagcactcgacaacatgattccgcagtacacagagcacttgctatcagctgcgaactgggcctcttactctatgggtagtggcttcttggatacattcacgagtattattggcgaccaacaagatgccaacatggccgatccgtcaaattggttggacacttctcacttctcttcctag

SEQ ID NO: 4073 - protein, 791 aa, Muscodor strobelii
  misc_feature: SGI Peptide ID NO. 561033
  misc_feature (293)..(388): Pfam Id: PF04082 Pfam Desc: Fungal specific transcription factor domain
  misc_feature (304)..(372): Pfam Id: PF04082 Pfam Desc: Fungal specific transcription factor domain
  misc_feature (28)..(781): NCBI GI: 242797239 Blast Desc: conserved [Talaromyces stipitatus ATCC 10500] gi|218719558|gb|EED18978.1| conserved [Talaromyces stipitatus ATCC 10500]
  misc_feature (25)..(753): NCBI GI: 238501036 Blast Desc: conserved [Aspergillus flavus NRRL3357] gi|220691989|gb|EED48336.1| conserved [Aspergillus flavus NRRL3357]
  misc_feature (25)..(658): NCBI GI: 67524373 Blast Desc: AN2644.2 [Aspergillus nidulans FGSC A4] gi|40743862|gb|EAA63046.1| AN2644.2 [Aspergillus nidulans FGSC A4] gi|259486446|tpe|CBF84289.1| TPA: Zn(II)2Cys6 transcription
  misc_feature (149)..(681): NCBI GI: 255955041 Blast Desc: Pc21g12430 [Penicillium chrysogenum Wisconsin 54-1255] gi|211589984|emb|CAP96140.1| Pc21g12430 [Penicillium chrysogenum Wisconsin 54-1255]
  misc_feature (28)..(665): NCBI GI: 189196762 Blast Desc: C6 zinc finger domain containing protein [Pyrenophora tritici-repentis Pt-1C-BFP] gi|187980598|gb|EDU47224.1| C6 zinc finger domain containing protein [Pyrenophora tritici-repentis
  misc_feature (28)..(652): NCBI GI: 115396206 Blast Desc: [Aspergillus terreus NIH2624] gi|114193311|gb|EAU35011.1| [Aspergillus terreus NIH2624]
  misc_feature (28)..(658): NCBI GI: 238490114 Blast Desc: conserved [Aspergillus flavus NRRL3357] gi|220696707|gb|EED53048.1| conserved [Aspergillus flavus NRRL3357]
  misc_feature (173)..(662): NCBI GI: 238839500 Blast Desc: C6 zinc finger domain-containing protein [Microsporum canis CBS 113480]
  misc_feature (22)..(652): NCBI GI: 170940175 Blast Desc: protein product [Podospora anserina]
  misc_feature (28)..(652): NCBI GI: 119476830 Blast Desc: C6 zinc finger domain protein [Neosartorya fischeri NRRL 181] gi|119407372|gb|EAW17321.1| C6 zinc finger domain protein [Neosartorya fischeri NRRL 181]
MPNAEVRSQQEGPTGVHESTTPPRPKPQRRVRKGTRSCWECRHRKIKCVFRSSSDKVCFRCTRRGAKCVSQEHPEVVSATLDRNLQMGDRVVRIESLVDQLLREIPKDSARSLPSPPELDGEKRHDVFASTGSCRGGNGEGSLSASDNAGFQIFQRNSSCSLEGASKSMPADSSRYTSLSQTLCQSLPPIADVRSIVKACGNTSSMFFEMQGIPYDALDKSKSLETIFEEPGPDAHPVIIARHMIHIATALQHLHPDYHEEIRSLSTPPLEMMRRLVRITNEKVTTRDDLIDNIEGLDLIGKESWYHANNGDLRKALLTVRRAVTIAQVMGLHRAGNTRCKVASSDTKAYPEVLWFRIVTLERYLCLMLGLPQVTIDQTMTSKEILERDTPMGRLERAHCAIAAQVLERNQSDPQANDYALTREVDEQLLQAAERMPSDWWLTPNLATTVEQPDALFLYMRQLFNHLFHYSLLIQLHLPYMLRSCVSIQRYDYSWVTCVTSAREILSRLVMYHSFNRIAFCCRTLDFFGLMASIALLIAHIEKHRLKSLSSIASEREASHTSMVDGLLSHQRLCDRALVEKALRPMEDASRFTTDAMGTRCSALLRQLLALESEAACSTTRDRVSNTGVSPSVSNKDAELQLTAPFFGMITITSKGITLKQPNGTIAASDNACKTPLRRTMTSDQSQRHAQVLSNSFDSDVPAQMPTYTIHTISNTPAYPTILSHDTQEIDSGALDNMIPQYTEHLLSAANWASYSMGSGFLDTFTSIIGDQQDANMADPSNWLDTSHFSS

SEQ ID NO: 4074 - DNA, 1347 bp, Muscodor strobelii
  misc_feature: SGI cDNA ID NO. 561034
  misc_feature: Encodes the peptide sequence at SEQ ID NO 4075
atgaaagtcatcaacccgactgcagaggccctggagagctctcgaaaaagagagcatgagcttgagatcaaagtccaacggttagaaacacaactcgccggactacgctcagcatcaccaaaatgcaccgcaccgttatcgacacgccagcgtgtgcagaaccacagcagcctcattctcaatcacgccaagccaactgcttcttccctcgctagatgccagagcacgaaggacagcaaacaagccgccattgtaaagaaactcgtaactacgattgtcgagaacaccatgtacagttacgaaggtggtgtccccacagcaattgcacagcgctttgatgaagaaggatgcgaagcttggaagccggtggagaagaattacatgaaggaaacagcagcatccactaatcgataccatgcgattgacggctttcggcgaagatatgccgcaaggctccgggctaagtctcgtgtactgccgtcgctaccctctccgtcctctccttcctctccagaaatctcgtggggggagtcccctaccttacgtgagcgcaagagagactcccacttgcaagactcttatctcacggaggagttcaaaatcgcagactgcaatagtgagacagtgatcgaggaccatcatcaatgcgactcatccgacgatgtgccgagctttgacgtaccgaatttggacgcctactcacgtctcgaagaagcttggagtgagaacaaaacggtatcgtccttcaaatacgataatattcggatagatagtgcggtcgggttgcgtatcctacagcgggccatgagtttagtccaagaaactctcttcccattatttcgagagcacggaagccgcgaaaacgcgcctcatctcatccttctcggacgaaatgaactaatcaacgaaattggagactacggacgtccatggttggaaatcaacggtcattcacagggtgatgtcctttacgctataatgaaactgcctcaccttcgcaacgcgatcgctcatcctagagtcgggcagcttggtgcccccagaacagtagacgacctcgtacaagacgctcaggaggtggcgttcatgttcagggactatgaaagaacgatggaattaagaagcctgcgcgatgaacttgtttctgaagcagaaaggtcagacgcgcatctagcaaccatatgtgggttagctgtactgccatactccgagcaaatggactttgaaccacatattcatgattctatgacactcaggctcagatggactggttgggctggggatgagccgagtgatttcggggtgtatgaagctgcactggcagtgaaagtacgcaacttaccttga

SEQ ID NO: 4075 - protein, 448 aa, Muscodor strobelii
  misc_feature: SGI Peptide ID NO. 561034
MKVINPTAEALESSRKREHELEIKVQRLETQLAGLRSASPKCTAPLSTRQRVQNHSSLILNHAKPTASSLARCQSTKDSKQAAIVKKLVTTIVENTMYSYEGGVPTAIAQRFDEEGCEAWKPVEKNYMKETAASTNRYHAIDGFRRRYAARLRAKSRVLPSLPSPSSPSSPEISWGESPTLRERKRDSHLQDSYLTEEFKIADCNSETVIEDHHQCDSSDDVPSFDVPNLDAYSRLEEAWSENKTVSSFKYDNIRIDSAVGLRILQRAMSLVQETLFPLFREHGSRENAPHLILLGRNELINEIGDYGRPWLEINGHSQGDVLYAIMKLPHLRNAIAHPRVGQLGAPRTVDDLVQDAQEVAFMFRDYERTMELRSLRDELVSEAERSDAHLATICGLAVLPYSEQMDFEPHIHDSMTLRLRWTGWAGDEPSDFGVYEAALAVKVRNLP

SEQ ID NO: 4076 - DNA, 629 bp, Muscodor strobelii
  misc_feature: SGI EST ID NO. CUFF.10166.0
  misc_feature: Variant of the nucleotide sequence at SEQ ID NO 4074
aaccacagcagcctcattctcaatcacgccaagccaactgcttcttccctcgctagatgccagagcacgaaggacagcaaacaagccgccattgtaaagaaactcgtaactacgattgtcgagaacaccatgtacagttacgaaggtggtgtccccacagcaattgcacagcgctttgatgaagaaggatgcgaagcttggaagccggtggagaagaattacatgaaggaaacagcagcatccactaatcgataccatgcgattgacggctttcggcgaagatatgccgcaaggctccgggctaagtctcgtgtactgccgtcgctaccctctccgtcctctccttcctctccagaaatctcgtggggggagtcccctaccttacgtgagcgcaagagagactcccacttgcaagactcttatctcacggaggagttcaaaatcgcagactgcaatagtgagacagtgatcgaggaccatcatcaatgcgactcatccgacgatgtgccgagctttgacgtaccgaatttggacgcctactcacgtctcgaagaagcttggagtgagaacaaaacggtatcgtccttcaaatacgataatattcggatagatagtgcggtcgggttgcg

SEQ ID NO: 4077 - DNA, 525 bp, Muscodor strobelii
  misc_feature: SGI cDNA ID NO. 561035
  misc_feature: Encodes the peptide sequence at SEQ ID NO 4078
atgaagtccttcgccattcttggcctcctggccgctggtgttctcgctgctcccatcaaggtaaacacaaaagctgcccctcgcgcttatgattacgaggacgatgcattcaggtactctgacaacatcgacaacgcagtcgatgtagtagagcaacgccgagacgttgactacgaagatgacgccttccgttacacggacaaaattgacaatgcctcggacatcatcgagcgccgggctacagactacgaagatgatgcctttcgctacacggacaacatcgacaacgcaagcgacatcattgagcccaagccatcacgggctgcagctgtaaaggacgccgacagcttcaactactccaacaacattgacaatgcggctgctgtcagggagaccgatagttacaactactccaataacatcgacaatgcggttgctgtcaagaaggcaaagcctaccaagctcaagagctgggagcacattgtaactgatgcggatggcaagtcttttctggtccacgattga

SEQ ID NO: 4078 - protein, 174 aa, Muscodor strobelii
  misc_feature: SGI Peptide ID NO. 561035
MKSFAILGLLAAGVLAAPIKVNTKAAPRAYDYEDDAFRYSDNIDNAVDVVEQRRDVDYEDDAFRYTDKIDNASDIIERRATDYEDDAFRYTDNIDNASDIIEPKPSRAAAVKDADSFNYSNNIDNAAAVRETDSYNYSNNIDNAVAVKKAKPTKLKSWEHIVTDADGKSFLVHD

SEQ ID NO: 4079 - DNA, 257 bp, Muscodor strobelii
  misc_feature: SGI EST ID NO. CUFF.10193.0
  misc_feature: Variant of the nucleotide sequence at SEQ ID NO 4077
acagactacgaagatgatgcctttcgctacacggacaacatcgacaacgcaagcgacatcattgagcccaagccatcacgggctgcagctgtaaaggacgccgacagcttcaactactccaacaacattgacaatgcggctgctgtcagggagaccgatagttacaactactccaataacatcgacaatgcggttgctgtcaagaaggcaaagcctaccaagctcaagagctgggagcacattgtaactgatgcgga

SEQ ID NO: 4080 - DNA, 942 bp, Muscodor strobelii
  misc_feature: SGI cDNA ID NO. 561036
  misc_feature: Encodes the peptide sequence at SEQ ID NO 4081
atgaaggccttcgaagatatcagtcaacttctcggcgtcagaaggacgtcgtatcaagaagtcggctcatcagaggacctgcttgagaaaagcgatcaaagtcccgacttcgagacataccgagctgccgttgccgcttcatacaggagacttacggcactcctgtccggcgctgtcgtactcctcgctaccgggctcgtgatatcacttctcacgcggaagccgaccgatgcacagtgcggcgctcaactgagcatttggtctcctgcgattgaggcggttgagtatcaactgtgggaaccaaataatgcttttgcacacaagtcacagtatcggggtccgcctacgccggagcttgagtcggcgtggacggacctgtggctgcatgggagcatccgatttccagaggacaagcttcacctgatcaacagaacggtagatcttgggaacaacaggacgctcaagtcatggcatgacggaaagggtggctatcacggccaacttgaagttcatcaccaattgcactgccttaatctcatacgacagtacacatggcgcgattggtacaagcgccaccctaacatcgtgcgcacatctggcgatatgttgtcctcggatattgaggcgcgtatgcacgctgatcactgcattgaggcgctcaggatagccctcatgtgccacgctgacacgacgccgtcgattggcatattggacccaaaagcgcctcgtggccaaatggcagatttcagtcccctgatgaagtgtcgaaacttcgacaggatacaggagtggtctgttgagaatcagcaaaattttcctccggcgtgggactggaagcctagaaagaagaagcctggtaaaggagagaagaaacctggaaataaggcagaggatgaggcagagggccataatggacatgatgggcacctccactcaatatga

SEQ ID NO: 4081 - protein, 313 aa, Muscodor strobelii
  misc_feature: SGI Peptide ID NO. 561036
  misc_feature (14)..(275): NCBI GI: 149211095 Blast Desc: MGCH7_ch7g1010 [Magnaporthe grisea 70-15] gi|86196965|gb|EAQ71603.1| MGCH7_ch7g1010 [Magnaporthe grisea 70-15]
  misc_feature (14)..(268): NCBI GI: 39969269 Blast Desc: [Magnaporthe grisea 70-15] gi|145012024|gb|EDJ96680.1| [Magnaporthe grisea 70-15]
  misc_feature (52)..(267): NCBI GI: 156033121 Blast Desc: SS1G_13636 [Sclerotinia sclerotiorum 1980] gi|154699039|gb|EDN98777.1| SS1G_13636 [Sclerotinia sclerotiorum 1980]
  misc_feature (12)..(264): NCBI GI: 238490180 Blast Desc: conserved [Aspergillus flavus NRRL3357] gi|220696740|gb|EED53081.1| conserved [Aspergillus flavus NRRL3357]
  misc_feature (70)..(268): NCBI GI: 67902778 Blast Desc: AN8376.2 [Aspergillus nidulans FGSC A4] gi|40747740|gb|EAA66896.1| AN8376.2 [Aspergillus nidulans FGSC A4] gi|259484308|tpe|CBF80416.1| TPA: [Aspergillus nidulans FGSC
  misc_feature (58)..(266): NCBI GI: 242215559 Blast Desc: POSPLDRAFT_130143 [Postia placenta Mad-698-R] gi|220727314|gb|EED81237.1| POSPLDRAFT_130143 [Postia placenta Mad-698-R]
  misc_feature (53)..(268): NCBI GI: 145603890 Blast Desc: MGG_14184 [Magnaporthe grisea 70-15] gi|145012023|gb|EDJ96679.1| MGG_14184 [Magnaporthe grisea 70-15]
  misc_feature (60)..(267): NCBI GI: 242207340 Blast Desc: [Postia placenta Mad-698-R] gi|220731553|gb|EED85397.1| [Postia placenta Mad-698-R]
  misc_feature (60)..(267): NCBI GI: 242211074 Blast Desc: [Postia placenta Mad-698-R] gi|220729542|gb|EED83414.1| [Postia placenta Mad-698-R]
  misc_feature (51)..(265): NCBI GI: 212533739 Blast Desc: conserved [Penicillium marneffei ATCC 18224] gi|210072390|gb|EEA26479.1| conserved [Penicillium marneffei ATCC 18224]
MKAFEDISQLLGVRRTSYQEVGSSEDLLEKSDQSPDFETYRAAVAASYRRLTALLSGAVVLLATGLVISLLTRKPTDAQCGAQLSIWSPAIEAVEYQLWEPNNAFAHKSQYRGPPTPELESAWTDLWLHGSIRFPEDKLHLINRTVDLGNNRTLKSWHDGKGGYHGQLEVHHQLHCLNLIRQYTWRDWYKRHPNIVRTSGDMLSSDIEARMHADHCIEALRIALMCHADTTPSIGILDPKAPRGQMADFSPLMKCRNFDRIQEWSVENQQNFPPAWDWKPRKKKPGKGEKKPGNKAEDEAEGHNGHDGHLHSI

SEQ ID NO: 4082 - DNA, 1569 bp, Muscodor strobelii
  misc_feature: SGI cDNA ID NO. 561037
  misc_feature: Elevated expression when VOC is produced
  misc_feature: Encodes the peptide sequence at SEQ ID NO 4083
atggcgaaccacattggatatctgctgttgggtggaattgccctgggtgcaggctatacattgtgtctcgttgtatatcggatattcttccacccgctcgccaaatatcccggtccgctgctggcgaagatcacggacgcccaccagctttaccatgcatggaaaggagatcgccatctcgaatactggcgcatgcatgagcgctacggaaaaatcgtgcgattcggacccaatagtctatcgttcaactccaatggcgcactaaaggacatctacggcttcaagtccaatgtgcgcaaagccgcattctacgatgcattcgcgcatcccgtcccgaacacgcacaacactcgcgacaagaccattcacgctcggaagcgtcgtgtgttatcgcaagcgttctcggacgcgtcgatgaaggagatggagcgctatgtcctagccaatgtccgatcattctgtgagcaaattggtatgggtgcgagcgatgaccgcaaaggatggactgtcgcgaaaaatatgtccgattggtgtaattacctcgctttcgatattttgggcgatctctgttttgggaaggcattccatatgctcgagatgtctgataatcggtatgtgctggacctcatatcgcttgctaccacgaggcatcttatttgcggaacaatgcgcctagtagagaagctccatctagacccctttctcttccccaagatcgccagcggacgggcaaagtatatggcatacagcagaggccaactcgagcgccgcaccaagcttggcgacgacacagaccgacgagatttcttctaccatctactcaaagcgcgtgatcccgaaacgggccaaggtttcgccacgccagaactctgggcagagtccaatctcttgatcatcgccggctcagacacgacttccacctctatcgccgcgacaatcttctacttagttcggaaccccactgctttgcaaaaagtgactgatgagattagaagtacgtttacggatgtagaagaaatccataatggatcacagctcaactcctgtcattacctccgcgcctgtatcgacgaagctatgcgtcttacgcccgccgttggcggaatcgcaccacgagaggtactgccgggcggcataacgatcgacggagaattcatccccgagggaatcgtagtagggacgccacactacacaatccatcacaaccctctctactatccgcagcccttcctatactcgcccgagcggtggatcaccggatcctccgcaccctcaaagatgtccggagacccagtcacggagcgcgatgtcactgtagcacaatccgcattctgcccattctcagtcggaccgaggggttgtattgggaagggattggcgtacatagagatgagcactacgttggcgaggacgttgtttttgtacgatatgaggaaagctcccgggtttgatcctgcggagggcagaaaggagttgggttggggtagacatagggagagcgagtatcagactattgatcagttcactagtcttaaggatgggcctatggttgagtttcggaggcgttga

SEQ ID NO: 4083 - protein, 522 aa, Muscodor strobelii
  misc_feature: SGI Peptide ID NO. 561037
  misc_feature (32)..(505): Pfam Id: PF00067 Pfam Desc: Cytochrome P450
  misc_feature (255)..(472): Pfam Id: PF00067 Pfam Desc: Cytochrome P450
  misc_feature (19)..(521): NCBI GI: 46123381 Blast Desc: FG06068.1 [Gibberella zeae PH-1]
  misc_feature (8)..(522): NCBI GI: 145608110 Blast Desc: MGG_03375 [Magnaporthe grisea 70-15] gi|145015610|gb|EDK00100.1| MGG_03375 [Magnaporthe grisea 70-15]
  misc_feature (2)..(522): NCBI GI: 85092131 Blast Desc: NCU06895 [Neurospora crassa OR74A] gi|28920645|gb|EAA30006.1| conserved [Neurospora crassa OR74A]
  misc_feature (19)..(522): NCBI GI: 171678814 Blast Desc: protein product [Podospora anserina] gi|170937477|emb|CAP62135.1| protein product [Podospora anserina]
  misc_feature (9)..(522): NCBI GI: 154313085 Blast Desc: BC1G_05544 [Botryotinia fuckeliana B05.10] gi|150849629|gb|EDN24822.1| BC1G_05544 [Botryotinia fuckeliana B05.10]
  misc_feature (14)..(426): NCBI GI: 116206096 Blast Desc: CHGG_02341 [Chaetomium globosum CBS 148.51] gi|88182938|gb|EAQ90406.1| CHGG_02341 [Chaetomium globosum CBS 148.51]
  misc_feature (1)..(522): NCBI GI: 156062766 Blast Desc: SS1G_01499 [Sclerotinia sclerotiorum 1980] gi|154696835|gb|EDN96573.1| SS1G_01499 [Sclerotinia sclerotiorum 1980]
  misc_feature (8)..(522): NCBI GI: 169603764 Blast Desc: SNOG_04890 [Phaeosphaeria nodorum SN15] gi|111066161|gb|EAT87281.1| SNOG_04890 [Phaeosphaeria nodorum SN15]
  misc_feature (10)..(522): NCBI GI: 119194053 Blast Desc: CIMG_01401 [Coccidioides immitis RS]
  misc_feature (10)..(522): NCBI GI: 240105464 Blast Desc: Cytochrome P450 family protein [Coccidioides posadasii C735 delta SOWgp]
  misc_feature (33)..(493): SWISSPROT Homolog: EC 1.14.13.12 Benzoate 4-monooxygenase
  misc_feature: Useful for introducing or modulating the production of volatile compounds
MANHIGYLLLGGIALGAGYTLCLVVYRIFFHPLAKYPGPLLAKITDAHQLYHAWKGDRHLEYWRMHERYGKIVRFGPNSLSFNSNGALKDIYGFKSNVRKAAFYDAFAHPVPNTHNTRDKTIHARKRRVLSQAFSDASMKEMERYVLANVRSFCEQIGMGASDDRKGWTVAKNMSDWCNYLAFDILGDLCFGKAFHMLEMSDNRYVLDLISLATTRHLICGTMRLVEKLHLDPFLFPKIASGRAKYMAYSRGQLERRTKLGDDTDRRDFFYHLLKARDPETGQGFATPELWAESNLLIIAGSDTTSTSIAATIFYLVRNPTALQKVTDEIRSTFTDVEEIHNGSQLNSCHYLRACIDEAMRLTPAVGGIAPREVLPGGITIDGEFIPEGIVVGTPHYTIHHNPLYYPQPFLYSPERWITGSSAPSKMSGDPVTERDVTVAQSAFCPFSVGPRGCIGKGLAYIEMSTTLARTLFLYDMRKAPGFDPAEGRKELGWGRHRESEYQTIDQFTSLKDGPMVEFRRR

SEQ ID NO: 4084 - DNA, 1959 bp, Muscodor strobelii
  misc_feature: SGI EST ID NO. CUFF.10402.0
  misc_feature: Variant of the nucleotide sequence at SEQ ID NO 4082
gaattcccttcgatttattgtcatttttgtctttgtgtgaaaatggcggattgaatctgctaagctgtggcagctgaaagaggtttttgggaacgtcacacggttcacggctgagccatcgaagataaccacaacccttgaggtgacgcgattgcgacagggaattgatactcattttattttaccattgtcaaccgtcgcagtgagctgcaggacataagcaagacgagacgacatggcgaaccacattggatatctgctgttgggtggaattgccctgggtgcaggctatacattgtgtctcgttgtatatcggatattcttccacccgctcgccaaatatcccggtccgctgctggcgaagatcacggacgcccaccagctttaccatgcatggaaaggagatcgccatctcgaatactggcgcatgcatgagcgctacggaaaaatcgtgcgattcggacccaatagtctatcgttcaactccaatggcgcactaaaggacatctacggcttcaagtccaatgtgcgcaaagccgcattctacgatgcattcgcgcatcccgtcccgaacacgcacaacactcgcgacaagaccattcacgctcggaagcgtcgtgtgttatcgcaagcgttctcggacgcgtcgatgaaggagatggagcgctatgtcctagccaatgtccgatcattctgtgagcaaattggtatgggtgcgagcgatgaccgcaaaggatggactgtcgcgaaaaatatgtccgattggtgtaattacctcgctttcgatattttgggcgatctctgttttgggaaggcattccatatgctcgagatgtctgataatcggtatgtgctggacctcatatcgcttgctaccacgaggcatcttatttgcggaacaatgcgcctagtagagaagctccatctagacccctttctcttccccaagatcgccagcggacgggcaaagtatatggcatacagcagaggccaactcgagcgccgcaccaagcttggcgacgacacagaccgacgagatttcttctaccatctactcaaagcgcgtgatcccgaaacgggccaaggtttcgccacgccagaactctgggcagagtccaatctcttgatcatcgccggctcagacacgacttccacctctatcgccgcgacaatcttctacttagttcggaaccccactgctttgcaaaaagtgactgatgagattagaagtacgtttacggatgtagaagaaatccataatggatcacagctcaactcctgtcattacctccgcgcctgtatcgacgaagctatgcgtcttacgcccgccgttggcggaatcgcaccacgagaggtactgccgggcggcataacgatcgacggagaattcatccccgagggaatcgtagtagggacgccacactacacaatccatcacaaccctctctactatccgcagcccttcctatactcgcccgagcggtggatcaccggatcctccgcaccctcaaagatgtccggagacccagtcacggagcgcgatgtcactgtagcacaatccgcattctgcccattctcagtcggaccgaggggttgtattgggaagggattggcgtacatagagatgagcactacgttggcgaggacgttgtttttgtacgatatgaggaaagctcccgggtttgatcctgcggagggcagaaaggagttgggttggggtagacatagggagagcgagtatcagactattgatcagttcactagtcttaaggatgggcctatggttgagtttcggaggcgttgaggaggggataggagaataagggaatggcatggcggtgtgatggtgttttgtattgttgttggtgtctaaggacacctagattgatcattggttgaacataaaatgctatgttcatttggaacaaagttcgtgctattgactgtgataagttgcag

SEQ ID NO: 4085 - DNA, 1308 bp, Muscodor strobelii
  misc_feature: SGI cDNA ID NO. 561038
  misc_feature: Encodes the peptide sequence at SEQ ID NO 4086
atgaaaattgtcaacagagttgtcgaacagctcaaaagcgctcagaaacgggtacgagagctcgaagcagagaatgcaaagcttcaactagagaaccgaaaactacgcgcgtcagttgcgaactgcatcacgccaacttctccgcgctgtactactaaggctctgatcaaggccatacctagtcatgctcaacctacggcgtcttctctggcaaagtgccacaacaccaaagaaagcaagaaacccattccagcaacagatccggtgatcattatcaacaacgtcaagtgtcggtacgaggacggcgtactcactgaacttgcatgtaactcggaagatgacgggtcaggagtctggattctggctcggaagaactacatgagcgatacgaccgcaagctacaatcgggattccgagagaaaacatgagagatacgaacagagccgggaaaggcaacatttattggagcaacggatcgactatgatccacttccatcacctgtttctccgccatggccatgcaaccccacgcccgccgaggagcccgattatgaggccatagcccgggccgaggctgagctccgctgggaagaacacgagagattgtggttgttagaaaaaaagcttctctcagagcacgatgtacccaatttggacgtattctcccgcttcgacgaggactgggacaaaactccaacattctcctcgctcaagttcccggacgatcctcgcataagcagcgtaaaaggatttcaaatgctgcgtcatgccatgacactgattcaggaaattcttcatccatttctacagaatcgctgtgagtggttccgtgacagtgctgggcctcatgtcattcgacttgggcggaacgaactacagcgctatgttaccgagacagcccaagactggctggctatcaatggccatagtgcatgtgctgttcattacgctattatggacttgccttacctccgtaacgctgtgtcacatcccggacaatatgaactctcctcaccctgtcacttggaccaatacctcaagttcgcgcaaaaagtagcgttcatcttgagggacttcgagaggacgatggaaatcaggagaatgcgggatgagcttatttccggcataagcgcgaccgacaagcaacttgagaatatctgtggctttgctgcagtagcgttttccgggaacatggagtttgaccagcatctttgggatatcctcgagcgttcactaatgtcgtcgaatccaaaggacattgtggtgcacaatagtgcacacgctctttggtggcataggccatcctaa

SEQ ID NO: 4086 - protein, 435 aa, Muscodor strobelii
  misc_feature: SGI Peptide ID NO. 561038
MKIVNRVVEQLKSAQKRVRELEAENAKLQLENRKLRASVANCITPTSPRCTTKALIKAIPSHAQPTASSLAKCHNTKESKKPIPATDPVIIINNVKCRYEDGVLTELACNSEDDGSGVWILARKNYMSDTTASYNRDSERKHERYEQSRERQHLLEQRIDYDPLPSPVSPPWPCNPTPAEEPDYEAIARAEAELRWEEHERLWLLEKKLLSEHDVPNLDVFSRFDEDWDKTPTFSSLKFPDDPRISSVKGFQMLRHAMTLIQEILHPFLQNRCEWFRDSAGPHVIRLGRNELQRYVTETAQDWLAINGHSACAVHYAIMDLPYLRNAVSHPGQYELSSPCHLDQYLKFAQKVAFILRDFERTMEIRRMRDELISGISATDKQLENICGFAAVAFSGNMEFDQHLWDILERSLMSSNPKDIVVHNSAHALWWHRPS

SEQ ID NO: 4087 - DNA, 430 bp, Muscodor strobelii
  misc_feature: SGI EST ID NO. CUFF.10202.0
  misc_feature: Variant of the nucleotide sequence at SEQ ID NO 4085
ccgattatgaggccatagcccgggccgaggctgagctccgctgggaagaacacgagagattgtggttgttagaaaaaaagcttctctcagagcacgatgtacccaatttggacgtattctcccgcttcgacgaggactgggacaaaactccaacattctcctcgctcaagttcccggacgatcctcgcataagcagcgtaaaaggatttcaaatgctgcgtcatgccatgacactgattcaggaaattcttcatccatttctacagaatcgctgtgagtggttccgtgacagtgctgggcctcatgtcattcgacttgggcggaacgaactacagcgctatgttaccgagacagcccaagactggctggctatcaatggccatagtgcatgtgctgttcattacgctattatggacttgccttacctccg

SEQ ID NO: 4088 - DNA, 792 bp, Muscodor strobelii
  misc_feature: SGI cDNA ID NO. 561039
  misc_feature: Encodes the peptide sequence at SEQ ID NO 4089
atgctcccagtcattgtcctcatcggcggaaccgcctcaggcaagggcacatttggctctcgcttggcagcggacttcaacatgaaacatatctccctcggcgatgtttatagggctatcgtcgctaaactgagtacaggtcacatagcaggtatgccagaagcagtcaataattgcatactccaccacattgaaacccccaatgagctgctcatgtcgttccagcctatacccgcgatactccaggtccacaactctatctgtcggggcgaggacaactggcgatgcggtcccatccttctgcgcgaagagctcgccgcaccagtggttcccggtggcccatgcgctatcattgtggacggactcggccacggaattggacgatttggtgcatccggcttcgagttcgatgatatggccaagatggtcccgccgttgtcgttctcgggactagtgcttaggccagttgtcccgtacgaattggcgaaaaagcggtatatggctcgcgctcgcaagggaagcagtaaggcggcgttcgagaagcgcacacagttttatgagctttttctccatgaattcattaagtacctacaaggtgagaaccatactatcgtgaacttccttaacgacgatactatgtcatttgatgaagcataccaggctctgcttcggaagctaatcgtgattccggcatggcgatcaatgattagcttcgaaaacgatagcgtcaaggtagaacgaccagcagctatgccttcatcttcatcgcaggctctacaggtgacgttgtga

SEQ ID NO: 4089 - protein, 263 aa, Muscodor strobelii
  misc_feature: SGI Peptide ID NO. 561039
MLPVIVLIGGTASGKGTFGSRLAADFNMKHISLGDVYRAIVAKLSTGHIAGMPEAVNNCILHHIETPNELLMSFQPIPAILQVHNSICRGEDNWRCGPILLREELAAPVVPGGPCAIIVDGLGHGIGRFGASGFEFDDMAKMVPPLSFSGLVLRPVVPYELAKKRYMARARKGSSKAAFEKRTQFYELFLHEFIKYLQGENHTIVNFLNDDTMSFDEAYQALLRKLIVIPAWRSMISFENDSVKVERPAAMPSSSSQALQVTL

SEQ ID NO: 4090 - DNA, 495 bp, Muscodor strobelii
  misc_feature: SGI cDNA ID NO. 561040
  misc_feature: Encodes the peptide sequence at SEQ ID NO 4091
atggatactacacgcttcggtcggctggcccgcaagctcctggccctccgcgacgacgacaagtgccacccgacccccgacagcaacgtctgcgagcacaacgccacatccggcgcttccaccggtatcactattggtgccatcgctgggagcatcgtattcgtagtcctcgtggtgctcctcgtcctccacttccgccggaagcgcatggacgagaaggagtggcccaagaacaaccaagaactcgacgactacggctacgtcaccggtcccgagcccacacgccgaacacaaaacaacaataattaccagcctgacagattccagcaccacggcgacatggaggaaggcataggcgccaccaagcctgctgcgcgcggctcgctcgatgacctacagagatcgcttcgcggccacactacgagtgctttcaagcgccacgacgacgatgtccccatcgacataaagcccgccatgccttcggatcggatatga

SEQ ID NO: 4091 - protein, 164 aa, Muscodor strobelii
  misc_feature: SGI Peptide ID NO. 561040
  misc_feature (3)..(106): NCBI GI: 171679824 Blast Desc: protein product [Podospora anserina] gi|170939538|emb|CAP64765.1| protein product [Podospora anserina]
  misc_feature (19)..(87): NCBI GI: 85074552 Blast Desc: NCU04558 [Neurospora crassa OR74A] gi|28916760|gb|EAA26526.1| [Neurospora crassa OR74A]
MDTTRFGRLARKLLALRDDDKCHPTPDSNVCEHNATSGASTGITIGAIAGSIVFVVLVVLLVLHFRRKRMDEKEWPKNNQELDDYGYVTGPEPTRRTQNNNNYQPDRFQHHGDMEEGIGATKPAARGSLDDLQRSLRGHTTSAFKRHDDDVPIDIKPAMPSDRI

SEQ ID NO: 4092 - DNA, 2300 bp, Muscodor strobelii
  misc_feature: SGI EST ID NO. CUFF.11103.1
  misc_feature: Variant of the nucleotide sequence at SEQ ID NO 4090
gctgatggcgaattactacaggcgacgtgcagtggaaggcgcagcctacgaaagcttgaaattgcttgaaatgccttcgtatcgaggcacatcaggcgcaattcagggtcatcgtcgacagtggaaggggaaagtaccatcggcagtcacaggtgcaattggctcggaactgacctcattctctctctgactctccgactctgcctcctccctttcttctgtcacccaccacgactcaaacacgcctaccacccacccttccagcagactgtcttctttcagtttcctcaccccatcgctcatcattgtcactctgtcactcgtttacatttcaacgtttcaataattgacttgcagccttcttctctactgctttttgcatcttccgacccatccgacctctatcgacttgttcgcatccattcgtccccaccggtatcccttcgcttataccgccttcgccctcgacgccgacaacaacaacacctatcgcgtcctccctttgccatactccctttaatctacgcgaacacgcgccctcgacacaacatatcggacaccagcgaagcttagagagaaggacagagcacgagtagggaggattataatcagtttcttggcagtctggagtggattcgaagaatcaaatcttgtcgatcatctgcgctagaaatatacttgaatgatggatactacacgcttcggtcggctggcccgcaagctcctggccctccgcgacgacgacaagtgccacccgacccccgacagcaacgtctgcgagcacaacgccacatccggcgcttccaccggtatcactattggtgccatcgctgggagcatcgtattcgtagtcctcgtggtgctcctcgtcctccacttccgccggaagcgcatggacgagaaggagtggcccaagaacaaccaagaactcgacgactacggctacgtcaccggtcccgagcccacacgccgaacacaaaacaacaataattaccagcctgacagattccagcaccacggcgacatggaggaaggcataggcgccaccaagcctgctgcgcgcggctcgctcgatgacctacagagatcgcttcgcggccacactacgagtgctttcaagcgccacgacgacgatgtccccatcgacataaagcccgccatgccttcggatcggatatgatcagagcccgatgcgctatgagccgggaccgaggggaggattgtttgatgtttatgtgaagccggcgtttgatcacgacattgcgattgcggtgtattgtcattctgacgatatcgatcgggcgttatatcgtttgcctttcttacccgtatacggcttgaatcgcattgcctgcacttgaattttctgcattggtcgaggatggggcataggttgaagtgagcgtggaagttcaaggtcgagacagtgcttgagaggatctatcaggcccaactgagcactgtgtcgtagctccatctcgtccctaaaaattcccgggaagaaaaattgcattgcactgcgcattacaagaataatctgctactactgggattcagtgtgtcatatgtctgtgcgacgagctagggtaatggaacttgtcggctggtgccgtatgagacacgccagggagcaagacacgagacgatgcagtaagaagagaagaagaaaacatgttaaaagttcattacttatgtgtggcgttagtgaagttgtgagcatgcgaccaagaatattgaataactaagtcaatcgtggtaggcaaaggcagcactgaccgcgaataagttttagcgactaaccgttccgtgcctttgaccatccgtcaccgacatctcaaaagaccccgcgaactcaaatctagccacgccaagactgttggtcacgacggcctagacggcacgtggctgaaactccgaccctaaagttccggaaactaggccaatatctccctcgacactgttccagctcagacattgtttcaacaccacgattacggccggcaaactcaattggcaggacctcgcgtggcatgcatccatgtcagaaacggcacgcagatgttaacgggcgccgcccggtctggaatcagccacctgggcttgggagcagtatctcgcgagaacatcctcaaacatggctgctgtgtcacttcaaaaaagcgcattcgcagtggactgaggcattgtgtaagaaggcaattgcgagagcgaagatactcgaatatcacaccttttgaagaatataaatcctccagcatgtcccgtcatttctcatggtaacggctggtcctccagcatcg

SEQ ID NO: 4093 - DNA, 2310 bp, Muscodor strobelii
  misc_feature: SGI cDNA ID NO. 561041
  misc_feature: Reduced expression when VOC is produced
  misc_feature: Encodes the peptide sequence at SEQ ID NO 4094
atggccacaatagctcccgtcaatcttacacctggtgtggcagttggcgcagcacccatgccctcccaggcaatatccgaaaatgagaaggagtggccattggatgtcaaagaggtccccatcccaatctttgatactggtgttttcatcacagaaatgattaacaaagaaatgctacccgagaagttcgatactcctcttacagacgaggaaaaatccgccattcgaaacaacccggaagacgttctcctagaaaaagcaaggaatgatggcaaccgcgctaatcagctggtagagggtacatatcgtgggacccagcttgcgctgactaagatatacgacctcgtcgagaagaaatatgggtctttcatggacacggccaatttcgagccaactgtgccatcgccgctcgatcttgagcagaaaaagaggttcttccagttcgccgacgacaaatatcccccacatctcaatctcgcagccaatcaaggtgcaaatgccgatgtccctaaaattcagggatcgtctctggatacgggtgacctattcaacaagcttcgtctcgcccagctgactgccttgattccccaagttgtgcccaagaaattcatcttcggagttgatgttgctaaaatcggggctaaagctggacagctagctgccgaggccgtgcttggtgaaatgggcacccccgacaaggggactcgaatcgccgacgtagaagaatataacaagaaacggagtgatgagtgtttccgaaaggatatcttcaacttgccaaacattgggaatctgccggattggtactccgatgctcgatttgctcagcagttcttcactggcaccaacccgaccacaatcgagaaggccggagattggatccggatcttcattgatgcggcaacgcaccctgaggacaaagccatgaaagcaaagattagcgagcgagctaaggattcccctggctccctctacgtccaggattacagctacatccggaaggccgcagggatgggtaaaactgacaacatgcagtgctcattcactgagacgtatgaggacaaaggcaagactaaagagaagacttcttaccgatatggtgttgctgctgtgtgccttttcaacctgacagacgatggcaaactcgagcctctggctatcattatcgactggcgcggtagcgcgaaagactcggtattcatctacaaccgggagctcaatactgtcaagcaagagacagactggccttggcgctatgccaaaacctgtgttcagagcagtgactggattcgtcacaacctcaccgttcacctgactaggactcatctgatcgaagaatcagtcatcgttgcggctaaccgaactcttccccaaaatcatgatgttttccagctcctctaccctcattggcagaagacattgtctctcaacgcggcagctaggagtgtgctgataccctacgtcatcgtcccactcatcggcatggaagatcctaacgcgtatcaatacatcaagtcggaatacgcctctttcgatttcatgggatcttacatcccggaggacctgcgacgccggggctttgcccccgacaagatcaatgaaagaaagtatcacaactacgcctgggctcgttgcatcctcagcatgtggttcaagatccgccgatatgtcaaagccatgctactcctgaagtacaccggtcaagacccggacctacaggtccgtgaggacgaatgcgtgcagaattggtccaaagaaatgcgggcacccgtcgacaatattcgaggcaatggtgccaacatctctactttcccgcagttcaagactcttgacgacctgatcgacgccgtgaccatgtgcatccacatcgcatcaccacaacacacatcagtcaactacttacagaattactaccaagcattcgtcatcaataagcctccctgtctctacgctcctccaccaaccacccgggagaagctactgggatacaccgagtccgacctcgtggccgcgcttcccatgaaccacacacatgactggcttctagcatctcacataccttacttgttgtcattcaagccaggcgacaaggaatcgctgatcatatatgctgcgtccaagtaccacgtgtataagttcaagaaagacgacaaggatcaggcgatcgctgatgctgcggcgaaattttacatggagctcgcggagagcgagctggagttcaagaagtttggagaggatacggatgattgtaaagagattgtgtataatgttctcagtcccagctggaacgctgttagtatcttgatttga

SEQ ID NO: 4094 - protein, 769 aa, Muscodor strobelii
  misc_feature: SGI Peptide ID NO. 561041
  misc_feature (134)..(761): Pfam Id: PF00305 Pfam Desc: Lipoxygenase
  misc_feature (414)..(485): Pfam Id: PF00305 Pfam Desc: Lipoxygenase
  misc_feature (605)..(658): Pfam Id: PF00305 Pfam Desc: Lipoxygenase
  misc_feature (7)..(769): NCBI GI: 159122913 Blast Desc: lipoxygenase, [Aspergillus fumigatus A1163]
  misc_feature (7)..(769): NCBI GI: 70982632 Blast Desc: lipoxygenase [Aspergillus fumigatus Af293] gi|66844468|gb|EAL84806.1| lipoxygenase, [Aspergillus fumigatus Af293]
  misc_feature (7)..(769): NCBI GI: 119488540 Blast Desc: lipoxygenase, [Neosartorya fischeri NRRL 181] gi|119410878|gb|EAW20823.1| lipoxygenase, [Neosartorya fischeri NRRL 181]
  misc_feature (33)..(769): NCBI GI: 21622514 Blast Desc: related to lipoxygenase 1 [Neurospora crassa]
  misc_feature (13)..(769): NCBI GI: 256723686 Blast Desc: NECHADRAFT_72762 [Nectria haematococca mpVI 77-13-4]
  misc_feature (86)..(765): NCBI GI: 154290374 Blast Desc: BC1G_15741 [Botryotinia fuckeliana B05.10] gi|150847763|gb|EDN22956.1| BC1G_15741 [Botryotinia fuckeliana B05.10]
  misc_feature (33)..(769): NCBI GI: 116198509 Blast Desc: CHGG_07410 [Chaetomium globosum CBS 148.51] gi|88178689|gb|EAQ86157.1| CHGG_07410 [Chaetomium globosum CBS 148.51]
  misc_feature (33)..(769): NCBI GI: 85089931 Blast Desc: NCU04621 [Neurospora crassa OR74A] gi|28919510|gb|EAA28941.1| NCU04621 [Neurospora crassa OR74A]
  misc_feature (15)..(769): NCBI GI: 56682225 Blast Desc: lipoxygenase [Gibberella moniliformis]
  misc_feature (40)..(704): NCBI GI: 156050771 Blast Desc: SS1G_07973 [Sclerotinia sclerotiorum 1980] gi|154692373|gb|EDN92111.1| SS1G_07973 [Sclerotinia sclerotiorum 1980]
  misc_feature (268)..(698): SWISSPROT Homolog: EC 1.13.11.33 Arachidonate 15-lipoxygenase
  misc_feature: Useful for introducing or modulating the production of volatile compounds
MATIAPVNLTPGVAVGAAPMPSQAISENEKEWPLDVKEVPIPIFDTGVFITEMINKEMLPEKFDTPLTDEEKSAIRNNPEDVLLEKARNDGNRANQLVEGTYRGTQLALTKIYDLVEKKYGSFMDTANFEPTVPSPLDLEQKKRFFQFADDKYPPHLNLAANQGANADVPKIQGSSLDTGDLFNKLRLAQLTALIPQVVPKKFIFGVDVAKIGAKAGQLAAEAVLGEMGTPDKGTRIADVEEYNKKRSDECFRKDIFNLPNIGNLPDWYSDARFAQQFFTGTNPTTIEKAGDWIRIFIDAATHPEDKAMKAKISERAKDSPGSLYVQDYSYIRKAAGMGKTDNMQCSFTETYEDKGKTKEKTSYRYGVAAVCLFNLTDDGKLEPLAIIIDWRGSAKDSVFIYNRELNTVKQETDWPWRYAKTCVQSSDWIRHNLTVHLTRTHLIEESVIVAANRTLPQNHDVFQLLYPHWQKTLSLNAAARSVLIPYVIVPLIGMEDPNAYQYIKSEYASFDFMGSYIPEDLRRRGFAPDKINERKYHNYAWARCILSMWFKIRRYVKAMLLLKYTGQDPDLQVREDECVQNWSKEMRAPVDNIRGNGANISTFPQFKTLDDLIDAVTMCIHIASPQHTSVNYLQNYYQAFVINKPPCLYAPPPTTREKLLGYTESDLVAALPMNHTHDWLLASHIPYLLSFKPGDKESLIIYAASKYHVYKFKKDDKDQAIADAAAKFYMELAESELEFKKFGEDTDDCKEIVYNVLSPSWNAVSILI

SEQ ID NO: 4095 - DNA, 2499 bp, Muscodor strobelii
  misc_feature: SGI EST ID NO. CUFF.11106.0
  misc_feature: Variant of the nucleotide sequence at SEQ ID NO 4093
tggccattggatgtcaaagaggtccccatcccaatctttgatactggtgttttcatcacagaaatgattaacaaagaaatgctacccgagaagttcgatactcctcttacagacgaggaaaaatccgccattcgaaacaacccggaagacgttctcctagaaaaagcaaggaatgatggcaaccgcgctaatcagctggtagagggtacatatcgtgggacccagcttgcgctgactaagatatacgacctcgtcgagaagaaatatgggtctttcatggacacggccaatttcgagccaactgtgccatcgccgctcgatcttgagcagaaaaagaggttcttccagttcgccgacgacaaatatcccccacatctcaatctcgcagccaatcaaggtgcaaatgccgatgtccctaaaattcagggatcgtctctggatacgggtgacctattcaacaagcttcgtctcgcccagctgactgccttgattccccaagttgtgcccaagaaattcatcttcggagttgatgttgctaaaatcggggctaaagctggacagctagctgccgaggccgtgcttggtgaaatgggcacccccgacaaggggactcgaatcgccgacgtagaagaatataacaagaaacggagtgatgagtgtttccgaaaggatatcttcaacttgccaaacattgggaatctgccggattggtactccgatgctcgatttgctcagcagttcttcactggcaccaacccgaccacaatcgagaaggccggagattggatccggatcttcattgatgcggcaacgcaccctgaggacaaagccatgaaagcaaagattagcgagcgagctaaggattcccctggctccctctacgtccaggattacagctacatccggaaggccgcagggatgggtaaaactgacaacatgcagtgctcattcactgagacgtatgaggacaaaggcaagactaaagagaagacttcttaccgatatggtgttgctgctgtgtgccttttcaacctgacagacgatggcaaactcgagcctctggctatcattatcgactggcgcggtagcgcgaaagactcggtattcatctacaaccgggagctcaatactgtcaagcaagagacagactggccttggcgctatgccaaaacctgtgttcagagcagtgactggattcgtcacaacctcaccgttcacctgactaggactcatctgatcgaagaatcagtcatcgttgcggctaaccgaactcttccccaaaatcatgatgttttccagctcctctaccctcattggcagaagacattgtctctcaacgcggcagctaggagtgtgctgataccctacgtcatcgtcccactcatcggcatggaagatcctaacgcgtatcaatacatcaagtcggaatacgcctctttcgatttcatgggatcttacatcccggaggacctgcgacgccggggctttgcccccgacaagatcaatgaaagaaagtatcacaactacgcctgggctcgttgcatcctcagcatgtggttcaagatccgccgatatgtcaaagccatgctactcctgaagtacaccggtcaagacccggacctacaggtccgtgaggacgaatgcgtgcagaattggtccaaagaaatgcgggcacccgtcgacaatattcgaggcaatggtgccaacatctctactttcccgcagttcaagactcttgacgacctgatcgacgccgtgaccatgtgcatccacatcgcatcaccacaacacacatcagtcaactacttacagaattactaccaagcattcgtcatcaataagcctccctgtctctacgctcctccaccaaccacccgggagaagctactgggatacaccgagtccgacctcgtggccgcgcttcccatgaaccacacacatgactggcttctagcatctcacataccttacttgttgtcattcaagccaggcgacaaggaatcgctgatcatatatgctgcgtccaagtaccacgtgtataagttcaagaaagacgacaaggatcaggcgatcgctgatgctgcggcgaaattttacatggagctcgcggagagcgagctggagttcaagaagtttggagaggatacggatgattgtaaagagattgtgtataatgttctcagtcccagctggaacgctgttagtatcttgatttgatgggtgttgaaatggttaggcaggctttgaggagaaaatggacgattgggaaaacgccctatactgaccaccagagttggctagccactctatataccatactaccactagtaaccactgtcgggtgcattcgacactcttttatagcgtggctcagtggtatgttctagtatgcgtgtattgtacacgctcattttatggtaaactacgaatacgatgtgtttttcggtcggtcgttataggtcatgtcgtagtgctcatggcatatatatggatattgag

SEQ ID NO: 4096 - DNA, 1056 bp, Muscodor strobelii
  misc_feature: SGI cDNA ID NO. 561042
  misc_feature: Encodes the peptide sequence at SEQ ID NO 4097
atgactgaacgctgccagcgtctcggagtagacatcgtcgggttgctgtcgttcgggcaccagtttaacacacagactcaagaacatttcaggttcttgcccggtataatcgatgcaatgagttggcgtattagcatatacatgcagttcccattgctcagattcttggagactcctctcctgctacttcggaaaaagcaaatgactgagtttggacgcacgattacttctgtcatcaaggcccgcatcgcaaaacccaaggatgcccactacgacctctattccatggtggccgatcttatcgggaaagggcaatacggtctgtatcccggggaactatggcccgaagccattttattcattatagcagggggcaccaccactgcgacagccatgagtgccatgttcttctaccttgcgcaaaacccaacaacgtacgccaagctggcaagtgaaatacgctcgtcattcgcttccgccggtgagatttattccgggcctcacttgacagattgcaaatatctccgagcatgtattgacgaaactctgcgcatggctccgccatcattgactatcctctggcgggaggcggaggcagatcgtaaagaacccttcattgtcgacggccatgtcattccacgtggaacgcaggtaggtgtcagtctctattcactaatgcacaatgccgagtatttcccagaccctttcgtcttctcgccagagcgctggctggaaagacagggcaatgaagactcgctttcaacaatgcgcaaggcctttgcccctttcctcatcggcgatcgagcttgtgctgggcgggccatggcgtatcttgaaatgagtctgacactagcccgcacaatttggttctttgactttgagttcgcaccgggcgaggagggaaatctagggcgtggtgaggttggtcggatagatggaagaggtcggcctgatgagtatcagctagaggacatctttgtcgctgctcatcaggggccgaatctagtctttcgcgaacggggcgacgggtcgaaaatcggagtcgaattccagtaa

SEQ ID NO: 4097 - protein, 351 aa, Muscodor strobelii
  misc_feature: SGI Peptide ID NO. 561042
  misc_feature (1)..(319): Pfam Id: PF00067 Pfam Desc: Cytochrome P450
  misc_feature (11)..(300): Pfam Id: PF00067 Pfam Desc: Cytochrome P450
  misc_feature (40)..(342): NCBI GI: 156056276 Blast Desc: SS1G_05490 [Sclerotinia sclerotiorum 1980] gi|154703274|gb|EDO03013.1| SS1G_05490 [Sclerotinia sclerotiorum 1980]
  misc_feature (46)..(341): NCBI GI: 156060449 Blast Desc: SS1G_02363 [Sclerotinia sclerotiorum 1980] gi|154699771|gb|EDN99509.1| SS1G_02363 [Sclerotinia sclerotiorum 1980]
  misc_feature (11)..(341): NCBI GI: 258572362 Blast Desc: conserved [Uncinocarpus reesii 1704] gi|237905213|gb|EEP79614.1| conserved [Uncinocarpus reesii 1704]
  misc_feature (8)..(340): NCBI GI: 145241738 Blast Desc: An09g02000 [Aspergillus niger] gi|134078055|emb|CAK40138.1| protein product [Aspergillus niger]
  misc_feature (1)..(340): NCBI GI: 242771379 Blast Desc: cytochrome P450, [Talaromyces stipitatus ATCC 10500] gi|218721449|gb|EED20867.1| cytochrome P450, [Talaromyces stipitatus ATCC 10500]
  misc_feature (1)..(340): NCBI GI: 255954725 Blast Desc: Pc21g10830 [Penicillium chrysogenum Wisconsin 54-1255] gi|211589826|emb|CAP95980.1| Pc21g10830 [Penicillium chrysogenum Wisconsin 54-1255]
  misc_feature (1)..(340): NCBI GI: 169611945 Blast Desc: SNOG_09088 [Phaeosphaeria nodorum SN15] gi|160702403|gb|EAT83280.2| SNOG_09088 [Phaeosphaeria nodorum SN15]
  misc_feature (112)..(340): NCBI GI: 189196570 Blast Desc: cytochrome P450 4A5 precursor [Pyrenophora tritici-repentis Pt-1C-BFP] gi|187980502|gb|EDU47128.1| cytochrome P450 4A5 precursor [Pyrenophora tritici-repentis
  misc_feature (1)..(342): NCBI GI: 85092131 Blast Desc: NCU06895 [Neurospora crassa OR74A] gi|28920645|gb|EAA30006.1| conserved [Neurospora crassa OR74A]
  misc_feature (1)..(340): NCBI GI: 145236080 Blast Desc: protein product [Aspergillus niger] gi|134075138|emb|CAK39148.1| protein product [Aspergillus niger]
MTERCQRLGVDIVGLLSFGHQFNTQTQEHFRFLPGIIDAMSWRISIYMQFPLLRFLETPLLLLRKKQMTEFGRTITSVIKARIAKPKDAHYDLYSMVADLIGKGQYGLYPGELWPEAILFIIAGGTTTATAMSAMFFYLAQNPTTYAKLASEIRSSFASAGEIYSGPHLTDCKYLRACIDETLRMAPPSLTILWREAEADRKEPFIVDGHVIPRGTQVGVSLYSLMHNAEYFPDPFVFSPERWLERQGNEDSLSTMRKAFAPFLIGDRACAGRAMAYLEMSLTLARTIWFFDFEFAPGEEGNLGRGEVGRIDGRGRPDEYQLEDIFVAAHQGPNLVFRERGDGSKIGVEFQ

SEQ ID NO: 4098 - DNA, 1749 bp, Muscodor strobelii
  misc_feature: SGI cDNA ID NO. 561043
  misc_feature: Encodes the peptide sequence at SEQ ID NO 4099
atggacgagaacaccaagaccgaggaagcacaacatgtgcatagtcaaacggagcatatcgaggacctttcgcctgtcgaggagttcgtgcatattattggggataatgcagatttgacaataaaagtccaccaaaaggatcccctggaatctttacctgacgtggacggatatgagcccggtactcagatctttaggatcaaccgaaacgccttgattgagacttcgccggttttcaagacaatgctcaccagagagggatttctcgaggcccagagttccgaaataaacctattcgaggatacgggggctacctgtgattccatacatgtcttgcttacggctttgtattgcaagcatatcgccaactcagagactgtagacgaccaattgaacctcaatcgcgaagaggtcgtttatgagataacacctttacacctcttcgagatctgtcagctgatggaagaagtcaagggcagtactcacgtcaactgcaacaggtggcaccggaataaagcggacatgaaagcaattgctcaacttgatcgggaattgactgggtccatcgcctctgactcttcgggcgcgctgtacattgtgacccgacttcgattgattcactgcgcacgagttcttcgaaataccatgttggcaccccgcatagacaatgattcggaacttgtcaatttctacgaaagtctttcaagcaattccatgtctactgacaccacgaacctagcgggagctgaaaacccaaatccttcaacatattttgtgctatcttttcagcaaattcagaacattgtccatgacccatcagggaccggacacagggagcggtttgatgagtgggtcgtgacgcggaatctttggcgtaatcaatacttatatgacggcgtccaaagcacattgctgttcgacaaggaagttgaactcgtgcgcaagcatacgcgacatttgatatccgttaggggacttatcaatctgctcctcgcactacacaagtacatgatcccgacaaaagcgctctcagcttggttcacgcactggttccaggcgtactgggtcaaagtacaagcccacagacagtgcacgagacagggaccgaaacaacgagacagagacttgttgacattggttcatgtatcatataaattcgatcatgcaaaggctttccacgaggtgacgcacaagataagggagctcaacctttcgcgtctcacctatgaagaagataactggtgcaaggaatacgcttttaaatacccaagccagtgggacctagtggtcttcgaacatcgcatcggggagtgccttcgccgctcctatgagccatttgactgtggactttgcctagactgcttcagaatgtctatttatcccttcaacaaacccaacccctcaaagataccgaaagacttgaaagaatgggccaatgacaatatgctagagttcgtccgtagaatgtcctgcgccgcaaatatcgccgacaaaacgatgaccgaaaagttctacggttggaacctgacggagtggctcacttttggttgcagatccccgctacccggctatcatggtacccgaaatgagtcttgggtagatggacgtcgtgtcaaatatcatgagcaccagcgaaatatctaccgcgaagctcgagaacttggctggcagaacctcgctgtagaagaagaatggctgacgtttgccgtcaacgaggcaggatggttaggagtatgcactattgattaa

SEQ ID NO: 4099 - protein, 582 aa, Muscodor strobelii
  misc_feature: SGI Peptide ID NO. 561043
MDENTKTEEAQHVHSQTEHIEDLSPVEEFVHIIGDNADLTIKVHQKDPLESLPDVDGYEPGTQIFRINRNALIETSPVFKTMLTREGFLEAQSSEINLFEDTGATCDSIHVLLTALYCKHIANSETVDDQLNLNREEVVYEITPLHLFEICQLMEEVKGSTHVNCNRWHRNKADMKAIAQLDRELTGSIASDSSGALYIVTRLRLIHCARVLRNTMLAPRIDNDSELVNFYESLSSNSMSTDTTNLAGAENPNPSTYFVLSFQQIQNIVHDPSGTGHRERFDEWVVTRNLWRNQYLYDGVQSTLLFDKEVELVRKHTRHLISVRGLINLLLALHKYMIPTKALSAWFTHWFQAYWVKVQAHRQCTRQGPKQRDRDLLTLVHVSYKFDHAKAFHEVTHKIRELNLSRLTYEEDNWCKEYAFKYPSQWDLVVFEHRIGECLRRSYEPFDCGLCLDCFRMSIYPFNKPNPSKIPKDLKEWANDNMLEFVRRMSCAANIADKTMTEKFYGWNLTEWLTFGCRSPLPGYHGTRNESWVDGRRVKYHEHQRNIYREARELGWQNLAVEEEWLTFAVNEAGWLGVCTID

SEQ ID NO: 4100 - DNA, 1143 bp, Muscodor strobelii
  misc_feature: SGI cDNA ID NO. 561044
  misc_feature: Encodes the peptide sequence at SEQ ID NO 4101
atgaagaattcaagaggagataacatcgtttatgctggtgcaaactgggatggacatagtgaagttatgataccggatggcttgcagtatcagtcaattgcgactcttgtgtccaagatcaaaagcgtcggcatgaatgccattagattgacctatgcgatccaaatggttgatcagatttacgcaaacggcaaagacacaaccgtccagcagagtttcatcaacgcgctaggtgcaacaaacggtccgaaagtgtacgcgcaattcatcgccaagaatccgtctttcaatgcctcttcgactcgacttgatgtatttgacgcagtggctgccgaatgcgcaaagcaacaaatacacgtacatctggacaatcatatgtcccgggctacatggtgttgctcaacaacggacggaaatgcatggttcaatgacaaagactataacgtcgccaactgggtccgaggtttgacttacatggctacacacgccaaatcctggacagcactcacttccatgtccctgcgaaatgaattgcgttccccggacgatgactcggcactcaagtcctcaagctacaattggagagactggtacacctatgtcaagcagggcagcgccgcgatccacggcgccaatggtgacattctgatttttctgtcgggtctcgacttcgacacttggatcacgccgatatttgccggcacagcattgacacccggcacggggaaatacagcgcggccgacttcccaggctatgcgaacaagcttgtgctcgagatacataactacgcaaacgacgcatcgtcttgctcttctctgcagaatacgctgtataccaatggatttcaagcaatgagctcttcggctgtgaacaagtttccggtagtgttaagtgaatttggcttcgcacagacagatgcagagtcgaagaaggtctatgcgacttgtattgcgagttacttgacgcaacttaaagcgggttggtttatctgggttctctcgggtagctactacatccgctcaggcactcaagactatgacgaaacttggggtctattgactcacgattggagcaactggagggccccgaactatgtgaatggtgcattcacacagcttgttaaaggaacggcttccaactaa

SEQ ID NO: 4101 - protein, 380 aa, Muscodor strobelii
  misc_feature: SGI Peptide ID NO. 561044
  misc_feature (1)..(379): NCBI GI: 85094362 Blast Desc: NCU05882 [Neurospora crassa OR74A] gi|28921329|gb|EAA30637.1| conserved [Neurospora crassa OR74A]
  misc_feature (1)..(379): NCBI GI: 116206102 Blast Desc: CHGG_02344 [Chaetomium globosum CBS 148.51] gi|88182941|gb|EAQ90409.1| CHGG_02344 [Chaetomium globosum CBS 148.51]
  misc_feature (2)..(377): NCBI GI: 39942588 Blast Desc: MGG_03374 [Magnaporthe grisea 70-15] gi|145015611|gb|EDK00101.1| MGG_03374 [Magnaporthe grisea 70-15]
  misc_feature (3)..(377): NCBI GI: 156045355 Blast Desc: SS1G_09866 [Sclerotinia sclerotiorum 1980] gi|154694261|gb|EDN93999.1| SS1G_09866 [Sclerotinia sclerotiorum 1980]
  misc_feature (3)..(377): NCBI GI: 154318702 Blast Desc: BC1G_02740 [Botryotinia fuckeliana B05.10] gi|150857870|gb|EDN33062.1| BC1G_02740 [Botryotinia fuckeliana B05.10]
  misc_feature (3)..(377): NCBI GI: 119507928 Blast Desc: beta-1,6-galactanase [Fusarium oxysporum]
  misc_feature (1)..(377): NCBI GI: 261360991 Blast Desc: beta-1,6-galactanase [Verticillium albo-atrum VaMs.102]
  misc_feature (1)..(379): NCBI GI: 256730390 Blast Desc: NECHADRAFT_45063 [Nectria haematococca mpVI 77-13-4]
  misc_feature (1)..(377): NCBI GI: 67904358 Blast Desc: AN9166.2 [Aspergillus nidulans FGSC A4] gi|40742809|gb|EAA61999.1| AN9166.2 [Aspergillus nidulans FGSC A4] gi|259485409|tpe|CBF82407.1| TPA: cellulase family protein
  misc_feature (3)..(377): NCBI GI: 46139339 Blast Desc: FG11184.1 [Gibberella zeae PH-1]
MKNSRGDNIVYAGANWDGHSEVMIPDGLQYQSIATLVSKIKSVGMNAIRLTYAIQMVDQIYANGKDTTVQQSFINALGATNGPKVYAQFIAKNPSFNASSTRLDVFDAVAAECAKQQIHVHLDNHMSRATWCCSTTDGNAWFNDKDYNVANWVRGLTYMATHAKSWTALTSMSLRNELRSPDDDSALKSSSYNWRDWYTYVKQGSAAIHGANGDILIFLSGLDFDTWITPIFAGTALTPGTGKYSAADFPGYANKLVLEIHNYANDASSCSSLQNTLYTNGFQAMSSSAVNKFPVVLSEFGFAQTDAESKKVYATCIASYLTQLKAGWFIWVLSGSYYIRSGTQDYDETWGLLTHDWSNWRAPNYVNGAFTQLVKGTASN

SEQ ID NO: 4102 - DNA, 915 bp, Muscodor strobelii
  misc_feature: SGI cDNA ID NO. 561045
  misc_feature: Elevated expression when VOC is produced
  misc_feature: Encodes the peptide sequence at SEQ ID NO 4103
atggcagagtacacgaaaagacttttgacccattcgagcgaccgcttacccgccatatcaggcttagctgcaagcttcggggataggttgcgcgacgagtatgcagccgggctctggacacgggttttgtacaaaggacttttctggtgtcacttcggttcgcacaccttaaaattgacatggaaagatctactcgatgaagtcacaaaccctgcgatgtacgtcgctccatcgtggagctgggccagccgagacgggtataaaaagttcgccgacggataccttggagtgtatggccttggtgaagggagctggggctcagccacacgtgaatgcgacactttgacgcctcgtatcgttcttgctagtgcagacccgtacgggcaaataaaaagcggcgagctgatggtcacttcaagacttcgcgaggttccagacgaaattatcgtccggcagtcggagaagcacggtgaatatcgggggttgataggagccgcaagcaaaccatttgcgacatgtgcacttgactggggacttgaattagatggcagcgttctaaagaaagtgtcgcgagaaaatttatatctgatgcttcttggcagtaaagtccgagacacgtcgactccaggagttcacagcaaagttgagtctacacaccccgtgggcaacaacccgatcccggatgcacggaccaaggggaagcaagaatgtaaacaagacgatgactacacgagtcacggtgaagagcctagagaagtagtggctcagcgaagagtcgcgtacggcctcgtcatttatcgccttcctgatgtgaacgaatacatcagagtcggcgtgtttcattccaaggcgagtgatggctggggactgcaaatctttaacgaatgcgagccaaatacaatcaccattttatga

SEQ ID NO: 4103 - protein, 304 aa, Muscodor strobelii
  misc_feature: SGI Peptide ID NO. 561045
  misc_feature (9)..(304): NCBI GI: 256720875 Blast Desc: NECHADRAFT_85612 [Nectria haematococca mpVI 77-13-4]
  misc_feature (1)..(304): NCBI GI: 256727902 Blast Desc: [Nectria haematococca mpVI 77-13-4]
  misc_feature (1)..(154): NCBI GI: 256729778 Blast Desc: NECHADRAFT_83568 [Nectria haematococca mpVI 77-13-4]
  misc_feature (9)..(304): NCBI GI: 256727242 Blast Desc: NECHADRAFT_75912 [Nectria haematococca mpVI 77-13-4]
  misc_feature (1)..(144): NCBI GI: 238502093 Blast Desc: conserved [Aspergillus flavus NRRL3357] gi|220691090|gb|EED47438.1| conserved [Aspergillus flavus NRRL3357]
  misc_feature (1)..(162): NCBI GI: 156064209 Blast Desc: SS1G_00112 [Sclerotinia sclerotiorum 1980] gi|154690974|gb|EDN90712.1| SS1G_00112 [Sclerotinia sclerotiorum 1980]
  misc_feature (3)..(138): NCBI GI: 256723350 Blast Desc: NECHADRAFT_86555 [Nectria haematococca mpVI 77-13-4]
  misc_feature (4)..(144): NCBI GI: 256722409 Blast Desc: NECHADRAFT_62329 [Nectria haematococca mpVI 77-13-4]
  misc_feature (4)..(144): NCBI GI: 256720853 Blast Desc: NECHADRAFT_85575 [Nectria haematococca mpVI 77-13-4]
  misc_feature (1)..(93): NCBI GI: 256726643 Blast Desc: NECHADRAFT_75851 [Nectria haematococca mpVI 77-13-4]
  misc_feature: Useful for introducing or modulating the production of volatile compounds
MAEYTKRLLTHSSDRLPAISGLAASFGDRLRDEYAAGLWTRVLYKGLFWCHFGSHTLKLTWKDLLDEVTNPAMYVAPSWSWASRDGYKKFADGYLGVYGLGEGSWGSATRECDTLTPRIVLASADPYGQIKSGELMVTSRLREVPDEIIVRQSEKHGEYRGLIGAASKPFATCALDWGLELDGSVLKKVSRENLYLMLLGSKVRDTSTPGVHSKVESTHPVGNNPIPDARTKGKQECKQDDDYTSHGEEPREVVAQRRVAYGLVIYRLPDVNEYIRVGVFHSKASDGWGLQIFNECEPNTITIL

SEQ ID NO: 4104 - DNA, 1413 bp, Muscodor strobelii
  misc_feature: SGI EST ID NO. CUFF.10235.0
  misc_feature: Variant of the nucleotide sequence at SEQ ID NO 4102
gcgcgacgagtatgcagccgggctctggacacgggttttgtacaaaggacttttctggtgtcacttcggttcgcacaccttaaaattgacatggaaagatctactcgatgaagtcacaaaccctgcgatgtacgtcgctccatcgtggagctgggccagccgagacgggtataaaaagttcgccgacggataccttggagtgtatggccttggtgaagggagctggggctcagccacacgtgaatgcgacactttgacgcctcgtatcgttcttgctagtgcagacccgtacgggcaaataaaaagcggcgagctgatggtcacttcaagacttcgcgaggttccagacgaaattatcgtccggcagtcggagaagcacggtgaatatcgggggttgataggagccgcaagcaaaccatttgcgacatgtgcacttgactggggacttgaattagatggcagcgttctaaagaaagtgtcgcgagaaaatttatatctgatgcttcttggcagtaaagtccgagacacgtcgactccaggagttcacagcaaagttgagtctacacaccccgtgggcaacaacccgatcccggatgcacggaccaaggggaagcaagaatgtaaacaagacgatgactacacgagtcacggtgaagagcctagagaagtagtggctcagcgaagagtcgcgtacggcctcgtcatttatcgccttcctgatgtgaacgaatacatcagagtcggcgtgtttcattccaaggcgagtgatggctggggactgcaaatctttaacgaatgcgagccaaatacaatcaccattttatgaaaccgaattgattgagctatataccgactaccatctagctagatttgttggtgacacttagcacttggcaatacagttatcggctgtgtaatggtcccgtgcttagttggaagccgttcctttaacaagctgtgtgaatgcaccattcacatagttcggggccctccagttgctccaatcgtgagtcaatagaccccaagtttcgtcatagtcttgagtgcctgagcggatgtagtagctacccgagagaacccagataaaccaacccgctttaagttgcgtcaagtaactcgcaatacaagtcgcatagaccttcttcgactctgcatctgtctgtgcgaagccaaattcacttaacactaccggaaacttgttcacagccgaagagctcattgcttgaaatccattggtatacagcgtattctgcagagaagagcaagacgatgcgtcgtttgcgtagttatgtatctcgagcacaagcttgttcgcatagcctgggaagtcggccgcgctgtatttccccgtgccgggtgtcaatgctgtgccggcaaatatcggcgtgatccaagtgtcgaagtcgagacccg

SEQ ID NO: 4105 - DNA, 828 bp, Muscodor strobelii
  misc_feature: SGI cDNA ID NO. 561046
  misc_feature: Elevated expression when VOC is produced
  misc_feature: Encodes the peptide sequence at SEQ ID NO 4106
atgaagttcaccggtcttgtatccgtactcgccctagccggtgccgccgcttccgcgccggagaagtcgaagtgccccaaaacacggaagatcgccaacatcgatgtaatcgacacgccgcttgtgaatgcggccatcgacttgatacgcgtcttccagccgctccagccttacttgtataatcacctgatgcgcacgtggcttttcggttctgccgccttcaacaacaacgccacgctcaaggctggcatggatcttgagctgcatgccatcggctccatgctgcacgatttaggatgggacatgcggaataatacaccctggcacagccaaacgtcccctttcgaggttgacagtggcctcggcgccgttgagttcgttaagcagaacaagaatctttggagctcaaaatgggatgacgtgcgcctggaacgattgtacgatggcattgtactacagggccaggggtcgtatttacccggcaagaacctccagtctcagtggattgtaaactctgtcggcttcgagattcctggtcgtcgttctcccatgatccaagatcacgattatgatactattcttgctgcatatcctaatcactacatcctacgcggcacgaatgaaacctttacttatttgtgcgaaactaagcccgcacaagctctgtccgggacatttgtcgagggttttggtatctatgttcctggattcgatacctcgccgtacaagcccttcactatcatcacggagaacgttgctgttgagaaagcaacatacggcaacgagactgcttatactggcagcatacttggcccaggtgcgatataa

SEQ ID NO: 4106 - protein, 275 aa, Muscodor strobelii
  misc_feature: SGI Peptide ID NO. 561046
  misc_feature (6)..(219): NCBI GI: 116200323 Blast Desc: CHGG_08317 [Chaetomium globosum CBS 148.51] gi|88179596|gb|EAQ87064.1| CHGG_08317 [Chaetomium globosum CBS 148.51]
  misc_feature (14)..(237): NCBI GI: 256721693 Blast Desc: NECHADRAFT_44823 [Nectria haematococca mpVI 77-13-4]
  misc_feature (28)..(252): NCBI GI: 171681192 Blast Desc: protein product [Podospora anserina] gi|170940554|emb|CAP65782.1| protein product [Podospora anserina]
  misc_feature (31)..(243): NCBI GI: 116202473 Blast Desc: CHGG_09121 [Chaetomium globosum CBS 148.51] gi|88177639|gb|EAQ85107.1| CHGG_09121 [Chaetomium globosum CBS 148.51]
  misc_feature (29)..(155): NCBI GI: 116204295 Blast Desc: CHGG_10031 [Chaetomium globosum CBS 148.51] gi|88176159|gb|EAQ83627.1| CHGG_10031 [Chaetomium globosum CBS 148.51]
  misc_feature (29)..(238): NCBI GI: 171693093 Blast Desc: protein product [Podospora anserina] gi|170946495|emb|CAP73296.1| protein product [Podospora anserina]
  misc_feature (23)..(228): NCBI GI: 242795716 Blast Desc: conserved [Talaromyces stipitatus ATCC 10500] gi|218719237|gb|EED18657.1| conserved [Talaromyces stipitatus ATCC 10500]
  misc_feature (28)..(231): NCBI GI: 13471098 Blast Desc: mlr0982 [Mesorhizobium loti MAFF303099] gi|14021842|dbj|BAB48453.1| mlr0982 [Mesorhizobium loti MAFF303099]
  misc_feature (18)..(237): NCBI GI: 162450515 Blast Desc: sce2243 [Sorangium cellulosum 'So ce 56'] gi|161161097|emb|CAN92402.1| [Sorangium cellulosum 'So ce 56']
  misc_feature (29)..(249): NCBI GI: 260460254 Blast Desc: conserved [Mesorhizobium opportunistum WSM2075] gi|259033899|gb|EEW35158.1| conserved [Mesorhizobium opportunistum WSM2075]
  misc_feature: Useful for introducing or modulating the production of volatile compounds
MKFTGLVSVLALAGAAASAPEKSKCPKTRKIANIDVIDTPLVNAAIDLIRVFQPLQPYLYNHLMRTWLFGSAAFNNNATLKAGMDLELHAIGSMLHDLGWDMRNNTPWHSQTSPFEVDSGLGAVEFVKQNKNLWSSKWDDVRLERLYDGIVLQGQGSYLPGKNLQSQWIVNSVGFEIPGRRSPMIQDHDYDTILAAYPNHYILRGTNETFTYLCETKPAQALSGTFVEGFGIYVPGFDTSPYKPFTIITENVAVEKATYGNETAYTGSILGPGAI

SEQ ID NO: 4107 - DNA, 1388 bp, Muscodor strobelii
  misc_feature: SGI EST ID NO. CUFF.10254.0
  misc_feature: Variant of the nucleotide sequence at SEQ ID NO 4105
cgttttttgaactgagggtcagcgccgaacccagacagcgtggtttcttgggtgactactcattcgggtcagtcatgcaatcaaagctgaccaggcaatgattggaccggagcgataccgtgtcattgctcggcggagatccaccggcagggagtccagaggatttgaattgcgatgagcgacgaggtgtgcctcgaacactaaggaagggatatgatccatctcgactttgatcctgatcgttgcttcgctactatgcggctgcaaaatgagatgaccctgggttcagagtcatgatgagaggtatcatacttatagtcagcatacaagggatggtcagcttaggactttataaagagcctgaagatgctgtcgatgagactagacggccacgtcgtttgagcaacatcttcatttactgccatccctaggaagaagccgcaaagactatatcggaccacatacacacgtcgagatgaagttcaccggtcttgtatccgtactcgccctagccggtgccgccgcttccgcgccggagaagtcgaagtgccccaaaacacggaagatcgccaacatcgatgtaatcgacacgccgcttgtgaatgcggccatcgacttgatacgcgtcttccagccgctccagccttacttgtataatcacctgatgcgcacgtggcttttcggttctgccgccttcaacaacaacgccacgctcaaggctggcatggatcttgagctgcatgccatcggctccatgctgcacgatttaggatgggacatgcggaataatacaccctggcacagccaaacgtcccctttcgaggttgacagtggcctcggcgccgttgagttcgttaagcagaacaagaatctttggagctcaaaatgggatgacgtgcgcctggaacgattgtacgatggcattgtactacagggccaggggtcgtatttacccggcaagaacctccagtctcagtggattgtaaactctgtcggcttcgagattcctggtcgtcgttctcccatgatccaagatcacgattatgatactattcttgctgcatatcctaatcactacatcctacgcggcacgaatgaaacctttacttatttgtgcgaaactaagcccgcacaagctctgtccgggacatttgtcgagggttttggtatctatgttcctggattcgatacctcgccgtacaagcccttcactatcatcacggagaacgttgctgttgagaaagcaacatacggcaacgagactgcttatactggcagcatacttggcccaggtgcgatataagattaagaacaagtggatgattgaccagatactccatataatagtatatagtaatgatggatacatacttgtatactgatgctgt

SEQ ID NO: 4108 - DNA, 1383 bp, Muscodor strobelii
  misc_feature: SGI cDNA ID NO. 561047
  misc_feature: Encodes the peptide sequence at SEQ ID NO 4109
atggattcgccgaacctcgtggtccttccggatcatccacaataccaggacgagaaagatgtcccttggtccgagacttgttggctacctgcgacatgtttttttcgacccgaaagtccacaagatgttgctaaggccctgaaggctgtagaggagactggctctaactttgcgattcgatgcggaggccacaacccaaatccgctcttcagtagcatcgatcaatctgggattattattgaccttcaagagttgaagacgctatcgctagactcggatggtatcttacaggttggtgcgggcaatcggtggggcgaggtctatagctatctcgaagagcatggcaggtcccctattggtggtcgccaaaacgacgttggggtttccggttatcttctcggagggggcatgcccgccttcccggctctttatggattcggggccgaccaggtcaagaacttcgaggtcgtgttggcaaactctattattatgaacgcaaacgctcatgaaaacaccgcactatggcgggccctcaaagggggcggaccgaacttcggcatcgtgacacgctttgatattcagactgtcccacaaatcaaagcacagtacacagtcaacacatatgacccatctgattacgtcaatcttatgcgtgcgaccgccgaactccaagatgcaatggaatatgaccctaagctcggtgcttttgtctacgtcaacccgacattcgtggctgtcggactattctacgcagagtgggtcaaagaaaggcccaaggcgttcgatactttcttcaatctcaagagtctcacagatgcagctgtgcctaccaccaatggtacgataaaggacctggtaacagcaattggagctggagccagcaatcctcccatgagacgccagtacgcgtcacaaggatctaaagtctccgccgacttctacatcgacgtatacaaggtttatccaaaaacagccgagaagtacggagatgcaatcaatctatcgtacagcattcagccagcgccagtcgccgcggtagaggaaggaaacgctcggggtggcaatattatgggccttgaaaaggttccccagacttggtgggcatttgttgcccaatgggacggccagaaaaatgatcaggttgcacaacaagccatcgacgagctttacaaaggtatgcagaaggtgtctcgtgagcatgatcagtggctggactttgttttcatgaacgagggtaagtggacacaagatgtcctatccagctatggccaagccaacttgcaaataatgaaggaattgagcttgaaatacgatccaaagggtatcttccaaaatttacagaaagatggataccttcttcgaaaggttgatacaacctcttga

SEQ ID NO: 4109 - protein, 460 aa, Muscodor strobelii
  misc_feature: SGI Peptide ID NO. 561047
  misc_feature (31)..(167): Pfam Id: PF01565 Pfam Desc: FAD binding domain
  misc_feature (4)..(454): NCBI GI: 256723541 Blast Desc: NECHADRAFT_42078 [Nectria haematococca mpVI 77-13-4]
  misc_feature (2)..(454): NCBI GI: 145254822 Blast Desc: An18g03080 [Aspergillus niger] gi|134084352|emb|CAK48692.1| protein product [Aspergillus niger]
  misc_feature (21)..(456): NCBI GI: 85090595 Blast Desc: NCU09273 [Neurospora crassa OR74A] gi|28919859|gb|EAA29256.1| conserved [Neurospora crassa OR74A]
  misc_feature (16)..(453): NCBI GI: 242821331 Blast Desc: 6-hydroxy-D-nicotine oxidase, [Talaromyces stipitatus ATCC 10500] gi|218712579|gb|EED12004.1| 6-hydroxy-D-nicotine oxidase, [Talaromyces stipitatus ATCC 10500]
  misc_feature (23)..(456): NCBI GI: 46138189 Blast Desc: FG10609.1 [Gibberella zeae PH-1]
  misc_feature (4)..(456): NCBI GI: 116201111 Blast Desc: CHGG_08440 [Chaetomium globosum CBS 148.51] gi|88176958|gb|EAQ84426.1| CHGG_08440 [Chaetomium globosum CBS 148.51]
  misc_feature (13)..(455): NCBI GI: 255939370 Blast Desc: Pc16g00310 [Penicillium chrysogenum Wisconsin 54-1255] gi|211585077|emb|CAP92701.1| Pc16g00310 [Penicillium chrysogenum Wisconsin 54-1255]
  misc_feature (137)..(454): NCBI GI: 242764197 Blast Desc: TSTA_067660 [Talaromyces stipitatus ATCC 10500] gi|218723917|gb|EED23334.1| TSTA_067660 [Talaromyces stipitatus ATCC 10500]
  misc_feature (14)..(456): NCBI GI: 145230445 Blast Desc: An01g11180 [Aspergillus niger] gi|134055649|emb|CAK44023.1| protein product [Aspergillus niger]
  misc_feature (15)..(456): NCBI GI: 238499855 Blast Desc: conserved [Aspergillus flavus NRRL3357] gi|220692915|gb|EED49261.1| conserved [Aspergillus flavus NRRL3357]
MDSPNLVVLPDHPQYQDEKDVPWSETCWLPATCFFRPESPQDVAKALKAVEETGSNFAIRCGGHNPNPLFSSIDQSGIIIDLQELKTLSLDSDGILQVGAGNRWGEVYSYLEEHGRSPIGGRQNDVGVSGYLLGGGMPAFPALYGFGADQVKNFEVVLANSIIMNANAHENTALWRALKGGGPNFGIVTRFDIQTVPQIKAQYTVNTYDPSDYVNLMRATAELQDAMEYDPKLGAFVYVNPTFVAVGLFYAEWVKERPKAFDTFFNLKSLTDAAVPTTNGTIKDLVTAIGAGASNPPMRRQYASQGSKVSADFYIDVYKVYPKTAEKYGDAINLSYSIQPAPVAAVEEGNARGGNIMGLEKVPQTWWAFVAQWDGQKNDQVAQQAIDELYKGMQKVSREHDQWLDFVFMNEGKWTQDVLSSYGQANLQIMKELSLKYDPKGIFQNLQKDGYLLRKVDTTS

SEQ ID NO: 4110 - DNA, 1581 bp, Muscodor strobelii
  misc_feature: SGI cDNA ID NO. 561048
  misc_feature: Encodes the peptide sequence at SEQ ID NO 4111
atggcatcgccgtcgcttatggcccttgtcatcgcaatctgttttgcttatgatatcccgagatgcatttatctgcgatgcttccatccacttgcaagctttccaggtccgcgtcttgcgtctatcactaattgctggtacgcatatcactcaatctcggggagattcccttgggcactcgaagaagccttcgggaaatatggtcggtgtgatctggtatttaacattgacctgctgaaaactgacgtgctgcgatacccaggcaacatcgttcgagtttcgcctaatgatcttgtcttctttgaaccacaggcgatgaataagatctatggctcaaaggccaacggcctcgagacatttgtcaaaacagatgctgatgacttgagcgctggatacctgggtattacgtgggaagtcgatccctcaaaacatcgcgaggtgtcgaagaagctctctcctgcttttagtatcaaatcattgaaagccaaagaggccactatacagcgatatacagacgtcttcatcgaacgaatgcgggagtacggctcccttgcagagggtattgatcttcacaagtggacggactggttggccatggatctggcagccgaagtcgcctataatagagagatgaatgggttaagaaacatgcagaaccctcctttccttgacgcggcgtatggagttaacttcttcactgctgtctaccgagtaatgaagcgctttcccctaatccgacctttgacattcctcttgatccccccttccacgcttcggtcgctccctgcgattctgaaaatgaacaaagaggaggtccaatcgagaatctgcaaacaaggcaagaacacgcatttggactactttgagcagcttctgccctgtgacagcccgccgccgacggaaaagccagtaatcaatcacctagaagtagtgactggtcagctcctgatagctagttacgacccagtgtcggtggtttacttcacagccgtcatgttcctgttaaacgagcgaaagtccggccaagcctcagtctaccataatctagtggatgagctgcaaaatagattcaagtcctattctgagatcgagcctgacctcctccgtgagcttcctcatctcaatgcctgtatcactgagactttgcgacttcaagcaactgcaacgtctggaggtctttccagagttagccctggtacgacagtgggaggcagatatatccccaaaggggttatctgcctcaatggtgactttgccactggccgttgtgaacgatacttcgctgaacccctcaagtatcggccacaaagatggctaccgagcagccatccaaatcacgactcaaagtatgtcaacgacgatctgaaatgcctcatgcccttcagtctaggaccaagaatgtgtcctggtcgcgaggctgctttgatccaaatacgtcttttcctcgcaaagctcttctggacgttcgatgttgaccagttacctggccagactgtgtcgttcgagaaggacttcatcctgtacggcatgtggaataagcccgtgtttcgtgtcaagctcaaagagcgccctgcactttga

SEQ ID NO: 4111 - protein, 526 aa, Muscodor strobelii
  misc_feature: SGI Peptide ID NO. 561048
  misc_feature (35)..(520): Pfam Id: PF00067 Pfam Desc: Cytochrome P450
  misc_feature (366)..(520): Pfam Id: PF00067 Pfam Desc: Cytochrome P450
  misc_feature (118)..(514): NCBI GI: 145606883 Blast Desc: MGG_03819 [Magnaporthe grisea 70-15] gi|145014505|gb|EDJ99073.1| MGG_03819 [Magnaporthe grisea 70-15]
  misc_feature (84)..(318): NCBI GI: 156056787 Blast Desc: SS1G_04124 [Sclerotinia sclerotiorum 1980] gi|154701910|gb|EDO01649.1| SS1G_04124 [Sclerotinia sclerotiorum 1980]
  misc_feature (88)..(521): NCBI GI: 156054726 Blast Desc: SS1G_06211 [Sclerotinia sclerotiorum 1980] gi|154703991|gb|EDO03730.1| SS1G_06211 [Sclerotinia sclerotiorum 1980]
  misc_feature (88)..(518): NCBI GI: 154296440 Blast Desc: BC1G_13046 [Botryotinia fuckeliana B05.10] gi|150843407|gb|EDN18600.1| BC1G_13046 [Botryotinia fuckeliana B05.10]
  misc_feature (14)..(524): NCBI GI: 259485752 Blast Desc: TPA: cytochrome P450, (Eurofung) [Aspergillus nidulans FGSC A4]
  misc_feature (7)..(520): NCBI GI: 154289577 Blast Desc: BC1G_16084 [Botryotinia fuckeliana B05.10] gi|150849019|gb|EDN24212.1| BC1G_16084 [Botryotinia fuckeliana B05.10] gi|169635728|emb|CAP58782.1| cytochrome P40 monooxygenase
  misc_feature (9)..(520): NCBI GI: 255931847 Blast Desc: Pc12g06380 [Penicillium chrysogenum Wisconsin 54-1255] gi|211582099|emb|CAP80265.1| Pc12g06380 [Penicillium chrysogenum Wisconsin 54-1255]
  misc_feature (5)..(523): NCBI GI: 212545522 Blast Desc: cytochrome P450 monooxygenase, [Penicillium marneffei ATCC 18224] gi|210065884|gb|EEA19978.1| cytochrome P450 monooxygenase, [Penicillium marneffei ATCC 18224]
  misc_feature (8)..(523): NCBI GI: 242815966 Blast Desc: cytochrome P450, [Talaromyces stipitatus ATCC 10500] gi|218715014|gb|EED14437.1| cytochrome P450, [Talaromyces stipitatus ATCC 10500]
  misc_feature (1)..(521): NCBI GI: 121716300 Blast Desc: benzoate 4-monooxygenase cytochrome P450 [Aspergillus clavatus NRRL 1] gi|119403916|gb|EAW14333.1| benzoate 4-monooxygenase cytochrome P450 [Aspergillus clavatus NRRL 1]
  misc_feature (145)..(489): SWISSPROT Homolog: EC 1.14.14.1 Unspecific monooxygenase
MASPSLMALVIAICFAYDIPRCIYLRCFHPLASFPGPRLASITNCWYAYHSISGRFPWALEEAFGKYGRCDLVFNIDLLKTDVLRYPGNIVRVSPNDLVFFEPQAMNKIYGSKANGLETFVKTDADDLSAGYLGITWEVDPSKHREVSKKLSPAFSIKSLKAKEATIQRYTDVFIERMREYGSLAEGIDLHKWTDWLAMDLAAEVAYNREMNGLRNMQNPPFLDAAYGVNFFTAVYRVMKRFPLIRPLTFLLIPPSTLRSLPAILKMNKEEVQSRICKQGKNTHLDYFEQLLPCDSPPPTEKPVINHLEVVTGQLLIASYDPVSVVYFTAVMFLLNERKSGQASVYHNLVDELQNRFKSYSEIEPDLLRELPHLNACITETLRLQATATSGGLSRVSPGTTVGGRYIPKGVICLNGDFATGRCERYFAEPLKYRPQRWLPSSHPNHDSKYVNDDLKCLMPFSLGPRMCPGREAALIQIRLFLAKLFWTFDVDQLPGQTVSFEKDFILYGMWNKPVFRVKLKERPAL

SEQ ID NO: 4112 - DNA, 975 bp, Muscodor strobelii
  misc_feature: SGI cDNA ID NO. 561049
  misc_feature: Encodes the peptide sequence at SEQ ID NO 4113
atgcggccggcacgtttgtcgtcttttgccaagggcgaggcgaagattgattacatgaggacacacctgcgtgaaaccactctgggcgacaataccaactcgaccctgcctttcccctaccgatcccgcaaacagtccctcggtgcattggagatcctgcccccggagttgcagttagaactgctctcgcatttcgacttgaagacctttgttgagttcagaaaggtcaacagaaaagccaaagatttcgttgacgagctttcccagtacagagacatcagactccatgcatttgcagccctctctggcatactgcagattggagcaggcagccggatcacatgcaagacattgcacgacaagctttgtactgccgaatgtgaggactgtggcaagtttgcaggctatctgtacgtgctcacctgcaagcgagtctgccggccctgtttgctgtcgagacgcgagtaccttccgattgatgaagattatgcgaaagacgtgcttggattggaccaagaaacgctgcaagacttacccagcatgaaaccagtccctgggtcgtacggaccgtcccgtatcccgctattccatccacgttcattctatgacttcaacgccgcactgcaggctggcatcgcaatgtacggttcagaagaggcgatccgcaaacacgaaaagcgcaaagtcaaggcctataacgaagaatatcgtgcgaaagcgaaagcacatgggcagactgttccccgccgtggtccgcgccaggtccaaagacgatccacgccctggacgttggacaaacacaatccccgacgatggatggccatcgttcgcacgccctggctcgaccagtcaacacacaagagcattctcggctcgcactgcgcctcgtgtaatgatggcatactctaccttggcgatgaaatcgaggagcacgcaagcaagtgcaagaagatcagggtggggacctttgtatga

SEQ ID NO: 4113 - protein, 324 aa, Muscodor strobelii
  misc_feature: SGI Peptide ID NO. 561049
  misc_feature (48)..(95): Pfam Id: PF00646 Pfam Desc: F-box domain
  misc_feature (23)..(294): NCBI GI: 256724203 Blast Desc: NECHADRAFT_87452 [Nectria haematococca mpVI 77-13-4]
  misc_feature (34)..(321): NCBI GI: 256726801 Blast Desc: NECHADRAFT_99125 [Nectria haematococca mpVI 77-13-4]
  misc_feature (61)..(297): NCBI GI: 258569647 Blast Desc: [Uncinocarpus reesii 1704] gi|237903897|gb|EEP78298.1| [Uncinocarpus reesii 1704]
  misc_feature (47)..(207): NCBI GI: 255952634 Blast Desc: Pc17g01230 [Penicillium chrysogenum Wisconsin 54-1255] gi|211586573|emb|CAP79410.1| Pc17g01230 [Penicillium chrysogenum Wisconsin 54-1255]
  misc_feature (47)..(196): NCBI GI: 255943584 Blast Desc: Pc19g00730 [Penicillium chrysogenum Wisconsin 54-1255] gi|211587294|emb|CAP79489.1| Pc19g00730 [Penicillium chrysogenum Wisconsin 54-1255]
  misc_feature (30)..(299): NCBI GI: 258566934 Blast Desc: [Uncinocarpus reesii 1704] gi|237905657|gb|EEP80058.1| [Uncinocarpus reesii 1704]
  misc_feature (6)..(223): NCBI GI: 119174935 Blast Desc: [Coccidioides immitis RS]
  misc_feature (6)..(223): NCBI GI: 240106993 Blast Desc: F-box domain containing protein [Coccidioides posadasii C735 delta SOWgp]
  misc_feature (45)..(298): NCBI GI: 240106431 Blast Desc: F-box domain containing protein [Coccidioides posadasii C735 delta SOWgp]
  misc_feature (50)..(299): NCBI GI: 170088843 Blast Desc: [Laccaria bicolor S238N-H82] gi|164648904|gb|EDR13146.1| [Laccaria bicolor S238N-H82]
MRPARLSSFAKGEAKIDYMRTHLRETTLGDNTNSTLPFPYRSRKQSLGALEILPPELQLELLSHFDLKTFVEFRKVNRKAKDFVDELSQYRDIRLHAFAALSGILQIGAGSRITCKTLHDKLCTAECEDCGKFAGYLYVLTCKRVCRPCLLSRREYLPIDEDYAKDVLGLDQETLQDLPSMKPVPGSYGPSRIPLFHPRSFYDFNAALQAGIAMYGSEEAIRKHEKRKVKAYNEEYRAKAKAHGQTVPRRGPRQVQRRSTPWTLDKHNPRRWMAIVRTPWLDQSTHKSILGSHCASCNDGILYLGDEIEEHASKCKKIRVGTFV

SEQ ID NO: 4114 - DNA, 325 bp, Muscodor strobelii
  misc_feature: SGI EST ID NO. CUFF.10310.0
  misc_feature: Variant of the nucleotide sequence at SEQ ID NO 4112
gtgcttggattggaccaagaaacgctgcaagacttacccagcatgaaaccagtccctgggtcgtacggaccgtcccgtatcccgctattccatccacgttcattctatgacttcaacgccgcactgcaggctggcatcgcaatgtacggttcagaagaggcgatccgcaaacacgaaaagcgcaaagtcaaggcctataacgaagaatatcgtgcgaaagcgaaagcacatgggcagactgttccccgccgtggtccgcgccaggtccaaagacgatccacgccctggacgttggacaaacacaatccccgacgatggatggcca

SEQ ID NO: 4115 - DNA, 2748 bp, Muscodor strobelii
  misc_feature: SGI cDNA ID NO. 561050
  misc_feature: Encodes the peptide sequence at SEQ ID NO 4116
atggcgtccaaaggcaaaccgtccaaccctctgaatgggatgcacaccgctggcattttttctgacatgagcattgacggtcccgaaatcggcactctagttcttatcgtcgaccgcgcaaagaatctgcccaatcgaaagacgattggaaagcaggatccctattgcgccgcccgcctaggcaaggaggccaagaagaccactacggatatccgaggtggccagacacccaaatgggatcaagagcttcggtttaccgttcacgattcacctgattattaccagctgaaactctccgtcttcaacgatgacaagaagacggaactaataggtgagacatggatcgacctgcgtgacatcgtcgtaccaggtggggggcagagcgaccattggcatactctgagctgcaagggcaagtatgccggcgagattcggatagagattacctactacgacagcagacccaagcccgagccagtggcagctaagccccagcccgtcacctccagctccgatccagatctatttgcaagcgctcagaagccagcagtcaagaggcgtcctctgccatccgacccagtcaccggacaggcgccagcccctctgcctgagcctgtgcacactcctcctaggcctcaacctcagccaaaccctgctccggctttgatacccaaccagtcacccttgcaagcagttgagtataacacaccgcccccgaaccgatatggccagcccgactctcacacaccggtacacgcttcggcaagcaaatactcaacgccgccgcagcgagactaccagcagccaggaggagagagggatctataccacacgccgtcgcatgaaagcgatccgttccatcaatcgcaaagcgcgagttctcgaccacatgagctggacaataggtcaccttacaacgcacggcctaactatagcacgcagtctcttcctattcagcaccaacgatcgttcgaaagtcccgaacaaccacctcctccaccggcgcatagagtgagaagtagcaacaccaactcgccagatgccgtgcaccgcagtagcatggatatggtacagcatcagtctacaccgcccatgcgccaaaacgtcttgcggaaggaagcacatcggatgtctgtgtcttcaccttcctcagcatatccgggccgtccttcgtatcgcccgtatgattctgcgcccgtagtgcagaacagcccccaatataatgaaagcaacatggacccatcgccacggcatcattcgtacgactctacatacgactcacatcatcgtcaaatgcagccgacagtggaggatgtacctgagacttggacgcctccacggccgcgacctcgcgagagtatttcgcagtatgacggacctgaatacaatcccaacgtaagcccttctgcgttggccctcagcaggcgtgggccggcaccgccggaacaatacagccccggccggtctcatccccaaccgcatcatgattactacggccagggttcatcgccatcgccaatgtctggaggagactattctcaggcgttggtttcacgtgtatcagggtatcaacagatggatcgctactctggccacccagaggacctagacagcacccaattgaatcatcggaggagctatgaacctgcccccgatattcccaatacgctagtacctggcgccgacccaggcatggccctcgaggtagcgggccgatttcatgacgagagaagacaggagcgccgttacactgctggcccaggcgagatggtggtgcattctagaggccggcaatacagcgagcctcccgcacattaccccacaaatcatttgccacatatccaccagtcgagcaattcgagaagctacgataggggcgcaatgtcctactcgacatcgccgcaagcagctacaagcccggcatcatacgaagatcctcgtagggtgtcaccaagtccagcggcgcaccatacaattaagcgcaagtctgtgagcccagcaccacctccatctgatgcccggagacattcgggcgtgccatttgggccggattcatatgacgcattcaacccgacggtggccacgtcgcgggaagtgtcaagtagttccgtgaattacactactgcagacggtaaaatagtgactcacgatggacgcgaagtcgacccgtccgatcatttgcctatggatacgtgggcgcccgagcccgagccgaagaagcccgcgcagccagcagagacgagatcgcggccaatgccagctggagcgcagcctatgccgccttccggacgccgtccactgcggatagcggctcggcctagctctgctatcgtggcccctgctccagcgacattcagcacgcctgatctgacgcctcccggtagtactggtcgcaaccgtcttcagaagaagaaccaccgcgcatcagctatgccggctcccatctcttctacttctccactcggcccggcgtcggcacaccaacgcaacagtacgccgccgcgagctctggtccgagctagtaccttcgactacgagaatcacggggtgtacgacaacgaaccgggtggctctcggccgggatatgggtctgccccgccgatcccggctaaggtactgatgatgagcggcgggttgggacccagccagtcagcaccgccgaggggccatgaggacttttcgctcatggaagagatgagccgcattgatatcgggactggccgggcgagacggcatgatagatactaa

SEQ ID NO: 4116 - protein, 915 aa, Muscodor strobelii
  misc_feature: SGI Peptide ID NO. 561050
  misc_feature (33)..(114): Pfam Id: PF00168 Pfam Desc: C2 domain
  misc_feature (1)..(904): NCBI GI: 46137091 Blast Desc: FG10061.1 [Gibberella zeae PH-1]
  misc_feature (1)..(904): NCBI GI: 256731741 Blast Desc: NECHADRAFT_40480 [Nectria haematococca mpVI 77-13-4]
  misc_feature (1)..(851): NCBI GI: 116197579 Blast Desc: CHGG_06945 [Chaetomium globosum CBS 148.51] gi|88178224|gb|EAQ85692.1| CHGG_06945 [Chaetomium globosum CBS 148.51]
  misc_feature (1)..(601): NCBI GI: 261351962 Blast Desc: conserved [Verticillium albo-atrum VaMs.102]
  misc_feature (4)..(479): NCBI GI: 39973407 Blast Desc: MGG_01150 [Magnaporthe grisea 70-15] gi|145017877|gb|EDK02156.1| MGG_01150 [Magnaporthe grisea 70-15]
  misc_feature (15)..(442): NCBI GI: 171694439 Blast Desc: protein product [Podospora anserina] gi|170947168|emb|CAP73973.1| protein product [Podospora anserina]
  misc_feature (17)..(422): NCBI GI: 85090344 Blast Desc: NCU09847 [Neurospora crassa OR74A] gi|28919729|gb|EAA29135.1| [Neurospora crassa OR74A]
  misc_feature (1)..(196): NCBI GI: 156055746 Blast Desc: SS1G_05225 [Sclerotinia sclerotiorum 1980] gi|154703009|gb|EDO02748.1| SS1G_05225 [Sclerotinia sclerotiorum 1980]
  misc_feature (13)..(200): NCBI GI: 240107444 Blast Desc: C2 domain containing protein [Coccidioides posadasii C735 delta SOWgp]
  misc_feature (13)..(199): NCBI GI: 258564867 Blast Desc: [Uncinocarpus reesii 1704] gi|237906879|gb|EEP81280.1| [Uncinocarpus reesii 1704]
MASKGKPSNPLNGMHTAGIFSDMSIDGPEIGTLVLIVDRAKNLPNRKTIGKQDPYCAARLGKEAKKTTTDIRGGQTPKWDQELRFTVHDSPDYYQLKLSVFNDDKKTELIGETWIDLRDIVVPGGGQSDHWHTLSCKGKYAGEIRIEITYYDSRPKPEPVAAKPQPVTSSSDPDLFASAQKPAVKRRPLPSDPVTGQAPAPLPEPVHTPPRPQPQPNPAPALIPNQSPLQAVEYNTPPPNRYGQPDSHTPVHASASKYSTPPQRDYQQPGGERDLYHTPSHESDPFHQSQSASSRPHELDNRSPYNARPNYSTQSLPIQHQRSFESPEQPPPPPAHRVRSSNTNSPDAVHRSSMDMVQHQSTPPMRQNVLRKEAHRMSVSSPSSAYPGRPSYRPYDSAPVVQNSPQYNESNMDPSPRHHSYDSTYDSHHRQMQPTVEDVPETWTPPRPRPRESISQYDGPEYNPNVSPSALALSRRGPAPPEQYSPGRSHPQPHHDYYGQGSSPSPMSGGDYSQALVSRVSGYQQMDRYSGHPEDLDSTQLNHRRSYEPAPDIPNTLVPGADPGMALEVAGRFHDERRQERRYTAGPGEMVVHSRGRQYSEPPAHYPTNHLPHIHQSSNSRSYDRGAMSYSTSPQAATSPASYEDPRRVSPSPAAHHTIKRKSVSPAPPPSDARRHSGVPFGPDSYDAFNPTVATSREVSSSSVNYTTADGKIVTHDGREVDPSDHLPMDTWAPEPEPKKPAQPAETRSRPMPAGAQPMPPSGRRPLRIAARPSSAIVAPAPATFSTPDLTPPGSTGRNRLQKKNHRASAMPAPISSTSPLGPASAHQRNSTPPRALVRASTFDYENHGVYDNEPGGSRPGYGSAPPIPAKVLMMSGGLGPSQSAPPRGHEDFSLMEEMSRIDIGTGRARRHDRY

SEQ ID NO: 4117 - DNA, 3703 bp, Muscodor strobelii
  misc_feature: SGI EST ID NO. CUFF.10421.0
  misc_feature: Variant of the nucleotide sequence at SEQ ID NO 4115
gggcaatgcagcccgcagctggtattccgcacacaccaacgcacatcccgcgtcatgacattcctctctcttacccttctctttcctgctctgcatattctaatctctgtgttcctctttctgcgttttgacttgtcgtccaattttgagaaataaattgccgtgtcgtagtgttgacccttttcctctcgttcatcgggtctgcatcgcatgtctgtctcctagtactgcggctgcacgccaatccactcgttacggtatcggagagagctgatgtcaacaaacccgcagcccaagacaacaaatgcccagtcatatacgcaattaattctacgagccgcctctttcgacgtcaaattcataaccagtgttacttgaatgttttcgattcgatttatgccaattaattgagaaatttagcaatttctcgcaatctcgcaagtcgaagtgcactcctcccatggttctggctgcctgagccaccacaagcagaatggcgtccaaaggcaaaccgtccaaccctctgaatgggatgcacaccgctggcattttttctgacatgagcattgacggtcccgaaatcggcactctagttcttatcgtcgaccgcgcaaagaatctgcccaatcgaaagacgattggaaagcaggatccctattgcgccgcccgcctaggcaaggaggccaagaagaccactacggatatccgaggtggccagacacccaaatgggatcaagagcttcggtttaccgttcacgattcacctgattattaccagctgaaactctccgtcttcaacgatgacaagaagacggaactaataggtgagacatggatcgacctgcgtgacatcgtcgtaccaggtggggggcagagcgaccattggcatactctgagctgcaagggcaagtatgccggcgagattcggatagagattacctactacgacagcagacccaagcccgagccagtggcagctaagccccagcccgtcacctccagctccgatccagatctatttgcaagcgctcagaagccagcagtcaagaggcgtcctctgccatccgacccagtcaccggacaggcgccagcccctctgcctgagcctgtgcacactcctcctaggcctcaacctcagccaaaccctgctccggctttgatacccaaccagtcacccttgcaagcagttgagtataacacaccgcccccgaaccgatatggccagcccgactctcacacaccggtacacgcttcggcaagcaaatactcaacgccgccgcagcgagactaccagcagccaggaggagagagggatctataccacacgccgtcgcatgaaagcgatccgttccatcaatcgcaaagcgcgagttctcgaccacatgagctggacaataggtcaccttacaacgcacggcctaactatagcacgcagtctcttcctattcagcaccaacgatcgttcgaaagtcccgaacaaccacctcctccaccggcgcatagagtgagaagtagcaacaccaactcgccagatgccgtgcaccgcagtagcatggatatggtacagcatcagtctacaccgcccatgcgccaaaacgtcttgcggaaggaagcacatcggatgtctgtgtcttcaccttcctcagcatatccgggccgtccttcgtatcgcccgtatgattctgcgcccgtagtgcagaacagcccccaatataatgaaagcaacatggacccatcgccacggcatcattcgtacgactctacatacgactcacatcatcgtcaaatgcagccgacagtggaggatgtacctgagacttggacgcctccacggccgcgacctcgcgagagtatttcgcagtatgacggacctgaatacaatcccaacgtaagcccttctgcgttggccctcagcaggcgtgggccggcaccgccggaacaatacagccccggccggtctcatccccaaccgcatcatgattactacggccagggttcatcgccatcgccaatgtctggaggagactattctcaggcgttggtttcacgtgtatcagggtatcaacagatggatcgctactctggccacccagaggacctagacagcacccaattgaatcatcggaggagctatgaacctgcccccgatattcccaatacgctagtacctggcgccgacccaggcatggccctcgaggtagcgggccgatttcatgacgagagaagacaggagcgccgttacactgctggcccaggcgagatggtggtgcattctagaggccggcaatacagcgagcctcccgcacattaccccacaaatcatttgccacatatccaccagtcgagcaattcgagaagctacgataggggcgcaatgtcctactcgacatcgccgcaagcagctacaagcccggcatcatacgaagatcctcgtagggtgtcaccaagtccagcggcgcaccatacaattaagcgcaagtctgtgagcccagcaccacctccatctgatgcccggagacattcgggcgtgccatttgggccggattcatatgacgcattcaacccgacggtggccacgtcgcgggaagtgtcaagtagttccgtgaattacactactgcagacggtaaaatagtgactcacgatggacgcgaagtcgacccgtccgatcatttgcctatggatacgtgggcgcccgagcccgagccgaagaagcccgcgcagccagcagagacgagatcgcggccaatgccagctggagcgcagcctatgccgccttccggacgccgtccactgcggatagcggctcggcctagctctgctatcgtggcccctgctccagcgacattcagcacgcctgatctgacgcctcccggtagtactggtcgcaaccgtcttcagaagaagaaccaccgcgcatcagctatgccggctcccatctcttctacttctccactcggcccggcgtcggcacaccaacgcaacagtacgccgccgcgagctctggtccgagctagtaccttcgactacgagaatcacggggtgtacgacaacgaaccgggtggctctcggccgggatatgggtctgccccgccgatcccggctaaggtactgatgatgagcggcgggttgggacccagccagtcagcaccgccgaggggccatgaggacttttcgctcatggaagagatgagccgcattgatatcgggactggccgggcgagacggcatgatagatactaatagaaatgagagatagagaccaatgagatacgaggcgatggtgttgtatgatagataatgtttaaccatggcaagggcaaggtttgcatctggttatcttcttgcctacttcgcttctacattggcattcgaatacagatcgaaagcctgatccgggatatggtgttttacaatctttgctggacttggagggaagggatctggaacacggtggctaatatagagggcacgagcggttgcaagtaccaccaaaaatgtggttggaaatggatgacaggcagttgaggctagacgagacgcggcccctggctttcctacatcttacagtataccctttgggctgaacatatatggaatagaagcatgaatgaatgttcaaagcggattttcttgattgtgaaatggatgaatctgaaaggacacacttagaaaaaatcagggtaaagaggaaataggcgtccg

SEQ ID NO: 4118 - DNA, 951 bp, Muscodor strobelii
  misc_feature: SGI cDNA ID NO. 561051
  misc_feature: Encodes the peptide sequence at SEQ ID NO 4119
atgggcgcaccgcaatcgtcaacctcagtgctcatctcattctgtttctcgccccagcgagcatttcatacagagctgtctggcagtcgatctccgctatgcacgactcctacgaatgttgttgagagcatggcagataatgagcatttgatggccgatggccaagagctcgcatcgattacgtcggatttcccttatcctcgcttcggtacccatttgagcgttgagatcaaagcacgaggtgatgccaagagaatggcaaagaatgttctcgacctgtatcgatacgtcgactacccagtcatagctttcttcacggacggaagccataagaggggaacaatgtacggcggtatcggaatcgtcatttacgtgttctttcccggagagcaccccaaacgattgacgtactcgtatggcgtattttgcgctgatgcaccgcaggccgaggctcatgccatgatcaagggaattgatctcgtccttggcatagctgaggagcatctccgcaacgcatttgttgaaaataccgagctattccggttgcgcgtattcggatttaccgattcccagccagtgctggagtggctcagatcatatgatgacaataggtgtgcaccattagttggcaaccgatggccaaagatctgcgaaaacgtcttggggcgaacatttcagaatcttagtaactcgtcagtatttcctgagctccaatggcagaaaggacacgatggtgttgagggcaatctgcgcgcagacgtggtcgcgcgaagtgcaatgagattgatgtctatcgtcccggtctcgatcgactcgaagaacccccacaagatctttccggtaagcgaactcgctgttttcaaggacctcaagggactcacaaattgctcccgagacgacgatacacctatcgagacaacgttgttgggtcatgaagcagggtctttttaa

SEQ ID NO: 4119 - protein, 316 aa, Muscodor strobelii
  misc_feature: SGI Peptide ID NO. 561051
  misc_feature (101)..(259): NCBI GI: 85083230 Blast Desc: NCU05091 [Neurospora crassa OR74A] gi|28881376|emb|CAD70417.1| [Neurospora crassa] gi|28918162|gb|EAA27841.1| [Neurospora crassa OR74A]
MGAPQSSTSVLISFCFSPQRAFHTELSGSRSPLCTTPTNVVESMADNEHLMADGQELASITSDFPYPRFGTHLSVEIKARGDAKRMAKNVLDLYRYVDYPVIAFFTDGSHKRGTMYGGIGIVIYVFFPGEHPKRLTYSYGVFCADAPQAEAHAMIKGIDLVLGIAEEHLRNAFVENTELFRLRVFGFTDSQPVLEWLRSYDDNRCAPLVGNRWPKICENVLGRTFQNLSNSSVFPELQWQKGHDGVEGNLRADVVARSAMRLMSIVPVSIDSKNPHKIFPVSELAVFKDLKGLTNCSRDDDTPIETTLLGHEAGSF

SEQ ID NO: 4120 - DNA, 1092 bp, Muscodor strobelii
  misc_feature: SGI cDNA ID NO. 561052
  misc_feature: Encodes the peptide sequence at SEQ ID NO 4121
atgacccgttttggaaccgtggcgctcgccgccaccaccattctcaccggtctcgccagtgccgtgttcaaccctgtgggcagacaaaatgtggccgtttactatggctcaggtactggtcagaagcggctgacgacattctgcgccgatccaaccatagacgtcatcatcctatcctttgtcaatgagttcccgcagcaggccaacgggtaccccggcatcaacttcggcaaccagtgctgggccacggcctatcccggccccggtcctgacccgtctaaggacaagctcctgatgtgcccaaatctagctgaagacctgtacgtgtgtcgccagaacttccctaagatgaagtttcttctttccctcggcggcgacaccacaaagagcacatatcagctcacaggcgccgcagctggtaccgacttcgccaacaagctgtggaatatcttcggcccgcgcaacaacacgctcgtggcccagggactaccgcgcccctttgactacaccaacaacacgctcggagatggcatatcgcacgagtttagcgtcgacggctatgacctcgatattgagcggccctcgactgataagtcggcgggctacatcgcgtttgccaagcggctgcgcgttctctttgctacagacgtttctaagtcatactacctaacggcctcgcctcaatgcactgtgcccgacgccaatctaggggacaccatcacggccgctcagttcgactacctctttatccagttctacaacacggcggcctgctcggcccgggcttggatcacgggtaatccatcttacgtccccggcgggaccttcaaaaaaggcgggacgcgcctcttcctcactctgcctggtgccaacgcggccgccaccgcgggcgcctacatctccattgcccagaccaagcttatcgccagcgcttactactgccgcagcaagttcgctggcatcggcgtctgggaggcaacgtacgctgagacggcgatcgccaacgggaggaacttcttccaggccgccaaggacacgctcaaggccgcttcggttgacacgcggctttcatgcgtcgcgtcaacgaaatga

SEQ ID NO: 4121 - protein, 363 aa, Muscodor strobelii
  misc_feature: SGI Peptide ID NO. 561052
  misc_feature (29)..(329): Pfam Id: PF00704 Pfam Desc: Glycosyl hydrolases family 18
  misc_feature (23)..(355): NCBI GI: 39943038 Blast Desc: MGG_03599 [Magnaporthe grisea 70-15] gi|145009830|gb|EDJ94486.1| MGG_03599 [Magnaporthe grisea 70-15] gi|260279099|dbj|BAI44120.1| chitinase [Magnaporthe oryzae]
  misc_feature (34)..(348): NCBI GI: 156035901 Blast Desc: SS1G_13155 [Sclerotinia sclerotiorum 1980] gi|154698559|gb|EDN98297.1| SS1G_13155 [Sclerotinia sclerotiorum 1980]
  misc_feature (13)..(349): NCBI GI: 121718263 Blast Desc: glycosyl hydrolase, family 18, [Aspergillus clavatus NRRL 1] gi|119404350|gb|EAW14726.1| glycosyl hydrolase, family 18, [Aspergillus clavatus NRRL 1]
  misc_feature (18)..(347): NCBI GI: 240106285 Blast Desc: chitinase [Coccidioides posadasii C735 delta SOWgp]
  misc_feature (18)..(347): NCBI GI: 115502371 Blast Desc: chitinase [Coccidioides posadasii C735 delta SOWgp]
  misc_feature (18)..(347): NCBI GI: 1200192 Blast Desc: chitinase [Coccidioides posadasii] gi|1586545|prf||2204242B chitinase
  misc_feature (18)..(347): NCBI GI: 115515973 Blast Desc: chitinase [Coccidioides posadasii] gi|1586545|prf||2204242B chitinase
  misc_feature (18)..(347): NCBI GI: 2133239 Blast Desc: chitinase [Coccidioides posadasii] gi|1586545|prf||2204242B chitinase
  misc_feature (9)..(348): NCBI GI: 115433036 Blast Desc: [Aspergillus terreus NIH2624] gi|114189507|gb|EAU31207.1| [Aspergillus terreus NIH2624]
  misc_feature (18)..(347): NCBI GI: 258573439 Blast Desc: [Uncinocarpus reesii 1704] gi|237901167|gb|EEP75568.1| [Uncinocarpus reesii 1704]
  misc_feature (23)..(347): SWISSPROT Homolog: EC 3.2.1.14 Chitinase
MTRFGTVALAATTILTGLASAVFNPVGRQNVAVYYGSGTGQKRLTTFCADPTIDVIILSFVNEFPQQANGYPGINFGNQCWATAYPGPGPDPSKDKLLMCPNLAEDLYVCRQNFPKMKFLLSLGGDTTKSTYQLTGAAAGTDFANKLWNIFGPRNNTLVAQGLPRPFDYTNNTLGDGISHEFSVDGYDLDIERPSTDKSAGYIAFAKRLRVLFATDVSKSYYLTASPQCTVPDANLGDTITAAQFDYLFIQFYNTAACSARAWITGNPSYVPGGTFKKGGTRLFLTLPGANAAATAGAYISIAQTKLIASAYYCRSKFAGIGVWEATYAETAIANGRNFFQAAKDTLKAASVDTRLSCVASTK

SEQ ID NO: 4122 - DNA, 1873 bp, Muscodor strobelii
  misc_feature: SGI EST ID NO. CUFF.10347.0
  misc_feature: Variant of the nucleotide sequence at SEQ ID NO 4120
ctttgatcgtgaagaatgtatccatagtaaataaaaagggggttcgctcttttttgcctacagtccgcgttcaccctctcttcctcagcacggcgcaacgaggtaggccagttttgactgccgtttcactcttttctttcacacattcgttgctttttctatatcgaaattgtcatctttgccgtcattcgctcactatatttctgttaataatatttgcaacaatgacccgttttggaaccgtggcgctcgccgccaccaccattctcaccggtctcgccagtgccgtgttcaaccctgtgggcagacaaaatgtggccgtttactatggctcaggtactggtcagaagcggctgacgacattctgcgccgatccaaccatagacgtcatcatcctatcctttgtcaatgagttcccgcagcaggccaacgggtaccccggcatcaacttcggcaaccagtgctgggccacggcctatcccggccccggtcctgacccgtctaaggacaagctcctgatgtgcccaaatctagctgaagacctgtacgtgtgtcgccagaacttccctaagatgaagtttcttctttccctcggcggcgacaccacaaagagcacatatcagctcacaggcgccgcagctggtaccgacttcgccaacaagctgtggaatatcttcggcccgcgcaacaacacgctcgtggcccagggactaccgcgcccctttgactacaccaacaacacgctcggagatggcatatcgcacgagtttagcgtcgacggctatgacctcgatattgagcggccctcgactgataagtcggcgggctacatcgcgtttgccaagcggctgcgcgttctctttgctacagacgtttctaagtcatactacctaacggcctcgcctcaatgcactgtgcccgacgccaatctaggggacaccatcacggccgctcagttcgactacctctttatccagttctacaacacggcggcctgctcggcccgggcttggatcacgggtaatccatcttacgtccccggcgggaccttcaaaaaaggcggggttcaccttcgacgactggatgaccttcctcgcgggcacgacactcaacacgaagacgcgcctcttcctcactctgcctggtgccaacgcggccgccaccgcgggcgcctacatctccattgcccagaccaagcttatcgccagcgcttactactgccgcagcaagttcgctggcatcggcgtctgggaggcaacgtacgctgagacggcgatcgccaacgggaggaacttcttccaggccgccaaggacacgctcaaggccgcttcggttgacacgcggctttcatgcgtcgcgtcaacgaaatgaaagggcgtggttattcttgccattagagcgtgatatggttgtcgcccagctcacattgtacatatctgaccttggtatatactcggaagaataaattcaaattctggagcactcgtcgtgaagattctctggggtgaatgttcttaatgtcagatccttatgttagcgaaccgtcctgtctcgtggatggtgtcacaatgtcgcaagattgttgcgtgcgcgcgcgggagcgtacatggcacaaagaagtcaggtatctggcctgccatgagtttgcccctgcatttagctatctgttgcctctgcggcaatgacgaattaggtagtcaaaacgccacgaaggctacggggatctgcatgaccgtagacagctattttcggtacttacatgtaaatagttgtcacgaacctgcgggattgctagaatccgaacagacccatcatgcctatcacgacgaatttctcttggtatctcgaagaatccctcggcaaaaattccctc

SEQ ID NO: 4123 - DNA, 1674 bp, Muscodor strobelii
  misc_feature: SGI cDNA ID NO. 561053
  misc_feature: Encodes the peptide sequence at SEQ ID NO 4124
atggctccgcgattgaccctcgcgcagaggcaagcaatccttaatgccccaataaacatcaacgcattcaaggcacccgacggtacggaccgcccctccggaccttatgttcgattccaaaatctgtacgatgcagccctgcatggacatcagatcggactcgatgacccagcactcgaaggtctctcacgtattgtcggatttctagatggttcatttcttcaagatggatcacttgccggagggatagccgtttggtatcgagcatttatcaagaaaaaggatgacaaagacggtgtctttgcgaaatggactcgatggcaacgcctcgtagtaggggttgttgggtgcgataacaacggggcggaactcatcgctatcggtgaatttcttcatcttgtccggcggactctcggccagtcattcgtcaatgctagattgtttgttttgtcggattatttgtccgcgttacgtgtagtcaagtttcatctcgcgaatattccgttctccccattgatgggtgtctccgctgatgatacggctcacctattacgcccgctcgctgagctttcctccaagggcatacatgcagaaatcgattgggtgccagggcacgatggcgtaatcgggaatgatcacgcagaccttcttgcttataaagcagcgctatgcgttagggaactatgggagagtcacagctctttggtgcccacgccaccctacaaaggaggctattatctcattcccgtgcagacaatgatcgcggatgagaagttgttcaagcacgagcttgctcaacgggtccgtcagaacgagcaggtcgcccccgaaatacgagcacttcaagcatcaaccgccagaacctctacttccacgggtccgaaacatacaaatatcttccaacgctcgaccaaccatgcgcctattgtttcgcagaacattgttcgaccccgcaacaattcgccctcagtctccaagaacaggcattcttccaactcctcgtacttttctagacatagttcatcccggatgctgagtcgcgcagctgcctcggtttaccctaactcccatccattccagggccatggcaacatagctctgtcacgcgatgcagtcaacaacacaccgttaggcactcggcgcaagaactctttgcagtaccctaccaacaacacgccgctcggcttcaacagtacgaacatccccaaagactccgtcaaccttacaccactcggtactagacgctcccgttccttgcatccccctctcgagaataattcgtcccccacaaggaaccaacctccgggtcttccgcccaccaagacgagaactcctgccgtcgtcaaaagaccgacagatgaagcagacgagatacagacacgtgctaccaagagacagaaaacggagtacggcggcatcaaagcaagaggaatcaacaccgatcagaaagaacgaattaccgaagtcgagaatcagggtattgagaatatcgcgaaaaagcaaatcaatgatagcggaagaagagtgatcgacgaagtcgagaagaagcagaacgagaacattggacggaagaaaattgacatctgtgctagtcattcactgagcatggcatgggatacgactccgctatacctcctttgggaaagctcggcgaagagcgatatgttctattaa

SEQ ID NO: 4124 - protein, 557 aa, Muscodor strobelii
  misc_feature: SGI Peptide ID NO. 561053
  misc_feature (62)..(223): Pfam Id: PF00075 Pfam Desc: RNase H
  misc_feature (187)..(223): Pfam Id: PF00075 Pfam Desc: RNase H
MAPRLTLAQRQAILNAPININAFKAPDGTDRPSGPYVRFQNLYDAALHGHQIGLDDPALEGLSRIVGFLDGSFLQDGSLAGGIAVWYRAFIKKKDDKDGVFAKWTRWQRLVVGVVGCDNNGAELIAIGEFLHLVRRTLGQSFVNARLFVLSDYLSALRVVKFHLANIPFSPLMGVSADDTAHLLRPLAELSSKGIHAEIDWVPGHDGVIGNDHADLLAYKAALCVRELWESHSSLVPTPPYKGGYYLIPVQTMIADEKLFKHELAQRVRQNEQVAPEIRALQASTARTSTSTGPKHTNIFQRSTNHAPIVSQNIVRPRNNSPSVSKNRHSSNSSYFSRHSSSRMLSRAAASVYPNSHPFQGHGNIALSRDAVNNTPLGTRRKNSLQYPTNNTPLGFNSTNIPKDSVNLTPLGTRRSRSLHPPLENNSSPTRNQPPGLPPTKTRTPAVVKRPTDEADEIQTRATKRQKTEYGGIKARGINTDQKERITEVENQGIENIAKKQINDSGRRVIDEVEKKQNENIGRKKIDICASHSLSMAWDTTPLYLLWESSAKSDMFY

SEQ ID NO: 4125 - DNA, 1566 bp, Muscodor strobelii
  misc_feature: SGI cDNA ID NO. 561054
  misc_feature: Encodes the peptide sequence at SEQ ID NO 4126
atgcctttatatattccacattggtgggtcgactacttcttgaatgcgatcccaaatcctgaacacttttgcgttcctggcggtggagagtttcccacaaacttcaaggtggttatggacagacgttttcaggccacacgattttcagtccaaatcggacaagaccacccaaatctcccccgacatagggtcgtattgtacatcgacgggtcacatcggcgtagatggggtggcgttggcatattttggaaagccttcggtgttcgcggcaagcatcgctcaggtcgtatatggcgaggtgagctgtggggaatgctcgaaggcgacaacaactcgactgagctaggggcttgttccaaagccttgaggctggtcctcgacgaattctctgattccgacataaagccccgcctgattttcgtcaccgactcaaaatgtctgttggagcagctcatgcgttaccgtactggtgaagcgttcaaggaactgaaggggattacggcactcgatagtgcatctctgcttgccccgctcgagctcctggcagatcgtgggttattccccgagttctattggggtcctggccatgttggctgcccagggaacgaagcggccgactacctagctgggcgagcagcagatcaactccgagactctaaatgccgcgcactgcgagagaatcgctaccagttcttctcctgggaggaaatgacggctgatggcgactatgatggtcccacgacaggcacgaactcaattccgatctctgcacgggcagtttcagcgagtgccactacaaccgagtccgaatatgtcgtcaatcatcatccgagcacaggctcagaagctgatcgtcattctcactcaagacttgaaccaagtcgtagtcttcaagggagcgcggttccgaacccgagcgcctactcaagatacttattcaatcgctattctaatgcacatgagaaatctgtcttgctcagaaatttagtcttcgtctcacaagctcaagtcaccagggatagtgggctcaatggctgcaagtcgccaccccataaaagaccacgtacatcacctcatgtcccaaggaccgccgaaagcgaagttcatcgaggagatgggcaggaagatcctgagcagaaacacgagaaacacgagcgacacagatgcgatgaggacaagcgcgaagaaggcggatacgaaacagatctcgaccaggaaaaccccggaggcacaactctgaaagaaggagagttccaagtaggcgaccttgatgaacaaggacttgaagaaggagagatcctggaagaagaaactgccaagatctctggaagctctgtaaaagccaaaatatctagcccaccgcagcaacgtgcgactatactcaagcatgacgtgaaaacgactcgcaaaggctataagagtcaccagacactctcgcgcaaaacggcccagcgggaacgagacaagatcacatcaaccagcaacactaagctgaaccaatttactctcccgccacggcctgccgtctgcgcacccggcgaccgaatcagatatccacgactatag

SEQ ID NO: 4126 - protein, 521 aa, Muscodor strobelii
  misc_feature: SGI Peptide ID NO. 561054
  misc_feature (60)..(214): Pfam Id: PF00075 Pfam Desc: RNase H
  misc_feature (62)..(220): NCBI GI: 262375943 Blast Desc: ribonuclease HI [Acinetobacter lwoffii SH145] gi|262309037|gb|EEY90169.1| ribonuclease HI [Acinetobacter lwoffii SH145]
  misc_feature (112)..(214): NCBI GI: 154276646 Blast Desc: [Ajellomyces capsulatus NAm1] gi|150414241|gb|EDN09606.1| [Ajellomyces capsulatus NAm1]
  misc_feature (112)..(214): NCBI GI: 154272351 Blast Desc: [Ajellomyces capsulatus NAm1] gi|150409015|gb|EDN04471.1| [Ajellomyces capsulatus NAm1]
MPLYIPHWWVDYFLNAIPNPEHFCVPGGGEFPTNFKVVMDRRFQATRFSVQIGQDHPNLPRHRVVLYIDGSHRRRWGGVGIFWKAFGVRGKHRSGRIWRGELWGMLEGDNNSTELGACSKALRLVLDEFSDSDIKPRLIFVTDSKCLLEQLMRYRTGEAFKELKGITALDSASLLAPLELLADRGLFPEFYWGPGHVGCPGNEAADYLAGRAADQLRDSKCRALRENRYQFFSWEEMTADGDYDGPTTGTNSIPISARAVSASATTTESEYVVNHHPSTGSEADRHSHSRLEPSRSLQGSAVPNPSAYSRYLFNRYSNAHEKSVLLRNLVFVSQAQVTRDSGLNGCKSPPHKRPRTSPHVPRTAESEVHRGDGQEDPEQKHEKHERHRCDEDKREEGGYETDLDQENPGGTTLKEGEFQVGDLDEQGLEEGEILEEETAKISGSSVKAKISSPPQQRATILKHDVKTTRKGYKSHQTLSRKTAQRERDKITSTSNTKLNQFTLPPRPAVCAPGDRIRYPRL

SEQ ID NO: 4127 - DNA, 714 bp, Muscodor strobelii
  misc_feature: SGI cDNA ID NO. 561055
  misc_feature: Encodes the peptide sequence at SEQ ID NO 4128
atgcaagagcaaaagatcgagaccgagtttggcacgctctggactgcctgcggccatggtcgctcttccgacgcgcgtgaccctgacaagtcttactaccagtacgcctatgcagaagcggctctggaagtcctccggtattacaacattacgcaagtcataatactaggatggagccttggtgggcatgttgcgctggaatttgtctctgtgctcgcgaatgccaaagagcccactgacattcgtatcgctggcatcatgattaccggaacgcccccagttccgaagcaagcaatcgccggtttccgtaaagacgctgatgtctcagcgctattcaacccggaagcttccaaggaggacctcataaagattgcaggcgtttttaccaagtctgcaccgccagattggctggttgaagatgttttgcgtacgaaccacttggctggtaggactatggttgcaaaattcatggagggctactgcagtgatcagatcaagatcgtgcatgatatcaaagggtggatagccgtcgtcaacggtggttcagatcctcttctggacctggattactgtgattctgtctgcagaggagcacctcgcctatggcgcggtgaatgtatcaggctcaaggatgagggacatgcaccattcttcgataatccgcaaggttttctgactgtactcttggactttatcgacagttgtaaactgtaa

SEQ ID NO: 4128 - protein, 237 aa, Muscodor strobelii
  misc_feature: SGI Peptide ID NO. 561055
  misc_feature (18)..(230): Pfam Id: PF00561 Pfam Desc: alpha/beta hydrolase fold
  misc_feature (18)..(92): Pfam Id: PF00561 Pfam Desc: alpha/beta hydrolase fold
  misc_feature (5)..(235): NCBI GI: 153008167 Blast Desc: alpha/beta hydrolase fold [Ochrobactrum anthropi ATCC 49188] gi|151560055|gb|ABS13553.1| alpha/beta hydrolase fold [Ochrobactrum anthropi ATCC 49188]
  misc_feature (5)..(235): NCBI GI: 270313530 Blast Desc: alpha/beta hydrolase fold protein [Ochrobactrum sp. T63]
  misc_feature (5)..(235): NCBI GI: 239833132 Blast Desc: Abhydrolase domain-containing protein 8 [Ochrobactrum intermedium LMG 3301] gi|239825399|gb|EEQ96967.1| Abhydrolase domain-containing protein 8 [Ochrobactrum intermedium LMG 3301]
  misc_feature (18)..(232): NCBI GI: 169606442 Blast Desc: SNOG_06260 [Phaeosphaeria nodorum SN15] gi|111064971|gb|EAT86091.1| SNOG_06260 [Phaeosphaeria nodorum SN15]
  misc_feature (18)..(235): NCBI GI: 212532245 Blast Desc: valacyclovir hydrolase, [Penicillium marneffei ATCC 18224] gi|210071643|gb|EEA25732.1| valacyclovir hydrolase, [Penicillium marneffei ATCC 18224]
  misc_feature (18)..(235): NCBI GI: 260463518 Blast Desc: alpha/beta hydrolase fold protein [Mesorhizobium opportunistum WSM2075] gi|259030609|gb|EEW31886.1| alpha/beta hydrolase fold protein [Mesorhizobium opportunistum WSM2075]
  misc_feature (18)..(232): NCBI GI: 75674690 Blast Desc: alpha/beta hydrolase fold [Nitrobacter winogradskyi Nb-255] gi|74419560|gb|ABA03759.1| alpha/beta hydrolase fold [Nitrobacter winogradskyi Nb-255]
  misc_feature (18)..(235): NCBI GI: 242764202 Blast Desc: alpha/beta hydrolase, [Talaromyces stipitatus ATCC 10500] gi|218723918|gb|EED23335.1| alpha/beta hydrolase, [Talaromyces stipitatus ATCC 10500]
  misc_feature (18)..(233): NCBI GI: 85713670 Blast Desc: alpha/beta hydrolase fold protein [Nitrobacter sp. Nb-311A] gi|85699574|gb|EAQ37441.1| alpha/beta hydrolase fold protein [Nitrobacter sp. Nb-311A]
  misc_feature (3)..(236): NCBI GI: 209883885 Blast Desc: alpha/beta hydrolase fold protein [Oligotropha carboxidovorans OM5] gi|209872081|gb|ACI91877.1| alpha/beta hydrolase fold protein [Oligotropha carboxidovorans OM5]
MQEQKIETEFGTLWTACGHGRSSDARDPDKSYYQYAYAEAALEVLRYYNITQVIILGWSLGGHVALEFVSVLANAKEPTDIRIAGIMITGTPPVPKQAIAGFRKDADVSALFNPEASKEDLIKIAGVFTKSAPPDWLVEDVLRTNHLAGRTMVAKFMEGYCSDQIKIVHDIKGWIAVVNGGSDPLLDLDYCDSVCRGAPRLWRGECIRLKDEGHAPFFDNPQGFLTVLLDFIDSCKL

SEQ ID NO: 4129 - DNA, 708 bp, Muscodor strobelii
  misc_feature: SGI cDNA ID NO. 561056
  misc_feature: Encodes the peptide sequence at SEQ ID NO 4130
atgaaatatgcgtctcttcttctcatggttgcggcgaccaacgtcgcggcacactatacgtttcccataataggcaattcgacggattggcagttcgtccgtctgacagcgaacaagcaccttctcacccccgtctatgatgttaccacggaagccatccgctgctaccaacaaactccaggcggcggaggcaacacatcgacgttggacgtaaaagccgggagcaacctcatcttctccatctacccgaatatttatcaccctggcccgctgtccgcctacatggccaaagtgccagcagggcagagagccgtggacttcgacggtgctggagccgtgtggttcaagatctaccacgagatgccttactatcatgacaaggttgatgcgttcgggaagataatggactggcattcttatatgacctggtttgccaacttcaccattcccacctgtatcgaagatggagaatatctgtttcgcgtggagcatgtagggctacacgaagctcaaaagcccaacggggctcagtttttcctcgcttgcgcccagataagtctcacaggtggggagagcgtcaagcaaccaacgaatctcgtgtcctttccaggcgcgtacaagacagatgatccaggtatcttgattgacatttacggcgatactaagaaggaatacataccacacggtccgccagtattcacatgctga

SEQ ID NO: 4130 - protein, 235 aa, Muscodor strobelii
  misc_feature: SGI Peptide ID NO. 561056
  misc_feature (147)..(227): Pfam Id: PF03443 Pfam Desc: Glycosyl hydrolase family 61
  misc_feature (1)..(235): NCBI GI: 39946514 Blast Desc: MGG_08254 [Magnaporthe grisea 70-15] gi|145020107|gb|EDK04335.1| MGG_08254 [Magnaporthe grisea 70-15]
  misc_feature (1)..(235): NCBI GI: 116203843 Blast Desc: CHGG_09805 [Chaetomium globosum CBS 148.51] gi|88175933|gb|EAQ83401.1| CHGG_09805 [Chaetomium globosum CBS 148.51]
  misc_feature (1)..(235): NCBI GI: 116200239 Blast Desc: CHGG_08275 [Chaetomium globosum CBS 148.51] gi|88179554|gb|EAQ87022.1| CHGG_08275 [Chaetomium globosum CBS 148.51]
  misc_feature (4)..(235): NCBI GI: 171683736 Blast Desc: protein product [Podospora anserina] gi|170941828|emb|CAP67481.1| protein product [Podospora anserina]
  misc_feature (15)..(235): NCBI GI: 171680024 Blast Desc: protein product [Podospora anserina] gi|170939638|emb|CAP64865.1| protein product [Podospora anserina]
  misc_feature (1)..(235): NCBI GI: 189198079 Blast Desc: endoglucanase II [Pyrenophora tritici-repentis Pt-1C-BFP] gi|187981325|gb|EDU47951.1| endoglucanase II [Pyrenophora tritici-repentis Pt-1C-BFP]
  misc_feature (7)..(235): NCBI GI: 85076191 Blast Desc: NCU03328 [Neurospora crassa OR74A] gi|28881165|emb|CAD70347.1| related to cellulose binding protein CEL1 [Neurospora crassa] gi|28916920|gb|EAA26656.1| conserved
  misc_feature (1)..(235): NCBI GI: 261358752 Blast Desc: conserved [Verticillium albo-atrum VaMs.102]
  misc_feature (18)..(235): NCBI GI: 85092580 Blast Desc: NCU02344 [Neurospora crassa OR74A] gi|28920895|gb|EAA30230.1| conserved [Neurospora crassa OR74A] gi|40804596|emb|CAF05857.1| related to cellulose binding protein
  misc_feature (1)..(235): NCBI GI: 39968819 Blast Desc: MGG_02502 [Magnaporthe grisea 70-15] gi|145013882|gb|EDJ98523.1| MGG_02502 [Magnaporthe grisea 70-15]
  misc_feature (53)..(234): SWISSPROT Homolog: EC 3.2.1.4 Cellulase
MKYASLLLMVAATNVAAHYTFPIIGNSTDWQFVRLTANKHLLTPVYDVTTEAIRCYQQTPGGGGNTSTLDVKAGSNLIFSIYPNIYHPGPLSAYMAKVPAGQRAVDFDGAGAVWFKIYHEMPYYHDKVDAFGKIMDWHSYMTWFANFTIPTCIEDGEYLFRVEHVGLHEAQKPNGAQFFLACAQISLTGGESVKQPTNLVSFPGAYKTDDPGILIDIYGDTKKEYIPHGPPVFTC

SEQ ID NO: 4131 - DNA, 660 bp, Muscodor strobelii
  misc_feature: SGI cDNA ID NO. 561057
  misc_feature: Reduced expression when VOC is produced
  misc_feature: Encodes the peptide sequence at SEQ ID NO 4132
atggaagcagcaggcctcgccctcgacaaactcatgggtcgcaatcagcccaccgagccaggctccgagtcctcctccgccaaaccaagcgaaggtgtcgaaacccataccaaagagactgcaccagccgtcgagcacgaaacagttcgtagaaaacacgagcaccgggaacaagaagttatcgaccgggagcgccaccaagaccactacaagaccgtggtccagcctctcaccgaccgagatgtcgctggcactgaacacaaatacgaagaagccggcgtggaacgtcgcgagatatcccatgatacagacaagagcaatgatgcaaaagccatcttagcccggaagaacgaccagttcgagaatactagtcagaaggccgagacggagtacacgcatacccgggaagcgccgcaggagaccgagcatgtgcatcatcatttgcatgagactattcagcctgtaattgagaaagaaactgttattccgtctgtcactcataagaagatcccaatcaaggaggtacatcaggaggcttccttggatcacggcgtggagtataagaaacccatctcggtcgaagagtttcaaggtcgcctaggtggtcagggatcaggtgcaacggcttcaagcaaaggccttgaggatgaggagttatag

SEQ ID NO: 4132 - protein, 219 aa, Muscodor strobelii
  misc_feature: SGI Peptide ID NO. 561057
  misc_feature (41)..(206): NCBI GI: 169607999 Blast Desc: SNOG_07065 [Phaeosphaeria nodorum SN15] gi|111064596|gb|EAT85716.1| SNOG_07065 [Phaeosphaeria nodorum SN15]
  misc_feature (42)..(203): NCBI GI: 154301572 Blast Desc: BC1G_10113 [Botryotinia fuckeliana B05.10] gi|150855775|gb|EDN30967.1| BC1G_10113 [Botryotinia fuckeliana B05.10]
  misc_feature (39)..(202): NCBI GI: 171676684 Blast Desc: protein product [Podospora anserina] gi|170936409|emb|CAP61066.1| protein product [Podospora anserina]
  misc_feature (42)..(203): NCBI GI: 156032700 Blast Desc: SS1G_13755 [Sclerotinia sclerotiorum 1980] gi|154699158|gb|EDN98896.1| SS1G_13755 [Sclerotinia sclerotiorum 1980]
  misc_feature (42)..(204): NCBI GI: 46135907 Blast Desc: FG09469.1 [Gibberella zeae PH-1]
  misc_feature (41)..(201): NCBI GI: 189189536 Blast Desc: PTRG_00774 [Pyrenophora tritici-repentis Pt-1C-BFP] gi|187972713|gb|EDU40212.1| PTRG_00774 [Pyrenophora tritici-repentis Pt-1C-BFP]
  misc_feature (36)..(210): NCBI GI: 46126671 Blast Desc: FG07713.1 [Gibberella zeae PH-1]
  misc_feature (55)..(206): NCBI GI: 261354437 Blast Desc: allergen [Verticillium albo-atrum VaMs.102]
  misc_feature (42)..(202): NCBI GI: 256727678 Blast Desc: NECHADRAFT_91258 [Nectria haematococca mpVI 77-13-4]
  misc_feature (24)..(209): NCBI GI: 58268496 Blast Desc: allergen [Cryptococcus neoformans var. neoformans JEC21] gi|134112680|ref|XP_774883.1| CNBF0480 [Cryptococcus neoformans var. neoformans B-3501A] gi|50257531|gb|EAL20236.1|
  misc_feature: Useful for introducing or modulating the production of volatile compounds
MEAAGLALDKLMGRNQPTEPGSESSSAKPSEGVETHTKETAPAVEHETVRRKHEHREQEVIDRERHQDHYKTVVQPLTDRDVAGTEHKYEEAGVERREISHDTDKSNDAKAILARKNDQFENTSQKAETEYTHTREAPQETEHVHHHLHETIQPVIEKETVIPSVTHKKIPIKEVHQEASLDHGVEYKKPISVEEFQGRLGGQGSGATASSKGLEDEEL

SEQ ID NO: 4133 - DNA, 1317 bp, Muscodor strobelii
  misc_feature: SGI EST ID NO. CUFF.10416.0
  misc_feature: Variant of the nucleotide sequence at SEQ ID NO 4131
tttggagaaatcaaggtttcacacagctccaaggattcaccttggcatccgatcccatactaatgtctcaaaatgtcttttcaacaaacaaatattgatgcaatgggggagcatattctgtcggcgatctctagcttgtgattgctgtcagcttgagaattgagatgggtaatgagattcaagtccagccgagcctatcgccataagcagcaggtgcaagtcaactagggtatgtaggtacggttaaagtgcgaaccatgacgcgtttgcatacagaatctcaagatcgacgatggattttgcaaacaggattcatctctcaactttaaggtgccgaggtgcatcattgcagagtgtacattttcaaatgacgtgctagaccaataaccatgtgtcacttcaagtgagaaagctcagcatatatcatggtgaaccccgcgcccatagtactgcctcgaatctcgaagccctctagatcaaccaatactatctaattgctacacgaaggatcgacataacagcaacaatggaagcagcaggcctcgccctcgacaaactcatgggtcgcaatcagcccaccgagccaggctccgagtcctcctccgccaaaccaagcgaaggtgtcgaaacccataccaaagagactgcaccagccgtcgagcacgaaacagttcgtagaaaacacgagcaccgggaacaagaagttatcgaccgggagcgccaccaagaccactacaagaccgtggtccagcctctcaccgaccgagatgtcgctggcactgaacacaaatacgaagaagccggcgtggaacgtcgcgagatatcccatgatacagacaagagcaatgatgcaaaagccatcttagcccggaagaacgaccagttcgagaatactagtcagaaggccgagacggagtacacgcatacccgggaagcgccgcaggagaccgagcatgtgcatcatcatttgcatgagactattcagcctgtaattgagaaagaaactgttattccgtctgtcactcataagaagatcccaatcaaggaggtacatcaggaggcttccttggatcacggcgtggagtataagaaacccatctcggtcgaagagtttcaaggtcgcctaggtggtcagggatcaggtgcaacggcttcaagcaaaggccttgaggatgaggagttatagtctgatgactattgtcgctcgccatgttgcaattaggcctgtcgcacgagatgtatctaggaagttagctgtactagtatggtagtatgaggctgtgccgctgttggccgccgaacatgtatcaaaagttg

SEQ ID NO: 4134 - DNA, 627 bp, Muscodor strobelii
  misc_feature: SGI cDNA ID NO. 561058
  misc_feature: Encodes the peptide sequence at SEQ ID NO 4135
atgtcgaaccgacagctggcccgcgacatgcaagtcgagttccaggctcgattccaagcgaaacaagcccgacgcgaagctcagaaggccgccaagcaggatccgctcctcaagaagcagatccaggaactcctgaagaagggcgaacatgccaaagcctaccagaaggcacagatcctcttgaagaagcaggcatttgctcaacagatggacaacatggccgacatggccgagctcagcgccgcccagatccaggccaacaacagcatgaaccgcatgactcatatgatggggcagtcgtcgcgaacgatgaacgctgcccagaagaacatgaatcccgagaggactctcatgaccctcgaacagttcaagcagcagaacgaagaatactccgtcaacagcggcatttaccaggacgccatggcacagactacatcgcaggaagtatcggaagatgcagtacacgaacttctcgggaagttggccgacgatgctggcgttgaactaaatgcgcagtttaacactgcgcaaccttccaaggtcgatcctacccccgcacagacaaatgaacccacggccgaggaggaagatgccctgcagcagcgtctgcgagccttgcgtgcatag

SEQ ID NO: 4135 - protein, 208 aa, Muscodor strobelii
  misc_feature: SGI Peptide ID NO. 561058
  misc_feature (15)..(189): Pfam Id: PF03357 Pfam Desc: Snf7
  misc_feature (1)..(208): NCBI GI: 261353380 Blast Desc: conserved [Verticillium albo-atrum VaMs.102]
  misc_feature (1)..(208): NCBI GI: 256721887 Blast Desc: NECHADRAFT_67766 [Nectria haematococca mpVI 77-13-4]
  misc_feature (1)..(208): NCBI GI: 171683149 Blast Desc: protein product [Podospora anserina] gi|170941534|emb|CAP67186.1| protein product [Podospora anserina]
  misc_feature (1)..(208): NCBI GI: 85111336 Blast Desc: NCU01854 [Neurospora crassa OR74A] gi|28925634|gb|EAA34652.1| [Neurospora crassa OR74A]
  misc_feature (1)..(208): NCBI GI: 116193953 Blast Desc: CHGG_06694 [Chaetomium globosum CBS 148.51] gi|88182607|gb|EAQ90075.1| CHGG_06694 [Chaetomium globosum CBS 148.51]
  misc_feature (14)..(207): NCBI GI: 149238441 Blast Desc: vacuolar protein sorting protein 46 [Lodderomyces elongisporus NRRL YB-4239] gi|146451694|gb|EDK45950.1| vacuolar protein sorting protein 46 [Lodderomyces elongisporus NRRL
  misc_feature (14)..(207): NCBI GI: 68470476 Blast Desc: CaO19.11783 [Candida albicans SC5314] gi|68470737|ref|XP_720614.1| CaO19.4307 [Candida albicans SC5314] gi|46442490|gb|EAL01779.1| CaO19.4307 [Candida albicans SC5314]
  misc_feature (14)..(208): NCBI GI: 150865568 Blast Desc: Vacuolar protein sorting protein 46 (Charged multivesicular body protein 1) (DOA4-independent degradation protein 2) (Fifty two inhibitor 1) [Pichia stipitis CBS 6054] 46
  misc_feature (14)..(208): NCBI GI: 254581232 Blast Desc: ZYRO0D03872p [Zygosaccharomyces rouxii] gi|238939493|emb|CAR27668.1| ZYRO0D03872p [Zygosaccharomyces rouxii]
  misc_feature (14)..(207): NCBI GI: 241955689 Blast Desc: vacuolar protein-sorting-associated protein, ; vacuolar-protein sorting and endocytosis factor, [Candida dubliniensis CD36] gi|223643907|emb|CAX41644.1| vacuolar protein,
MSNRQLARDMQVEFQARFQAKQARREAQKAAKQDPLLKKQIQELLKKGEHAKAYQKAQILLKKQAFAQQMDNMADMAELSAAQIQANNSMNRMTHMMGQSSRTMNAAQKNMNPERTLMTLEQFKQQNEEYSVNSGIYQDAMAQTTSQEVSEDAVHELLGKLADDAGVELNAQFNTAQPSKVDPTPAQTNEPTAEEEDALQQRLRALRA

SEQ ID NO: 4136 - DNA, 1292 bp, Muscodor strobelii
  misc_feature: SGI EST ID NO. CUFF.10869.0
  misc_feature: Variant of the nucleotide sequence at SEQ ID NO 4134
gctgaggctctccatgggccgagagtcagctcaaggttggggctaggccgaccatcaagagtcagtcttcatcactatctccttccacacgcgaccacctaacccatctgctcgaccccccgcacgtctttttactttcactacgacatcgaaagacctgtgtttccagctcgccgaccgcgcgcactccacgaaaccgtctatatccctctgtcgcgataccccgccattcctacatccaccatgtcgaaccgacagctggcccgcgacatgcaagtcgagttccaggctcgagtatgtccttcgccatgcaataccactactgcgccgcttgctgacaacgcgcgctcatccagttccaagcgaaacaagcccgacgcgaagctcagaaggccgccaagcaggatccgctcctcaagaagcagatccaggaactcctgaagaagggcgaacatgccaaagcctaccagaaggcacagatcctcttgaagaagcaggcatttgctcaacagatggacaacatggccgacatggccgagctcagcgccgcccagatccaggccaacaacagcatgaaccgcatgactcatatgatggggcagtcgtcgcgaacgatgaacgctgcccagaagaacatgaatcccgagaggactctcatgaccctcgaacagttcaagcagcagaacgaagaatactccgtcaacagcggcatttaccaggacgccatggcacagactacatcgcaggaagtatcggaagatgcagtacacgaacttctcgggaagttggccgacgatgctggcgttgaactaaatgcgcagtttaacactgcgcaaccttccaaggtcgatcctacccccgcacagacaaatgaacccacggccgaggaggaagatgccctgcagcagcgtctgcgagccttgcgtgcatagaaagctgacgatggccaagacgatgactcgggcgatgagggcagaggtggacgaaatgcagtcctacggaccaaggatggcaagaagcgtcaagccgagacagagatcttctgagatgtggcatgattgttgatgacttacatatgggattgttaggcgttcggcgacacggattttttcatggagggcgtttctctgaagttttagaaggtccacgaggcgttgatttatctccagacagcatgaaatcgcatcatcatctctaattacaaagtgttccttccgtagcggctggagccagttgagaacagtgctcaaaggttacgaacgacagtttcacgatgtgcgcgatgattgttt

SEQ ID NO: 4137 - DNA, 483 bp, Muscodor strobelii
  misc_feature: SGI cDNA ID NO. 561059
  misc_feature: Encodes the peptide sequence at SEQ ID NO 4138
atggtgcctcgagtgaaaatgaatgtgcagtctttcccaagaccaccacgacttgagaaaacgccaaggcatctacagatcaaatggaatgacacgttaatcgcagatacaaaggaagcatactgggtcttagaaacccatcatccgcccacgtattatctccccccaacatcaatacaggaaaacgtgaatttgaaacccacttcgaggtcctcatggtgcgagtggaaaggcaaagcaacatattatgccatcagccagggcaacgacaaggctgtctcaaatcgcatatggtcatatgatgagcccacaaaaggcttcaccgcgatcaagggctacctctccttctatgctgggccatgggattgctatgttgacggagagaaggtagagccacaaccaggagatttctatggtggctgggtcacaagtgacattgagggcatagtcaaaggtcgcatgggcaattttgatcctgtgtag

SEQ ID NO: 4138 - protein, 160 aa, Muscodor strobelii
  misc_feature: SGI Peptide ID NO. 561059
  misc_feature (25)..(127): Pfam Id: PF04248 Pfam Desc: Domain of function (DUF427)
  misc_feature (1)..(152): NCBI GI: 261353381 Blast Desc: conserved [Verticillium albo-atrum VaMs.102]
  misc_feature (6)..(159): NCBI GI: 145609481 Blast Desc: MGG_07633 [Magnaporthe grisea 70-15] gi|145016846|gb|EDK01276.1| MGG_07633 [Magnaporthe grisea 70-15]
  misc_feature (6)..(160): NCBI GI: 85111338 Blast Desc: NCU01855 [Neurospora crassa OR74A] gi|28925635|gb|EAA34653.1| [Neurospora crassa OR74A]
  misc_feature (1)..(152): NCBI GI: 156058514 Blast Desc: SS1G_03269 [Sclerotinia sclerotiorum 1980] gi|154701056|gb|EDO00795.1| SS1G_03269 [Sclerotinia sclerotiorum 1980]
  misc_feature (1)..(152): NCBI GI: 154310684 Blast Desc: BC1G_06816 [Botryotinia fuckeliana B05.10] gi|150851356|gb|EDN26549.1| BC1G_06816 [Botryotinia fuckeliana B05.10]
  misc_feature (6)..(152): NCBI GI: 171683147 Blast Desc: protein product [Podospora anserina] gi|170941533|emb|CAP67185.1| protein product [Podospora anserina]
  misc_feature (8)..(152): NCBI GI: 166363403 Blast Desc: MAE_06620 [Microcystis aeruginosa NIES-843] gi|166085776|dbj|BAG00484.1| [Microcystis aeruginosa NIES-843]
  misc_feature (8)..(156): NCBI GI: 126658543 Blast Desc: CY0110_25516 [Cyanothece sp. CCY0110] gi|126620130|gb|EAZ90852.1| CY0110_25516 [Cyanothece sp. CCY0110]
  misc_feature (8)..(156): NCBI GI: 75907413 Blast Desc: Ava_1190 [Anabaena variabilis ATCC 29413] gi|75701138|gb|ABA20814.1| Protein of function DUF427 [Anabaena variabilis ATCC 29413]
  misc_feature (8)..(152): NCBI GI: 159030179 Blast Desc: protein product [Microcystis aeruginosa PCC 7806]
MVPRVKMNVQSFPRPPRLEKTPRHLQIKWNDTLIADTKEAYWVLETHHPPTYYLPPTSIQENVNLKPTSRSSWCEWKGKATYYAISQGNDKAVSNRIWSYDEPTKGFTAIKGYLSFYAGPWDCYVDGEKVEPQPGDFYGGWVTSDIEGIVKGRMGNFDPV

SEQ ID NO: 4139 - DNA, 627 bp, Muscodor strobelii
  misc_feature: SGI EST ID NO. CUFF.10419.0
  misc_feature: Variant of the nucleotide sequence at SEQ ID NO 4137
cgaaaagctggatggatatctcaagtatgagtatcacagtatagcaggttcttgctcactcgttaacgattcttcagcgatatatcaatcaataatggtgcctcgagtgaaaatgaatgtgcagtctttcccaagaccaccacgacttgagaaaacgccaaggcatctacagatcaaatggaatgacacgttaatcgcagatacaaaggaagcatactgggtcttagaaacccatcatccgcccacgtattatctccccccaacatcaatacaggaaaacgtgaatttgaaacccacttcgaggtcctcatggtgcgagtggaaaggcaaagcaacatattatgccatcagccagggcaacgacaaggctgtctcaaatcgcatatggtcatatgatgagcccacaaaaggcttcaccgcgatcaagggctacctctccttctatgctgggccatgggattgctatgttgacggagagaaggtagagccacaaccaggagatttctatggtggctgggtcacaagtgacattgagggcatagtcaaaggtcgcatgggcaattttgatcctgtgtagatacaatgaaacgtcaacaagaagaattcaagtctcggatatgctcaaag

SEQ ID NO: 4140 - DNA, 2997 bp, Muscodor strobelii
  misc_feature: SGI cDNA ID NO. 561060
  misc_feature: Encodes the peptide sequence at SEQ ID NO 4141
atgactatggcaaaaaagagattgctactcaatattttggaacagggggatttgcagtcgctatacttaacatggaaaaacaagtcactgagaaagatttggcctgatctagttggggccgtcaggacagcactcgatcataacgatgacgatatcgagggaaatgacaacgcgaaaggacctgacacacagatactggaagacctcaaggaaatattggggtatgatgagcccaagacaaagctgagcttcaagaagacagagctatatcgagaggcacttctggactgggatgcagacaacggtctggaagatgctgccgccatgatagttaatgccttgtgtcttctgaacccggagatggcatttaccgacccgattaaaaaaaagcaaacggacaagtatacaaatcagttaagtgattctactgtctacgtgtttcacgaggcagtggaaaagggagccttgggagttgttgaggccatgctcaacgcgctgcctcagtaccccgaaaattcagagcagaggctgcgcattgttgacagatgtatcgactgtaaagacaaaggcagcgggaaaactccccttcatctggcagctgaacacctgcaactggatattctcaaactgatgctgaggaagtacccagaactggccaacagagaaagcattgcagactgtattggagagatcatacagagaactgcgcccacggaggacgaagatgacatacggatagcctttgcggccttcaaactcattttcacaaaattgacaaggaacgagataatctcggagaggatatggaaagatgctgtggcgacccggtcaaaaaagataatccagtacctactggatgaacgggactgtgagaatggagagggcagaggaaatgaaaactgtgaagctaacgcgtttgtcacgcagggcaatgcgaaggttgtcatcgaaaatggcgaccgtgagatttgggacagtttcaaagttacataccgacgccggctccttgccgaccagaacaatgacctcttgcatatagctgtgagatccggcaaggcggatatcgtggaaagcattctgaaggatgtgcccgaacagatagaggtcaaatttggtgacaagaaccatatatttgcgattcaagagctgactcaaccgtccaaggatgatgatcttcgcaacattcttgtccgcgccatgattcgaagcacgagcgaaaagtttggcattcgagaacttcgggctttgttggacatctcaaatacggatcaaatgtgcctccacctaacaaatcttgacactgaaagacagagcttcgatgaatacgtgcaggggcttctacagcagaaagagtcgatggggaagatttacaagtttgagaagagcttgaagtatgcaaagtttccggatctaaatgcgcaagtgtccgagcaagcccaggatataattagcggcctgcgtatgcaccatcacgaggttagggacatattcaaatggctcgcgcatagaatggttgaagatgttgtcgagctgtctgtccctgatcgactgcttgctccccacacggacgatgatgtcgactactgcgtgaataagttcaaggttcgtatcttaaagtggaagaaactagacctgtatctcggcaactttagtaaggagaccagggatgagctacaagagctacacctctacagtagcgggaaacagctcgttcataaccactggttttccgccctagggagctttcagaaggatgtgatgcccgagacgcgattgagagaaacaattgaaacattacaaacaaaattagacaagctaaacagagattctctcaattgtcgatggacggcagggcgtatagggttgagaaaagacagggagaagaaaccaatggttccagtcgagaaatatctttgggctgcggatcgaggcttcaagacctataagaatctggatgagattcgtaatgatgtcgttggagcaaatcttgcagcctttattgacaagtacctcggttaccaggctcccactcttgggagaacaaaaatagccgtgatcgatagtggtgtagttattgtcagtggtaagggaaagaatgaaacaaacgacacgaccacgagtagcagaacagagagcgagaagcagaataaaagcggcataccaaatcacattgctacaatcccaccatcaaccagcgacctggcggatcgcatagaggaaggtatatcttttgtgggcactggcgatgatgaggaacaaatgtggtggcacgcctctgagccgcatggaacacaaatggcaaggttaatttgttccattgaccctctttgcaggctctacgttgcgaaagtcgcggagacacgaagtccaggtatcgctgcaaacatagtcgctaaggcaattgattgggcaattgaaaaacaggtcgatattatatcaattagccttgtggtcttcaccggcacaggccccatgatggagcaaataacaagagccaaaatggagggcatcgtggttttcgtgaccactgcagacacaggtctagcgacaacacagacatcaacggacaagtctgacttcaacgaggacctatttaccattgccgcgtgtgacaaatggggaaatctgctaccattcagccagagaactggtgctagatttcggttcgtgggacaaaatgtccaagttggacaaatacctttctcaaagtctgaagaaacaattaccggcagctcagctgcgacggctatcgcggctgggacagcatcactaatcctagcttgttgccgaatttcacctaactttgataaatctaaaaaagattggagatatcgtatcatcaaatccaagttcgccgcgatgggagaaggagattcgccaccttgggtcaaactcgaaaacttatgtggcaagaataaagacctgcgcgggaatgattttgaggcgatggttatttcagaattccatagtaactacgagcacggccgaaacaaatga

SEQ ID NO: 4141 - protein, 998 aa, Muscodor strobelii
  misc_feature: SGI Peptide ID NO. 561060
  misc_feature (191)..(223): Pfam Id: PF00023 Pfam Desc: Ankyrin repeat
  misc_feature (106)..(931): NCBI GI: 46117488 Blast Desc: FG04586.1 [Gibberella zeae PH-1]
  misc_feature (418)..(930): NCBI GI: 115385108 Blast Desc: [Aspergillus terreus NIH2624] gi|114196793|gb|EAU38493.1| [Aspergillus terreus NIH2624]
  misc_feature (681)..(932): NCBI GI: 46134213 Blast Desc: FG09246.1 [Gibberella zeae PH-1]
  misc_feature (734)..(979): NCBI GI: 171678501 Blast Desc: protein product [Podospora anserina] gi|170937320|emb|CAP61978.1| protein product [Podospora anserina]
  misc_feature (429)..(577): NCBI GI: 171678499 Blast Desc: protein product [Podospora anserina] gi|170937319|emb|CAP61977.1| protein product [Podospora anserina]
  misc_feature (458)..(942): NCBI GI: 116180760 Blast Desc: CHGG_01008 [Chaetomium globosum CBS 148.51] gi|88185305|gb|EAQ92773.1| CHGG_01008 [Chaetomium globosum CBS 148.51]
  misc_feature (492)..(932): NCBI GI: 46133981 Blast Desc: FG09130.1 [Gibberella zeae PH-1]
  misc_feature (765)..(906): NCBI GI: 14269405 Blast Desc: serine proteinase-like protein [Ophiostoma novo-ulmi]
  misc_feature (725)..(931): NCBI GI: 212531555 Blast Desc: PMAA_064980 [Penicillium marneffei ATCC 18224] gi|210071298|gb|EEA25387.1| PMAA_064980 [Penicillium marneffei ATCC 18224]
  misc_feature (496)..(942): NCBI GI: 256733837 Blast Desc: NECHADRAFT_77386 [Nectria haematococca mpVI 77-13-4]
MTMAKKRLLLNILEQGDLQSLYLTWKNKSLRKIWPDLVGAVRTALDHNDDDIEGNDNAKGPDTQILEDLKEILGYDEPKTKLSFKKTELYREALLDWDADNGLEDAAAMIVNALCLLNPEMAFTDPIKKKQTDKYTNQLSDSTVYVFHEAVEKGALGVVEAMLNALPQYPENSEQRLRIVDRCIDCKDKGSGKTPLHLAAEHLQLDILKLMLRKYPELANRESIADCIGEIIQRTAPTEDEDDIRIAFAAFKLIFTKLTRNEIISERIWKDAVATRSKKIIQYLLDERDCENGEGRGNENCEANAFVTQGNAKVVIENGDREIWDSFKVTYRRRLLADQNNDLLHIAVRSGKADIVESILKDVPEQIEVKFGDKNHIFAIQELTQPSKDDDLRNILVRAMIRSTSEKFGIRELRALLDISNTDQMCLHLTNLDTERQSFDEYVQGLLQQKESMGKIYKFEKSLKYAKFPDLNAQVSEQAQDIISGLRMHHHEVRDIFKWLAHRMVEDVVELSVPDRLLAPHTDDDVDYCVNKFKVRILKWKKLDLYLGNFSKETRDELQELHLYSSGKQLVHNHWFSALGSFQKDVMPETRLRETIETLQTKLDKLNRDSLNCRWTAGRIGLRKDREKKPMVPVEKYLWAADRGFKTYKNLDEIRNDVVGANLAAFIDKYLGYQAPTLGRTKIAVIDSGVVIVSGKGKNETNDTTTSSRTESEKQNKSGIPNHIATIPPSTSDLADRIEEGISFVGTGDDEEQMWWHASEPHGTQMARLICSIDPLCRLYVAKVAETRSPGIAANIVAKAIDWAIEKQVDIISISLVVFTGTGPMMEQITRAKMEGIVVFVTTADTGLATTQTSTDKSDFNEDLFTIAACDKWGNLLPFSQRTGARFRFVGQNVQVGQIPFSKSEETITGSSAATAIAAGTASLILACCRISPNFDKSKKDWRYRIIKSKFAAMGEGDSPPWVKLENLCGKNKDLRGNDFEAMVISEFHSNYEHGRNK

SEQ ID NO: 4142 - DNA, 1924 bp, Muscodor strobelii
  misc_feature: SGI EST ID NO. CUFF.10465.0
  misc_feature: Variant of the nucleotide sequence at SEQ ID NO 4140
tgcagactgtattggagagatcatacagagaactgcgcccacggaggacgaagatgacatacggatagcctttgcggccttcaaactcattttcacaaaattgacaaggaacgagataatctcggagaggatatggaaagatgctgtggcgacccggtcaaaaaagataatccagtacctactggatgaacgggactgtgagaatggagagggcagaggaaatgaaaactgtgaagctaacgcgtttgtcacgcagggcaatgcgaaggttgtcatcgaaaatggcgaccgtgagatttgggacagtttcaaagttacataccgacgccggctccttgccgaccagaacaatgacctcttgcatatagctgtgagatccggcaaggcggatatcgtggaaagcattctgaaggatgtgcccgaacagatagaggtcaaatttggtgacaagaaccatatatttgcgattcaagagctgactcaaccgtccaaggatgatgatcttcgcaacattcttgtccgcgccatgattcgaagcacgagcgaaaagtttggcattcgagaacttcgggctttgttggacatctcaaatatccaaggcaagtcgattagggaagaagtccggcgttaacaatagcgactaatttggacaaaagcggatcaaatgtgcctccacctaacaaatcttgacactgaaagacagagcttcgatgaatacgtgcaggggcttctacagcagaaagagtcgatggggaagatttacaagtttgagaagagcttgaagtatgcaaagtttccggatctaaatgcgcaagtgtccgagcaagcccaggatataattagcggcctgcgtatgcaccatcacgaggttagggacatattcaaatggctcgcgcatagaatggttgaagatgttgtcgagctgtctgtccctgatcgactgcttgctccccacacggacgatgatgtcgactactgcgtgaataagttcaaggttcgtatcttaaagtggaagaaactagacctgtatctcggcaactttagtaaggagaccagggatgagctacaagagctacacctctacagtagcgggaaacagctcgttcataaccactggttttccgccctagggagctttcagaaggtatattgagacttcgcttattgaaaacgcccagacgacttacactaattgcatcggaagctacgccacctatttgtatatgtggtagcggtgaggcaagctgttcgttatccatgcaatctgctgacgagaaacaggatgtgatgcccgagacgcgattgagagaaacaattgaaacattacaaacaaaattagacaagctaaacagagattctctcaattgtcgatggacggcagggcgtatagggttgagaaaagacagggagaagaaaccaatggttccagtcgagaaatatctttgggctgcggatcgaggcttcaagacctataagaatctggatgagattcgtaatgatgtcgttggagcaaatcttgcagcctttattgacaagtacctcggttaccaggctcccactcttgggagaacaaaaatagccgtgatcgatagtggtgtagttattgtcagtggtaagggaaagaatgaaacaaacgacacgaccacgagtagcagaacagagagcgagaagcagaataaaagcggcataccaaatcacattgctacaatcccaccatcaaccagcgacctggcggatcgcatagaggaaggtatatcttttgtgggcactggcgatgatgaggaacaaatgtggtggcacgcctctgagccgcatggaacacaaatggcaaggttaatttgttccattgaccctctttgcaggctctacgttgcgaaagtcgcggagacacgaagtccaggtatcgctgcaaacatagtcgcta

SEQ ID NO: 4143 - DNA, 1005 bp, Muscodor strobelii
  misc_feature: SGI cDNA ID NO. 561061
  misc_feature: Reduced expression when VOC is produced
  misc_feature: Encodes the peptide sequence at SEQ ID NO 4144
atgtctactatcgagtccacagatgctgccctcgaggctctgagggtacaatcggatgatgaggttgatgaagagcccttttacgaggaacttgatcctgattttgaagaccgacttggcgccttcaagacgaagaatccggaggagaaccgcctgcaaagaagattcatccatgtagcaagcgagaaatccaaatttcgaaagacaatcgagacagtccttgtcgttcacggctgggagacaccagcaaagactgtgcccatgaccctcatcgtcctcggcgtcggcctcgactgccactcccagaacttccgattccagtccgtcaggatgtggcttgctttctacgaagatgataaagccgatctacctaatacagagaaagctgccccccaggtggtcgcctgggctccgttcgtgcagcaggaccagtggggcgagagtgaagaagcagtgggaaaatctactacgatcggggccactgtgggtgctgaatatattggcaaagctgacatcaactgggagcggggaaggacgagctcgtttacacgcaaacattttgatcgcggctcggccgaccgacttgttcacaacgataaggtatttggagtcaattggtattgcgaacagaataaattacagaaatacggtgtcaagccttatttccacattgcggtccttctgaagcgatctcacaccagaacagatgaacccattacattcaagggtatcttcgacatgcgcattgaagctggcttcattcacgacttcaatgaagggcggcgtcgttcgttcaggcttggaaagccagaggatgatcccatttactatgaccccacattacctgaccaagtgggtgggattgaaggctcagggcactctatctatagaaaggtggagaaagacaagttgggggacctagcggagggttaccgactcagcgctctccttgatcctagtaacactccgtcgggtctcgagcccctacagcctaaagtagcgtga

SEQ ID NO: 4144 - protein, 334 aa, Muscodor strobelii
  misc_feature: SGI Peptide ID NO. 561061
  misc_feature (59)..(318): NCBI GI: 46117488 Blast Desc: FG04586.1 [Gibberella zeae PH-1]
  misc_feature (74)..(289): NCBI GI: 256733836 Blast Desc: NECHADRAFT_77385 [Nectria haematococca mpVI 77-13-4]
  misc_feature (41)..(282): NCBI GI: 256733762 Blast Desc: NECHADRAFT_36556 [Nectria haematococca mpVI 77-13-4]
  misc_feature (16)..(279): NCBI GI: 238504444 Blast Desc: conserved [Aspergillus flavus NRRL3357] gi|220690924|gb|EED47273.1| conserved [Aspergillus flavus NRRL3357]
  misc_feature: Useful for introducing or modulating the production of volatile compounds
MSTIESTDAALEALRVQSDDEVDEEPFYEELDPDFEDRLGAFKTKNPEENRLQRRFIHVASEKSKFRKTIETVLVVHGWETPAKTVPMTLIVLGVGLDCHSQNFRFQSVRMWLAFYEDDKADLPNTEKAAPQVVAWAPFVQQDQWGESEEAVGKSTTIGATVGAEYIGKADINWERGRTSSFTRKHFDRGSADRLVHNDKVFGVNWYCEQNKLQKYGVKPYFHIAVLLKRSHTRTDEPITFKGIFDMRIEAGFIHDFNEGRRRSFRLGKPEDDPIYYDPTLPDQVGGIEGSGHSIYRKVEKDKLGDLAEGYRLSALLDPSNTPSGLEPLQPKVA

SEQ ID NO: 4145 - DNA, 1188 bp, Muscodor strobelii
  misc_feature: SGI EST ID NO. CUFF.10593.0
  misc_feature: Variant of the nucleotide sequence at SEQ ID NO 4143
cagatagatgcaattaccaattaccttcccctggattaccgagaaagttgcttatttttccagtggtgagacttttggcgtcccgtaccatgtctactatcgagtccacagatgctgccctcgaggctctgagggtacaatcggatgatgaggttgatgaagagcccttttacgaggaacttgatcctgattttgaagaccgacttggcgccttcaagacgaagaatccggaggagaaccgcctgcaaagaagattcatccatgtagcaagcgagaaatccaaatttcgaaagacaatcgagacagtccttgtcgttcacggctgggagacaccagcaaagactgtgcccatgaccctcatcgtcctcggcgtcggcctcgactgccactcccagaacttccgattccagtccgtcaggatgtggcttgctttctacgaagatgataaagccgatctacctaatacagagaaagctgccccccaggtggtcgcctgggctccgttcgtgcagcaggaccagtggggcgagagtgaagaagcagtgggaaaatctactacgatcggggccactgtgggtgctgaatatattggcaaagctgacatcaactgggagcggggaaggacgagctcgtttacacgcaaacattttgatcgcggctcggccgaccgacttgttcacaacgataaggtatttggagtcaattggtattgcgaacagaataaattacagaaatacggtgtcaagccttatttccacattgcggtccttctgaagcgatctcacaccagaacagatgaacccattacattcaagggtatcttcgacatgcgcattgaagctggcttcattcacgacttcaatgaagggcggcgtcgttcgttcaggcttggaaagccagaggatgatcccatttactatgaccccacattacctgaccaagtgggtgggattgaaggctcagggcactctatctatagaaaggtggagaaagacaagttgggggacctagcggagggttaccgactcagcgctctccttgatcctagtaacactccgtcgggtctcgagcccctacagcctaaagtagcgtgaacggtttctttggacatcattttcgataagcatctaggagcaaagtagtggaatattagggtagattataaatccaaggctaaatagcgatccc

SEQ ID NO: 4146 - DNA, 4362 bp, Muscodor strobelii
  misc_feature: SGI cDNA ID NO. 561062
  misc_feature: Elevated expression when VOC is produced
  misc_feature: Encodes the peptide sequence at SEQ ID NO 4147
atggattgttctcatgcagatcgtgcttttggcccccgtgttaaccctggctgccggtccttcgattttaccctgttgtttgaggatcttttccttgcttctctaccctccgctcttttcatcgcgttatcgccattgaagttcgtaaagttgtttcgaagacgagctgtcacctcgccttacagcgtactctttgcaatcaaagtgtcaacgctgattgctttgctcaccgtgcaacttgcgttcttggctcttagagtggcagactcggtaactagcgcgccagcatcgattgctgcggatgtgttgagtcctatcgcgaccgtattggcattaatcctagtcgtattagaccgtcagcgagcatcccgcccatctacactgctcacactctacctctcttcggccgtgcttctcgacattgctcgactacgcaccttatcactactagcagctcatagtatcattgagggtttaatatttgttactttcgtacttacatcagtagccctgctttgcgagtctgctgaaacgcgttcgggactcattacaagccccaacctcagtaaaggtccccgcgcacctgaggaagttagtgacttctggattagaacatgttttacctggctggcgtctaccttctggcggggctattctcgggtcatctctttagacgatctgcctcatctagatagtatgcttcgttcgtctcagcttggcgatatattggccgccaaatggactcaacatggaaaaggaggccgctataggctcttgagaacttgcttgatgagctacttcttttccttcgcgtcgcctataatcccgcggctgtgtcttaccgccttcacattctcccagccactcctaatcaatgcaaccgtgacttttgtggacagcgcaaacccagatgccaactacggaagaggcctcatcggtgcttgggctctagtatcactaggtatagcggcttccagctcggtctatcaataccagactctccgtttcgtcacccgacttagaggaggactcattgctctcgtgtaccaacgcaccttagggaccagagacgcagatgctggggaaattaccgccgttgcgctcttgggcgcggatgttgaacgcataaaagtctgtatgggcttgatccacgaagtctggggctcgcttgtggacattggcatagcgagctggcttctcgccgtgcagctatctctcgcaacccttgcgccgactatcttagttctcggtcggttacaaactttcatcgccgtcacctccaaagtctcactgttgagcaagacagcccaaaggaaatggatagaaaaggtccagacgcgactccggattactacgagcttattgaataacatgaaatcaattaagatgggcgggcttgaacatattatccgtaatattatgcaggttgcacgtgccgacgaaatcaacacatcaagcactttcagaaaactgctagttgccacgctcactctatcgctggcccctatcaatctggctcctgtcgccacgttcgggatctatgtcatcatctcggtcttctggaaagacgagacgctactgcccgcaaaagcattcacttccgttgcgatagtctccatactgacctctcatgttgtggtattcatccaggtacttccgcaagtcatacagtgctttgctagctttgatcggattcaggagttttgcagctacggtgaaaaaatggtctgtgaccgcttagagaaagacctgccccataccgaatccgagattaagcctcatgtcacagaactacaacagcaaaacacgacaatatccctctgcaacgagagcttctcgtgggacaaatgttctcctcctaccctgaagaatttgaacatcaaattatctcctggaaccgtcaccgcagttgtcgggccacttgggagtgggaaatcatcaatcctacgagccattctcggagagatgatctctacgagcacagattcacagatcgataccaagatgaagagaaaaataggaggggtagcatactgctcccaagcaccttggctggagagcatgtccattcgtcagaacatcattggggcatcaccccccgacgagaaatggtacgcaaatgtcaaggcactctgcggtctcgatacggatatagccaagctcccgagaggagatgacatgcgtataggaagccaaggcattaatttgagtggtggtcagaagcaacggatcgctcttgcgcgagccatctacgcgaggcgcaagattttgattctcgatgatgtctttagcggcatggatgctcataccgcggagagtatatcgttacgcctaataggacctcgaggtatcttacgcgacacccaaacgactgtagtgatagcttctcatagccgtaaagtgattgcgttatcagaccaggtcatcgtcttgaaagaaggcagtattgtagaaaccactcgcccagctgctcttctacagtatgatgataacggtgagaactcgggattatcgctgagctcgtatggtgatggcgtatcgagagcacctcgatctgccgaaggcacagagtcgtcatcgtccacggactcacctcaacccgcccggaccacagacgatggcgcaactacggaagccgatggaagtcgaaacaaggcggacttcactatttacacgtactatctagggaacgcgggatacgcagcaatcctttgctacgcggtggccgtcgttgcgtggatattctttacagagttctctaccgtctggattaattggtggtcggaggccaatactgtggaaggcaaccagaatgttggttactatatcggcatctacacgttgctaggcgtattaggcatccttggagccgcggcggctgcttgggctattttcgcgtctgtaattagtaccactggcaacaagtttcactctcacctcctcgaaacgattctggtggcaccgcttcgcttcttcactaatactaacagtggggatcttcttaatcggtttagccaagacttggaactcatcgacatggagttgcctgcgacaatggtcaactatacttcgaccgttgtctcaattcttggaaaagtgatcgtcgttgctatattctcgcagtatcttggaacagcaatcccctttcttggtggggccatgtaccttctacagagattctaccttcacacttcccgtcaagtccgcctgctggacatcgaagcaaaagcaccactctacacgcttttcagcgagtctgtagctggcgtgtccacgatacgcgcttttggctggcaagatgaatatcagcggcgcaataaccaccatgtcgacacttcccagaggccgatgtacctccaaggctgtatccaggcctggctggcatttgtcacgaacataatggttgcggcgttaattgcgatattgatcgcggtcgccatcacatggcacgatcgtttcagtcctgggagcatcggtgtcagtctgaccgttgtgatcggacttagcgaaaccctttcgcgcgctatcgcgacttggacgaaattggaatcaagtgttggagccttaaaaaggatcaaacaattcactgagcagacgaagcgggaagactcaaacgacgagaatcaagatgtgcctcagggatggccgtttgccggggcaatcgatgtcgcaggtgtttccgcctcgtacagtgatgatgagctggtcataaaagacgtctctctttccattcttccgggcgaacacgtagcgatctgtgggcgcacagggggcggaaagtcctcacttatcctgagcctgttgcgcatgataaatatcaatcaaggccagatcagcatcgataacatagaaacttcagtcctaaaacgcagcgatcttcgtcattgcatcaatacggtgccacaggatcctttttggataccgggaacaatacgcgacaacgtggatccttttaaaacttctccggattctgccattgtggacgctattcgaagagtaggacttggctccttcctcgacgtctatggtatagacaaggtgattgatgctaccgagctttctacaggccagaagcagcttctgtatttcgcgcgggctattatgaagaaatccaagatattggtgctcgacgaagccatgagcagtgttgatgtcgaaactgaatcgatcatgcagaacattgtcgacaccgagttcaaggactgcactgtgatagctgttatgcacagactgcaacacgttgcacactatgacaaggtggctgtgatggaaaatggtgcccttctcgagttcgataggccacaggtactgctggccaagaagacgcgctttgcagagctatatcggtcatatatgacctga

SEQ ID NO: 4147 - protein, 1453 aa, Muscodor strobelii
  misc_feature: SGI Peptide ID NO. 561062
  misc_feature (899)..(1172): Pfam Id: PF00664 Pfam Desc: ABC transporter transmembrane region
  misc_feature (1247)..(1426): Pfam Id: PF00005 Pfam Desc: ABC transporter
  misc_feature (632)..(814): Pfam Id: PF00005 Pfam Desc: ABC transporter
  misc_feature (6)..(1450): NCBI GI: 145239915 Blast Desc: An08g04860 [Aspergillus niger] gi|134077118|emb|CAK45459.1| protein product [Aspergillus niger]
  misc_feature (6)..(1450): NCBI GI: 259484198 Blast Desc: TPA: ABC transporter (Eurofung) [Aspergillus nidulans FGSC A4]
  misc_feature (6)..(1450): NCBI GI: 67901704 Blast Desc: AN7839.2 [Aspergillus nidulans FGSC A4] gi|40741988|gb|EAA61178.1| AN7839.2 [Aspergillus nidulans FGSC A4]
  misc_feature (6)..(1448): NCBI GI: 212544668 Blast Desc: multidrug resistance-associated protein, [Penicillium marneffei ATCC 18224] gi|210065457|gb|EEA19551.1| multidrug resistance-associated protein, [Penicillium marneffei ATCC 18224]
  misc_feature (6)..(1451): NCBI GI: 242778412 Blast Desc: ATP-binding cassette transporter, [Talaromyces stipitatus ATCC 10500] gi|218722852|gb|EED22270.1| ATP-binding cassette transporter, [Talaromyces stipitatus ATCC 10500]
  misc_feature (1)..(1450): NCBI GI: 238495622 Blast Desc: ATP-binding cassette transporter, [Aspergillus flavus NRRL3357] gi|220695697|gb|EED52040.1| ATP-binding cassette transporter, [Aspergillus flavus NRRL3357]
  misc_feature (18)..(1453): NCBI GI: 119495913 Blast Desc: ABC multidrug transporter, [Neosartorya fischeri NRRL 181] gi|119412894|gb|EAW22835.1| ABC multidrug transporter, [Neosartorya fischeri NRRL 181]
  misc_feature (2)..(1452): NCBI GI: 242798985 Blast Desc: ABC multidrug transporter, [Talaromyces stipitatus ATCC 10500] gi|218716626|gb|EED16047.1| ABC multidrug transporter, [Talaromyces stipitatus ATCC 10500]
  misc_feature (1)..(1448): NCBI GI: 121704122 Blast Desc: ABC transporter, [Aspergillus clavatus NRRL 1] gi|119398469|gb|EAW08899.1| ABC transporter, [Aspergillus clavatus NRRL 1]
  misc_feature (3)..(1452): NCBI GI: 212541342 Blast Desc: ABC multidrug transporter, [Penicillium marneffei ATCC 18224] gi|210068125|gb|EEA22217.1| ABC multidrug transporter, [Penicillium marneffei ATCC 18224]
  misc_feature (207)..(1451): SWISSPROT Homolog: EC 3.6.3.44 Xenobiotic-transporting ATPase
  misc_feature: Useful for introducing or modulating the production of volatile compounds
MDCSHADRAFGPRVNPGCRSFDFTLLFEDLFLASLPSALFIALSPLKFVKLFRRRAVTSPYSVLFAIKVSTLIALLTVQLAFLALRVADSVTSAPASIAADVLSPIATVLALILVVLDRQRASRPSTLLTLYLSSAVLLDIARLRTLSLLAAHSIIEGLIFVTFVLTSVALLCESAETRSGLITSPNLSKGPRAPEEVSDFWIRTCFTWLASTFWRGYSRVISLDDLPHLDSMLRSSQLGDILAAKWTQHGKGGRYRLLRTCLMSYFFSFASPIIPRLCLTAFTFSQPLLINATVTFVDSANPDANYGRGLIGAWALVSLGIAASSSVYQYQTLRFVTRLRGGLIALVYQRTLGTRDADAGEITAVALLGADVERIKVCMGLIHEVWGSLVDIGIASWLLAVQLSLATLAPTILVLGRLQTFIAVTSKVSLLSKTAQRKWIEKVQTRLRITTSLLNNMKSIKMGGLEHIIRNIMQVARADEINTSSTFRKLLVATLTLSLAPINLAPVATFGIYVIISVFWKDETLLPAKAFTSVAIVSILTSHVVVFIQVLPQVIQCFASFDRIQEFCSYGEKMVCDRLEKDLPHTESEIKPHVTELQQQNTTISLCNESFSWDKCSPPTLKNLNIKLSPGTVTAVVGPLGSGKSSILRAILGEMISTSTDSQIDTKMKRKIGGVAYCSQAPWLESMSIRQNIIGASPPDEKWYANVKALCGLDTDIAKLPRGDDMRIGSQGINLSGGQKQRIALARAIYARRKILILDDVFSGMDAHTAESISLRLIGPRGILRDTQTTVVIASHSRKVIALSDQVIVLKEGSIVETTRPAALLQYDDNGENSGLSLSSYGDGVSRAPRSAEGTESSSSTDSPQPARTTDDGATTEADGSRNKADFTIYTYYLGNAGYAAILCYAVAVVAWIFFTEFSTVWINWWSEANTVEGNQNVGYYIGIYTLLGVLGILGAAAAAWAIFASVISTTGNKFHSHLLETILVAPLRFFTNTNSGDLLNRFSQDLELIDMELPATMVNYTSTVVSILGKVIVVAIFSQYLGTAIPFLGGAMYLLQRFYLHTSRQVRLLDIEAKAPLYTLFSESVAGVSTIRAFGWQDEYQRRNNHHVDTSQRPMYLQGCIQAWLAFVTNIMVAALIAILIAVAITWHDRFSPGSIGVSLTVVIGLSETLSRAIATWTKLESSVGALKRIKQFTEQTKREDSNDENQDVPQGWPFAGAIDVAGVSASYSDDELVIKDVSLSILPGEHVAICGRTGGGKSSLILSLLRMININQGQISIDNIETSVLKRSDLRHCINTVPQDPFWIPGTIRDNVDPFKTSPDSAIVDAIRRVGLGSFLDVYGIDKVIDATELSTGQKQLLYFARAIMKKSKILVLDEAMSSVDVETESIMQNIVDTEFKDCTVIAVMHRLQHVAHYDKVAVMENGALLEFDRPQVLLAKKTRFAELYRSYMT

SEQ ID NO: 4148 - DNA, 5780 bp, Muscodor strobelii
  misc_feature: SGI EST ID NO. CUFF.10489.0
  misc_feature: Variant of the nucleotide sequence at SEQ ID NO 4146
caaacatacaacgttcgttcaaagtagctatgaaatcaagtctgattttctattgacgctcaacatttgggatccctgaagagaagctatcaagtatctcatgctatccgatggattgttctcatgcagatcgtgcttttggcccccgtgttaaccctggctgccggtccttcgattttaccctgttgtttgaggatcttttccttgcttctctaccctccgctcttttcatcgcgttatcgccattgaagttcgtaaagttgtttcgaagacgagctgtcacctcgccttacagcgtactctttgcaatcaaagtgtcaacgctgattgctttgctcaccgtgcaacttgcgttcttggctcttagagtggcagactcggtaactagcgcgccagcatcgattgctgcggatgtgttgagtcctatcgcgaccgtattggcattaatcctagtcgtattagaccgtcagcgagcatcccgcccatctacactgctcacactctacctctcttcggccgtgcttctcgacattgctcgactacgcaccttatcactactagcagctcatagtatcattgagggtttaatatttgttactttcgtacttacatcagtagccctgctttgcgagtctgctgaaacgcgttcgggactcattacaagccccaacctcagtaaaggtccccgcgcacctgaggaagttagtgacttctggattagaacatgttttacctggctggcgtctaccttctggcggggctattctcgggtcatctctttagacgatctgcctcatctagatagtatgcttcgttcgtctcagcttggcgatatattggccgccaaatggactcaacatggaaaaggaggccgctataggctcttgagaacttgcttgatgagctacttcttttccttcgcgtcgcctataatcccgcggctgtgtcttaccgccttcacattctcccagccactcctaatcaatgcaaccgtgacttttgtggacagcgcaaacccagatgccaactacggaagaggcctcatcggtgcttgggctctagtatcactaggtatagcggcttccagctcggtctatcaataccagactctccgtttcgtcacccgacttagaggaggactcattgctctcgtgtaccaacgcaccttagggaccagagacgcagatgctggggaaattaccgccgttgcgctcttgggcgcggatgttgaacgcataaaagtctgtatgggcttgatccacgaagtctggggctcgcttgtggacattggcatagcgagctggcttctcgccgtgcagctatctctcgcaacccttgcgccgactatcttagttctcggtcggttacaaagttagagctacgtataccatgagctaatttagggcgaatctcaatagctttcatcgccgtcacctccaaagtctcactgttgagcaagacagcccaaaggaaatggatagaaaaggtccagacgcgactccggattactacgagcttattgaataacatgaaatcaattaagatgggcgggcttgaacatattatccgtaatattatgcaggttgcacgtgccgacgaaatcaacacatcaagcactttcagaaaactgctagttgccacgctcactctatcgctggcccctatcaatctggctcctgtcgccacgttcgggatctatgtcatcatctcggtcttctggaaagacgagacgctactgcccgcaaaagcattcacttccgttgcgatagtctccatactgacctctcatgttgtggtattcatccaggtacttccgcaagtcatacagtgctttgctagctttgatcggattcaggagttttgcagctacggtgaaaaaatggtctgtgaccgcttagagaaagacctgccccataccgaatccgagattaagcctcatgtcacagaactacaacagcaaaacacgacaatatccctctgcaacgagagcttctcgtgggacaaatgttctcctcctaccctgaagaatttgaacatcaaattatctcctggaaccgtcaccgcagttgtcgggccacttgggagtgggaaatcatcaatcctacgagccattctcggagagatgatctctacgagcacagattcacagatcgataccaagatgaagagaaaaataggaggggtagcatactgctcccaagcaccttggctggagagcatgtccattcgtcagaacatcattggggcatcaccccccgacgagaaatggtacgcaaatgtcaaggcactctgcggtctcgatacggatatagccaagctcccgagaggagatgacatgcgtataggaagccaaggcattaatttgagtggtggtcagaagcaacggatcgctcttgcgcgagccatctacgcgaggcgcaagattttgattctcgatgatgtctttagcggcatggatgctcataccgcggagagtatatcgttacgcctaataggacctcgaggtatcttacgcgacacccaaacgactgtagtgatagcttctcatagccgtaaagtgattgcgttatcagaccaggtcatcgtcttgaaagaaggcagtattgtagaaaccactcgcccagctgctcttctacagtatgatgataacggtgagaactcgggattatcgctgagctcgtatggtgatggcgtatcgagagcacctcgatctgccgaaggcacagagtcgtcatcgtccacggactcacctcaacccgcccggaccacagacgatggcgcaactacggaagccgatggaagtcgaaacaaggcggacttcactatttacacgtactatctagggaacgcgggatacgcagcaatcctttgctacgcggtggccgtcgttgcgtggatattctttacagagttctctaccgtctggattaattggtggtcggaggccaatactgtggaaggcaaccagaatgttggttactatatcggcatctacacgttgctaggcgtattaggcatccttggagccgcggcggctgcttgggctattttcgcgtctgtaattagtaccactggcaacaagtttcactctcacctcctcgaaacgattctggtggcaccgcttcgcttcttcactaatactaacagtggggatcttcttaatcggtttagccaagacttggaactcatcgacatggagttgcctgcgacaatggtcaactatacttcgaccgttgtctcaattcttggaaaagtgatcgtcgttgctatattctcgcagtatcttggaacagcaatcccctttcttggtggggccatgtaccttctacagagattctaccttcacacttcccgtcaagtccgcctgctggacatcgaagcaaaagcaccactctacacgcttttcagcgagtctgtagctggcgtgtccacgatacgcgcttttggctggcaagatgaatatcagcggcgcaataaccaccatgtcgacacttcccagaggccgatgtacctccaaggctgtatccaggcctggctggcatttgtcacgaacataatggttgcggcgttaattgcgatattgatcgcggtcgccatcacatggcacgatcgtttcagtcctgggagcatcggtgtcagtctgaccgttgtgatcggacttagcgaaaccctttcgcgcgctatcgcgacttggacgaaattggaatcaagtgttggagccttaaaaaggatcaaacaattcactgagcagacgaagcgggaagactcaaacgacgagaatcaagatgtgcctcagggatggccgtttgccggggcaatcgatgtcgcaggtgtttccgcctcgtacagtgatgatgagctggtcataaaagacgtctctctttccattcttccgggcgaacacgtagcgatctgtgggcgcacagggggcggaaagtcctcacttatcctgagcctgttgcgcatgataaatatcaatcaaggccagatcagcatcgataacatagaaacttcagtcctaaaacgcagcgatcttcgtcattgcatcaatacggtgccacaggatcctttttggataccgggaacaatacgcgacaacgtggatccttttaaaacttctccggattctgccattgtggacgctattcgaagagtaggacttggctccttcctcgacgtctatggtatagacaaggtgattgatgctaccgagctttctacaggccagaagcagcttctgtatttcgcgcgggctattatgaagaaatccaagatattggtgctcgacgaagccatgagcagtgttgatgtcgaaactgaatcgatcatgcagaacattgtcgacaccgagttcaaggactgcactgtgatagctgttatgcacagactgcaacacgttgcacactatgacaaggtggctgtgatggaaaatggtgcccttctcgagttcgataggccacaggtactgctggccaagaagacgcgctttgcagagctatatcggtcatatatgacctgaagctcgctgctaagcaggccgacaagtgcaacattggggatggcatgatcgacaaagagtactatatcgatgacgtgatcggtaaggttatggaagataagaagactcagaaggccaaggctctcgtgggtaaggcactttgtctttgaaaagcaataagggtcacattcattcacttcaagtcgttgaacggttggtgatccgaagaccttttgtcagccagaccaagcagtgcactgtgcacagcagctattgacataaacagtgcatgcatggataaacggcaacgagcgaagataaggaaaagcaaaagaaatgtgaccagggcctacgtcgaaccctttgcctcaagaaagttgaaatacagggcagagagctggacagcacaagattgccacgacaacattggggcagaacttcggcaagggctgccattggctgcagcagagttaaggataagtaatctgataacagagcggctgtcaacaacaaaggtgccaatgtggccaagtggttaggcgatcacaccgatgatgccaccgggcaacggctcagagacagtgtctggccaatcctctctagactctcactgcacccttgtgatagggtggaaaagcttggtcactgaggaaccggccagaccaactgcaaataaataccctcactcgggaaacgaagggcacgctgaagacttgccacctgcaagagcaagaacagcgcgtgtatgatttatagcaagaaagtgtttttcttcttcttgtttattacctccatcttgatctcgcccttccatacttcacaagactgcttgaattcttataccgtagaataaggcaacttccattctaacactagaaatggtgatatcttctatctccctccgatatggcttcggacagcactgacgattatcagtgagtttagctgtcttctaagccaatatacctgtatgtcgaaataacgatagcaaaagacgatctatgttagtcaatgagcttagcggccgtttggtcaaaccttcattattcatccttttagacccggtatctacctctttgagagcatatagcctactgtttggaagcggtagcttgagctcctcacattgccgtagagcagcaatccctttagggagtaagacaagtccaccaacgcgaagaaaatattatggacatttagtctagtcctttgcactagatttcgttatctgcaacagaaacggggcataactaattgccataagtgacattctctatctttt

SEQ ID NO: 4149 - DNA, 4365 bp, Muscodor strobelii
  misc_feature: SGI cDNA ID NO. 561063
  misc_feature: Encodes the peptide sequence at SEQ ID NO 4150
atggattgttctcatgcagatcgtgcttttggcccccgtgttaaccctggctgccggtccttcgattttaccctgttgtttgaggatcttttccttgcttctctaccctccgctcttttcatcgcgttatcgccattgaagttcgtaaagttgtttcgaagacgagctgtcacctcgccttacagcgtactctttgcaatcaaagtgtcaacgctgattgctttgctcaccgtgcaacttgcgttcttggctcttagagtggcagactcggtaactagcgcgccagcatcgattgctgcggatgtgttgagtcctatcgcgaccgtattggcattaatcctagtcgtattagaccgtcagcgagcatcccgcccatctacactgctcacactctacctctcttcggccgtgcttctcgacattgctcgactacgcaccttatcactactagcagctcatagtatcattgagggtttaatatttgttactttcgtacttacatcagtagccctgctttgcgagtctgctgaaacgcgttcgggactcattacaagccccaacctcagtaaaggtccccgcgcacctgaggaagttagtgacttctggattagaacatgttttacctggctggcgtctaccttctggcggggctattctcgggtcatctctttagacgatctgcctcatctagatagtatgcttcgttcgtctcagcttggcgatatattggccgccaaatggactcaacatggaaaaggaggccgctataggctcttgagaacttgcttgatgagctacttcttttccttcgcgtcgcctataatcccgcggctgtgtcttaccgccttcacattctcccagccactcctaatcaatgcaaccgtgacttttgtggacagcgcaaacccagatgccaactacggaagaggcctcatcggtgcttgggctctagtatcactaggtatagcggcttccagctcggtctatcaataccagactctccgtttcgtcacccgacttagaggaggactcattgctctcgtgtaccaacgcaccttagggaccagagacgcagatgctggggaaattaccgccgttgcgctcttgggcgcggatgttgaacgcataaaagtctgtatgggcttgatccacgaagtctggggctcgcttgtggacattggcatagcgagctggcttctcgccgtgcagctatctctcgcaacccttgcgccgactatcttagttctcggtcggttacaaactttcatcgccgtcacctccaaagtctcactgttgagcaagacagcccaaaggaaatggatagaaaaggtccagacgcgactccggattactacgagcttattgaataacatgaaatcaattaagatgggcgggcttgaacatattatccgtaatattatgcaggttgcacgtgccgacgaaatcaacacatcaagcactttcagaaaactgctagttgccacgctcactctatcgctggcccctatcaatctggctcctgtcgccacgttcgggatctatgtcatcatctcggtcttctggaaagacgagacgctactgcccgcaaaagcattcacttccgttgcgatagtctccatactgacctctcatgttgtggtattcatccaggtacttccgcaagtcatacagtgctttgctagctttgatcggattcaggagttttgcagctacggtgaaaaaatggtctgtgaccgcttagagaaagacctgccccataccgaatccgagattaagcctcatgtcacagaactacaacagcaaaacacgacaatatccctctgcaacgagagcttctcgtgggacaaatgttctcctcctaccctgaagaatttgaacatcaaattatctcctggaaccgtcaccgcagttgtcgggccacttgggagtgggaaatcatcaatcctacgagccattctcggagagatgatctctacgagcacagattcacagatcgataccaagatgaagagaaaaataggaggggtagcatactgctcccaagcaccttggctggagagcatgtccattcgtcagaacatcattggggcatcaccccccgacgagaaatggtacgcaaatgtcaaggcactctgcggtctcgatacggatatagccaagctcccgagaggagatgacatgcgtataggaagccaaggcattaatttgagtggtggtcagaagcaacggatcgctcttgcgcgagccatctacgcgaggcgcaagattttgattctcgatgatgtctttagcggcatggatgctcataccgcggagagtatatcgttacgcctaataggacctcgaggtatcttacgcgacacccaaacgactgtagtgatagcttctcatagccgtaaagtgattgcgttatcagaccaggtcatcgtcttgaaagaaggcagtattgtagaaaccactcgcccagctgctcttctacagtatgatgataacggtgagaactcgggattatcgctgagctcgtatggtgatggcgtatcgagagcacctcgatctgccgaaggcacagagtcgtcatcgtccacggactcacctcaacccgcccggaccacagacgatggcgcaactacggaagccgatggaagtcgaaacaaggcggacttcactatttacacgtactatctagggaacgcgggatacgcagcaatcctttgctacgcggtggccgtcgttgcgtggatattctttacagagttctctaccgtctggattaattggtggtcggaggccaatactgtggaaggcaaccagaatgttggttactatatcggcatctacacgttgctaggcgtattaggcatccttggagccgcggcggctgcttgggctattttcgcgtctgtaattagtaccactggcaacaagtttcactctcacctcctcgaaacgattctggtggcaccgcttcgcttcttcactaatactaacagtggggatcttcttaatcggtttagccaagacttggaactcatcgacatggagttgcctgcgacaatggtcaactatacttcgaccgttgtctcaattcttggaaaagtgatcgtcgttgctatattctcgcagtatcttggaacagcaatcccctttcttggtggggccatgtaccttctacagagattctaccttcacacttcccgtcaagtccgcctgctggacatcgaagcaaaagcaccactctacacgcttttcagcgagtctgtagctggcgtgtccacgatacgcgcttttggctggcaagatgaatatcagcggcgcaataaccaccatgtcgacacttcccagaggccgatgtacctccaaggctgtatccaggcctggctggcatttgtcacgaacataatggttgcggcgttaattgcgatattgatcgcggtcgccatcacatggcacgatcgtttcagtcctgggagcatcggtgtcagtctgaccgttgtgatcggacttagcgaaaccctttcgcgcgctatcgcgacttggacgaaattggaatcaagtgttggagccttaaaaaggatcaaacaattcactgagcagacgaagcgggaagactcaaacgacgagaatcaagatgtgcctcagggatggccgtttgccggggcaatcgatgtcgcaggtgtttccgcctcgtacagtgatgatgagctggtcataaaagacgtctctctttccattcttccgggcgaacacgtagcgatctgtgggcgcacagggggcggaaagtcctcacttatcctgagcctgttgcgcatgataaatatcaatcaaggccagatcagcatcgataacatagaaacttcagtcctaaaacgcagcgatcttcgtcattgcatcaatacggtgccacaggatcctttttggataccgggaacaatacgcgacaacgtggatccttttaaaacttctccggattctgccattgtggacgctattcgaagagtaggacttggctccttcctcgacgtctatggtatagacaaggtgattgatgctaccgagctttctacaggccagaagcagcttctgtatttcgcgcgggctattatgaagaaatccaagatattggtgctcgacgaagccatgagcagcagtgttgatgtcgaaactgaatcgatcatgcagaacattgtcgacaccgagttcaaggactgcactgtgatagctgttatgcacagactgcaacacgttgcacactatgacaaggtggctgtgatggaaaatggtgcccttctcgagttcgataggccacaggtactgctggccaagaagacgcgctttgcagagctatatcggtcatatatgacctga

SEQ ID NO: 4150 - protein, 1454 aa, Muscodor strobelii
  misc_feature: SGI Peptide ID NO. 561063
  misc_feature (899)..(1172): Pfam Id: PF00664 Pfam Desc: ABC transporter transmembrane region
  misc_feature (1247)..(1427): Pfam Id: PF00005 Pfam Desc: ABC transporter
  misc_feature (632)..(814): Pfam Id: PF00005 Pfam Desc: ABC transporter
  misc_feature (6)..(1451): NCBI GI: 145239915 Blast Desc: An08g04860 [Aspergillus niger] gi|134077118|emb|CAK45459.1| protein product [Aspergillus niger]
  misc_feature (6)..(1451): NCBI GI: 259484198 Blast Desc: TPA: ABC transporter (Eurofung) [Aspergillus nidulans FGSC A4]
  misc_feature (6)..(1451): NCBI GI: 67901704 Blast Desc: AN7839.2 [Aspergillus nidulans FGSC A4] gi|40741988|gb|EAA61178.1| AN7839.2 [Aspergillus nidulans FGSC A4]
  misc_feature (6)..(1449): NCBI GI: 212544668 Blast Desc: multidrug resistance-associated protein, [Penicillium marneffei ATCC 18224] gi|210065457|gb|EEA19551.1| multidrug resistance-associated protein, [Penicillium marneffei ATCC 18224]
  misc_feature (6)..(1452): NCBI GI: 242778412 Blast Desc: ATP-binding cassette transporter, [Talaromyces stipitatus ATCC 10500] gi|218722852|gb|EED22270.1| ATP-binding cassette transporter, [Talaromyces stipitatus ATCC 10500]
  misc_feature (1)..(1451): NCBI GI: 238495622 Blast Desc: ATP-binding cassette transporter, [Aspergillus flavus NRRL3357] gi|220695697|gb|EED52040.1| ATP-binding cassette transporter, [Aspergillus flavus NRRL3357]
  misc_feature (18)..(1454): NCBI GI: 119495913 Blast Desc: ABC multidrug transporter, [Neosartorya fischeri NRRL 181] gi|119412894|gb|EAW22835.1| ABC multidrug transporter, [Neosartorya fischeri NRRL 181]
  misc_feature (2)..(1453): NCBI GI: 242798985 Blast Desc: ABC multidrug transporter, [Talaromyces stipitatus ATCC 10500] gi|218716626|gb|EED16047.1| ABC multidrug transporter, [Talaromyces stipitatus ATCC 10500]
  misc_feature (1)..(1449): NCBI GI: 121704122 Blast Desc: ABC transporter, [Aspergillus clavatus NRRL 1] gi|119398469|gb|EAW08899.1| ABC transporter, [Aspergillus clavatus NRRL 1]
  misc_feature (3)..(1453): NCBI GI: 212541342 Blast Desc: ABC multidrug transporter, [Penicillium marneffei ATCC 18224] gi|210068125|gb|EEA22217.1| ABC multidrug transporter, [Penicillium marneffei ATCC 18224]
  misc_feature (207)..(1452): SWISSPROT Homolog: EC 3.6.3.44 Xenobiotic-transporting ATPase
MDCSHADRAFGPRVNPGCRSFDFTLLFEDLFLASLPSALFIALSPLKFVKLFRRRAVTSPYSVLFAIKVSTLIALLTVQLAFLALRVADSVTSAPASIAADVLSPIATVLALILVVLDRQRASRPSTLLTLYLSSAVLLDIARLRTLSLLAAHSIIEGLIFVTFVLTSVALLCESAETRSGLITSPNLSKGPRAPEEVSDFWIRTCFTWLASTFWRGYSRVISLDDLPHLDSMLRSSQLGDILAAKWTQHGKGGRYRLLRTCLMSYFFSFASPIIPRLCLTAFTFSQPLLINATVTFVDSANPDANYGRGLIGAWALVSLGIAASSSVYQYQTLRFVTRLRGGLIALVYQRTLGTRDADAGEITAVALLGADVERIKVCMGLIHEVWGSLVDIGIASWLLAVQLSLATLAPTILVLGRLQTFIAVTSKVSLLSKTAQRKWIEKVQTRLRITTSLLNNMKSIKMGGLEHIIRNIMQVARADEINTSSTFRKLLVATLTLSLAPINLAPVATFGIYVIISVFWKDETLLPAKAFTSVAIVSILTSHVVVFIQVLPQVIQCFASFDRIQEFCSYGEKMVCDRLEKDLPHTESEIKPHVTELQQQNTTISLCNESFSWDKCSPPTLKNLNIKLSPGTVTAVVGPLGSGKSSILRAILGEMISTSTDSQIDTKMKRKIGGVAYCSQAPWLESMSIRQNIIGASPPDEKWYANVKALCGLDTDIAKLPRGDDMRIGSQGINLSGGQKQRIALARAIYARRKILILDDVFSGMDAHTAESISLRLIGPRGILRDTQTTVVIASHSRKVIALSDQVIVLKEGSIVETTRPAALLQYDDNGENSGLSLSSYGDGVSRAPRSAEGTESSSSTDSPQPARTTDDGATTEADGSRNKADFTIYTYYLGNAGYAAILCYAVAVVAWIFFTEFSTVWINWWSEANTVEGNQNVGYYIGIYTLLGVLGILGAAAAAWAIFASVISTTGNKFHSHLLETILVAPLRFFTNTNSGDLLNRFSQDLELIDMELPATMVNYTSTVVSILGKVIVVAIFSQYLGTAIPFLGGAMYLLQRFYLHTSRQVRLLDIEAKAPLYTLFSESVAGVSTIRAFGWQDEYQRRNNHHVDTSQRPMYLQGCIQAWLAFVTNIMVAALIAILIAVAITWHDRFSPGSIGVSLTVVIGLSETLSRAIATWTKLESSVGALKRIKQFTEQTKREDSNDENQDVPQGWPFAGAIDVAGVSASYSDDELVIKDVSLSILPGEHVAICGRTGGGKSSLILSLLRMININQGQISIDNIETSVLKRSDLRHCINTVPQDPFWIPGTIRDNVDPFKTSPDSAIVDAIRRVGLGSFLDVYGIDKVIDATELSTGQKQLLYFARAIMKKSKILVLDEAMSSSVDVETESIMQNIVDTEFKDCTVIAVMHRLQHVAHYDKVAVMENGALLEFDRPQVLLAKKTRFAELYRSYMT

SEQ ID NO: 4151 - DNA, 5780 bp, Muscodor strobelii; identical to SEQ ID NO: 4148
  misc_feature: SGI EST ID NO. CUFF.10489.0
  misc_feature: Variant of the nucleotide sequence at SEQ ID NO 4149

SEQ ID NO: 4152 - DNA, 849 bp, Muscodor strobelii
  misc_feature: SGI cDNA ID NO. 561064
  misc_feature: Encodes the peptide sequence at SEQ ID NO 4153
atgattgtcgcgggccgcctgaaacttcgcgtagactgcccgccgcgcgccttgcgcccgaaaagacagcgcgccgcgcaagaaaaccacggtattatgtcactacagctggacgtggcagcatctatgaaattatttgggcgcatggaacaagacctcaacatggatgagaagtgcgagaaattcgagacattacctctggtacctgacgcttcgcaggatattctcgtgaaggatgatccaaggcaaggacgcaggagaagggcctgccttgtcggactcctgggtttcctactactcgaagtagtcaacgtcattgtgttcttcatcattgtctcctcaagccaggaagtgcaggttgttaatgatagcttggacgagcgcacgctagtaaaaaaattgcagtcggactacaaaaagatttgggtttgggacacagccgatggagatgatcgccgcaatttctacgaaggaggctgggaggatatcgcacttgaacctggctttgtctcaatagataagagcgtcgtcgaaaaacacggcattcctgtctctggagacactccgggcaattcaggagaaatggtctatcagattggcgcattccacgcgctacattgtatatacttgatacgcgagagcttgatcaacaggactctagatccgaacgacggacacatacaacactgcttcaactacatccgacagtcgctcatgtgcaacatggacctgcagctcaacgtcaggctcggcgaccagctcctgggcatagacgacgagccccacgtctgccaggactacggggccattgttgaatggatcgacgctcataggtgggatccatcctaa

SEQ ID NO: 4153 - protein, 282 aa, Muscodor strobelii
  misc_feature: SGI Peptide ID NO. 561064
  misc_feature (76)..(274): NCBI GI: 212533745 Blast Desc: PMAA_075510 [Penicillium marneffei ATCC 18224] gi|210072393|gb|EEA26482.1| PMAA_075510 [Penicillium marneffei ATCC 18224]
  misc_feature (68)..(274): NCBI GI: 242787550 Blast Desc: TSTA_038090 [Talaromyces stipitatus ATCC 10500] gi|218721179|gb|EED20598.1| TSTA_038090 [Talaromyces stipitatus ATCC 10500]
  misc_feature (168)..(278): NCBI GI: 212540122 Blast Desc: conserved [Penicillium marneffei ATCC 18224] gi|210067515|gb|EEA21607.1| conserved [Penicillium marneffei ATCC 18224]
  misc_feature (167)..(279): NCBI GI: 164425482 Blast Desc: NCU05766 [Neurospora crassa OR74A] gi|157070942|gb|EAA30505.2| conserved [Neurospora crassa OR74A]
  misc_feature (95)..(273): NCBI GI: 242774252 Blast Desc: conserved [Talaromyces stipitatus ATCC 10500] gi|218722023|gb|EED21441.1| conserved [Talaromyces stipitatus ATCC 10500]
  misc_feature (69)..(277): NCBI GI: 156051644 Blast Desc: SS1G_07229 [Sclerotinia sclerotiorum 1980] gi|154705007|gb|EDO04746.1| SS1G_07229 [Sclerotinia sclerotiorum 1980]
  misc_feature (168)..(278): NCBI GI: 261360883 Blast Desc: conserved [Verticillium albo-atrum VaMs.102]
  misc_feature (159)..(275): NCBI GI: 169611622 Blast Desc: SNOG_08926 [Phaeosphaeria nodorum SN15] gi|111062974|gb|EAT84094.1| SNOG_08926 [Phaeosphaeria nodorum SN15]
  misc_feature (87)..(280): NCBI GI: 242798186 Blast Desc: conserved [Talaromyces stipitatus ATCC 10500] gi|218716463|gb|EED15884.1| conserved [Talaromyces stipitatus ATCC 10500]
  misc_feature (181)..(280): NCBI GI: 212541638 Blast Desc: conserved [Penicillium marneffei ATCC 18224] gi|210068273|gb|EEA22365.1| conserved [Penicillium marneffei ATCC 18224]
MIVAGRLKLRVDCPPRALRPKRQRAAQENHGIMSLQLDVAASMKLFGRMEQDLNMDEKCEKFETLPLVPDASQDILVKDDPRQGRRRRACLVGLLGFLLLEVVNVIVFFIIVSSSQEVQVVNDSLDERTLVKKLQSDYKKIWVWDTADGDDRRNFYEGGWEDIALEPGFVSIDKSVVEKHGIPVSGDTPGNSGEMVYQIGAFHALHCIYLIRESLINRTLDPNDGHIQHCFNYIRQSLMCNMDLQLNVRLGDQLLGIDDEPHVCQDYGAIVEWIDAHRWDPS

SEQ ID NO: 4154 - DNA, 1665 bp, Muscodor strobelii
  misc_feature: SGI EST ID NO. CUFF.10480.0
  misc_feature: Variant of the nucleotide sequence at SEQ ID NO 4152
aaaggttttaatttccttaagatgactgttcagttgcctttgaagttgagactattttcttgggtttgattgactccaaatatagcactaatgaacgagaagggataattatgggtcgacatagtctggtaggccccctcaacgatggaatcagtccagaccaatcgaaggtcgaaaaagtccgtcgaatcagattagcccgtccattagatgagttagaacagaactgaccaagttctacccggaatatatagaggccgggaattctagcaattcccatgttgtatgcaaagccattacagatatgaaaagcatgtgctccaaaaccatgactcggctagttgatcgtgatgagcaggggaaggcatgcgcaactgtcaattctttatctcgaacatcttcgatgttggataatgagattataggtgcaatggttgtggcggtacttccgaatggatggcagaatactaaggtgcggggcgttatgccgagccgcccgaccctaacacttaagtcttggcttaccatcagtcccatatcagtttcatcatcaacaaatgtatgacaattacagcagaattcattgatttcacatacttaagtctttcggatctccttcaaagtcactagtggctcttagaaaaattatttactttcagatagaaaacgtactctgttccccagttttggttgtatgacgattgttcgtgtttcctgagctatcataggggcggcatatgcgttatctctgccaccccatataccgttagagtacgaaccaacattctagcaatcccattgcttcggccaagtgggaatgcatgccaagacacggacacggacagatgtctactctattgttcatgactgctatttgctcctgtggttccgccaataagctacctagctcaacgccctagaagtcgtcgacgaatggcggagacaatgagcatatcagtagacacttgacatggaaaacattaaatgaactataggccatataatcctacggaatattaagtgagagtggcggagcaggggatcatttggacaagcgtgacgccgggcggatgattgtcgcgggccgcctgaaacttcgcgtagactgcccgccgcgcgccttgcgcccgaaaagacagcgcgccgcgcaagaaaaccacggtattatgtcactacagctggacgtggcagcatctatgaaattagtctccgcctgaatgttctaattccaaagccttggtctgagtgctttgcagagatctttttatttcatagggaacgtctctaattaatgccacgctttagtttgggcgcatggaacaagacctcaacatggatgagaagtgcgagaaattcgagacattacctctggtacctgacgcttcgcaggatattctcgtgaaggatgatccaaggcaaggacgcaggagaagggcctgccttgtcggactcctgggtttcctactactcgaagtagtcaacgtcattgtgttcttcatcattgtctcctcaagccaggaagtgcaggttgttaatgatagcttggacgagctaaaaaaattgcagtcggactacaaaaagatttgggtttgggacacagccgatggagatgatcgccgcaatttctacgaaggaggctgggaggatatcgcacttgaacctggc

SEQ ID NO: 4155 - DNA, 1044 bp, Muscodor strobelii
  misc_feature: SGI cDNA ID NO. 561065
  misc_feature: Elevated expression when VOC is produced
  misc_feature: Encodes the peptide sequence at SEQ ID NO 4156
atggacaggggtcctcttgagcgcgagaaaatggaaacggtcaaagcagaaattgcccgtgctgggagcaagagaagacgcctttcgctgagcaaaaaaactttgtcgcctccaccctccctggaatcctccagcggcaactcgttcggttcgcgacagcaatctgaagcgatggcgcttcgaaatgaccctctagaaatgctagattctttgccgtatggtcgaagagatgacgtacagagcttatcagatgaatgcttcggtttgatttcaggggacgatttctggaatgatgagatgttcaattggcagattcagactcttccgcgactggtcaacgacgaagactcaacaatttcactctcacagacttcatccggaaagtgttcagttgaacaatcctctacatcccgcgagttcaatgtagaaggcccccaatcaccattttctgtcgtccagaacaaggctctggcgtctgaaatttccggacagatagaaaatggtagcaaatcaacaaattgggaaagaattgggtaccagaatggttcagttatcaatacagtcaatggtccacgagtcacccatggacatctcgatatcttgttgcctgaggttgcagaccctccttccaatggccggaaactcgagaacacaacaggtctacaaaaatctaaactgcagacagcaattatgctgtcttcttatttgaagatgttgtcttttgggcagactcgctttcaatccgacattaatgaaatatgttcggagtggctacaagttctagtatatcattccaagcacttgctagagatcacattgatccttagtgaagcatactacacatggaactctaacccagagtcctcagaaattcacatgactggtttgagtaaaacaaaactcgttctcagggcgctgctatctccagatgccgtgatatgtatgctcgacgaggaacggagggcattgcaagctgctgttgtctgctcgtgtgtttgccaaatcatccatctggaggtatgggacgtcaatatggtcctttaa

SEQ ID NO: 4156 - protein, 347 aa, Muscodor strobelii
  misc_feature: SGI Peptide ID NO. 561065
  misc_feature: Useful for introducing or modulating the production of volatile compounds
MDRGPLEREKMETVKAEIARAGSKRRRLSLSKKTLSPPPSLESSSGNSFGSRQQSEAMALRNDPLEMLDSLPYGRRDDVQSLSDECFGLISGDDFWNDEMFNWQIQTLPRLVNDEDSTISLSQTSSGKCSVEQSSTSREFNVEGPQSPFSVVQNKALASEISGQIENGSKSTNWERIGYQNGSVINTVNGPRVTHGHLDILLPEVADPPSNGRKLENTTGLQKSKLQTAIMLSSYLKMLSFGQTRFQSDINEICSEWLQVLVYHSKHLLEITLILSEAYYTWNSNPESSEIHMTGLSKTKLVLRALLSPDAVICMLDEERRALQAAVVCSCVCQIIHLEVWDVNMVL

SEQ ID NO: 4157 - DNA, 2515 bp, Muscodor strobelii
  misc_feature: SGI EST ID NO. CUFF.10482.2
  misc_feature: Variant of the nucleotide sequence at SEQ ID NO 4155
gtcaacgaatacgtcttgacaatacgaaatttatagtacaatcggacaattattggctttgatgctagctacgaaccacattaccaatataactaccatgagtccaagtttaacaactgcaagagtatcgggtgttagaagtgcaaatggctgttggatttgtcgtctgaggcggaaaaaatgcgacgagtcgcaaccccactgtcggacttgtacgaatctaggcatagactgtgagggttacggatcacgaccaccttggatggacaggggtcctcttgagcgcgagaaaatggaaacggtcaaagcagaaattgcccgtgctgggagcaagagaagacgcctttcgctgagcaaaaaaactttgtcgcctccaccctccctggaatcctccagcggcaactcgttcggttcgcgacagcaatctgaagcgatggcgcttcgaaatgaccctctagaaatgctagattctttgccgtatggtcgaagagatgacgtacagagcttatcagatgaatgcttcggtttgatttcaggggacgatttctggaatgatgagatgttcaattggcagattcagactcttccgcgactggtcaacgacgaagactcaacaatttcactctcacagacttcatccggaaagtgttcagttgaacaatcctctacatcccgcgagttcaatgtagaaggcccccaatcaccattttctgtcgtccagaacaaggctctggcgtctgaaatttccggacagatagaaaatggtagcaaatcaacaaattgggaaagaattgggtaccagaatggttcagttatcaatacagtcaatggtccacgagtcacccatggacatctcgatatcttgttgcctgaggttgcagaccctccttccaatggccggaaactcgagaacacaacaggtctacaaaaatctaaactgcagacagcaattatgctgtcttcttatttgaagatgttgtcttttgggcagactcgctttcaatccgacattaatgaaatatgttcggagtggctacaagttctagtatatcattccaagcacttgctagagatcacattgatccttagtgaagcatactacacatggaactctaacccagagtcctcagaaattcacatgactggtttgagtaaaacaaaactcgttctcagggcgctgctatctccagatgccgtgatatgtatgctcgacgaggaacggagggcattgcaagctgctgttgtctgctcgtgtgtttgccaaatcatccatctggagcttctttgtggtacaagtagccattggaaacaatgtctcgcccaagctggcccatatacgcagattttagttgacatagttgtgtgcagccgagatagcgcatccagctccgagccacttgcgttagctacacaacagacattgctagccgcagccaaagcacttgtaactcgtctaatatggcttgacactatggcggctgtatctacgggtagtccatcatatttacaattcaatcatacttatctcttgcgctctgagttcattgacatggcagagatatttggatgcgaaaattgggtgcttaaggaattacatgagatcatcgcgctacgacgatgaaaagaacaagcagagtccgagcaaaatcttaacataatgcggctggctgcacgtggatcaaccattttggaatccttgaaagagaaaatcacaaaattgggaagtatcacatcaaacgccgttgggctgcaagctgaaagtgtcaacggcatcgaccaacgttttaactgcgcgaaggacaaggttaaatacataggcacatgtataacagccgcttttgctcacgctaccacaatctttctccacgtcgttctgtccggccccttgccacatctacaggagatacgcacggcccacgcagagttacgatcatcgctgtgcatcctagacagtcaagagctgaccaaatacgttgcgtggcctctatgtgtggcagcatgcttcgtaattggggatgagcaggatcctattttcactcccgcatacttggaggtgcaaggcaacccgaagatgcccagtacatgcatcgaggcgtcgaaaatcgggcagaagtgccgttcaatgagaaaaggcggagaatgcgctgagtgggtgtcggcgatgaaaagtctccagacatgcgttttgttggcttagagtaggagtttccaaaatcgcacaaatctaatatgccaccttctcgcggtgcagcctcgagatactgtccaaagatgctttggagcaggcaatgatagcttttcattgtgcaaccgcgacaacaatataacagcttagccatgaacccgaaaagcaatcacaattgtcggagtcataacactgtaccccatgacgaatacgataaattctacacagtctaggcttctagagatgttcccttctgtttcaacgtcaaaacggagccgatttcattcatcagactggtaatgtacgcagaagtagatagatcaatcagag

SEQ ID NO: 4158 - DNA, 816 bp, Muscodor strobelii
  misc_feature: SGI cDNA ID NO. 561066
  misc_feature: Encodes the peptide sequence at SEQ ID NO 4159
atgtacatactttgccaagcaatttcctcctggtatccgcggatatcgccaatgtggtcgaagggagggggcaaaaccaccgctctgtgtggattaggtgacgatgttcacgaccaaagcaagcccctgatggacggtgacgaccactcaaagccagaagattacgctagctcccaacaacaccgccatactcttatctggtatcgctacgtctcaccttatattttaatactcctgctcagctctctggtatcggcgctactaggtgccacattagccgtcgtcgcaggatcatgccgtctccaaaacgacattgccgcccccgccactgagacggaaacaaagttggcgaaatacaaacattcgcagctcagagaaatcatgagcgagccatgcggcaccagtgcagccgaggcgcgggctcgtggctgccacttcgacgttatctcgttcaactggctgcctgacgcttactacgatagcgagctgtctgccgagtttatggagaagcacgctcttgtctggtacgaggacccgaaacaacagcggccgctcagttacgacgagatcatgaccggcgagcacacggatttgtacgttaactgggaataccacatcgcccattgcacggccatgtggaagaagatgcaccgggcgctgctgacggacgggggcggcttcgccgctatcgacggctatatcgcgtcatatgcacattctgagcactgcgagatgatgttgttgggcgatcgggatgtcgagcttgaggctattaatacgaggattgcggtgaagtttccggactgtggaatgtga

SEQ ID NO: 4159 - protein, 271 aa, Muscodor strobelii
  misc_feature: SGI Peptide ID NO. 561066
  misc_feature (65)..(271): NCBI GI: 240106192 Blast Desc: CPC735_057550 [Coccidioides posadasii C735 delta SOWgp]
  misc_feature (79)..(271): NCBI GI: 119192178 Blast Desc: CIMG_00466 [Coccidioides immitis RS]
  misc_feature (111)..(271): NCBI GI: 169774635 Blast Desc: [Aspergillus oryzae RIB40] gi|83769648|dbj|BAE59783.1| protein product [Aspergillus oryzae]
  misc_feature (111)..(248): NCBI GI: 238496783 Blast Desc: conserved [Aspergillus flavus NRRL3357] gi|220694507|gb|EED50851.1| conserved [Aspergillus flavus NRRL3357]
  misc_feature (132)..(270): NCBI GI: 159128481 Blast Desc: conserved [Aspergillus fumigatus A1163]
  misc_feature (132)..(270): NCBI GI: 70985755 Blast Desc: conserved [Aspergillus fumigatus Af293] gi|66846012|gb|EAL86345.1| conserved [Aspergillus fumigatus Af293]
  misc_feature (132)..(270): NCBI GI: 119473595 Blast Desc: NFIA_001230 [Neosartorya fischeri NRRL 181] gi|119406826|gb|EAW16776.1| conserved [Neosartorya fischeri NRRL 181]
  misc_feature (93)..(270): NCBI GI: 121712331 Blast Desc: conserved [Aspergillus clavatus NRRL 1] gi|119401929|gb|EAW12351.1| conserved [Aspergillus clavatus NRRL 1]
  misc_feature (132)..(269): NCBI GI: 116204155 Blast Desc: [Chaetomium globosum CBS 148.51] gi|88176089|gb|EAQ83557.1| [Chaetomium globosum CBS 148.51]
  misc_feature (119)..(270): NCBI GI: 169771085 Blast Desc: [Aspergillus oryzae RIB40] gi|83767871|dbj|BAE58010.1| protein product [Aspergillus oryzae]
MYILCQAISSWYPRISPMWSKGGGKTTALCGLGDDVHDQSKPLMDGDDHSKPEDYASSQQHRHTLIWYRYVSPYILILLLSSLVSALLGATLAVVAGSCRLQNDIAAPATETETKLAKYKHSQLREIMSEPCGTSAAEARARGCHFDVISFNWLPDAYYDSELSAEFMEKHALVWYEDPKQQRPLSYDEIMTGEHTDLYVNWEYHIAHCTAMWKKMHRALLTDGGGFAAIDGYIASYAHSEHCEMMLLGDRDVELEAINTRIAVKFPDCGM

SEQ ID NO: 4160 - DNA, 188 bp, Muscodor strobelii
  misc_feature: SGI EST ID NO. CUFF.10485.0
  misc_feature: Variant of the nucleotide sequence at SEQ ID NO 4158
tctatcgagtcctctttcttcacattcagcataaatccacgatgtacatactttgccaagcaatttcctcctggtatccgcggatatcgccaatgtggtcgaagggagggggcaaaaccaccgctctgtgtggattaggtgacgatgttcacgaccaaagcaagcccctgatggacggtgacgaccac

SEQ ID NO: 4161 - DNA, 228 bp, Muscodor strobelii
  misc_feature: SGI cDNA ID NO. 561067
  misc_feature: Encodes the peptide sequence at SEQ ID NO 4162
atgcagatcatcaagttcatcactctcttcgctgccaccgtcgtggccgcccctccccctgctatccctgtcgacaccctctcgagtgagattgccacagttattgaaaaactgtctgccgatgccgtgaacagcgccgcagagatccagaagtttaagcgcttgacatataattggatcaagcgcgagaacgatgtctacccgcgtgattccgcaggtccttactaa

SEQ ID NO: 4162 - protein, 75 aa, Muscodor strobelii
  misc_feature: SGI Peptide ID NO. 561067
MQIIKFITLFAATVVAAPPPAIPVDTLSSEIATVIEKLSADAVNSAAEIQKFKRLTYNWIKRENDVYPRDSAGPY

SEQ ID NO: 4163 - DNA, 516 bp, Muscodor strobelii
  misc_feature: SGI cDNA ID NO. 561068
  misc_feature: Encodes the peptide sequence at SEQ ID NO 4164
atgatgcccaaagacactcacgaagatctgttttcccgcgagattcgaacctttaagctggaccccttatttctctccctcccagataaggatagcactgcagcgtgggaggccttgccagggccaaatggtcggggattcatagaactggaacctgataatccctataactttcccgatactaaggcaggcctatcagtcttccaccaacttcattgtctcggggcgctacgcaagttcatatgggagctcatgtacgaccaggtcgatagggaggctctgttactgacttggcctgacaatgtgacgaaccccacctatgaccaagctctcaatggcatgtggcactatgcccactgtctcgactatctgagacagggtgtgacgtgctctgcagacatgtccctagaattcgtttcgcggagtacaggccgtgccgtggtggatggtctggattacccgcatgaatgtgccaattgggacgagatatgggaatatgccgagatatatggttag

SEQ ID NO: 4164 - protein, 171 aa, Muscodor strobelii
  misc_feature: SGI Peptide ID NO. 561068
  misc_feature (21)..(163): NCBI GI: 145616294 Blast Desc: MGG_03428 [Magnaporthe grisea 70-15] gi|145010029|gb|EDJ94685.1| MGG_03428 [Magnaporthe grisea 70-15]
  misc_feature (11)..(163): NCBI GI: 169626156 Blast Desc: SNOG_16357 [Phaeosphaeria nodorum SN15] gi|111055223|gb|EAT76343.1| SNOG_16357 [Phaeosphaeria nodorum SN15]
  misc_feature (11)..(168): NCBI GI: 164425482 Blast Desc: NCU05766 [Neurospora crassa OR74A] gi|157070942|gb|EAA30505.2| conserved [Neurospora crassa OR74A]
  misc_feature (31)..(165): NCBI GI: 145236188 Blast Desc: protein product [Aspergillus niger] gi|134075193|emb|CAK96506.1| protein product [Aspergillus niger]
  misc_feature (16)..(167): NCBI GI: 145253116 Blast Desc: An16g07720 [Aspergillus niger] gi|134083629|emb|CAL00544.1| protein product [Aspergillus niger]
  misc_feature (17)..(168): NCBI GI: 169618698 Blast Desc: SNOG_12541 [Phaeosphaeria nodorum SN15] gi|111058719|gb|EAT79839.1| SNOG_12541 [Phaeosphaeria nodorum SN15]
  misc_feature (37)..(165): NCBI GI: 154305122 Blast Desc: [Botryotinia fuckeliana B05.10] gi|150853814|gb|EDN29006.1| [Botryotinia fuckeliana B05.10]
  misc_feature (26)..(168): NCBI GI: 169866279 Blast Desc: [Coprinopsis cinerea okayama7#130] gi|116499230|gb|EAU82125.1| [Coprinopsis cinerea okayama7#130]
  misc_feature (11)..(168): NCBI GI: 169625706 Blast Desc: SNOG_16129 [Phaeosphaeria nodorum SN15] gi|160705711|gb|EAT76501.2| SNOG_16129 [Phaeosphaeria nodorum SN15]
  misc_feature (37)..(165): NCBI GI: 156037504 Blast Desc: SS1G_12465 [Sclerotinia sclerotiorum 1980] gi|154697874|gb|EDN97612.1| SS1G_12465 [Sclerotinia sclerotiorum 1980]
MMPKDTHEDLFSREIRTFKLDPLFLSLPDKDSTAAWEALPGPNGRGFIELEPDNPYNFPDTKAGLSVFHQLHCLGALRKFIWELMYDQVDREALLLTWPDNVTNPTYDQALNGMWHYAHCLDYLRQGVTCSADMSLEFVSRSTGRAVVDGLDYPHECANWDEIWEYAEIYG

SEQ ID NO: 4165 - DNA, 627 bp, Muscodor strobelii
  misc_feature: SGI EST ID NO. CUFF.10504.0
  misc_feature: Variant of the nucleotide sequence at SEQ ID NO 4163
ctggaacctgataatccctataactttcccgatactaaggcaggcctatcagtcttccaccaacttcattgtctcggggcgctacgcaagttcatatgggagctcatgtacgaccaggtcgatagggaggctctgttactgacttggcctgacaatgtgacgaaccccacctatgaccaagctctcaatggcatgtggcactatgcccactgtctcgactatctgagacagggtgtgacgtgctctgcagacatgtccctagaattcgtttcgcggagtacaggccgtgccgtggtggatggtctggattacccgcatgaatgtgccaattgggacgagatatgggaatatgccgagatatatggttagcttgaattatttctagcaacttcagagattttctatatgccaaaattgcatttccttgagtggtagctattcgtcgttagtataaaatcatggccatcacacgccaaaatgacctatcttttgagtgacgagctcgtgcattggaggcagcgtctgtcatgatacgatgggtttccctgtccgttgtggccagaatgtactggctcactctcagtccgttactggctccaattatttggggaagcatctctgacggct

SEQ ID NO: 4166 - DNA, 618 bp, Muscodor strobelii
  misc_feature: SGI cDNA ID NO. 561069
  misc_feature: Encodes the peptide sequence at SEQ ID NO 4167
atgctacagcacctcccggcacatgatcctgagggccatcttgagtgccctgtgtctggttgcgacgacaaggaggccttgcattcgcattactacaagacacacgtcaagcctacccaccctgttctccacgagcacggagcatcggacagaggctgtcctttttgtgggaaacgctatcttcgccatgatcagctgaagtggcacattttccgcgagcacgcccaatcccagcgccctgaaacacctgcctctccacaacaactctcatcgcctctgcaacagcaagaattgccagcttccacgcaacaacccacgactcttcagcaacagcctatcaccgggatctctgctcctgttcgccttcagtgtgtcgaaaccaggctccgagaaatcctggaagcagactctcattttcccgctcagatcaaagccctccgtgagtcgctcgatgccggaggatggccgggtcctggaaatgccacactacgctgcctcaagcaattagaggcagagcttagatatgaatttggagcagatcactactgcttatatcagctttgggcacttcaagaggaacttaatgccaacggatggggcggcaatgacgaagattag

SEQ ID NO: 4167 - protein, 205 aa, Muscodor strobelii
  misc_feature: SGI Peptide ID NO. 561069
  misc_feature (4)..(75): NCBI GI: 194744761 Blast Desc: GF18481 [Drosophila ananassae] gi|190627898|gb|EDV43422.1| GF18481 [Drosophila ananassae]
MLQHLPAHDPEGHLECPVSGCDDKEALHSHYYKTHVKPTHPVLHEHGASDRGCPFCGKRYLRHDQLKWHIFREHAQSQRPETPASPQQLSSPLQQQELPASTQQPTTLQQQPITGISAPVRLQCVETRLREILEADSHFPAQIKALRESLDAGGWPGPGNATLRCLKQLEAELRYEFGADHYCLYQLWALQEELNANGWGGNDED

SEQ ID NO: 4168 - DNA, 1515 bp, Muscodor strobelii
  misc_feature: SGI cDNA ID NO. 561070
  misc_feature: Reduced expression when VOC is produced
  misc_feature: Encodes the peptide sequence at SEQ ID NO 4169
atggcgtccacgacgcctgaggttaaagtggaggtatctcccgcagaatccttcatttccgctcccggcgagttctatccatctctgttcccaacgtcgacagatatcgatatcatggactcggccatgacccccgaatctctgggcgagggtgcatccacaccggcccccgagacaccagccgcttccaccacagaatcagagaagaagcctgccaagaaaaggaagtcttggggacaagtcctcccagagcccaagacaaacttacctccaaggaaacgtgccaagactgaggatgagaaggagcagcgacgtgttgagcgagttcttcgcaaccgtcgtgccgcccagtcgtcacgtgagcgtaagagacaagaagtagaggccttggagcagagaaatgaagtccttcagaaccagttactcgagcagcagaagcagaacatgagactgttgcaagagctggagaagcttcgtaatggtggtgtcagccaggattcctcgacagcggaattccagccttcacccatcactctctcccaacccctgttcaccaacccgtccgtcccaggtatgaaggaagaattcgacatcctccccgagaccgtcaaccctgcctcgatttctcctgaactcaaccccgtggccgatgacgagatcccctccgcccccacagagactacttcgaccgatgcgacacaacatccagcagtgatgttgtgggacctgcagtgtccatcggtcaaagctccgtcgttttgggtggcctcgaggaccccgtcgcctccagcgctgtcgatgtacctccagcttcaaaccttgatgatggtgtcttcggctctggtttcggcctgttctcgtcctttgacactgatccgtggggcgctgaaagccaatttagcccttcagccgaccccgtcaattttgagtacgataatttggctggtaaccctaccaccgaacttcacgactttgacctcagtcaattcctcgaggacgtcagcggagccacaggcgcgaccgcaggactcgactcgagtctccctgaacccgacttcatcttcggcctcgaccttgagaatcaagtctcttcagaagcttttgaccagcagccccgtcctggcgcgtccactcatggatgcgacgatggggttattgcggtcggtgtctgagggacgagaggatcgggtcgatggaccggcatttggatccccgggtatcaagggagatcagagccgtggactgctgatgtggccagaaggctccagcttaccatcgcgtgaattactgctcacattactgtgggccataaaagttgaagaacgaaaattatcgtcgcagaggaacactagagtatcctcgccaagttctcgacccggatcaatcgtccttcggaagaagacaccaacaacaaaaagtattgtatcatcaggagtaacgaaacggaagagagaaatgactgcggatgaaatcagaaaaagattcctgttaggaaagggcaaggctcggggttaa

SEQ ID NO: 4169 - protein, 504 aa, Muscodor strobelii
  misc_feature: SGI Peptide ID NO. 561070
  misc_feature (100)..(161): Pfam Id: PF07716 Pfam Desc: Basic region leucine zipper
  misc_feature (100)..(133): Pfam Id: PF07716 Pfam Desc: Basic region leucine zipper
  misc_feature (5)..(495): NCBI GI: 171683145 Blast Desc: protein product [Podospora anserina] gi|170941532|emb|CAP67184.1| protein product [Podospora anserina]
  misc_feature (3)..(484): NCBI GI: 149209363 Blast Desc: MGCH7_ch7g173 [Magnaporthe grisea 70-15] gi|86196128|gb|EAQ70766.1| MGCH7_ch7g173 [Magnaporthe grisea 70-15]
  misc_feature (3)..(254): NCBI GI: 116193947 Blast Desc: CHGG_06691 [Chaetomium globosum CBS 148.51] gi|88182604|gb|EAQ90072.1| CHGG_06691 [Chaetomium globosum CBS 148.51]
  misc_feature (13)..(312): NCBI GI: 164429506 Blast Desc: NCU01856 [Neurospora crassa OR74A] gi|157073504|gb|EAA36251.2| NCU01856 [Neurospora crassa OR74A]
  misc_feature (4)..(220): NCBI GI: 74664279 Blast Desc: HAC1_TRIRE RecName: Full=Transcriptional activator hac1 gi|20330483|emb|CAC88374.1| transcription factor [Hypocrea jecorina]
  misc_feature (3)..(244): NCBI GI: 145610484 Blast Desc: MGG_09010 [Magnaporthe grisea 70-15] gi|145017761|gb|EDK02124.1| MGG_09010 [Magnaporthe grisea 70-15]
  misc_feature (58)..(500): NCBI GI: 121711848 Blast Desc: bZIP transcription factor (HacA), [Aspergillus clavatus NRRL 1] gi|119401691|gb|EAW12113.1| bZIP transcription factor (HacA), [Aspergillus clavatus NRRL 1]
  misc_feature (47)..(442): NCBI GI: 226288440 Blast Desc: bZIP transcription factor HacA [Paracoccidioides brasiliensis Pb18]
  misc_feature (4)..(234): NCBI GI: 46140217 Blast Desc: FG11623.1 [Gibberella zeae PH-1]
  misc_feature (22)..(217): NCBI GI: 256721921 Blast Desc: NECHADRAFT_99800 [Nectria haematococca mpVI 77-13-4]
  misc_feature: Useful for introducing or modulating the production of volatile compounds
MASTTPEVKVEVSPAESFISAPGEFYPSLFPTSTDIDIMDSAMTPESLGEGASTPAPETPAASTTESEKKPAKKRKSWGQVLPEPKTNLPPRKRAKTEDEKEQRRVERVLRNRRAAQSSRERKRQEVEALEQRNEVLQNQLLEQQKQNMRLLQELEKLRNGGVSQDSSTAEFQPSPITLSQPLFTNPSVPGMKEEFDILPETVNPASISPELNPVADDEIPSAPTETTSTDATQHPAVMLWDLQCPSVKAPSFWVASRTPSPPALSMYLQLQTLMMVSSALVSACSRPLTLIRGALKANLALQPTPSILSTIIWLVTLPPNFTTLTSVNSSRTSAEPQARPQDSTRVSLNPTSSSASTLRIKSLQKLLTSSPVLARPLMDATMGLLRSVSEGREDRVDGPAFGSPGIKGDQSRGLLMWPEGSSLPSRELLLTLLWAIKVEERKLSSQRNTRVSSPSSRPGSIVLRKKTPTTKSIVSSGVTKRKREMTADEIRKRFLLGKGKARG

SEQ ID NO: 4170 - DNA, 2238 bp, Muscodor strobelii
  misc_feature: SGI EST ID NO. CUFF.10662.0
  misc_feature: Variant of the nucleotide sequence at SEQ ID NO 4168
agggggtcccttgggtttcacaggcaggacgcagcaggacatattgctgacataattgtgctcacctgaagaggccacgttggacataaagagactggctcgcccaccatcccaaaccgtctttcgctcagccagcaccagcaccacaggacaggccacccacccaccctagagaggcagcgcgctgggccatcagaaatgaacacctgtcctctcaccaccacactccagcctgtgcacacacaactctaccacatcacacagccttgactcaccaaggcccctctttatagcgtttaggaacaatgcgtccttgtaggcagccatgaatcaactgctatatttcatgtagcgaggatttgacggctccccctactcgattgattaatccatcttatcatccacaatcaatcatccaaccaacgccatacatcaccagcgctactgtcgccattcgcttggtctgcatccgatccaatccgtcacttcagaccacaacccgtccgtagtgaatcaaggataacaactcattcactcaccacatcttcatcgattacctcatcagtattcgtcatcccgaatcacgataatcaccatggcgtccacgacgcctgaggttaaagtggaggtatctcccgcagaatccttcatttccgctcccggcgagttctatccatctctgttcccaacgtcgacagatatcgatatcatggactcggccatgacccccgaatctctgggcgagggtgcatccacaccggcccccgagacaccagccgcttccaccacagaatcagagaagaagcctgccaagaaaaggaagtcttggggacaagtcctcccagagcccaagacaaacttacctccaaggaaacgtgccaagactgaggatgagaaggagcagcgacgtgttgagcgagttcttcgcaaccgtcgtgccgcccagtcgtcacgtgagcgtaagagacaagaagtagaggccttggagcagagaaatgaagtccttcagaaccagttactcgagcagcagaagcagaacatgagactgttgcaagagctggagaagcttcgtaatggtggtgtcagccaggattcctcgacagcggaattccagccttcacccatcactctctcccaacccctgttcaccaacccgtccgtcccaggtatgaaggaagaattcgacatcctccccgagaccgtcaaccctgcctcgatttctcctgaactcaaccccgtggccgatgacgagatcccctccgcccccacagagactacttcgaccgatgcgacacaacatccagcagtgatgttgtgggacctgcagtgtccatcggtcaaagctccgtcgttttgggtggcctcgaggaccccgtcgcctccagcgctgtcgatgtacctccagcttcaaaccttgatgatggtgtcttcggctctggtttcggcctgttctcgtcctttgacactgatccgtggggcgctgaaagccaatttagcccttcagccgaccccgtcaattttgagtacgataatttggctggtaaccctaccaccgaacttcacgactttgacctcagtcaattcctcgaggacgtcagcggagccacaggcgcgaccgcaggactcgactcgagtctccctgaacccgacttcatcttcggcctcgaccttgagaatcaagtctcttcagaagcttttgaccagcagccccgtcctggcgcgtccactcatggatgcgacgatggggttattgcggtcggtgtctgagggacgagaggatcgggtcgatggaccggcatttggatccccgggtatcaagggagatcagagccgtggactgctgatgtggccagaaggctccagcttaccatcgcgtgaattactgctcacattactgtgggccataaaagttgaagaacgaaaattatcgtcgcagaggaacactagagtatcctcgccaagttctcgacccggatcaatcgtccttcggaagaagacaccaacaacaaaaagtattgtatcatcaggagtaacgaaacggaagagagaaatgactgcggatgaaatcagaaaaagattcctgttaggaaagggcaaggctcggggttaaaaggcatggtcactggcgtctggatcgtggttaatcaagaccgacacgaactggtctggcgcagagcgtggacatgtatttctatatgttacaatcaattccaatgagcattgatcagtgtcttagaa

SEQ ID NO: 4171 - DNA, 2409 bp, Muscodor strobelii
  misc_feature: SGI cDNA ID NO. 561071
  misc_feature: Encodes the peptide sequence at SEQ ID NO 4172
atggcacctctcacagatgaaccagacgcgatccgagtcatcctaaagatggctcgacgaaaagcattctataacctggtcgttgatataatgagatacatgcgttcacaactagaactgcagcacaactccaacaccagcaggccacttccgggcgatgagcctcatcctccgccgtatagcccattggcggatgcatcgaacagcaacaactctctacaacaaagtagcgaaagcggatcgcagagtcttccaaaccgctcgctgccaacgccgcctagtccggcactcattcgtttacgcaaagcggcattgctgcactttgattcctggaggacacagacgctgggcgcgctgaaagaaatcgccgcgaaagccgatgaccagaagatcgtcgacgcacgacggaaacgtgcagaacttggcgcaaaacgtcaggaagtctcgcaaccaagcggagatctcctgacattcgactccgagcccacaccctcaaacaccgtcatcccgcagaaatcaaaagaactggaagcattccagactttgtatcaccctataccaacgagactaactaccatcccacttcgtgaccgcgaagaggcgttgagcgccatgctccttttgcttctctcagtcggcaattattcctcgtattctagggcattatgctgttatatcgcatcagcgcttgaaatctcgcctagtatgctagataaagaggagaaggagatagcgacgacgatggtaggcactgcgcaaaaggcagatgctgataagaaagcaggtatgagcgctgagtctgagacacaaaagcgtcgggaagagaataaagcggggcgctattggaaagtcggtcttgcttctgttgctggggcggcgatcgtgggcgtcactggcggacttgctgcgcccgttgttgcggctgctgtgggtggcattatgagttcggtgggacttggtggtctcgcgggattcttggggatattctggatgaacggtgcgcttgtcggaacgttgttcggtgcgtttggagcgaagatgacaggggagatggtcgatcggtatgcgaaggaagttgaggatttcaagttcttgccgctcagtgcggaatggggaagggagtgggtgcagaacgatcagccggatgcgagacggctgagggtcacgattgggattaatgggtggcttgagaacgaagatgatgttacaaagccttggcgtgtgcttggtgatgagtctgaagtcttcgcgcttaggtatgagatgagtagtctcgtgtcgctgggagagaaactgaagtcgttggtgggatccgcggcttggagtgcggtaagggcggagattttgaagcggacggtgctggctacgctttcgactgcattgtggccgatgttcctactgaacactgcatcgagtgttgataatcctttcagcttcgcgaggaatcgatccgagaaggcgggacggatcctggctgatgcgctgatcaatagggtgcagggtgagagacctgttactcttattgggtattcgctcggtgcgagggtcatctactcgtgtttacgagtacttgctgagcgcaaagccttcggtattgtcgatactgtggtcttgataggtgctcccgtaccgtcaagtcatgaacactggcagatgatgcgcagtgtggtcgcaggcaagctgttcaatgttcacagcgagaatgactacatcttgggcttcttgtaccgtggtacgagcttgcagctaggtattgctggtctgcaggctgtcggcagggatatcgaaggtgtggaggatctggatctcagcgagcaggtctcaggacatcttcgatacccaactctcatcgcacagatcctgcatcgttgcggatttcctagtgtaaagggaggggagaaggccattgagaaggataagatgccaggcgacagtgagatccagctacgtgattctgactgggcagagatgggaaccctcattgacgttgaggatcctgaggataattcgccgaagccacttctaccgtcgaggcacactctgcgagaaatggagaacgagaagttcgatccatttgtcaagaatgtcaatgagcagaagacagatgctcaaacgctggacctaagattgaagggatctggctctgcggcctcaaagtctgctcctgatcgacttgacagggtgtcgcaggacgcgaatccgaatcttagagatactcaacccagatctttgagcattccacatcggcctatatcagttgatcaagcagcagtcgctggagatagtgatggcgactccgatgagtatgaaggtggtgggatcacgatgctggataatgaggatgatggtgaactcaccatggtcgagccattgagcatcgatgatgaagacgatgtagtgaagagatag

SEQ ID NO: 4172 - protein, 802 aa, Muscodor strobelii
  misc_feature: SGI Peptide ID NO. 561071
  misc_feature (276)..(627): Pfam Id: PF05277 Pfam Desc: Domain of function (DUF726)
  misc_feature (1)..(673): NCBI GI: 116182254 Blast Desc: CHGG_01755 [Chaetomium globosum CBS 148.51] gi|88186052|gb|EAQ93520.1| CHGG_01755 [Chaetomium globosum CBS 148.51]
  misc_feature (1)..(671): NCBI GI: 171695192 Blast Desc: protein product [Podospora anserina] gi|170947838|emb|CAP60002.1| protein product [Podospora anserina]
  misc_feature (1)..(681): NCBI GI: 46108060 Blast Desc: FG00912.1 [Gibberella zeae PH-1]
  misc_feature (1)..(651): NCBI GI: 85113855 Blast Desc: NCU02065 [Neurospora crassa OR74A] gi|28926380|gb|EAA35356.1| [Neurospora crassa OR74A]
  misc_feature (1)..(680): NCBI GI: 261355326 Blast Desc: transmembrane and coiled-coil domain-containing protein [Verticillium albo-atrum VaMs.102]
  misc_feature (1)..(781): NCBI GI: 39953888 Blast Desc: MGG_08873 [Magnaporthe grisea 70-15] gi|145021186|gb|EDK05315.1| MGG_08873 [Magnaporthe grisea 70-15]
  misc_feature (1)..(777): NCBI GI: 154319115 Blast Desc: BC1G_02509 [Botryotinia fuckeliana B05.10] gi|150856940|gb|EDN32132.1| BC1G_02509 [Botryotinia fuckeliana B05.10]
  misc_feature (1)..(641): NCBI GI: 256734707 Blast Desc: NECHADRAFT_31070 [Nectria haematococca mpVI 77-13-4]
  misc_feature (94)..(629): NCBI GI: 154298011 Blast Desc: BC1G_12158 [Botryotinia fuckeliana B05.10] gi|150858285|gb|EDN33477.1| BC1G_12158 [Botryotinia fuckeliana B05.10]
  misc_feature (1)..(629): NCBI GI: 156055942 Blast Desc: SS1G_05323 [Sclerotinia sclerotiorum 1980] gi|154703107|gb|EDO02846.1| SS1G_05323 [Sclerotinia sclerotiorum 1980]
MAPLTDEPDAIRVILKMARRKAFYNLVVDIMRYMRSQLELQHNSNTSRPLPGDEPHPPPYSPLADASNSNNSLQQSSESGSQSLPNRSLPTPPSPALIRLRKAALLHFDSWRTQTLGALKEIAAKADDQKIVDARRKRAELGAKRQEVSQPSGDLLTFDSEPTPSNTVIPQKSKELEAFQTLYHPIPTRLTTIPLRDREEALSAMLLLLLSVGNYSSYSRALCCYIASALEISPSMLDKEEKEIATTMVGTAQKADADKKAGMSAESETQKRREENKAGRYWKVGLASVAGAAIVGVTGGLAAPVVAAAVGGIMSSVGLGGLAGFLGIFWMNGALVGTLFGAFGAKMTGEMVDRYAKEVEDFKFLPLSAEWGREWVQNDQPDARRLRVTIGINGWLENEDDVTKPWRVLGDESEVFALRYEMSSLVSLGEKLKSLVGSAAWSAVRAEILKRTVLATLSTALWPMFLLNTASSVDNPFSFARNRSEKAGRILADALINRVQGERPVTLIGYSLGARVIYSCLRVLAERKAFGIVDTVVLIGAPVPSSHEHWQMMRSVVAGKLFNVHSENDYILGFLYRGTSLQLGIAGLQAVGRDIEGVEDLDLSEQVSGHLRYPTLIAQILHRCGFPSVKGGEKAIEKDKMPGDSEIQLRDSDWAEMGTLIDVEDPEDNSPKPLLPSRHTLREMENEKFDPFVKNVNEQKTDAQTLDLRLKGSGSAASKSAPDRLDRVSQDANPNLRDTQPRSLSIPHRPISVDQAAVAGDSDGDSDEYEGGGITMLDNEDDGELTMVEPLSIDDEDDVVKR

SEQ ID NO: 4173 - DNA, 2585 bp, Muscodor strobelii
  misc_feature: SGI EST ID NO. CUFF.10665.0
  misc_feature: Variant of the nucleotide sequence at SEQ ID NO 4171
cttcatcactcgcgacgtttcgatttacaatcttcagattctcatcttgtttaagtgcttcggagattgaaaattttacctcattcgccaattagtacatgcttggaggctggaatgcctcttcaaagcagcaatggcacctctcacagatgaaccagacgcgatccgagtcatcctaaagatggctcgacgaaaagcattctataacctggtcgttgatataatgagatacatgcgttcacaactagaactgcagcacaactccaacaccagcaggccacttccgggcgatgagcctcatcctccgccgtatagcccattggcggatgcatcgaacagcaacaactctctacaacaaagtagcgaaagcggatcgcagagtcttccaaaccgctcgctgccaacgccgcctagtccggcactcattcgtttacgcaaagcggcattgctgcactttgattcctggaggacacagacgctgggcgcgctgaaagaaatcgccgcgaaagccgatgaccagaagatcgtcgacgcacgacggaaacgtgcagaacttggcgcaaaacgtcaggaagtctcgcaaccaagcggagatctcctgacattcgactccgagcccacaccctcaaacaccgtcatcccgcagaaatcaaaagaactggaagcattccagactttgtatcaccctataccaacgagactaactaccatcccacttcgtgaccgcgaagaggcgttgagcgccatgctccttttgcttctctcagtcggcaattattcctcgtattctagggcattatgctgttatatcgcatcagcgcttgaaatctcgcctagtatgctagataaagaggagaaggagatagcgacgacgatggtaggcactgcgcaaaaggcagatgctgataagaaagcaggtatgagcgctgagtctgagacacaaaagcgtcgggaagagaataaagcggggcgctattggaaagtcggtcttgcttctgttgctggggcggcgatcgtgggcgtcactggcggacttgctgcgcccgttgttgcggctgctgtgggtggcattatgagttcggtgggacttggtggtctcgcgggattcttggggatattctggatgaacggtgcgcttgtcggaacgttgttcggtgcgtttggagcgaagatgacaggggagatggtcgatcggtatgcgaaggaagttgaggatttcaagttcttgccgctcagtgcggaatggggaagggagtgggtgcagaacgatcagccggatgcgagacggctgagggtcacgattgggattaatgggtggcttgagaacgaagatgatgttacaaagccttggcgtgtgcttggtgatgagtctgaagtcttcgcgcttaggtatgagatgagtagtctcgtgtcgctgggagagaaactgaagtcgttggtgggatccgcggcttggagtgcggtaagggcggagattttgaagcggacggtgctggctacgctttcgactgcattgtggccgatgttcctactgaacactgcatcgagtgttgataatcctttcagcttcgcgaggaatcgatccgagaaggcgggacggatcctggctgatgcgctgatcaatagggtgcagggtgagagacctgttactcttattgggtattcgctcggtgcgagggtcatctactcgtgtttacgagtacttgctgagcgcaaagccttcggtattgtcgatactgtggtcttgataggtgctcccgtaccgtcaagtcatgaacactggcagatgatgcgcagtgtggtcgcaggcaagctgttcaatgttcacagcgagaatgactacatcttgggcttcttgtaccgtggtacgagcttgcagctaggtattgctggtctgcaggctgtcggcagggatatcgaaggtgtggaggatctggatctcagcgagcaggtctcaggacatcttcgatacccaactctcatcgcacagatcctgcatcgttgcggatttcctagtgtaaagggaggggagaaggccattgagaaggataagatgccaggcgacagtgagatccagctacgtgattctgactgggcagagatgggaaccctcattgacgttgaggatcctgaggataattcgccgaagccacttctaccgtcgaggcacactctgcgagaaatggagaacgagaagttcgatccatttgtcaagaatgtcaatgagcagaagacagatgctcaaacgctggacctaagattgaagggatctggctctgcggcctcaaagtctgctcctgatcgacttgacagggtgtcgcaggacgcgaatccgaatcttagagatactcaacccagatctttgagcattccacatcggcctatatcagttgatcaagcagcagtcgctggagatagtgatggcgactccgatgagtatgaaggtggtgggatcacgatgctggataatgaggatgatggtgaactcaccatggtcgagccattgagcatcgatgatgaagacgatgtagtgaagagatagcaatcttgaagccaatgctgatttctccaattatcgaaatgcg

SEQ ID NO: 4174 - DNA, 399 bp, Muscodor strobelii
  misc_feature: SGI cDNA ID NO. 561072
  misc_feature: Encodes the peptide sequence at SEQ ID NO 4175
atggctgctcctgaccccagcgtggttcctgatgacctggggccaccttacgcccatcagaattcgcaccctgattttggtgcccatgctcaacgactcctacgagcctggacttcaaccctccttaccaccgagcgcctcctgaacaatgaaggtatccagggacttaccgccggcaatccgcagcacatcaccaaggcatttgatattattacggctgtcaacgttgacgaactgctcgcaaatgtgtaccgcaacgaagcaatcctgaagcgcatcgacacacgtgtcggaaaccttgagaagaaggttaccgaaatgcacactctctacttctctttcgtctgggtcctgctcgcgattgttctgttcaaggtatacaaggcattggcaggttga

SEQ ID NO: 4175 - protein, 132 aa, Muscodor strobelii
  misc_feature: SGI Peptide ID NO. 561072
MAAPDPSVVPDDLGPPYAHQNSHPDFGAHAQRLLRAWTSTLLTTERLLNNEGIQGLTAGNPQHITKAFDIITAVNVDELLANVYRNEAILKRIDTRVGNLEKKVTEMHTLYFSFVWVLLAIVLFKVYKALAG

SEQ ID NO: 4176 - DNA, 1707 bp, Muscodor strobelii
  misc_feature: SGI cDNA ID NO. 561073
  misc_feature: Encodes the peptide sequence at SEQ ID NO 4177
atggaggacttaagcaagaaatttgaggatcttcatcttcagatgaagtcactttgttgcaacgacaataaccagtcttcgatctgcggccaaatcgcctcgtttgcatgcgaggcctgccacatggtatcaaaagaaaagcatctctggggtagcatgccagcattcgacgtaatccaattgcaccataatgaaggacctgaatttgatggcccgatggacattctatttgcagcatctggtgacctgcgtaatgtaatgctttctgtgtcgaatctcccctcaacctaccgaggctctctgaatatcacaatcaacgaccccgagttcgatattgtagcacgcaatacaattcttcttctgatcatgttcgtcgaagacgatcctatcaaagcagccgagtgtatgctgcacacatggtattcggcattcatgccagaatggtgctatagtgtactccatgataaagttaggccactgatcgtgaatgtttacgagaagaccaaacatagaccagagaagattctacaggccaagacatggacatttggagaaagttctcttcgactcattctcaccggagccgagtggaaacatctgatgtggtttttagagacagttgacggattcaagaagccagaggcgcagattgttcgcaataccgccatcatgccaccctcacaggctgacgtaatcgatctggtgattactctccaagtaccggaaaaggcgcttggcatgatgaagttccgcggcgatggaatcctgcgcccatttggaagtgctcgagaggatttcatcgtccctaatccgacactcttccgaccctttgcagaaggccccaaaggcgctgatggaaagccaaatgcaaaatacgcccgcccgttcacatggcccattgcaaactttgcagatcccacaggtggctgggcagcgcagtctttcattggcgggaatggcggaccggcgtcgaaagacgtttatggccagctgtaccactatctgatgcgcttactttccgtcttccacgctcagttgcagtctaaagctatgtctttcaaactactgaacgtcgaaacgatggatttgtcgaagaagctagctagcaagagctttgatcgcgttgaggtcggcaatatcagtgacagacttcacattggttttagaccggctcttagaatattcggttctttcctgaagcctcagacaaccaacccacatgcaacgctcgtcatgcttttcatgactgcggtcgccgagatgaaggccaaatctcttgacattggcagtattgaggcaaccatgagaagagtagccaagttcatgcccgagctgaattcccaggagacgaaacagaaaattggctcgctaacggattgcgatcgtggcgacatccaacgtccttcttcttacaagcttttgaaagcaatggagatattgggcgatgtagagaatgctttcaatctgtatatgcatgatgtcagtttcgaccaggcggcttcggctgccggactagaaatgaaagcgcaacacacaatcgtcagtccctggccactaagagaatcgatcggctttagtactaccggccctgatccgccagcaagtctgcacatggaatgtttcaagcacttgtttggttctgagcgcaatggaaccgaacgatatgtggaatggaagcgggccagcggcgtctcaaagggttcctaa

SEQ ID NO: 4177 - protein, 568 aa, Muscodor strobelii
  misc_feature: SGI Peptide ID NO. 561073
  misc_feature (46)..(559): NCBI GI: 156056723 Blast Desc: SS1G_04092 [Sclerotinia sclerotiorum 1980] gi|154701878|gb|EDO01617.1| SS1G_04092 [Sclerotinia sclerotiorum 1980]
  misc_feature (45)..(559): NCBI GI: 154323824 Blast Desc: BC1G_00311 [Botryotinia fuckeliana B05.10] gi|150842540|gb|EDN17733.1| BC1G_00311 [Botryotinia fuckeliana B05.10]
  misc_feature (46)..(562): NCBI GI: 46110595 Blast Desc: FG02179.1 [Gibberella zeae PH-1]
  misc_feature (47)..(560): NCBI GI: 238845993 Blast Desc: conserved [Microsporum canis CBS 113480]
  misc_feature (45)..(561): NCBI GI: 240106688 Blast Desc: MYND finger family protein [Coccidioides posadasii C735 delta SOWgp]
  misc_feature (17)..(561): NCBI GI: 258570069 Blast Desc: [Uncinocarpus reesii 1704] gi|237904108|gb|EEP78509.1| [Uncinocarpus reesii 1704]
  misc_feature (44)..(558): NCBI GI: 256720860 Blast Desc: NECHADRAFT_49944 [Nectria haematococca mpVI 77-13-4]
  misc_feature (47)..(561): NCBI GI: 242791874 Blast Desc: conserved [Talaromyces stipitatus ATCC 10500] gi|218718431|gb|EED17851.1| conserved [Talaromyces stipitatus ATCC 10500]
  misc_feature (45)..(566): NCBI GI: 119174078 Blast Desc: CIMG_09021 [Coccidioides immitis RS]
  misc_feature (47)..(566): NCBI GI: 189200813 Blast Desc: conserved [Pyrenophora tritici-repentis Pt-1C-BFP] gi|187983842|gb|EDU49330.1| conserved [Pyrenophora tritici-repentis Pt-1C-BFP]
MEDLSKKFEDLHLQMKSLCCNDNNQSSICGQIASFACEACHMVSKEKHLWGSMPAFDVIQLHHNEGPEFDGPMDILFAASGDLRNVMLSVSNLPSTYRGSLNITINDPEFDIVARNTILLLIMFVEDDPIKAAECMLHTWYSAFMPEWCYSVLHDKVRPLIVNVYEKTKHRPEKILQAKTWTFGESSLRLILTGAEWKHLMWFLETVDGFKKPEAQIVRNTAIMPPSQADVIDLVITLQVPEKALGMMKFRGDGILRPFGSAREDFIVPNPTLFRPFAEGPKGADGKPNAKYARPFTWPIANFADPTGGWAAQSFIGGNGGPASKDVYGQLYHYLMRLLSVFHAQLQSKAMSFKLLNVETMDLSKKLASKSFDRVEVGNISDRLHIGFRPALRIFGSFLKPQTTNPHATLVMLFMTAVAEMKAKSLDIGSIEATMRRVAKFMPELNSQETKQKIGSLTDCDRGDIQRPSSYKLLKAMEILGDVENAFNLYMHDVSFDQAASAAGLEMKAQHTIVSPWPLRESIGFSTTGPDPPASLHMECFKHLFGSERNGTERYVEWKRASGVSKGS

SEQ ID NO: 4178 - DNA, 582 bp, Muscodor strobelii
  misc_feature: SGI cDNA ID NO. 561074
  misc_feature: Encodes the peptide sequence at SEQ ID NO 4179
atgaccgagccctacgccccgtccgagggacacgtcgattctatctacggggatgtggattttgcatccatctatgatcctatccaggaaccagcaaattcaccacaatccgcagatcaagaacgaatgttgatcgccattggaaacctttcgggcggcatcagcgagctgtcaacaactgggcaggtacgaaaactgcaacaaatcgccgagaaaactcaagaacatgcaggaatgctggccgatggagtcgcagagattattcaacacgcagagcagatgaaaaagcgccaaggacaatcgactgaacagatcgagcgcatgcataagaagatcgatggtgtcgccactcaggtggcgcaagaagtccagaaggctgccgagaacattgctgaggacgctgccaagcagaacgccattattgcgcagacaaataagaatgcccttgaagcttacttcagacaacaagaagatcagcgacggaaggagattcgttctgttgcccacatgatcgttagcgcagtcgtcgtcttgatcgccgtattttggggcaccttgtggtatcggggtctcgttcgatga

SEQ ID NO: 4179 - protein, 193 aa, Muscodor strobelii
  misc_feature: SGI Peptide ID NO. 561074
MTEPYAPSEGHVDSIYGDVDFASIYDPIQEPANSPQSADQERMLIAIGNLSGGISELSTTGQVRKLQQIAEKTQEHAGMLADGVAEIIQHAEQMKKRQGQSTEQIERMHKKIDGVATQVAQEVQKAAENIAEDAAKQNAIIAQTNKNALEAYFRQQEDQRRKEIRSVAHMIVSAVVVLIAVFWGTLWYRGLVR

SEQ ID NO: 4180 - DNA, 366 bp, Muscodor strobelii
  misc_feature: SGI cDNA ID NO. 561075
  misc_feature: Elevated expression when VOC is produced
  misc_feature: Encodes the peptide sequence at SEQ ID NO 4181
atgttcccagacggcgcgacgtacaaggccggtgacaagatcacgatcgagtggagcgcggcagggctgcccgagggtgacatgcggctcagcgtgcagtccgggctcgtaacgccaatcattaccggttatgggtataactggttaggacagcaagttcccatctacgacttcaagggcggcgccgtctttctcgatcccgttcccatcgagaacgagaagctggagtggacggttgcggtcatcgccaacagcacgggcgatgagtaccagtactacgcaaacggcatgtactacacgcattacagcgacaccggcgacagctccgaaagctgcagcaccaactacttccacgtctcggcttag

SEQ ID NO: 4181 - protein, 121 aa, Muscodor strobelii
  misc_feature: SGI Peptide ID NO. 561075
  misc_feature: Useful for introducing or modulating the production of volatile compounds
MFPDGATYKAGDKITIEWSAAGLPEGDMRLSVQSGLVTPIITGYGYNWLGQQVPIYDFKGGAVFLDPVPIENEKLEWTVAVIANSTGDEYQYYANGMYYTHYSDTGDSSESCSTNYFHVSA

SEQ ID NO: 4182 - DNA, 791 bp, Muscodor strobelii
  misc_feature: SGI EST ID NO. CUFF.10540.0
  misc_feature: Variant of the nucleotide sequence at SEQ ID NO 4180
tagaaaacggccattatgtccagatagatgatctgcacctctggactcatcttcatccttattttcatcttatcctctaaccccagcccatcgtttttaggcttaggaaaaagaaagaaagaaaaaatacgatggcgccctccgtaataaagaccctagctcttcccgcgctcctcctggcgggtgcagtgcaggccctaccgagcctaaagtcgaactcgctgaagccacgtgtgccacaaccctgtgcggtcaagaccatgttcccagacggcgcgacgtacaaggccggtgacaagatcacgatcgagtggagcgcggcagggctgcccgagggtgacatgcggctcagcgtgcagtccgggctcgtaacgccaatcattaccggttatgggtataactggttaggacagcaagttcccatctacgacttcaagggcggcgccgtctttctcgatcccgttcccatcgagaacgagaagctggagtggacggttgcggtcatcgccaacagcacgggcgatgagtaccagtactacgcaaacggcatgtactacacgcattacagcgacaccggcgacagctccgaaagctgcagcaccaactacttccacgtctcggcttagatcatccgagagagcgatattggatggcctccttcctgttcaaagcgcgaatggaatctccaatcagaattgatgggcggagcttccaatgcgagtagcgagaaaagctgaaatagatggattgtgtcggaacccggttgaaaccagtatggatgtgatgtggtg

SEQ ID NO: 4183 - DNA, 495 bp, Muscodor strobelii
  misc_feature: SGI cDNA ID NO. 561076
  misc_feature: Encodes the peptide sequence at SEQ ID NO 4184
atgacgcatccgcgcccccgcaccgcccgtcgcgaggcggtcaaccgtctcagcagactccgcccaaatgacagcacccagaatcgaaatgaatcaccggctcgcaacgaccccgatctcctctctgtcttccccggtaccggcaatgtgtacgcgcattgggtgagagagaaggatcgcaatgcgacactatctgaagaacttcatcgactgaaggaaatggtacgcaagcagagtaaggagaatgtcgagcttgcaaataagaatctcgagtttgcaaactcgaacaaagaactggcgaactcaaacgtcaagtttgcagagacgaatgtagtgcttgcagaggagggagccaaacttgcaaaggacctaggcggccaatatactgcgcgcgacatcctcttctacgtcttctacatcttcctgatgatggcaatcacgataattttggccaaattcatcgagaagaagcgcaaggaaagtatcgttggttag

SEQ ID NO: 4184 - protein, 164 aa, Muscodor strobelii
  misc_feature: SGI Peptide ID NO. 561076
MTHPRPRTARREAVNRLSRLRPNDSTQNRNESPARNDPDLLSVFPGTGNVYAHWVREKDRNATLSEELHRLKEMVRKQSKENVELANKNLEFANSNKELANSNVKFAETNVVLAEEGAKLAKDLGGQYTARDILFYVFYIFLMMAITIILAKFIEKKRKESIVG

SEQ ID NO: 4185 - DNA, 708 bp, Muscodor strobelii
  misc_feature: SGI cDNA ID NO. 561077
  misc_feature: Encodes the peptide sequence at SEQ ID NO 4186
atgctgttcacgctacctctgttgcttgctcctgccttggtggctgcacacggtgctgtcacgagttatatcattggcggcaagacatatgatggatatcaaggcttctcgcctgtttccggggctcagattatacagagacagtggccagactacaaccccatcatgaccgtgacggacgccaagatgacttgcaatggtggaacttcggctcctatttccgcttccgttgccgctggcaccaatatcacggctgtctggaaacaatggacacatgctcaaggccccgtgatggtctggatgtacccatgcgacggtgcatttactgcctgcgatggcaagagcaagaagtggttcaagatcgaccagatgggtttgttcggtcccgccttgaacagtaatgattggggtactgctctcgtcatgaaaaacttgcaatggtcgagcaagatccccgcgagtcttaagcctggcaattacctcatccgtcatgagctgcttgcactgcaccaggccaatacccctcagttctatcccgaatgcgcccagattgaggtcactggctccggaacagcagtcccaagtggaacgttccttgcatctatcccagcctatgccgcccagtctgatccaggcgtcatggtcgatatttatcaaggcaaagcgacgacatacacatgccccggccccgctgtgtggactggttaa

SEQ ID NO: 4186 - protein, 235 aa, Muscodor strobelii
  misc_feature: SGI Peptide ID NO. 561077
  misc_feature (7)..(227): Pfam Id: PF03443 Pfam Desc: Glycosyl hydrolase family 61
  misc_feature (1)..(227): Pfam Id: PF03443 Pfam Desc: Glycosyl hydrolase family 61
  misc_feature (3)..(235): NCBI GI: 189199872 Blast Desc: cel1 protein precursor [Pyrenophora tritici-repentis Pt-1C-BFP] gi|187983372|gb|EDU48860.1| cel1 protein precursor [Pyrenophora tritici-repentis Pt-1C-BFP]
  misc_feature (1)..(235): NCBI GI: 164427556 Blast Desc: NCU03000 [Neurospora crassa OR74A] gi|157071792|gb|EAA36150.2| conserved [Neurospora crassa OR74A]
  misc_feature (1)..(235): NCBI GI: 16945376 Blast Desc: related to cel1 protein precursor [Neurospora crassa]
  misc_feature (13)..(235): NCBI GI: 145610466 Blast Desc: MGG_12696 [Magnaporthe grisea 70-15] gi|145017744|gb|EDK02107.1| MGG_12696 [Magnaporthe grisea 70-15]
  misc_feature (1)..(228): NCBI GI: 11359621 Blast Desc: MGG_12696 [Magnaporthe grisea 70-15] gi|145017744|gb|EDK02107.1| MGG_12696 [Magnaporthe grisea 70-15]
  misc_feature (1)..(235): NCBI GI: 171693123 Blast Desc: protein product [Podospora anserina] gi|170946510|emb|CAP73311.1| protein product [Podospora anserina]
  misc_feature (2)..(187): NCBI GI: 169625613 Blast Desc: SNOG_16081 [Phaeosphaeria nodorum SN15] gi|160705691|gb|EAT76660.2| SNOG_16081 [Phaeosphaeria nodorum SN15]
  misc_feature (20)..(235): NCBI GI: 116181126 Blast Desc: CHGG_01191 [Chaetomium globosum CBS 148.51] gi|88185488|gb|EAQ92956.1| CHGG_01191 [Chaetomium globosum CBS 148.51]
  misc_feature (71)..(235): NCBI GI: 116192853 Blast Desc: CHGG_06144 [Chaetomium globosum CBS 148.51] gi|88182057|gb|EAQ89525.1| CHGG_06144 [Chaetomium globosum CBS 148.51]
  misc_feature (13)..(235): NCBI GI: 149209397 Blast Desc: MGCH7_ch7g190 [Magnaporthe grisea 70-15] gi|86196145|gb|EAQ70783.1| MGCH7_ch7g190 [Magnaporthe grisea 70-15]
  misc_feature (73)..(235): SWISSPROT Homolog: EC 3.2.1.4 Cellulase
MLFTLPLLLAPALVAAHGAVTSYIIGGKTYDGYQGFSPVSGAQIIQRQWPDYNPIMTVTDAKMTCNGGTSAPISASVAAGTNITAVWKQWTHAQGPVMVWMYPCDGAFTACDGKSKKWFKIDQMGLFGPALNSNDWGTALVMKNLQWSSKIPASLKPGNYLIRHELLALHQANTPQFYPECAQIEVTGSGTAVPSGTFLASIPAYAAQSDPGVMVDIYQGKATTYTCPGPAVWTG

SEQ ID NO: 4187 - DNA, 1239 bp, Muscodor strobelii
  misc_feature: SGI cDNA ID NO. 561078
  misc_feature: Encodes the peptide sequence at SEQ ID NO 4188
atgcatttcaccaaacttgcagctggcctcggcctcattgccggtgccacggcgatgcccaccaaccgcaagcgcgcagccaacggacccctaaatgtggtgtactgggggcaaaacggcggtggtacgatcgagaacaacgacttggcaagctactgtacggccacttcgggcattgacgttgtcgtgcttgccttcttgtactcatacggaaatgggaacacatctccgtctggcgggatcggacagtcgtgctcgatttcatccggaaagggatcacaatgtgacgctctcggcactgccatctctgcttgccaagaggctggcgtcacggtcatcatgtctctcggcggtgcggtcggctccacccagataacatctcagtccgaggccgagtcgatcgccacgaatctatggaactcatacggaaactcgggtaccagcgcttcttcacgaccgtttggttcggcgtttgtgaatggtttcgattttgatatcgaacagaatgctggtggcaacaataaatactacacgtatctaatctcgtctcttcgatcgaaattcacctctgataagtcaaacacctactatatcactggtgcaccacaatgccccatacccgagcccaacatgggggttatcatcgagggttcacagttcgattggctctggccccaattctataacaacaacaactacacctatccgtgtgcgctcccgattaatggcaacgccccattcaactacgaccaatggatcagctacacggcaggaactccatctgccaacgctaagatcttcgttggcgttccagctgctcctctcgcagctaatggcgggccggctggcgagacatattatgcaacgcccaaccaactctcgaccatcatcaatagtgttaagggtgaatctcgattcggtggcattatgctttggtcggcgggcttttccgattctaacgtcatcagcggttgcacctacgcacaacaggctaaagctattctcgaaaaaggctcaccttgcagcaatggccctgtgactgtaacgcgcactccaatagtgacagcgacagctacgcacacaactggcactggtacaacatcacccactgccactgctactggaactccagtggctcaatggggtcaatgcggcggaataggctacactggttcgacggtctgcgcgaagccgtacacatgcgttgcgacaggtccttactggtcacaatgccagtag

SEQ ID NO: 4188 - protein, 412 aa, Muscodor strobelii
  misc_feature: SGI Peptide ID NO. 561078
  misc_feature (380)..(408): Pfam Id: PF00734 Pfam Desc: Fungal cellulose binding domain
  misc_feature (30)..(317): Pfam Id: PF00704 Pfam Desc: Glycosyl hydrolases family 18
  misc_feature (5)..(412): NCBI GI: 9971103 Blast Desc: endochitinase CHI2 [Metarhizium anisopliae var. acridum]
  misc_feature (1)..(412): NCBI GI: 63148160 Blast Desc: chitinase [Metarhizium anisopliae]
  misc_feature (1)..(412): NCBI GI: 126032267 Blast Desc: TPA: TPA_inf: chitinase 18-14 [Hypocrea jecorina]
  misc_feature (32)..(398): NCBI GI: 255709229 Blast Desc: chitinase [Metarhizium anisopliae]
  misc_feature (14)..(412): NCBI GI: 242798333 Blast Desc: chitinase 3 precursor, [Talaromyces stipitatus ATCC 10500] gi|218716493|gb|EED15914.1| chitinase 3 precursor, [Talaromyces stipitatus ATCC 10500]
  misc_feature (10)..(412): NCBI GI: 242811823 Blast Desc: class III chitinase ChiA2 [Talaromyces stipitatus ATCC 10500] gi|218714169|gb|EED13592.1| class III chitinase ChiA2 [Talaromyces stipitatus ATCC 10500]
  misc_feature (32)..(398): NCBI GI: 255709231 Blast Desc: chitinase [Metarhizium anisopliae]
  misc_feature (1)..(412): NCBI GI: 212544236 Blast Desc: endochitinase precursor, [Penicillium marneffei ATCC 18224] gi|210065241|gb|EEA19335.1| endochitinase precursor, [Penicillium marneffei ATCC 18224]
  misc_feature (23)..(412): NCBI GI: 212541552 Blast Desc: Acidic endochitinase precursor, [Penicillium marneffei ATCC 18224] gi|210068230|gb|EEA22322.1| Acidic endochitinase precursor, [Penicillium marneffei ATCC 18224]
  misc_feature (1)..(341): NCBI GI: 119483574 Blast Desc: class III chitinase ChiA2 [Neosartorya fischeri NRRL 181] gi|119409846|gb|EAW19793.1| class III chitinase ChiA2 [Neosartorya fischeri NRRL 181]
  misc_feature (19)..(335): SWISSPROT Homolog: EC 3.2.1.14 Chitinase
MHFTKLAAGLGLIAGATAMPTNRKRAANGPLNVVYWGQNGGGTIENNDLASYCTATSGIDVVVLAFLYSYGNGNTSPSGGIGQSCSISSGKGSQCDALGTAISACQEAGVTVIMSLGGAVGSTQITSQSEAESIATNLWNSYGNSGTSASSRPFGSAFVNGFDFDIEQNAGGNNKYYTYLISSLRSKFTSDKSNTYYITGAPQCPIPEPNMGVIIEGSQFDWLWPQFYNNNNYTYPCALPINGNAPFNYDQWISYTAGTPSANAKIFVGVPAAPLAANGGPAGETYYATPNQLSTIINSVKGESRFGGIMLWSAGFSDSNVISGCTYAQQAKAILEKGSPCSNGPVTVTRTPIVTATATHTTGTGTTSPTATATGTPVAQWGQCGGIGYTGSTVCAKPYTCVATGPYWSQCQ

SEQ ID NO: 4189 - DNA, 2464 bp, Muscodor strobelii
  misc_feature: SGI EST ID NO. CUFF.10611.0
  misc_feature: Variant of the nucleotide sequence at SEQ ID NO 4187
ggaaggtggtgcgtaaatcactgataagtctccaagaggagtggatcacatctagatcagatgggctaactgcttgaggatcgatgccaatgtctagcttgatatcgcgaagcaagccatcaccacaccaagctacactccttcctttactatgagtctagctccactctgcagcccttatgataatatttaaaatgtcagctacgacgttacgcgtgggcaacactgcacaagacaaaggtggccttgctattgacaatgccggcgcagtggcccgacgccgatacgcgacgacgggacatcacgcttagctcaaatgaccatggatcattaggacgaatcaggcgttcttgaaacgcatagcattcaagaccgatgctacgccgagttcccgcttcggaaccacttgcacagaagtagacggctacaagatatcgcctaccatttacgtttgctcatttcctgtcacaacaccatgggcacacgctacgttctcttgccttgtattcgtcccttttggacaatagcatgtaacgtctccctccctgtgctcccattggaatggagaaagtatctggaatgtggaaacacgatattagagaattagagatggtggctgcttcagtctcagaaaccatgtatgccatcgcgaggctacaaatatgccgccttcccgacctcttggctaaatttccattccaagccaccacggttcgatctgggcatcatcgaccagctgcagtcctcgacgggcattattcttcttgtatatagttcaaattacacacagacactccttcatcatgcatttcaccaaacttgcagctggcctcggcctcattgccggtgccacggcgatgcccaccaaccgcaagcgcgcagccaacggacccctaaatgtggtgtactgggggcaaaacggcggtggtacgatcgagaacaacgacttggcaagctactgtacggccacttcgggcattgacgttgtcgtgcttgccttcttgtactcatacggaaatgggaacacatctccgtctggcgggatcggacagtcgtgctcgatttcatccggaaagggatcacaatgtgacgctctcggcactgccatctctgcttgccaagaggctggcgtcacggtcatcatgtctctcggcggtgcggtcggctccacccagataacatctcagtccgaggccgagtcgatcgccacgaatctatggaactcatacggaaactcgggtaccagcgcttcttcacgaccgtttggttcggcgtttgtgaatggtttcgattttgatatcgaacagaatgctggtggcaacaataaatactacacgtatctaatctcgtctcttcgatcgaaattcacctctgataagtcaaacacctactatatcactggtgcaccacaatgccccatacccgagcccaacatgggggttatcatcgagggttcacagttcgattggctctggccccaattctataacaacaacaactacacctatccgtgtgcgctcccgattaatggcaacgccccattcaactacgaccaatggatcagctacacggcaggaactccatctgccaacgctaagatcttcgttggcgttccagctgctcctctcgcagctaatggcgggccggctggcgagacatattatgcaacgcccaaccaactctcgaccatcatcaatagtgttaagggtgaatctcgattcggtggcattatgctttggtcggcgggcttttccgattctaacgtcatcagcggttgcacctacgcacaacaggctaaagctattctcgaaaaaggctcaccttgcagcaatggccctgtgactgtaacgcgcactccaatagtgacagcgacagctacgcacacaactggcactggtacaacatcacccactgccactgctactggaactccagtggctcaatggggtcaatgcggcggaataggctacactggttcgacggtctgcgcgaagccgtacacatgcgttgcgacaggtccttactggtcacaatgccagtagatgttctacaatctaatgtccgttggatacagatataggtagtagatatgagtcattctgaattcagcataagcgaatgatttttttgatgcagttgagacgcattcagcccaagttcaaactcacgtgtgtgacagttgttgcaatcatgcaaagacttagacgtcgctcagtgtcacacgtgcatgtatattatacaggtacctatgtcagatactcaatcatgcgttcatatttagaaaccttttttcttcccttgcataagcctctgtgcttctaagtagataaaagtatgatcaacctcacgattgccagcgtttgaacgacctgcgattacaatatttatctttctcgaaacgagagccacatatattgaagtcacttggcatcgagaagcctgattagtgagtcgaggatcgtca

SEQ ID NO: 4190 - DNA, 1602 bp, Muscodor strobelii
  misc_feature: SGI cDNA ID NO. 561079
  misc_feature: Encodes the peptide sequence at SEQ ID NO 4191
atgcctttcccgccatcgcggggtgacgagccgacgtctcacgggcccaaattcctcacgaagaaacatgagattgtcatattcagtagtacggcaatcgccctgtacggctacgatcagggaatgatgagcctcatcaacacaaatcggtcatatcttcgcactatgcaacttgacgccaaatcgccaatcattggcatcatcgtcagtgtctattatctcggctgtacagttggggcggtcatcgcctcctggtgggctgataagaaaggccgcaagccttctatcttgctctgtctcatcacgaccatggtaggaaatctgctcatgttcatcgcaggaatgacacctggcgggtcggacccttggggcggcgcctcaattgtcttcatgactttggggagggtcattctcggtctcggcgttggcggtatcgatgcagcgattcccgtctacagctctgagctgaccaaggacaaatcccgaggtcgtgctttagcacaagaatttcagatgaacatattcggactcctcatggcattttccataaatgtcggagtcactatcgccctaggcaaagacagcgaatgggcatggagaatacctattgtggtgatgcaagcatttccgctcgtcttgatttctagtatcagtagacttccagaatctccgagatggctcatgagtcaaactagggaaaatgacgcgatgaaatctctacttacactatttgatgagaccaaggcggaacagacacttgatgagctccgccgagcgcagcaggaagaagatggcaagaacattggctacgccgatatgttttggcctggtaacagccaatttcatcccactatgcttacagttatggggcagatcaatcaagcactcacaggctacggtgcagtatctgtttatggacctcagatcttcgagcttctagggttcggcgtgcgtagcgctgagctagtcacactcggaaattattcgagttatttccttatgatgacggtagcttggatgacgatcgacacttttggtcgacgaaagttgatggtctggggctcagctggtctgtcgatttctttcgcgctattgacaatatttggcgggctttcattagacgtatccaatgtctcggtcctggctgtcgaaattttgggttctgtcacccttttcattgcgactgcaattttcggaatatgttggctcgcgacggtttggctgataccaacagagatatatcctaatggagcgcgcgctcaaggttccagcgcatctgtgataatttggggactcgctaactttgctatcacactcctgactccgatcatgtttaataatctgaaatactggcttttcctagtcttcgctgcgacaaatgcatttgcgggctggtggacttggcgatactcaccagagaccggaggaaggagtttcgaggaaaatcaagaattctttgtgactgctcgtgagtcaaagaactgggctgtcaaaaacgttgataatggcaagtttcttcatatgccacaaaaagccccccatgcacaggctcggaaaaggcattccgagactgagccattgttgagccatcaggtcgtatga

SEQ ID NO: 4191 - protein, 533 aa, Muscodor strobelii
  misc_feature: SGI Peptide ID NO. 561079
  misc_feature (25)..(438): Pfam Id: PF07690 Pfam Desc: Major Facilitator Superfamily
  misc_feature (25)..(486): Pfam Id: PF00083 Pfam Desc: Sugar (and other) transporter
  misc_feature (25)..(167): Pfam Id: PF07690 Pfam Desc: Major Facilitator Superfamily
  misc_feature (1)..(530): NCBI GI: 154294818 Blast Desc: BC1G_13624 [Botryotinia fuckeliana B05.10] gi|150844582|gb|EDN19775.1| BC1G_13624 [Botryotinia fuckeliana B05.10]
  misc_feature (21)..(528): NCBI GI: 169609284 Blast Desc: SNOG_07730 [Phaeosphaeria nodorum SN15] gi|111064076|gb|EAT85196.1| SNOG_07730 [Phaeosphaeria nodorum SN15]
  misc_feature (13)..(528): NCBI GI: 189199180 Blast Desc: conserved [Pyrenophora tritici-repentis Pt-1C-BFP] gi|187983026|gb|EDU48514.1| conserved [Pyrenophora tritici-repentis Pt-1C-BFP]
  misc_feature (20)..(489): NCBI GI: 255941130 Blast Desc: Pc16g10240 [Penicillium chrysogenum Wisconsin 54-1255] gi|211585957|emb|CAP93694.1| Pc16g10240 [Penicillium chrysogenum Wisconsin 54-1255]
  misc_feature (23)..(531): NCBI GI: 50421517 Blast Desc: DEHA0D20449g [Debaryomyces hansenii CBS767]
  misc_feature (23)..(486): NCBI GI: 199431879 Blast Desc: DEHA2D18942p [Debaryomyces hansenii]
  misc_feature (9)..(523): NCBI GI: 212536292 Blast Desc: MFS monosaccharide transporter, [Penicillium marneffei ATCC 18224] gi|210070701|gb|EEA24791.1| MFS monosaccharide transporter, [Penicillium marneffei ATCC 18224]
  misc_feature (25)..(523): NCBI GI: 190348730 Blast Desc: PGUG_05340 [Pichia guilliermondii ATCC 6260]
  misc_feature (25)..(523): NCBI GI: 146412698 Blast Desc: PGUG_05340 [Pichia guilliermondii ATCC 6260]
  misc_feature (19)..(488): NCBI GI: 145238234 Blast Desc: An07g06880 [Aspergillus niger] gi|134076246|emb|CAK39532.1| protein product [Aspergillus niger]
MPFPPSRGDEPTSHGPKFLTKKHEIVIFSSTAIALYGYDQGMMSLINTNRSYLRTMQLDAKSPIIGIIVSVYYLGCTVGAVIASWWADKKGRKPSILLCLITTMVGNLLMFIAGMTPGGSDPWGGASIVFMTLGRVILGLGVGGIDAAIPVYSSELTKDKSRGRALAQEFQMNIFGLLMAFSINVGVTIALGKDSEWAWRIPIVVMQAFPLVLISSISRLPESPRWLMSQTRENDAMKSLLTLFDETKAEQTLDELRRAQQEEDGKNIGYADMFWPGNSQFHPTMLTVMGQINQALTGYGAVSVYGPQIFELLGFGVRSAELVTLGNYSSYFLMMTVAWMTIDTFGRRKLMVWGSAGLSISFALLTIFGGLSLDVSNVSVLAVEILGSVTLFIATAIFGICWLATVWLIPTEIYPNGARAQGSSASVIIWGLANFAITLLTPIMFNNLKYWLFLVFAATNAFAGWWTWRYSPETGGRSFEENQEFFVTARESKNWAVKNVDNGKFLHMPQKAPHAQARKRHSETEPLLSHQVV

SEQ ID NO: 4192 - DNA, 2085 bp, Muscodor strobelii
  misc_feature: SGI EST ID NO. CUFF.10596.0
  misc_feature: Variant of the nucleotide sequence at SEQ ID NO 4190
cactgggtcgaatttcgaccggagaaggcgtcgatttaaactttccccgtagtttcccaacatgctcgctgcagtttgtgggtaaggaaaaatttggtttcggtttgaaaacgctcttgcatgtacccggcggtctggtttgacctagtctatcgcccaaagccaacatgcctttcccgccatcgcggggtgacgagccgacgtctcacgggcccaaattcctcacgaagaaacatgagattgtcatattcagtagtacggcaatcgccctgtacggctacgatcagggaatgatgagcctcatcaacacaaatcggtcatatcttcgcactatgcaacttgacgccaaatcgccaatcattggcatcatcgtcagtgtctattatctcggctgtacagttggggcggtcatcgcctcctggtgggctgataagaaaggccgcaagccttctatcttgctctgtctcatcacgaccatggtaggaaatctgctcatgttcatcgcaggaatgacacctggcgggtcggacccttggggcggcgcctcaattgtcttcatgactttggggagggtcattctcggtctcggcgttggcggtatcgatgcagcgattcccgtctacagctctgagctgaccaaggacaaatcccgaggtcgtgctttagcacaagaatttcagatgaacatattcggactcctcatggcattttccataaatgtcggagtcactatcgccctaggcaaagacagcgaatgggcatggagaatacctattgtggtgatgcaagcatttccgctcgtcttgatttctagtatcagtagacttccagaatctccgagatggctcatgagtcaaactagggaaaatgacgcgatgaaatctctacttacactatttgatgagaccaaggcggaacagacacttgatgagctccgccgagcgcagcaggaagaagatggcaagaacattggctacgccgatatgttttggcctggtaacagccaatttcatcccactatgcttacagttatggggcagatcaatcaagcactcacaggctacggtgcagtatctgtttatggacctcagatcttcgagcttctagggttcggcgtgcgtagcgctgagctagtcacactcggaaattattcgagttatttccttatgatgacggtagcttggatgacgatcgacacttttggtcgacgaaagttgatggtctggggctcagctggtctgtcgatttctttcgcgctattgacaatatttggcgggctttcattagacgtatccaatgtctcggtcctggctgtcgaaattttgggttctgtcacccttttcattgcgactgcaattttcggaatatgttggctcgcgacggtttggctgataccaacagagatatatcctaatggagcgcgcgctcaaggttccagcgcatctgtgataatttggggactcgctaactttgctatcacactcctgactccgatcatgtttaataatctgaaatactggcttttcctagtcttcgctgcgacaaatgcatttgcgggctggtggacttggcgatactcaccagagaccggaggaaggagtttcgaggaaaatcaagaattctttgtgactgctcgtgagtcaaagaactgggctgtcaaaaacgttgataatggcaagtttcttcatatgccacaaaaagccccccatgcacaggctcggaaaaggcattccgagactgagccattgttgagccatcaggtcgtatgaagcccctgaggctagacactggtattacagcctatttgtcgctgaggccgttcatatatcacttgggcgctacctcgcagctcaagttgtaccaatttgacttgctgccgctacaactttaccgtcatagaagaatgagactttacgtgcccagtcgctttgatacctacgccccgcgtcgtatattcacgagataggtctcgcaaagtttgttttcaactcactatttaaagttagacaggcatgactagtctgcctaagtatcacaggacctctaaatcccaatagactttgtattgtgaagcgttgatcaact

SEQ ID NO: 4193 - DNA, 1350 bp, Muscodor strobelii
  misc_feature: SGI cDNA ID NO. 561080
  misc_feature: Encodes the peptide sequence at SEQ ID NO 4194
atggctgtattcttgtatctcgttgtcacggtattgggactcttaggggcctgggtttacgagcctgtcaggcacacggctgctaccattggactatttcggattcttcgaggagaggcagatattgtccatggttttgaaactcatctcattcctgatgcagttgcttgcgaagatctagaataccacccacagtctggtatgatatatgctggatgcagcggagatgttgtatcgactagtggctggatgcctggcggcgatgctttagcgcatcccgagaacgcagcgaatggcaccatcgttgtcatcgacccgaaggtgatacctaccttagttccccgaaaagcaagctccgttcttatcaggctagacatgctaaagctactgcagaccctgaaagcgcagaagctgttattagagaattttgagggacgattcgtcactcacggtctctcagtcttgacggatcctaagaaccctaagaaagtgtacatcttcatggtcaaccacttaccgaatgccaagtgggctcctggatcaacagaggaaaaggccgcttcgcaagtagaattgttttctcacaacgtgggaagcaagtccgcaacacacatccgcacgatcgctcatcctatgatccgaacaccaaatgatcttatagccctctctccaaatgagttccttgtgacaaacgaccacttctaccgcgaaggccgtctacgtttcatagagaacttgattggtaacatcaagtcatggaccgatttggttcgtgtcaaatttgacgataaacaaatcgatgcaactgtcgcccttgacacaattggaaccaacaacggattggcgtggggcccgtcggggcaagttctcatcggggatgccgccggcggccatatctatttcgcagagttgagagggatcaataacgataccttgtctgtgtcacattacgcaccagtcgactgtatcgtagacaacccaagcttcttcgcggatccttacgtgggagtcgatggcaaagactacagcggatacttgcttccgggaatgtcgcacggtcttacctttgtcgagagctttgccgatgcctctggccagctcaagatgccgggtgaagtctggtacttgcctctagcggttggacaagataagaacctggatggaaaaaagttgcgtaaacggatcttcgcggatgacggatcgaccattagatcagtcacgacttctactcttgtggctatcgaccccgccgttaacgacggtaagcgggaaggttggctttttgtaacgggtgtgttatcggctgcagtggtggctagtaagatcaatctcgaaagcctcctggtctaa

SEQ ID NO: 4194 - protein, 449 aa, Muscodor strobelii
  misc_feature: SGI Peptide ID NO. 561080
  misc_feature (7)..(444): NCBI GI: 46116204 Blast Desc: FG03944.1 [Gibberella zeae PH-1]
  misc_feature (7)..(444): NCBI GI: 169779930 Blast Desc: [Aspergillus oryzae RIB40] gi|83773169|dbj|BAE63296.1| protein product [Aspergillus oryzae]
  misc_feature (14)..(444): NCBI GI: 238506054 Blast Desc: serum paraoxonase/arylesterase family protein [Aspergillus flavus NRRL3357] gi|220690343|gb|EED46693.1| serum paraoxonase/arylesterase family protein [Aspergillus flavus
  misc_feature (1)..(444): NCBI GI: 115402935 Blast Desc: conserved [Aspergillus terreus NIH2624] gi|114189390|gb|EAU31090.1| conserved [Aspergillus terreus NIH2624]
  misc_feature (4)..(444): NCBI GI: 255945143 Blast Desc: Pc20g08160 [Penicillium chrysogenum Wisconsin 54-1255] gi|211588074|emb|CAP86145.1| Pc20g08160 [Penicillium chrysogenum Wisconsin 54-1255]
  misc_feature (1)..(444): NCBI GI: 171692523 Blast Desc: protein product [Podospora anserina] gi|170946210|emb|CAP73011.1| protein product [Podospora anserina]
  misc_feature (7)..(447): NCBI GI: 256722457 Blast Desc: NECHADRAFT_34932 [Nectria haematococca mpVI 77-13-4]
  misc_feature (20)..(444): NCBI GI: 119493356 Blast Desc: serum paraoxonase/arylesterase family protein [Neosartorya fischeri NRRL 181] gi|119412028|gb|EAW21971.1| serum paraoxonase/arylesterase family protein [Neosartorya fischeri
  misc_feature (7)..(444): NCBI GI: 116198511 Blast Desc: CHGG_07411 [Chaetomium globosum CBS 148.51] gi|88178690|gb|EAQ86158.1| CHGG_07411 [Chaetomium globosum CBS 148.51]
  misc_feature (1)..(431): NCBI GI: 85103767 Blast Desc: NCU01230 [Neurospora crassa OR74A] gi|12733899|emb|CAB88551.2| [Neurospora crassa] gi|28923143|gb|EAA32360.1| conserved [Neurospora crassa OR74A]
MAVFLYLVVTVLGLLGAWVYEPVRHTAATIGLFRILRGEADIVHGFETHLIPDAVACEDLEYHPQSGMIYAGCSGDVVSTSGWMPGGDALAHPENAANGTIVVIDPKVIPTLVPRKASSVLIRLDMLKLLQTLKAQKLLLENFEGRFVTHGLSVLTDPKNPKKVYIFMVNHLPNAKWAPGSTEEKAASQVELFSHNVGSKSATHIRTIAHPMIRTPNDLIALSPNEFLVTNDHFYREGRLRFIENLIGNIKSWTDLVRVKFDDKQIDATVALDTIGTNNGLAWGPSGQVLIGDAAGGHIYFAELRGINNDTLSVSHYAPVDCIVDNPSFFADPYVGVDGKDYSGYLLPGMSHGLTFVESFADASGQLKMPGEVWYLPLAVGQDKNLDGKKLRKRIFADDGSTIRSVTTSTLVAIDPAVNDGKREGWLFVTGVLSAAVVASKINLESLLV

SEQ ID NO: 4195 - DNA, 3158 bp, Muscodor strobelii
  misc_feature: SGI EST ID NO. CUFF.10635.0
  misc_feature: Variant of the nucleotide sequence at SEQ ID NO 4193
gatttctaggtcgatcgggaatgtacctatcaataacaattccggatacgagtagctcaggacttcccctgcgcctcgggaagtggatgatgctagctcaagggtagcgtcatgtgcgggggacaatgtctcataaaacgcgtccaaagccatcctttcttagtcgtgtaagcaaatgatgcagaccaatagataatcaaaaccatggctgtattcttgtatctcgttgtcacggtattgggactcttaggggcctgggtttacgagcctgtcaggcacacggctgctaccattggactatttcggattcttcgaggagaggcagatattgtccatggttttgaaactcatctcattcctgatgcagttgcttgcgaagatctagaataccacccacagtctggtatgatatatgctggatgcagcggagatgttgtatcgactagtggctggatgcctggcggcgatgctttagcgcatcccgagaacgcagcgaatggcaccatcgttgtcatcgacccgaagaccctgaaagcgcagaagctgttattagagaattttgagggacgattcgtcactcacggtctctcagtcttgacggatcctaagaaccctaagaaagtgtacatcttcatggtcaaccacttaccgaatgccaagtgggctcctggatcaacagaggaaaaggccgcttcgcaagtagaattgttttctcacaacgtgggaagcaagtccgcaacacacatccgcacgatcgctcatcctatgatccgaacaccaaatgatcttatagccctctctccaaatgagttccttgtgacaaacgaccacttctaccgcgaaggccgtctacgtttcatagagaacttgattggtaacatcaagtcatggaccgatttggttcgtgtcaaatttgacgataaacaaatcgatgcaactgtcgcccttgacacaattggaaccaacaacggattggcgtggggcccgtcggggcaagttctcatcggggatgccgccggcggccatatctatttcgcagagttgagagggatcaataacgataccttgtctgtgtcacattacgcaccagtcgactgtatcgtagacaacccaagcttcttcgcggatccttacgtgggagtcgatggcaaagactacagcggatacttgcttccgggaatgtcgcacggtcttacctttgtcgagagctttgccgatgcctctggccagctcaagatgccgggtgaagtctggtacttgcctctagcggttggacaagataagaacctggatggaaaaaagttgcgtaaacggatcttcgcggatgacggatcgaccattagatcagtcacgacttctactcttgtggctatcgaccccgccgttaacgacggtaagcgggaaggttggctttttgtaacgggtgtgttatcggctgcagtggtggctagtaagatcaatctcgaaagcctcctggtctaagatgagcggttattccgatacgcagaaatggaatacagccactgcgtagtacctgttgtcactataatcatctcgtgaagcttgcgccgaagatctgacgaccgaaatcgatgtttccacattccttgacagtaacatgcaaagatcttgacaggtctcatcacgcgaggaacgacaaaaaggatctatcgcgcgacggcaacgtattgtgctctaatcaaaggcgaaccttatcgctatagcggtaccgtcgatacatcactcgtcaaagcagtcgattcaaaagaacagactcaggcctacgtcacatcccccgtcgatactgcaatcgaaaatgcgctatatttagataacgccggttgtagtgatcatcggattattacttaacttctatgcaataaaaactcacttcagtatccattcaagtgacaacgtcgctgacgcgcttgaagtcacaacggtgccgacatatttgagagtgaagagcaaaagtgatctaactacggataacctcgaattgacttggcgatatatggatcaaatttcatgcttgtacatagtaataagggaagagttcctgaactgcttgatgcgttactatctttagatcggcttcatcgtctccctggcgataatcacgatgtgtcaagtcttctaaaaaggaaccagcggtattctatagccaaccaagccacctctagctcggcctgctcgatcttgtcctgcgcctctcccgggcatatcccgccagtaacaataatcactacaggctcttgataaaccacttcgtcctaacgccctgacacagcatatctccttgcgcagagaccttcccatcatgataaggaccgaaggaattgatgacgtagtcgtacatgtcaaggatgtccgcgttcgccatgttgaaggacgcatgatttaatgagctgtctcccggttgaagcgcaaaggagcacggccagccgagaattgtatggagaccaccattgccttcgttgccgaagtcgacagtccagtcccctgcatccgaattcacgccataacaggtatcctcacattgagtcgttgtgggaggcgagttggtcttgttcgttgtgtcgtagtggtgcggatcagtgcataagcggcgggcatcattattggcaaaacactgatcctgtgcttgagccagggggacagtaatcaggctgccgagcaacgtgaggatgaacgcgaattgatgcatcatcgtgatagtgagagttaatagcagcttttgaatcgcgatatgaacaggcgagattcgtgatctgaactagagcggcggtgtatatggcaatatccgtcaaaacaacactagagactgatttcagttgatagagaagctagagtgaatcgatgaggatggatttgatgagatgcgcaggtaggcaccgtgaagcatttgtattcttttcgatgctagtgctcatcttgtcgaacaagccaatgcttgcctcttcgtggaccacaagtcccttaccgtgggcgttctccatcgtgggaaccccgtctctcccatctcgtcactccatgtagcggtgatgaaggtgctagttgctggcacggcgacccctgtacacggtgctctgtccagtggtttgcagtccatcacgtccacggcagttggtcacagtcacgagactcgcaagtccaac

SEQ ID NO: 4196 - DNA, 1278 bp, Muscodor strobelii
  misc_feature: SGI cDNA ID NO. 561081
  misc_feature: Elevated expression when VOC is produced
  misc_feature: Encodes the peptide sequence at SEQ ID NO 4197
atggctgtattcttgtatctcgttgtcacggtattgggactcttaggggcctgggtttacgagcctgtcaggcacacggctgctaccattggactatttcggattcttcgaggagaggcagatattgtccatggttttgaaactcatctcattcctgatgcagttgcttgcgaagatctagaataccacccacagtctggtatgatatatgctggatgcagcggagatgttgtatcgactagtggctggatgcctggcggcgatgctttagcgcatcccgagaacgcagcgaatggcaccatcgttgtcatcgacccgaagaccctgaaagcgcagaagctgttattagagaattttgagggacgattcgtcactcacggtctctcagtcttgacggatcctaagaaccctaagaaagtgtacatcttcatggtcaaccacttaccgaatgccaagtgggctcctggatcaacagaggaaaaggccgcttcgcaagtagaattgttttctcacaacgtgggaagcaagtccgcaacacacatccgcacgatcgctcatcctatgatccgaacaccaaatgatcttatagccctctctccaaatgagttccttgtgacaaacgaccacttctaccgcgaaggccgtctacgtttcatagagaacttgattggtaacatcaagtcatggaccgatttggttcgtgtcaaatttgacgataaacaaatcgatgcaactgtcgcccttgacacaattggaaccaacaacggattggcgtggggcccgtcggggcaagttctcatcggggatgccgccggcggccatatctatttcgcagagttgagagggatcaataacgataccttgtctgtgtcacattacgcaccagtcgactgtatcgtagacaacccaagcttcttcgcggatccttacgtgggagtcgatggcaaagactacagcggatacttgcttccgggaatgtcgcacggtcttacctttgtcgagagctttgccgatgcctctggccagctcaagatgccgggtgaagtctggtacttgcctctagcggttggacaagataagaacctggatggaaaaaagttgcgtaaacggatcttcgcggatgacggatcgaccattagatcagtcacgacttctactcttgtggctatcgaccccgccgttaacgacggtaagcgggaaggttggctttttgtaacgggtgtgttatcggctgcagtggtggctagtaagatcaatctcgaaagcctcctggtctaa

SEQ ID NO: 4197 - protein, 425 aa, Muscodor strobelii
  misc_feature: SGI Peptide ID NO. 561081
  misc_feature (7)..(420): NCBI GI: 46116204 Blast Desc: FG03944.1 [Gibberella zeae PH-1]
  misc_feature (7)..(420): NCBI GI: 169779930 Blast Desc: [Aspergillus oryzae RIB40] gi|83773169|dbj|BAE63296.1| protein product [Aspergillus oryzae]
  misc_feature (14)..(420): NCBI GI: 238506054 Blast Desc: serum paraoxonase/arylesterase family protein [Aspergillus flavus NRRL3357] gi|220690343|gb|EED46693.1| serum paraoxonase/arylesterase family protein [Aspergillus flavus
  misc_feature (1)..(420): NCBI GI: 115402935 Blast Desc: conserved [Aspergillus terreus NIH2624] gi|114189390|gb|EAU31090.1| conserved [Aspergillus terreus NIH2624]
  misc_feature (4)..(420): NCBI GI: 255945143 Blast Desc: Pc20g08160 [Penicillium chrysogenum Wisconsin 54-1255] gi|211588074|emb|CAP86145.1| Pc20g08160 [Penicillium chrysogenum Wisconsin 54-1255]
  misc_feature (1)..(420): NCBI GI: 171692523 Blast Desc: protein product [Podospora anserina] gi|170946210|emb|CAP73011.1| protein product [Podospora anserina]
  misc_feature (20)..(420): NCBI GI: 119493356 Blast Desc: serum paraoxonase/arylesterase family protein [Neosartorya fischeri NRRL 181] gi|119412028|gb|EAW21971.1| serum paraoxonase/arylesterase family protein [Neosartorya fischeri
  misc_feature (7)..(423): NCBI GI: 256722457 Blast Desc: NECHADRAFT_34932 [Nectria haematococca mpVI 77-13-4]
  misc_feature (7)..(420): NCBI GI: 116198511 Blast Desc: CHGG_07411 [Chaetomium globosum CBS 148.51] gi|88178690|gb|EAQ86158.1| CHGG_07411 [Chaetomium globosum CBS 148.51]
  misc_feature (1)..(407): NCBI GI: 85103767 Blast Desc: NCU01230 [Neurospora crassa OR74A] gi|12733899|emb|CAB88551.2| [Neurospora crassa] gi|28923143|gb|EAA32360.1| conserved [Neurospora crassa OR74A]
  misc_feature: Useful for introducing or modulating the production of volatile compounds
MAVFLYLVVTVLGLLGAWVYEPVRHTAATIGLFRILRGEADIVHGFETHLIPDAVACEDLEYHPQSGMIYAGCSGDVVSTSGWMPGGDALAHPENAANGTIVVIDPKTLKAQKLLLENFEGRFVTHGLSVLTDPKNPKKVYIFMVNHLPNAKWAPGSTEEKAASQVELFSHNVGSKSATHIRTIAHPMIRTPNDLIALSPNEFLVTNDHFYREGRLRFIENLIGNIKSWTDLVRVKFDDKQIDATVALDTIGTNNGLAWGPSGQVLIGDAAGGHIYFAELRGINNDTLSVSHYAPVDCIVDNPSFFADPYVGVDGKDYSGYLLPGMSHGLTFVESFADASGQLKMPGEVWYLPLAVGQDKNLDGKKLRKRIFADDGSTIRSVTTSTLVAIDPAVNDGKREGWLFVTGVLSAAVVASKINLESLLV

SEQ ID NO: 4198 - DNA, 3158 bp, Muscodor strobelii; identical to SEQ ID NO: 4195
  misc_feature: SGI EST ID NO. CUFF.10635.0
  misc_feature: Variant of the nucleotide sequence at SEQ ID NO 4196

SEQ ID NO: 4199 - DNA, 465 bp, Muscodor strobelii
  misc_feature: SGI cDNA ID NO. 561082
  misc_feature: Elevated expression when VOC is produced
  misc_feature: Encodes the peptide sequence at SEQ ID NO 4200
atgatgcatcaattcgcgttcatcctcacgttgctcggcagcctgattactgtccccctggctcaagcacaggatcagtgttttgccaataatgatgcccgccgcttatgcactgatccgcaccactacgacacaacgaacaagaccaactcgcctcccacaacgactcaatgtgaggatacctgttatggcgtgaattcggatgcaggggactggactgtcgacttcggcaacgaaggcaatggtggtctccatacaattctcggctggccgtgctcctttgcgcttcaaccgggagacagctcattaaatcatgcgtccttcaacatggcgaacgcggacatccttgacatgtacgactacgtcatcaattccttcggtccttatcatgatgggaaggtctctgcgcaaggagatatgctgtgtcagggcgttaggacgaagtggtttatcaagagcctgtag

SEQ ID NO: 4200 - protein, 154 aa, Muscodor strobelii
  misc_feature: SGI Peptide ID NO. 561082
  misc_feature (2)..(151): NCBI GI: 189188394 Blast Desc: PTRG_00203 [Pyrenophora tritici-repentis Pt-1C-BFP] gi|187972142|gb|EDU39641.1| PTRG_00203 [Pyrenophora tritici-repentis Pt-1C-BFP]
  misc_feature (2)..(76): NCBI GI: 169617329 Blast Desc: SNOG_11842 [Phaeosphaeria nodorum SN15] gi|111059766|gb|EAT80886.1| SNOG_11842 [Phaeosphaeria nodorum SN15]
  misc_feature: Useful for introducing or modulating the production of volatile compounds
MMHQFAFILTLLGSLITVPLAQAQDQCFANNDARRLCTDPHHYDTTNKTNSPPTTTQCEDTCYGVNSDAGDWTVDFGNEGNGGLHTILGWPCSFALQPGDSSLNHASFNMANADILDMYDYVINSFGPYHDGKVSAQGDMLCQGVRTKWFIKSL

SEQ ID NO: 4201 - DNA, 1428 bp, Muscodor strobelii
  misc_feature: SGI cDNA ID NO. 561083
  misc_feature: Elevated expression when VOC is produced
  misc_feature: Encodes the peptide sequence at SEQ ID NO 4202
atgtctgaagcgccatctaagtcgcaggacggacgagccgagttgccgacaccgaatagcaccaaatcctattggcatcgtgatccatcatcaactcttctaggtcatcgcacaaccgaagatcaacctgtagaagcggatctcgtggtcattggaagtggtatttcaggagcctttgccgcacgagagcttgttgcaggtggtagaaatgtgctgatgctagaagcgagagaggcctgttggggcgcgacagggcgcaatggaggtcactgccaaccacaagtctggaataatgaagaagagattgcacgcttcgaattgacaaccttcgagatgattgccaatcttgtggcggagcataaggttccttgcgactggcaagctgtcggtggcatacaggctatctttgtaccggagctactcgatattgctctcaagcaagtatcacgcctacaacggcatcccgatctcaaggataaagccgttgtcatactcgataagaatgagttggcagcgcgacatattccggaggccatcggcgctgtcttccaacccaatgcagcaaagctttggccatataagcttgtcgcatggatacttgagacgcttctccaggactatgacgccaatcaattcaacttacagaccaacactccggtcacgcgccttgagaagcatggctcttcgtggatttgtcatacaccaagaggtcagatacgggctcgagaggttcttctcgcaacgaacgcatatacatcgcatttactacccggaacgacggacatcatagtaccagtgagaggacaggtcgccgcccttgagcctgcagaaggatccgtgcagctcccgcacagttacgtttggacaacgggtgacgatcatcagtacttgattcataggagcccggatgattcccaagtaagtggctcagactcgaaagatagaagtctgatcctaggaggcgagcgatgggcggtcccagaaggtgaagaaggcatctcgcgtgacgatgttgtgaacccgattctgagtcgtgctctccatcaatcattgaatcatgctatcaaactcctgcctaaggatgagccggaccgagaagagctcaaggcaaattgggaatggactggaataatgggatactcccgagaccttgacccctgggtcggccgggtgccgacgtcgttgagaattgatcattccgaccaaggaagcacggaagggctgtggatatgtgcgggattcacgggacacggaatgccagttgctcctcgatgtggtattgcggtcgcagaggcgatactcggcgttaaaggcggtgtgaaattgcctcccaattgggttccgagcgaggaacgaatcgatagtgcgaagatcctggagttgccacggggcgtacacgacttcatcaagtcgatgccggttgtataa

SEQ ID NO: 4202 - protein, 475 aa, Muscodor strobelii
  misc_feature: SGI Peptide ID NO. 561083
  misc_feature (47)..(432): Pfam Id: PF01266 Pfam Desc: FAD dependent oxidoreductase
  misc_feature (47)..(76): Pfam Id: PF00890 Pfam Desc: FAD binding domain
  misc_feature (11)..(472): NCBI GI: 256732209 Blast Desc: NECHADRAFT_61325 [Nectria haematococca mpVI 77-13-4]
  misc_feature (11)..(472): NCBI GI: 46137427 Blast Desc: FG10229.1 [Gibberella zeae PH-1]
  misc_feature (9)..(460): NCBI GI: 261351783 Blast Desc: conserved [Verticillium albo-atrum VaMs.102]
  misc_feature (11)..(461): NCBI GI: 156056254 Blast Desc: SS1G_05479 [Sclerotinia sclerotiorum 1980] gi|154703263|gb|EDO03002.1| SS1G_05479 [Sclerotinia sclerotiorum 1980]
  misc_feature (11)..(467): NCBI GI: 154291202 Blast Desc: BC1G_15227 [Botryotinia fuckeliana B05.10] gi|150847040|gb|EDN22233.1| BC1G_15227 [Botryotinia fuckeliana B05.10]
  misc_feature (12)..(457): NCBI GI: 189188770 Blast Desc: FAD dependent oxidoreductase [Pyrenophora tritici-repentis Pt-1C-BFP] gi|187972330|gb|EDU39829.1| FAD dependent oxidoreductase [Pyrenophora tritici-repentis Pt-1C-BFP]
  misc_feature (13)..(459): NCBI GI: 116179860 Blast Desc: CHGG_00558 [Chaetomium globosum CBS 148.51] gi|88184855|gb|EAQ92323.1| CHGG_00558 [Chaetomium globosum CBS 148.51]
  misc_feature (12)..(465): NCBI GI: 169612832 Blast Desc: SNOG_09543 [Phaeosphaeria nodorum SN15] gi|111061688|gb|EAT82808.1| SNOG_09543 [Phaeosphaeria nodorum SN15]
  misc_feature (12)..(457): NCBI GI: 171691721 Blast Desc: protein product [Podospora anserina] gi|170945809|emb|CAP72609.1| protein product [Podospora anserina]
  misc_feature (5)..(453): NCBI GI: 85092014 Blast Desc: NCU04641 [Neurospora crassa OR74A] gi|21622308|emb|CAD37011.1| conserved [Neurospora crassa] gi|28920586|gb|EAA29948.1| [Neurospora crassa OR74A]
  misc_feature: Useful for introducing or modulating the production of volatile compounds
MSEAPSKSQDGRAELPTPNSTKSYWHRDPSSTLLGHRTTEDQPVEADLVVIGSGISGAFAARELVAGGRNVLMLEAREACWGATGRNGGHCQPQVWNNEEEIARFELTTFEMIANLVAEHKVPCDWQAVGGIQAIFVPELLDIALKQVSRLQRHPDLKDKAVVILDKNELAARHIPEAIGAVFQPNAAKLWPYKLVAWILETLLQDYDANQFNLQTNTPVTRLEKHGSSWICHTPRGQIRAREVLLATNAYTSHLLPGTTDIIVPVRGQVAALEPAEGSVQLPHSYVWTTGDDHQYLIHRSPDDSQVSGSDSKDRSLILGGERWAVPEGEEGISRDDVVNPILSRALHQSLNHAIKLLPKDEPDREELKANWEWTGIMGYSRDLDPWVGRVPTSLRIDHSDQGSTEGLWICAGFTGHGMPVAPRCGIAVAEAILGVKGGVKLPPNWVPSEERIDSAKILELPRGVHDFIKSMPVV

SEQ ID NO: 4203 - DNA, 2195 bp, Muscodor strobelii
  misc_feature: SGI EST ID NO. CUFF.10617.0
  misc_feature: Variant of the nucleotide sequence at SEQ ID NO 4201
cctagccctgtaccatgtctcacctaggaataccatatactcttttattcatcaacagaatgtagattatgacgagtgatgatttctatactaggtagctgagtttgtccctagacaggactgaccgctcacctactaaattctcgcctcaaagtatgtccacacagcccacacgctcttctttcgtcatggacattactaggctctggtcttccaaattgactagttagaggatttgtctttatactaggtccagattgctgagctaagttgttcttcttatcacgtttgtcaagaagtgtaatgacgatccacgtagacgcaatgcggggcaattttggagcttaggtacctccgaaacgactccgttgttgagagaaccggcttaactcgtacttctactcatacttaataattttctccggagttgactttttatgcccgtagtttacagggcagcgaagaaaccgggttattgagagtgccgacctaagttcgtatgcatatcgagataaccatgtctgaagcgccatctaagtcgcaggacggacgagccgagttgccgacaccgaatagcaccaaatcctattggcatcgtgatccatcatcaactcttctaggtcatcgcacaaccgaagatcaacctgtagaagcggatctcgtggtcattggaagtggtatttcaggagcctttgccgcacgagagcttgttgcaggtggtagaaatgtgctgatgctagaagcgagagaggcctgttggggcgcgacagggcgcaatggaggtcactgccaaccacaagtctggaataatgaagaagagattgcacgcttcgaattgacaaccttcgagatgattgccaatcttgtggcggagcataaggttccttgcgactggcaagctgtcggtggcatacaggctatctttgtaccggagctactcgatattgctctcaagcaagtatcacgcctacaacggcatcccgatctcaaggataaagccgttgtcatactcgataagaatgagttggcagcgcgacatattccggaggccatcggcgctgtcttccaacccaatgcagcaaagctttggccatataagcttgtcgcatggatacttgagacgcttctccaggactatgacgccaatcaattcaacttacagaccaacactccggtcacgcgccttgagaagcatggctcttcgtggatttgtcatacaccaagaggtcagatacgggctcgagaggttcttctcgcaacgaacgcatatacatcgcatttactacccggaacgacggacatcatagtaccagtgagaggacaggtcgccgcccttgagcctgcagaaggatccgtgcagctcccgcacagttacgtttggacaacgggtgacgatcatcagtacttgattcataggagcccggatgattcccaagtaagtggctcagactcgaaagatagaagtctgatcctaggaggcgagcgatgggcggtcccagaaggtgaagaaggcatctcgcgtgacgatgttgtgaacccgattctgagtcgtgctctccatcaatcattgaatcatgctatcaaactcctgcctaaggatgagccggaccgagaagagctcaaggcaaattgggaatggactggaataatgggatactcccgagaccttgacccctgggtcggccgggtgccgacgtcgttgagaattgatcattccgaccaaggaagcacggaagggctgtggatatgtgcgggattcacgggacacggaatgccagttgctcctcgatgtggtattgcggtcgcagaggcgatactcggcgttaaaggcggtgtgaaattgcctcccaattgggttccgagcgaggaacgaatcgatagtgcgaagatcctggagttgccacggggcgtacacgacttcatcaagtcgatgccggttgtataaagttggagaaaggtctatttatatattcaccacatcaggtgctcatatgcgggacaacctgagccagcatacaatattctgactacatgaagtattactgcaacgcaggtgaaaacgttcttcgagcctaatctaaatgagccattctacttgaatttcatagatcttgacaatgataattcagttgtcacggaaagcctacggctttggtggcagctgtacgcctcttttcgtgggtaatactacgccg

SEQ ID NO: 4204 - DNA, 816 bp, Muscodor strobelii
  misc_feature: SGI cDNA ID NO. 561084
  misc_feature: Encodes the peptide sequence at SEQ ID NO 4205
atgcatcgtacgctattcacttctttagtatttgccgcccatgccttggcagtatgtgatcgagcaatactccaagatgccgcgacagcatacgtgaaagcgcaactagctggctccccaatccctaacctcgcctcaaacgcaacctacgcagaaaacgacaaacccgtagatattaccaagggcgttctgtcacagccaatcacaatcgacttcaatcgcagcttttacgacaccacgcaatgcgcagcctttaccgaagtcacagctgcgacgaacaaacatccctatgtgatccacacacatatcacggtctcaccaacggacaacaagatcacggcgatcgattcggtcgttaccgatgatggagactgggctttcaacgcagcgggtcatttgaaatggactcaacaagagaagtgggatgctatccccgaggcacagcgcgacagtcggactgtcatcaaagctgctgcagacgcatatctcgaccaatgggccgacagcagtatcgccgttcctttgggcacgccatgtgcccgtctcgaaggcggctcttacacgggacaatcgaacccgaccggcaatacctgtcgcatgccggcgtttcctcaaccgctgaaggtcggaaatcggcggtatgtcattgatgaagaggtcggcgctgtcagtgttttcaatggcttcccttggcttgaggcttcgttgggtgcgaatgggtcgacgcctagtagtaatgagatccgtgttgaggctggtaaaattcggtatattcatgaggtcactatgtgccagactaagaattgtgggagatga

SEQ ID NO: 4205 - protein, 271 aa, Muscodor strobelii
  misc_feature: SGI Peptide ID NO. 561084
  misc_feature (1)..(260): NCBI GI: 169611596 Blast Desc: SNOG_08912 [Phaeosphaeria nodorum SN15] gi|160702326|gb|EAT84080.2| SNOG_08912 [Phaeosphaeria nodorum SN15]
  misc_feature (5)..(271): NCBI GI: 171678287 Blast Desc: protein product [Podospora anserina] gi|170937213|emb|CAP61870.1| protein product [Podospora anserina]
  misc_feature (5)..(270): NCBI GI: 116193927 Blast Desc: CHGG_06681 [Chaetomium globosum CBS 148.51] gi|88182594|gb|EAQ90062.1| CHGG_06681 [Chaetomium globosum CBS 148.51]
  misc_feature (4)..(263): NCBI GI: 169854321 Blast Desc: CC1G_01512 [Coprinopsis cinerea okayama7#130] gi|116504970|gb|EAU87865.1| CC1G_01512 [Coprinopsis cinerea okayama7#130]
  misc_feature (3)..(269): NCBI GI: 189194003 Blast Desc: conserved [Pyrenophora tritici-repentis Pt-1C-BFP] gi|187978904|gb|EDU45530.1| conserved [Pyrenophora tritici-repentis Pt-1C-BFP]
  misc_feature (19)..(265): NCBI GI: 169869949 Blast Desc: CC1G_13257 [Coprinopsis cinerea okayama7#130] gi|116497398|gb|EAU80293.1| CC1G_13257 [Coprinopsis cinerea okayama7#130]
  misc_feature (19)..(265): NCBI GI: 169854317 Blast Desc: CC1G_01510 [Coprinopsis cinerea okayama7#130] gi|116504968|gb|EAU87863.1| CC1G_01510 [Coprinopsis cinerea okayama7#130]
  misc_feature (19)..(270): NCBI GI: 169600761 Blast Desc: SNOG_03229 [Phaeosphaeria nodorum SN15] gi|160705508|gb|EAT89960.2| SNOG_03229 [Phaeosphaeria nodorum SN15]
  misc_feature (17)..(271): NCBI GI: 116200452 Blast Desc: CHGG_10771 [Chaetomium globosum CBS 148.51] gi|88175485|gb|EAQ82953.1| CHGG_10771 [Chaetomium globosum CBS 148.51]
  misc_feature (15)..(269): NCBI GI: 171678034 Blast Desc: protein product [Podospora anserina] gi|170937086|emb|CAP61744.1| protein product [Podospora anserina]
MHRTLFTSLVFAAHALAVCDRAILQDAATAYVKAQLAGSPIPNLASNATYAENDKPVDITKGVLSQPITIDFNRSFYDTTQCAAFTEVTAATNKHPYVIHTHITVSPTDNKITAIDSVVTDDGDWAFNAAGHLKWTQQEKWDAIPEAQRDSRTVIKAAADAYLDQWADSSIAVPLGTPCARLEGGSYTGQSNPTGNTCRMPAFPQPLKVGNRRYVIDEEVGAVSVFNGFPWLEASLGANGSTPSSNEIRVEAGKIRYIHEVTMCQTKNCGR

SEQ ID NO: 4206 - DNA, 281 bp, Muscodor strobelii
  misc_feature: SGI EST ID NO. CUFF.10620.0
  misc_feature: Variant of the nucleotide sequence at SEQ ID NO 4204
gaatcataatatagttatcatgcatcgtacgctattcacttctttagtatttgccgcccatgccttggcagtatgtgatcgagcaatactccaagatgccgcgacagcatacgtgaaagcgcaactagctggctccccaatccctaacctcgcctcaaacgcaacctacgcagaaaacgacaaacccgtagatattaccaagggcgttctgtcacagccaatcacaatcgacttcaatcgcagcttttacgacaccacgcaatgcgcagcctttaccgaag

SEQ ID NO: 4207 - DNA, 768 bp, Muscodor strobelii
  misc_feature: SGI cDNA ID NO. 561085
  misc_feature: Encodes the peptide sequence at SEQ ID NO 4208
atggctgctcaacaagatatatggcgccatcattactgggacgacgaccagaactcaagtctggtagtcagagaattaatccaaagtccttacatcgaccaggaagacattgtctggctcgcttggagagaaattcttcactgctacttccgacctggggaacataacgttctcacctggagaatacagtggcacattgtggctcctgcctaccgtggtcctgacggcgcgggccaaggcaaccaacccgacatcgtggttgtcaagaagtataaggaccttcccaaacatcacgttaatccttatcctcactgggtggctaagtcacgagatcatgtctggatcgagtgcaaaaacaagggtttcgacgcccctcaccattggaaggatgcaatcgaacaactcctcgataatctcgtcaatggcggaagagacgggctcaccgatgtgttttgcatcgtagcgattggttataagtgtatatggttcaaatggagtaaagactatcagtcgagccatgacacggttgttctggactaccgcggtagacctcagtggccggtcggcaacaagcagtgcatgttcttcgaacaagatccattcgttgtaaagaaccagatcaccggacagtggacaatagacacaacaagggcctacaatctgaatcatcaggtggatcccgatgctcgggataagcttgaagcattccttaagttagctcacgacttcgatttcgccacagtaaacccatatcactatctagcttga

SEQ ID NO: 4208 - protein, 255 aa, Muscodor strobelii
  misc_feature: SGI Peptide ID NO. 561085
  misc_feature (35)..(165): NCBI GI: 145236495 Blast Desc: An06g00680 [Aspergillus niger] gi|134075350|emb|CAK39164.1| protein product [Aspergillus niger]
MAAQQDIWRHHYWDDDQNSSLVVRELIQSPYIDQEDIVWLAWREILHCYFRPGEHNVLTWRIQWHIVAPAYRGPDGAGQGNQPDIVVVKKYKDLPKHHVNPYPHWVAKSRDHVWIECKNKGFDAPHHWKDAIEQLLDNLVNGGRDGLTDVFCIVAIGYKCIWFKWSKDYQSSHDTVVLDYRGRPQWPVGNKQCMFFEQDPFVVKNQITGQWTIDTTRAYNLNHQVDPDARDKLEAFLKLAHDFDFATVNPYHYLA

SEQ ID NO: 4209 - DNA, 1584 bp, Muscodor strobelii
  misc_feature: SGI cDNA ID NO. 561086
  misc_feature: Encodes the peptide sequence at SEQ ID NO 4210
atgcgacgagcgcttcgcacattacgcttgcgctgtgattacaagatgttgcctaaagatgatcccttaatccaagacagcaacacgggcgggcctcactacgaggacgttccggacgagacacaaaacacgaacaagtcttcaggatggcaccgcgaccgctattttggttcccttctcttcaatatagcagccttcatcctcccagcactatacggtaccctatccaagctctgggtcgcgaacatcgactcctcaatggtcgtcacgaccgactcatacacataccttaacaccgccgccgaagccattaatgagggactacccagagcagcatgggtcatcatcggcgacaaagcatcgagaagtttgccgcaaagactgcagctaactcatactctgattgtctttcaggccgctgccggcttcatcttgagtatcatcttcttaagctccgcatcagcatttgccgataaattcgtgccctccgaggtgcgaaatgccagtctgacgtatatccgaattacttcgttcactatactaggcggtaccatcgagacggctgtcgctgcagcaaccagggcgctcgataaaccagacgtaccgctgatcatcagctctgtgaaatttgcggtcaatattattctagacctcattatcatctccagatttcacgtaggatcagtcgagcccacggtcaacacacaagccgtgatccaacttgtctgtagtctcactgctgctttcgtcgggcttggatacttcctgttctcaaacacctggcccattctccgagaagtccagaatagcaatgccgaagagaacaatccacgtcacaatctacgaccaaatgtcacatctctcacaatcctcattcgcccgggaataataaccttcgccgaatccgccatccgcaacgcactatacctctggctcgtaaccaccatcgtcgctctaggctcaacatacgcgacagcttggggcgtattcaacacaatccgatggggactcgtcatggtccctgtgaatgcgctcgaggcgacagctttgcaattcatcggccatcgatggggtcaatggcgccgagacgtgagagataatagacgtccgaaggcaacttggaagcagatactcccgattgtcaagcccgcattattatccctctctttagcgcttgccgttgagatacctatcgctatattcctttctctctatggagctcgagcttttgcgctgtatatcagtaattcgaatgaagtagcgggcgtcacggcttacatgtggcggactattgattggtgttatgtcttttatgctatgtctacgcagttagctacagtgttgcttgctactaggcctaagtggtacttgtaccagagcttagcaagtaatgtcctgtacgtacttccgtgggctattgtgtgtcaggtcaaggatctgcaggaggggaatgcgtggacatatcatagtcttgtgtttggtggtagtctgattttcagtttcgttgatattgttgtcgttgatggtatctgggcttggacactagttacggggaaagcaagactggagaggattcgtatgtag

SEQ ID NO: 4210 - protein, 527 aa, Muscodor strobelii
  misc_feature: SGI Peptide ID NO. 561086
  misc_feature (50)..(526): NCBI GI: 256726587 Blast Desc: NECHADRAFT_79686 [Nectria haematococca mpVI 77-13-4]
  misc_feature (1)..(526): NCBI GI: 171677714 Blast Desc: protein product [Podospora anserina] gi|170936925|emb|CAP61584.1| protein product [Podospora anserina]
  misc_feature (48)..(485): NCBI GI: 46124213 Blast Desc: FG06484.1 [Gibberella zeae PH-1]
  misc_feature (40)..(525): NCBI GI: 169605787 Blast Desc: SNOG_05920 [Phaeosphaeria nodorum SN15] gi|160706841|gb|EAT86984.2| SNOG_05920 [Phaeosphaeria nodorum SN15]
  misc_feature (51)..(474): NCBI GI: 145615380 Blast Desc: MGG_05551 [Magnaporthe grisea 70-15] gi|145022218|gb|EDK06238.1| MGG_05551 [Magnaporthe grisea 70-15]
  misc_feature (55)..(523): NCBI GI: 258567316 Blast Desc: conserved [Uncinocarpus reesii 1704] gi|237905848|gb|EEP80249.1| conserved [Uncinocarpus reesii 1704]
  misc_feature (55)..(511): NCBI GI: 170116714 Blast Desc: [Laccaria bicolor S238N-H82] gi|164635549|gb|EDQ99855.1| [Laccaria bicolor S238N-H82]
  misc_feature (21)..(495): NCBI GI: 169856299 Blast Desc: CC1G_08454 [Coprinopsis cinerea okayama7#130] gi|116504088|gb|EAU86983.1| CC1G_08454 [Coprinopsis cinerea okayama7#130]
  misc_feature (55)..(512): NCBI GI: 169771805 Blast Desc: [Aspergillus oryzae RIB40] gi|83768231|dbj|BAE58370.1| protein product [Aspergillus oryzae]
  misc_feature (16)..(468): NCBI GI: 189194824 Blast Desc: conserved [Pyrenophora tritici-repentis Pt-1C-BFP] gi|187979629|gb|EDU46255.1| conserved [Pyrenophora tritici-repentis Pt-1C-BFP]
MRRALRTLRLRCDYKMLPKDDPLIQDSNTGGPHYEDVPDETQNTNKSSGWHRDRYFGSLLFNIAAFILPALYGTLSKLWVANIDSSMVVTTDSYTYLNTAAEAINEGLPRAAWVIIGDKASRSLPQRLQLTHTLIVFQAAAGFILSIIFLSSASAFADKFVPSEVRNASLTYIRITSFTILGGTIETAVAAATRALDKPDVPLIISSVKFAVNIILDLIIISRFHVGSVEPTVNTQAVIQLVCSLTAAFVGLGYFLFSNTWPILREVQNSNAEENNPRHNLRPNVTSLTILIRPGIITFAESAIRNALYLWLVTTIVALGSTYATAWGVFNTIRWGLVMVPVNALEATALQFIGHRWGQWRRDVRDNRRPKATWKQILPIVKPALLSLSLALAVEIPIAIFLSLYGARAFALYISNSNEVAGVTAYMWRTIDWCYVFYAMSTQLATVLLATRPKWYLYQSLASNVLYVLPWAIVCQVKDLQEGNAWTYHSLVFGGSLIFSFVDIVVVDGIWAWTLVTGKARLERIRM

SEQ ID NO: 4211 - DNA, 3908 bp, Muscodor strobelii
  misc_feature: SGI EST ID NO. CUFF.10630.0
  misc_feature: Variant of the nucleotide sequence at SEQ ID NO 4209
caaccctccacagatccgaaggtagacagtgttcgtaaagagatgctattgacgtcaagctttcaatactaaatgcgaatactcgttgcagctcgtttagcaaaatacactttatttcgttccggattgactgtttcagggtctatgcgagcgactgttcaattcaatgttccgacatagaccactaacaacaccaaagacctcgccatgaaggcgaatgttatagacgacaaagtgttttagaagaacccgaacatctgctgcatagctagagtgaagcgtcctgcacccattctttaatggcctgagatgtgagaggattacacgtaggctacctgtttagatcaccaaactcagattcagcaaccaatgcgcgaatgatgcgaatcgtgtcgagcgacactgaaaagtatagtcatataagatccctccctcggtggcgactatcccagcctcgaggcagtcacccgaaaagtgtgacgtacccgaggcagccaaacgcccctcgtcctgatctgataccccacatgaggattgataccgaggccagcagagtcagatcaagtggtaagtatatggagatttatctgctcacatctccaaccgttctctaccccagctattactctattcggcatccatgtcgtggaaccctttcaatgctgccggtctccgccccagagcatggaaaacctggggtgcatggggctcacgccctcggtttggaggcggggagtccgttgaagttgcgtacagattaccgctatggtactctcaagatacgcatttaagagtcagtgttctcaaaatcaaagatacagtgccgtcgtgcacttaagccacaggctgctctatatcaacacaaccctcgatctcaccatggcatgtccatacgccggcggtgatggtgaccctaagaaccatccagcactcgccaagttcaaaaaggagcccattttcgagacaatcgaagagcctacggagttgagaaaagtagccaccgatgccattttcatcctgggtgggcaattcgcaatcatatgccagttcgcccatcctggattagcagagggctcctacaaacagtccaactttgccggcaggataatgaacagactcaagacgactacgcgcttcttgaatgctgctgtatggggaacagaagaggagaaacaggccatattctctgtcattcaccatgcgcactccactgtgaaaggcgatggctacgacgccgacgatcctgaactgcacaagtggacggcggcgacgctcttcgtgtctctcatcgtagtacacgaagcattcttcggcaaagtctcggtcgagaaacaacaaaagctattcaaagaaaccgccatctacggcacatcccttcgaatgccaggtgagatgtggccaaagacactcgacgacttctgggcgtattggaaccataacatcgcaaccctccaagtcactgattgggcgcgcagtctagcacgcgatctcctatggcccaaaaatattccaattcttcttcgaccacagatccccgtcgccaggatattgacgattcactggctgcctgagcgcatgcaacgggagttcaacctcaaagtcacgccgctgaatacactgatgtatcacttcttcgtcggccatattgcgttggtgtacccatatctccccatgaggcttagatcatacccgagtaagatcgggatgaaagatatgaggaaagctgtgaagaggatcgaagagacgggcacttggaataagcctaggaaatgacggtacgtacggcaaattgctgagtaatttgtcacctgatcctggggtttatatgctcctcatttacacatgcacttcgacgattacactttcggtataatcgtagtttcttcgtcctgtttcaagatccgtgtgcattcgaccgaaagccatcatcttacggaggcggacttacggtacttgttatcacagtcgttgggcttcgtcatcgaaatctcacattaattgtatcagtgattcgcagcatgacggaagctccagtcgtttgcgagatgccgtttgcgggaccgcaaagctcacagcaagcacggttggttatcaacgttggggaggcttatggtggcgccaccggtgagagtgttatcgcttgctgtcacaaacaccccgcacttcatcaataaaaggctttgtattgcatgatgctcaattatatatactgcgagattcatgatgtcaatgcgacgagcgcttcgcacattacgcttgcgctgtgattacaagatgttgcctaaagatgatcccttaatccaagacagcaacacgggcgggcctcactacgaggacgttccggacgagacacaaaacacgaacaagtcttcaggatggcaccgcgaccgctattttggttcccttctcttcaatatagcagccttcatcctcccagcactatacggtaccctatccaagctctgggtcgcgaacatcgactcctcaatggtcgtcacgaccgactcatacacataccttaacaccgccgccgaagccattaatgagggactacccagagcagcatgggtcatcatcggcgacaaagcatcgagaagtttgccgcaaagactgcagctaactcatactctgattgtctttcaggccgctgccggcttcatcttgagtatcatcttcttaagctccgcatcagcatttgccgataaattcgtgccctccgaggtgcgaaatgccagtctgacgtatatccgaattacttcgttcactatactaggcggtaccatcgagacggctgtcgctgcagcaaccagggcgctcgataaaccagacgtaccgctgatcatcagctctgtgaaatttgcggtcaatattattctagacctcattatcatctccagatttcacgtaggatcagtcgagcccacggtcaacacacaagccgtgatccaacttgtctgtagtctcactgctgctttcgtcgggcttggatacttcctgttctcaaacacctggcccattctccgagaagtccagaatagcaatgccgaagagaacaatccacgtcacaatctacgaccaaatgtcacatctctcacaatcctcattcgcccgggaataataaccttcgccgaatccgccatccgcaacgcactatacctctggctcgtaaccaccatcgtcgctctaggctcaacatacgcgacagcttggggcgtattcaacacaatccgatggggactcgtcatggtccctgtgaatgcgctcgaggcgacagctttgcaattcatcggccatcgatggggtcaatggcgccgagacgtgagagataatagacgtccgaaggcaacttggaagcagatactcccgattgtcaagcccgcattattatccctctctttagcgcttgccgttgagatacctatcgctatattcctttctctctatggagctcgagcttttgcgctgtatatcagtaattcgaatgaagtagcgggcgtcacggcttacatgtggcggactattgattggtgttatgtcttttatgctatgtctacgcagttagctacagtgttgcttgctactaggcctaagtggtacttgtaccagagcttagcaagtaatgtcctgtacgtacttccgtgggctattgtgtgtcaggtcaaggatctgcaggaggggaatgcgtggacatatcatagtcttgtgtttggtggtagtctgattttcagtttcgttgatattgttgtcgttgatggtatctgggcttggacactagttacggggaaagcaagactggagaggattcgtatgtagtatcctgtacttaccacacagaagaacatgcattagagcctcaagtgttacatagtgtcaagtatctggtggaactgattattgatcgctatctt

SEQ ID NO: 4212 - DNA, 894 bp, Muscodor strobelii
  misc_feature: SGI cDNA ID NO. 561087
  misc_feature: Encodes the peptide sequence at SEQ ID NO 4213
atggcatgtccatacgccggcggtgatggtgaccctaagaaccatccagcactcgccaagttcaaaaaggagcccattttcgagacaatcgaagagcctacggagttgagaaaagtagccaccgatgccattttcatcctgggtgggcaattcgcaatcatatgccagttcgcccatcctggattagcagagggctcctacaaacagtccaactttgccggcaggataatgaacagactcaagacgactacgcgcttcttgaatgctgctgtatggggaacagaagaggagaaacaggccatattctctgtcattcaccatgcgcactccactgtgaaaggcgatggctacgacgccgacgatcctgaactgcacaagtggacggcggcgacgctcttcgtgtctctcatcgtagtacacgaagcattcttcggcaaagtctcggtcgagaaacaacaaaagctattcaaagaaaccgccatctacggcacatcccttcgaatgccaggtgagatgtggccaaagacactcgacgacttctgggcgtattggaaccataacatcgcaaccctccaagtcactgattgggcgcgcagtctagcacgcgatctcctatggcccaaaaatattccaattcttcttcgaccacagatccccgtcgccaggatattgacgattcactggctgcctgagcgcatgcaacgggagttcaacctcaaagtcacgccgctgaatacactgatgtatcacttcttcgtcggccatattgcgttggtgtacccatatctccccatgaggcttagatcatacccgagtaagatcgggatgaaagatatgaggaaagctgtgaagaggatcgaagagacgggcacttggaataagcctaggaaatga

SEQ ID NO: 4213 - protein, 297 aa, Muscodor strobelii
  misc_feature: SGI Peptide ID NO. 561087
  misc_feature (4)..(294): NCBI GI: 149211153 Blast Desc: MGCH7_ch7g1039 [Magnaporthe grisea 70-15] gi|86196994|gb|EAQ71632.1| MGCH7_ch7g1039 [Magnaporthe grisea 70-15]
  misc_feature (4)..(294): NCBI GI: 145603856 Blast Desc: MGG_10272 [Magnaporthe grisea 70-15] gi|145011997|gb|EDJ96653.1| MGG_10272 [Magnaporthe grisea 70-15]
  misc_feature (21)..(292): NCBI GI: 119497639 Blast Desc: NFIA_032440 [Neosartorya fischeri NRRL 181] gi|119413741|gb|EAW23680.1| conserved [Neosartorya fischeri NRRL 181]
  misc_feature (20)..(292): NCBI GI: 70988603 Blast Desc: conserved [Aspergillus fumigatus Af293] gi|66846792|gb|EAL87123.1| conserved [Aspergillus fumigatus Af293] gi|159128578|gb|EDP53692.1| conserved [Aspergillus A1163]
  misc_feature (15)..(292): NCBI GI: 115388675 Blast Desc: conserved [Aspergillus terreus NIH2624] gi|114195927|gb|EAU37627.1| conserved [Aspergillus terreus NIH2624]
  misc_feature (24)..(286): NCBI GI: 261189915 Blast Desc: conserved [Ajellomyces dermatitidis SLH14081] gi|239591604|gb|EEQ74185.1| conserved [Ajellomyces dermatitidis SLH14081]
  misc_feature (25)..(284): NCBI GI: 239612867 Blast Desc: conserved [Ajellomyces dermatitidis ER-3]
  misc_feature (26)..(289): NCBI GI: 67524441 Blast Desc: AN2678.2 [Aspergillus nidulans FGSC A4] gi|40743896|gb|EAA63080.1| AN2678.2 [Aspergillus nidulans FGSC A4] gi|259486411|tpe|CBF84225.1| TPA: conserved [Aspergillus FGSC
  misc_feature (24)..(297): NCBI GI: 115383726 Blast Desc: conserved [Aspergillus terreus NIH2624] gi|114196102|gb|EAU37802.1| conserved [Aspergillus terreus NIH2624]
  misc_feature (24)..(287): NCBI GI: 238508166 Blast Desc: conserved [Aspergillus flavus NRRL3357] gi|220688803|gb|EED45155.1| conserved [Aspergillus flavus NRRL3357]
MACPYAGGDGDPKNHPALAKFKKEPIFETIEEPTELRKVATDAIFILGGQFAIICQFAHPGLAEGSYKQSNFAGRIMNRLKTTTRFLNAAVWGTEEEKQAIFSVIHHAHSTVKGDGYDADDPELHKWTAATLFVSLIVVHEAFFGKVSVEKQQKLFKETAIYGTSLRMPGEMWPKTLDDFWAYWNHNIATLQVTDWARSLARDLLWPKNIPILLRPQIPVARILTIHWLPERMQREFNLKVTPLNTLMYHFFVGHIALVYPYLPMRLRSYPSKIGMKDMRKAVKRIEETGTWNKPRK

SEQ ID NO: 4214 - DNA, 3908 bp, Muscodor strobelii; identical to SEQ ID NO: 4211
  misc_feature: SGI EST ID NO. CUFF.10630.0
  misc_feature: Variant of the nucleotide sequence at SEQ ID NO 4212

SEQ ID NO: 4215 - DNA, 1137 bp, Muscodor strobelii
  misc_feature: SGI cDNA ID NO. 561088
  misc_feature: Encodes the peptide sequence at SEQ ID NO 4216
atggccgctaaagctggtctcgagaagcaggatagagcccgtgatgccgccttcaacaaggccatgcacggcgagtctgccgaggctgctggaggtttccgcgccatgatgggcaaggacgccaaagcccaaaaagctgccgttgacgagtacttcaagcactgggacaacaaggctgctgaaattgagaccgaggagactcgcgctgccagaactgccgaatacgccactttgaccagacactactacaatctcgccaccgatctgtacgagtatggctggggccagtcattccacttctgccgctactcgatcggcgagaacttctaccaggccattgcccgacacgagcactacctcgcacaccagattggcatcaaggatggcatgaaggtgctcgacgttggctgtggtgtcggtggcccagcccgtgagatcgctaagtttaccggctgccacgtcaccggcctcaacaacaacgactaccagatccagcgtgccactcagtacgccaagaaggagggcatgtctaaccagctcgctttcgtcaagggtgacttcatgcaaatggacttccccgacaacaccttcgacgctgtctacgctatcgaggcgacttgccacgctcccaagctggctggtgtctacagcgagatcttccgtgtgctgaagcccggcggtatctttggtgtctacgagtggttgatgaccgaggactacgacaacgataacgtcgagcaccgtaagatccgtctcggaatcgagcttggtgacggtatctccaacatggtcaaggtctccgagggcctggaggcgatgaagattgccggcttcgagatgttgcaccacgaggatctggctgaccgccccgacaccatcccctggtactggcctctggctggtcgctggaagtacatgcagtccgtctttgacgcgcccacgatcgcacgtatgacctggtggggacgtctcctcgcccacaacttcgctggtatcttggaaaagatcagaatcgctcctcccggaaccaagaagacggccgacagtctcggtgtcgccgccgacaacttggttgctggtgccgagcagcacctcttcacgccgatgtacctcatggtcggcaagaagcccgaataa

SEQ ID NO: 4216 - protein, 378 aa, Muscodor strobelii
  misc_feature: SGI Peptide ID NO. 561088
  misc_feature (70)..(335): Pfam Id: PF02353 Pfam Desc: Cyclopropane-fatty-acyl-phospholipid synthase
  misc_feature (133)..(231): Pfam Id: PF08241 Pfam Desc: Methyltransferase domain
  misc_feature (133)..(229): Pfam Id: PF08242 Pfam Desc: Methyltransferase domain
  misc_feature (240)..(377): Pfam Id: PF08498 Pfam Desc: Sterol methyltransferase C-terminal
  misc_feature (86)..(298): Pfam Id: PF01209 Pfam Desc: ubiE/COQ5 methyltransferase family
  misc_feature (3)..(378): NCBI GI: 119487178 Blast Desc: sterol 24-c-methyltransferase, [Neosartorya fischeri NRRL 181] gi|119410601|gb|EAW20547.1| sterol 24-c-methyltransferase, [Neosartorya fischeri NRRL 181]
  misc_feature (2)..(377): NCBI GI: 46111803 Blast Desc: FG02783.1 [Gibberella zeae PH-1]
  misc_feature (3)..(378): NCBI GI: 121714493 Blast Desc: sterol 24-c-methyltransferase, [Aspergillus clavatus NRRL 1] gi|119403011|gb|EAW13431.1| sterol 24-c-methyltransferase, [Aspergillus clavatus NRRL 1]
  misc_feature (3)..(378): NCBI GI: 145248894 Blast Desc: An14g01590 [Aspergillus niger] gi|134081459|emb|CAK46472.1| protein product [Aspergillus niger]
  misc_feature (3)..(378): NCBI GI: 169782960 Blast Desc: [Aspergillus oryzae RIB40] gi|238492697|ref|XP_002377585.1| sterol 24-c-methyltransferase, [Aspergillus flavus NRRL3357] gi|83774686|dbj|BAE64809.1| protein
  misc_feature (3)..(378): NCBI GI: 70982043 Blast Desc: sterol 24-c-methyltransferase [Aspergillus fumigatus Af293] gi|66844173|gb|EAL84512.1| sterol 24-c-methyltransferase, [Aspergillus fumigatus Af293] gi|159122217|gb|EDP47339.1| sterol
  misc_feature (3)..(378): NCBI GI: 115387689 Blast Desc: sterol 24-C-methyltransferase [Aspergillus terreus NIH2624] gi|114195434|gb|EAU37134.1| sterol 24-C-methyltransferase [Aspergillus terreus NIH2624]
  misc_feature (7)..(377): NCBI GI: 156058910 Blast Desc: sterol 24-C-methyltransferase [Sclerotinia sclerotiorum 1980] gi|154701254|gb|EDO00993.1| sterol 24-C-methyltransferase [Sclerotinia sclerotiorum 1980]
  misc_feature (3)..(378): NCBI GI: 67541965 Blast Desc: AN7146.2 [Aspergillus nidulans FGSC A4] gi|40742208|gb|EAA61398.1| AN7146.2 [Aspergillus nidulans FGSC A4] gi|259483523|tpe|CBF78983.1| TPA: sterol (AFU_orthologue; A4]
  misc_feature (3)..(377): NCBI GI: 154308319 Blast Desc: BC1G_07905 [Botryotinia fuckeliana B05.10] gi|150852990|gb|EDN28182.1| BC1G_07905 [Botryotinia fuckeliana B05.10]
  misc_feature (1)..(377): SWISSPROT Homolog: EC 2.1.1.41 Sterol 24-C-methyltransferase
MAAKAGLEKQDRARDAAFNKAMHGESAEAAGGFRAMMGKDAKAQKAAVDEYFKHWDNKAAEIETEETRAARTAEYATLTRHYYNLATDLYEYGWGQSFHFCRYSIGENFYQAIARHEHYLAHQIGIKDGMKVLDVGCGVGGPAREIAKFTGCHVTGLNNNDYQIQRATQYAKKEGMSNQLAFVKGDFMQMDFPDNTFDAVYAIEATCHAPKLAGVYSEIFRVLKPGGIFGVYEWLMTEDYDNDNVEHRKIRLGIELGDGISNMVKVSEGLEAMKIAGFEMLHHEDLADRPDTIPWYWPLAGRWKYMQSVFDAPTIARMTWWGRLLAHNFAGILEKIRIAPPGTKKTADSLGVAADNLVAGAEQHLFTPMYLMVGKKPE

SEQ ID NO: 4217 - DNA, 1832 bp, Muscodor strobelii
  misc_feature: SGI EST ID NO. CUFF.10638.0
  misc_feature: Variant of the nucleotide sequence at SEQ ID NO 4215
ctgctcacatgttactggtgcccgacagtcaaatgtgagatggccataaaagttgcccacatcccctttcgcaaaagatagttagatggatactcaccccttcctctcactctaacatcttacttcaacagttcaataaagcaattgccatcttttcgtggctcaattgttctccttaaacgctctaattgatacggaatttaatacgctgcaaaatcagtcgccatggccgctaaagctggtctcgagaagcaggatagagcccgtgatgccgccttcaacaaggccatgcacggcgagtctgccgaggctgctggaggtttccgcgccatgatgggcaaggacgccaaagcccaaaaagctgccgttgacgagtacttcaagcactgggacaacaaggctgctgaaattgagaccgaggagactcgcgctgccagaactgccgaatacgccactttgaccagacactactacaatctcgccaccgatctgtacgagtatggctggggccagtcattccacttctgccgctactcgatcggcgagaacttctaccaggccattgcccgacacgagcactacctcgcacaccagattggcatcaaggatggcatgaaggtgctcgacgttggctgtggtgtcggtggcccagcccgtgagatcgctaagtttaccggctgccacgtcaccggcctcaacaacaacgactaccagatccagcgtgccactcagtacgccaagaaggagggcatgtctaaccagctcgctttcgtcaagggtgacttcatgcaaatggacttccccgacaacaccttcgacgctgtctacgctatcgaggcgacttgccacgctcccaagctggctggtgtctacagcgagatcttccgtgtgctgaagcccggcggtatctttggtgtctacgagtggttgatgaccgaggactacgacaacgataacgtcgagcaccgtaagatccgtctcggaatcgagcttggtgacggtatctccaacatggtcaaggtctccgagggcctggaggcgatgaagattgccggcttcgagatgttgcaccacgaggatctggctgaccgccccgacaccatcccctggtactggcctctggctggtcgctggaagtacatgcagtccgtctttgacgcgcccacgatcgcacgtatgacctggtggggacgtctcctcgcccacaacttcgctggtatcttggaaaagatcagaatcgctcctcccggaaccaagaagacggccgacagtctcggtgtcgccgccgacaacttggttgctggtgccgagcagcacctcttcacgccgatgtacctcatggtcggcaagaagcccgaataaatcacgacacgagagacgagggatgacaaaagcatatcacgaaaagaagcatgcaccataccgactgcaaggcgacgtcgagaagacgaatacccgcagcgccaatacatacccacataatattcacacatatttataatcgactgaacggcgcccaatagagcagctagcggcaatagacttgggaggagtcggatgggtcctaatgaagctataagagttcttcactgtatataactatcattattgcaactttcagaagcatacctagcggcgcacaaaatagaagcaagctcacgtcaagaaatggcggagagacgtatttgatcaaattacttctgggctactattaactcgtgcaagtttgcgatttgtcgttattgatgttaaaccaagtatcgcgaaataatacagtgatgttggaaaactcactgttgctgacatgatgatatgcttactcagtatctcag

SEQ ID NO: 4218 - DNA, 1131 bp, Muscodor strobelii
  misc_feature: SGI cDNA ID NO. 561089
  misc_feature: Reduced expression when VOC is produced
  misc_feature: Encodes the peptide sequence at SEQ ID NO 4219
atgtcgcgttaccttcgcccggccgcgaggttagctacctctacccgcctcaccgccgctcctcgaaccctctcccgctttgcctctcccgccaccctcgccgtctcacagcggaggacgttcgccgatgtcaagggaaccaaggagtacacggtccgtgaggcgctgaacgaggccatggccgaggagctcgagcagaacgagaaggtcttcattctcggcgaggaggtcgcccagtacaacggtgcatacaaggtcaccaagggcctgctggatcgcttcggcgacaagagagtcatcgacacccccatcaccgagtccggattctgcggtttggctgtcggtgctgctctcagcggtctcaaccccatctgcgagttcatgaccttcaacttcgccatgcaggccatcgaccagatcgtcaacagcgccgccaagaccctctacatgtccggcggtatccagccctgcaacatcaccttccgcggccccaacggtttcgccgccggtgtcgccgcacagcactcccaggactacagcgcctggtacggctccatccccgggctcaaggtcgtctctccctggtctgcagaggatgccaagggtctgctcaaggccgccatccgtgaccccaaccccgtcgtcgtcctcgagaacgagctgatgtacggtgtctctttccccatgtccgaggccgcccagaaggatgacttcgtcattcccttcggcaaggccaaggtcgagcgtgtcggcaaggatctcaccatggtgtctctgtcccgcaccgtcggccagtgcatggtcgccgctgaggccctgaagaagaagtacggtgttgaggtcgaggtcatcaacttgcgctctgtcaagcctctcgacgtcgagagcatcgtcaagtccgtcaagaagaccggccgtctgatttccgtcgagtctggcttccccttcgccggtatgggtgccgagattcttgccaccaccatggagtacgcattcgactaccttgatgctcctgcccagcgtatcactggcgctgaagtgcctaccccctacgcccagggtcttgaggtcatgtcattccccactgagcagctcatcgaggacttctccgccaagttgttgaaggtataa

SEQ ID NO: 4219 - protein, 376 aa, Muscodor strobelii
  misc_feature: SGI Peptide ID NO. 561089
  misc_feature (48)..(225): Pfam Id: PF02779 Pfam Desc: Transketolase, pyrimidine binding domain
  misc_feature (243)..(366): Pfam Id: PF02780 Pfam Desc: Transketolase, C-terminal domain
  misc_feature (1)..(376): NCBI GI: 46111801 Blast Desc: FG02782.1 [Gibberella zeae PH-1]
  misc_feature (1)..(376): NCBI GI: 256721924 Blast Desc: [Nectria haematococca mpVI 77-13-4]
  misc_feature (1)..(376): NCBI GI: 85118132 Blast Desc: pyruvate dehydrogenase E1 component [Neurospora crassa OR74A] gi|9367270|emb|CAB97287.1| pyruvate dehydrogenase (lipoamide) beta chain precursor (PDB1) [Neurospora crassa] E1
  misc_feature (1)..(376): NCBI GI: 156040730 Blast Desc: SS1G_11343 [Sclerotinia sclerotiorum 1980] gi|154695727|gb|EDN95465.1| SS1G_11343 [Sclerotinia sclerotiorum 1980]
  misc_feature (1)..(376): NCBI GI: 154303820 Blast Desc: pyruvate dehydrogenase E1 component beta subunit [Botryotinia fuckeliana B05.10] gi|150854378|gb|EDN29570.1| pyruvate dehydrogenase E1 component beta subunit [Botryotinia
  misc_feature (1)..(376): NCBI GI: 116192849 Blast Desc: conserved [Chaetomium globosum CBS 148.51] gi|88182055|gb|EAQ89523.1| conserved [Chaetomium globosum CBS 148.51]
  misc_feature (1)..(376): NCBI GI: 171684155 Blast Desc: protein product [Podospora anserina] gi|170942038|emb|CAP67690.1| protein product [Podospora anserina]
  misc_feature (3)..(376): NCBI GI: 154272916 Blast Desc: pyruvate dehydrogenase E1 component beta subunit, mitochondrial precursor [Ajellomyces capsulatus NAm1] gi|150415822|gb|EDN11166.1| pyruvate dehydrogenase E1 component
  misc_feature (1)..(376): NCBI GI: 39969921 Blast Desc: conserved [Magnaporthe grisea 70-15] gi|149209249|ref|XP_001521999.1| MGCH7_ch7g117 [Magnaporthe grisea 70-15] gi|86196072|gb|EAQ70710.1| MGCH7_ch7g117 grisea
  misc_feature (3)..(376): NCBI GI: 240281364 Blast Desc: pyruvate dehydrogenase E1 component beta subunit [Ajellomyces capsulatus H143]
  misc_feature (25)..(361): SWISSPROT Homolog: EC 1.2.4.1 Pyruvate dehydrogenase (acetyl-transferring)
  misc_feature: Useful for introducing or modulating the production of volatile compounds
  misc_feature: Useful for fungicidal and/or biocontrol applications
MSRYLRPAARLATSTRLTAAPRTLSRFASPATLAVSQRRTFADVKGTKEYTVREALNEAMAEELEQNEKVFILGEEVAQYNGAYKVTKGLLDRFGDKRVIDTPITESGFCGLAVGAALSGLNPICEFMTFNFAMQAIDQIVNSAAKTLYMSGGIQPCNITFRGPNGFAAGVAAQHSQDYSAWYGSIPGLKVVSPWSAEDAKGLLKAAIRDPNPVVVLENELMYGVSFPMSEAAQKDDFVIPFGKAKVERVGKDLTMVSLSRTVGQCMVAAEALKKKYGVEVEVINLRSVKPLDVESIVKSVKKTGRLISVESGFPFAGMGAEILATTMEYAFDYLDAPAQRITGAEVPTPYAQGLEVMSFPTEQLIEDFSAKLLKV

SEQ ID NO: 4220 - DNA, 1702 bp, Muscodor strobelii
  misc_feature: SGI EST ID NO. CUFF.11464.0
  misc_feature: Variant of the nucleotide sequence at SEQ ID NO 4218
gggcgcgacaggactgtcgaaacctcccaaaaaaaggccggagctcgccaattccacgcatctgcaaaaatcactcgactcgactcgatctctctcttccactccatcctcccacctcgactccatcacctgcgacgccttcgcccgcgcaccctcgcccgtctcccatcgacggtcggatcctcaattgcactctcgcattcaattgtctgagatccggtccatcccaagtccctcttaccggcgttccccgtccagtcagcagcagccatgtcgcgttaccttcgcccggccgcgaggttagctacctctacccgcctcaccgccgctcctcgaaccctctcccgctttgcctctcccgccaccctcgccgtctcacagcggaggacgttcgccgatgtcaagggaaccaaggagtacacggtccgtgaggcgctgaacgaggccatggccgaggagctcgagcagaacgagaaggtcttcattctcggcgaggaggtcgcccagtacaacggtgcatacaaggtcaccaagggcctgctggatcgcttcggcgacaagagagtcatcgacacccccatcaccgagtccggattctgcggtttggctgtcggtgctgctctcagcggtctcaaccccatctgcgagttcatgaccttcaacttcgccatgcaggccatcgaccagatcgtcaacagcgccgccaagaccctctacatgtccggcggtatccagccctgcaacatcaccttccgcggccccaacggtttcgccgccggtgtcgccgcacagcactcccaggactacagcgcctggtacggctccatccccgggctcaaggtcgtctctccctggtctgcagaggatgccaagggtctgctcaaggccgccatccgtgaccccaaccccgtcgtcgtcctcgagaacgagctgatgtacggtgtctctttccccatgtccgaggccgcccagaaggatgacttcgtcattcccttcggcaaggccaaggtcgagcgtgtcggcaaggatctcaccatggtgtctctgtcccgcaccgtcggccagtgcatggtcgccgctgaggccctgaagaagaagtacggtgttgaggtcgaggtcatcaacttgcgctctgtcaagcctctcgacgtcgagagcatcgtcaagtccgtcaagaagaccggccgtctgatttccgtcgagtctggcttccccttcgccggtatgggtgccgagattcttgccaccaccatggagtacgcattcgactaccttgatgctcctgcccagcgtatcactggcgctgaagtgcctaccccctacgcccagggtcttgaggtcatgtcattccccactgagcagctcatcgaggacttctccgccaagttgttgaaggtataaggaaacctgtgtacagacaaaaatcaaaaactcggggacgaggcagtgggaagcatgtgcaatttacaataagacagagcggggtggcttatcgggctggctatagactgtgtatgtggcgttaaactcacgcatgtactataattaattcaccacggcatgggaatgggttgctcttaggattatatcgacgcattccaacggctcgtgggaattttatcttttgaatcataaataccaattactcaatgatgataatcctcaagctatttggcttgtatgtgttagagattaaactcga

SEQ ID NO: 4221 - DNA, 588 bp, Muscodor strobelii
  misc_feature: SGI cDNA ID NO. 561090
  misc_feature: Elevated expression when VOC is produced
  misc_feature: Encodes the peptide sequence at SEQ ID NO 4222
atggccgaaatcatcttcaacctcctcctccgcggtgcgctcctcgctgcagatgtggcgtcgggcgatatcaaggatcttgtaggagacggaaatggtacaggagtgcctggcatttgtctgctacatgtctacggagggggcaccaacgatgacaagtacgccactgtgaattgcaacggcgacataaacacatacaacctcgataactgggactcgaacagccaaaacaaaatctccgatgacagaatcggtgatatatctgtcaacttcggcgatccgtctgagttcgaatccgcctggcctggcgagccttcggtcgatcaagatgtgtactcggtgtcgacgggcggtgataccacgacggacgtggggctgcagaaccttgcgccgcatacagggccgagagagctgacgggcgggggatgcgacggcgaagatgtcgcaattattgctgggtattacaattggggtggtgatgcggatgacggaaccctttgggagacatatgccattgcgttcccgcttgttgggggaaatcccggttgcactgatgataagaggcgttgggagcattggcgtgcttag

SEQ ID NO: 4222 - protein, 195 aa, Muscodor strobelii
  misc_feature: SGI Peptide ID NO. 561090
  misc_feature: Useful for introducing or modulating the production of volatile compounds
MAEIIFNLLLRGALLAADVASGDIKDLVGDGNGTGVPGICLLHVYGGGTNDDKYATVNCNGDINTYNLDNWDSNSQNKISDDRIGDISVNFGDPSEFESAWPGEPSVDQDVYSVSTGGDTTTDVGLQNLAPHTGPRELTGGGCDGEDVAIIAGYYNWGGDADDGTLWETYAIAFPLVGGNPGCTDDKRRWEHWRA

SEQ ID NO: 4223 - DNA, 1248 bp, Muscodor strobelii
  misc_feature: SGI EST ID NO. CUFF.10668.0
  misc_feature: Variant of the nucleotide sequence at SEQ ID NO 4221
tttaaagtgaagacaaagtcgagtttgaaattatgattcaggctcaagcatctcaagcatctcaagtatctgaagcatctcaagtatctgaagcatctcatcgacatccataaattcaacaacacgatatagtatcagtctaattccacaatggccgaaatcatcttcaacctcctcctccgcggtgcgctcctcgctgcagatgtggcgtcgggcgatatcaaggatcttgtaggagacggaaatggtacaggagtgcctggcatttgtctgctacatgtctacggagggggcaccaacgatgacaagtacgccactgtgaattgcaacggcgacataaacacatacaacctcgataactgggactcgaacagccaaaacaaaatctccgatgacagaatcggtgatatatctgtcaacttcggcgatccgtctgagttcgaatccgcctggcctggcgagccttcggtcgatcaagatgtgtactcggtgtcgacgggcggtgataccacgacggacgtggggctgcagaaccttgcgccgcatacagggccgagagagctgacgggcgggggatgcgacggcgaagatgtcgcaattattgctgggtattacaattggggtggtgatgcggatgacggaaccctttgggagacatatgccattgcgttcccgcttgttgggggaaatcccggttgcactgatgataagaggcgttgggagcattggcgtgcttagagttgatggttcatgatgtgaacctgtgaggtgatgatgagtagatgagtgtgtcgtctaacgggtgatttaggttagttgtatgattatgaagcacggagctatttgtagtttgtttaggtagttactctccaattgcattttaattctatggtgcggtgtggttaagtatagactcttgttgaaaatccctgagcgcgttgcttaacagaatattactccaatttgtgtaagaccccgagttagagaacttgttcgaaaacagctaaccattgcggaaactgaattcctcgcctttgcactcattatggcaaattcaagattgcagccgctatcaaacacgagttgacgaggtaatgcatcgcatccacactatattctcggaaatcggtatttgtgttatgagtgagaatttatatatacaatagtttcgcagccgaaccagacgtgtcgtgtaatcggtggactttctagaataaagcggaaaacttactcgcaacatgattgcgt

SEQ ID NO: 4224 - DNA, 576 bp, Muscodor strobelii
  misc_feature: SGI cDNA ID NO. 561091
  misc_feature: Elevated expression when VOC is produced
  misc_feature: Encodes the peptide sequence at SEQ ID NO 4225
atggacccactgactgtagttggtctcgtcagcaatattgtacaatttatctcattcgggcatgagattattagttctttccaagaggtacatgcccgtggagctttgcgagagatcgaacagcttaaacttctagcccacgatgtgcgtaccagaagccgtgaagtgtctgagtttgtcgaccaggaggcaaaattgaaggaccaagtcatgctgcgtatgcgtgagcgccgcgaacatcatgaagtaaaagtacaagatgagcagattgcactacagagagagctagcgccactacagagaatagccgccgagtctgatcacatcgcgagcggtcttctcgattatctagcccgttttgatgtgaacagtagcggatggcaacgaaagctagaggctatgaaagtctcagggcgcattctatggaagaaaagcgacttccgtgagatggcccaaaagctcactggattggagaaacgattggctagctggtggactgtgacgatactaataatcaagcaatgggtttttagtgagcaggcgacacgacgacaaacttcaagctatctgtactag

SEQ ID NO: 4225 - protein, 191 aa, Muscodor strobelii
  misc_feature: SGI Peptide ID NO. 561091
  misc_feature (2)..(108): NCBI GI: 255956529 Blast Desc: Pc21g20270 [Penicillium chrysogenum Wisconsin 54-1255] gi|211590728|emb|CAP96924.1| Pc21g20270 [Penicillium chrysogenum Wisconsin 54-1255]
  misc_feature: Useful for introducing or modulating the production of volatile compounds
MDPLTVVGLVSNIVQFISFGHEIISSFQEVHARGALREIEQLKLLAHDVRTRSREVSEFVDQEAKLKDQVMLRMRERREHHEVKVQDEQIALQRELAPLQRIAAESDHIASGLLDYLARFDVNSSGWQRKLEAMKVSGRILWKKSDFREMAQKLTGLEKRLASWWTVTILIIKQWVFSEQATRRQTSSYLY

SEQ ID NO: 4226 - DNA, 3774 bp, Muscodor strobelii
  misc_feature: SGI EST ID NO. CUFF.10752.2
  misc_feature: Variant of the nucleotide sequence at SEQ ID NO 4224
cacaattgtggcgctgcctgcatactgactgccctgactgccttggctgcattgtcgctacctaggtaagttgccggtaggcagactggcgatcataagtggggttgcgtagacacatcgtgggctcaccaccagcacaacctacctaggtatctcgaactattttgcagacttcacttttaatcttcgcaacgactgcgttcgaatattggcgcatcatggacccactgactgtagttggtctcgtcagcaatattgtacaatttatctcattcgggcatgagattattagttctttccaagagcccacgatgtgcgtaccagaagccgtgaagtgtctgagtttgtcgaccaggaggcaaaattgaaggaccaagtcatgctgcgtatgcgtgagcgccgcgaacatcatgaagtaaaagtacaagatgagcagattgcactacagagagagctagcgccactacagagaatagccgccgagtctgatcacatcgcgagcggtcttctcgattatctagcccgttttgatgtgaacagtagcggatggcaacgaaagctagaggctatgaaagtctcagggcgcattctatggaagaaaagcgacttccgtgagatggcccaaaagctcactggattggagaaacgattggctagctggtggactgtgacgatgagcaggcgacacgacgacaaacttcaagctatctgtactagtcttgatatgttaaatgataaactagaaagttcgagagtgctgaatcatcaatattgttaaatcgcaaatacaagactacttggatgaatggcacaagacgcttagagcaagccaagtgcttagaagtctagcgttcgatgttatcgattaccgttgagataatatcgaggagccacattaccaaacatgccagtgggcttatgaccctggcaaaacaaacttcgtggaatggcttagatctggctctggtatttactggatcaatggcttagtgggctgggagtgggaaatcaacactcatgaaatttgtcgcggcggacgattctacgcgcagagagctcttgatttggtctggaagccgcaaacttgtaactgcaagccactatttctggattgccggtacggatatgcaaaaatcacatcatgggctgcttcaaacactgttatatgagattctccatgccgatcttagtttatgcggatcactgtgtcctgatcataattgtgatgcattgtggacaacccaagagcttaccacagcgcttgaacgactaagggctgtatcagagacagagtgtaatttctgcttcttcatcgatggcctcgacgagtatcacggcccagaagagaccattatacaagttctaaaagcacttgccacagctccaaatattaagatttgtgcatcgagtcgtccctggcctgctttccatgcagaatggaagaacagcatttacactttcaaaatgcaagatcttacaggggacgatatgacacgatatgtgcgagaatatctcgagggaagtgagatgttcatggcagcggcaaccaaagatagtagatgtcttcaattgatttctagtatctcagaaagagctaatggagtatggttgtgggtgtacctagtcgtgcgcaacattctgcgggatatgcgagacggagagccgtttccagtgtggcaggccagattggagtcgtacacacaagaacttatcaactatttcagaaagatgatggaacaaatcgatcccttccattgcaggcaaggatcagagatatttcttatggctctagcatcgactgagatcggcttaccactgcttagcctgccggtattatacgacgaagaaatgccctggcataaccccgatgggacttcgcatcagttatcgattcaagaggtcaaggaagtataccgaaactggcagccgcgactacacaatcgatgtagagatctgatgaagctgacgacctctacctctggacatgatatacttaagaatccggtaaatcacctgaacacgccagcaatcaaatacaaggtcgggtttttacaccgaaccgtcaaggatttcctggaagaacattatatcgatgagctacgaaataggacacttcctgaattcagtgaatcaatatgtctcgcacgagttattatcgtgttgctagagcaaattttacttgctcgtggtccaaacacgatgtccgatataaggatatacagattaatacgctatttctctagcttgataagcaaatcccaagatgaagaatctcaagcgacgcaacatcactcacctgaccgcgtcacgcttgtggacgacttagacctcatgatgaagcgatgtttggaatatgagaaacattctgggcagcgggaaatcgatcattgtgggacctggtatcaccaagttgctgggcagcatgttgatcttctacatctgacagtacagttgcggttgagagactattcattaaatgctctgaagccacgaaccgattggtctgaagaagaatctattatgtacatgaggtgtgctctgaaatctcctctgcatgcagatttggatggtcttccaatagacacgagactcctaaatggccttgtcgcacgaggtattgacccaaatacaaatattgattggcatgacactgcctacacctacacagtcactgcatggagctgctttttgctgtcgtgtagtaaatcttggtctcaatggtcggcgattcaacgcgaggatgctattgacgctatccgcatgttcttatcacacggcgcgaagaccgacgtcgttgtcgatgggcagcgtctacgcgaactgcttacccagctacttggccgtgaacgaatgtcagggcttgaggaagatatcgctatcgcacaaagggcaggaaaaggacccttgagtatgaagtccaattggctcttcaagatgtttgcttctaggagctgagcagatattccacttacgctcttgctttcatattgggccagaattacaagtgtctcggggttatgtcgttcctcattcggtgatggcgagtccccgggcaccgacgaaacggaagttcgcgctactagagcgactcggccgatgggttccggctgacccgccttggttacatcgtggtaacccaagacccaattgataactttcccttaagcaagtagggatctcattgtgggatggcggggacattgtgggatgagggctgttatgcacggcgcttgtctcaatagcgagcgggaagacgcgccttggctcttggtgtcaatgttctagcgccgatgcggcggaggctacgacatagtaggggttggcaacatagaatacataaaggaaggtttctaagcgtctgagtcgacaatgagcagtcaacagcgatcatttcaactacctaaagggtcaaatctggcttaaaataagtatgaaggtcattgtcatcggcgctggcataggcggactttctgccgccattgctctcgggcaagcaggtcatgatgttgatatatacgaaagctcgtccttcttaaatgaagtcggagccgctgttggccttggtcccaatgcaactcgccttctcaagaattggggttgtgatttcaaactgttgcattctgttcaaatccaacagttcgcagaatatcgcggtggcaaagctgagttcttcaacggcaacgctctgcgggtaagcattgaagagccagtaagacgttggacttagaaggatactcaagtaacgcatggacgtgacagatcgcaatcgactcg

SEQ ID NO: 4227 - DNA, 1299 bp, Muscodor strobelii
  misc_feature: SGI cDNA ID NO. 561092
  misc_feature: Encodes the peptide sequence at SEQ ID NO 4228
atgaaggtcattgtcatcggcgctggcataggcggactttctgccgccattgctctcgggcaagcaggtcatgatgttgatatatacgaaagctcgtccttcttaaatgaagtcggagccgctgttggccttggtcccaatgcaactcgccttctcaagaattggggttgtgatttcaaactgttgcattctgttcaaatccaacagttcgcagaatatcgcggtggcaaagctgagttcttcaacggcaacgctctgcgggtaagcattgaagagccaatcgcaatcgactcgttcgaagacaaatttcatgctgttcatcgaagcgacctgcacaattgcctgcgacaggctgctgaaaagacggcgaaactacacttgaagtcaagggttgcctcagttgatccgatagctggggttgtccactttgaagatggcaactcagtacaaggcgatctaatagttggagcagatggcctccactctcgaacagtacaagcggtaacagactcgggtcgcgagaaagtcagcattaaccaaaactgcttccgctttcttgtccctgcagagaaacttgagaataatcctgcgacagctcacttagtcgacatgatgaaaagcactttgcttctcactacacatcccgataggcgcctcattctgtacccgtgtcgatctggaacactgtacaattgtgctgccttttaccctgctagtgaaacaaatcaggattcagttgccgactcctcctggctcaactccgcggacgtcgatgagcttgttgcccgattctcagattctgaggagcctgcgatggttgagatgtgtaagatggcagaagatctcaaattgtggcgaatcttaacccgtgacccccctccttcgtttgtgaaggggaagctggcgctcgtcggtgatgccgctcaccctatgccacctcatcaagcacagggtgctgcacagtccatcgaagatggcgccgcgctcggagctgcattctcgggcggtgcaatcccaagccaggttgaagacttattacaggtgtataacgaagcccgatatacccatgcggttactatttccatcatgtcaagagtcttcaatgagcggtataagcaaatggcagacacactgaagaaatttctacccaatgcgactatgccagaaagctcgcttctctttgcgtggaactcgcgtccggatgatcaggtgaagaagcttctatcagcgcaaaaggaagatgcagcctcgtcctctgtgcctgaggaacatcagcgaagggagactgtgatggtctaa

SEQ ID NO: 4228 - protein, 432 aa, Muscodor strobelii
  misc_feature: SGI Peptide ID NO. 561092
  misc_feature (2)..(236): Pfam Id: PF01266 Pfam Desc: FAD dependent oxidoreductase
  misc_feature (1)..(366): Pfam Id: PF01494 Pfam Desc: FAD binding domain
  misc_feature (10)..(32): Pfam Id: PF01593 Pfam Desc: Flavin containing amine oxidoreductase
  misc_feature (2)..(30): Pfam Id: PF01266 Pfam Desc: FAD dependent oxidoreductase
  misc_feature (2)..(26): Pfam Id: PF00890 Pfam Desc: FAD binding domain
  misc_feature (2)..(30): Pfam Id: PF01134 Pfam Desc: Glucose inhibited division protein A
  misc_feature (2)..(30): Pfam Id: PF07992 Pfam Desc: Pyridine nucleotide-disulphide oxidoreductase
  misc_feature (1)..(415): NCBI GI: 145253198 Blast Desc: An16g08140 [Aspergillus niger] gi|134083672|emb|CAK47063.1| protein product [Aspergillus niger]
  misc_feature (17)..(409): NCBI GI: 259488030 Blast Desc: TPA: salicylate hydroxylase, (AFU_orthologue; AFUA_3G01600) [Aspergillus nidulans FGSC A4]
  misc_feature (17)..(413): NCBI GI: 238491924 Blast Desc: monoxygenase, [Aspergillus flavus NRRL3357] gi|220697612|gb|EED53953.1| monoxygenase, [Aspergillus flavus NRRL3357]
  misc_feature (101)..(413): NCBI GI: 169773897 Blast Desc: [Aspergillus oryzae RIB40] gi|83769278|dbj|BAE59415.1| protein product [Aspergillus oryzae]
  misc_feature (26)..(409): NCBI GI: 259483894 Blast Desc: TPA: conserved [Aspergillus nidulans FGSC A4]
  misc_feature (100)..(414): NCBI GI: 256724309 Blast Desc: NECHADRAFT_97659 [Nectria haematococca mpVI 77-13-4]
  misc_feature (26)..(383): NCBI GI: 67901172 Blast Desc: AN7573.2 [Aspergillus nidulans FGSC A4] gi|40742963|gb|EAA62153.1| AN7573.2 [Aspergillus nidulans FGSC A4]
  misc_feature (1)..(366): NCBI GI: 169596386 Blast Desc: SNOG_00952 [Phaeosphaeria nodorum SN15] gi|111071327|gb|EAT92447.1| SNOG_00952 [Phaeosphaeria nodorum SN15]
  misc_feature (1)..(394): NCBI GI: 121712252 Blast Desc: salicylate hydroxylase, [Aspergillus clavatus NRRL 1] gi|119401893|gb|EAW12315.1| salicylate hydroxylase, [Aspergillus clavatus NRRL 1]
  misc_feature (1)..(365): NCBI GI: 70982686 Blast Desc: salicylate hydroxylase [Aspergillus fumigatus Af293] gi|66844495|gb|EAL84833.1| salicylate hydroxylase, [Aspergillus fumigatus Af293]
  misc_feature (28)..(396): SWISSPROT Homolog: EC 1.14.13.24 3-hydroxybenzoate 6-monooxygenase
MKVIVIGAGIGGLSAAIALGQAGHDVDIYESSSFLNEVGAAVGLGPNATRLLKNWGCDFKLLHSVQIQQFAEYRGGKAEFFNGNALRVSIEEPIAIDSFEDKFHAVHRSDLHNCLRQAAEKTAKLHLKSRVASVDPIAGVVHFEDGNSVQGDLIVGADGLHSRTVQAVTDSGREKVSINQNCFRFLVPAEKLENNPATAHLVDMMKSTLLLTTHPDRRLILYPCRSGTLYNCAAFYPASETNQDSVADSSWLNSADVDELVARFSDSEEPAMVEMCKMAEDLKLWRILTRDPPPSFVKGKLALVGDAAHPMPPHQAQGAAQSIEDGAALGAAFSGGAIPSQVEDLLQVYNEARYTHAVTISIMSRVFNERYKQMADTLKKFLPNATMPESSLLFAWNSRPDDQVKKLLSAQKEDAASSSVPEEHQRRETVMV

SEQ ID NO: 4229 - DNA, 1608 bp, Muscodor strobelii
  misc_feature: SGI EST ID NO. CUFF.10671.0
  misc_feature: Variant of the nucleotide sequence at SEQ ID NO 4227
agacggcgaaactacacttgaagtcaagggttgcctcagttgatccgatagctggggttgtccactttgaagatggcaactcagtacaaggcgatctaatagttggagcagatggcctccactctcgaacagtacaagcggtaacagactcgggtcgcgagaaagtcagcattaaccaaaactgcttccgctttcttgtccctgcagagaaacttgagaataatcctgcgacagctcacttagtcgacatgatgaaaagcactttgcttctcactacacatcccgataggcgcctcattctgtacccgtgtcgatctggaacactgtacaattgtgctgccttttaccctgctagtgaaacaaatcaggattcagttgccgactcctcctggctcaactccgcggacgtcgatgagcttgttgcccgattctcagattctgaggagcctgcgatggttgagatgtgtaagatggcagaagatctcaaattgtggcgaatcttaacccgtgacccccctccttcgtttgtgaaggggaagctggcgctcgtcggtgatgccgctcaccctatgccacctcatcaagcacagggtgctgcacagtccatcgaagatggcgccgcgctcggagctgcattctcgggcggtgcaatcccaagccaggttgaagacttattacaggtgtataacgaagcccgatatacccatgcggttactatttccatcatgtcaagagtcttcaatgagcggtataagcaaatggcagacacactgaagaaatttctacccaatgcgactatgccagaaagctcgcttctctttgcgtggaactcgcgtccggatgatcaggtgaagaagcttctatcagcgcaaaaggaagatgcagcctcgtcctctgtgcctgaggaacatcagcgaagggagactgtgatggtctaaagaagccattgggcgagtagcacattcggtcttggttcttgtaattcactatgtcaaatgtaaagtataggttgttgaattgaagtgcagatgagcaattgtgacctacctgctgtgcagcaaacgactcctccgagattgtgctgatgcatatatgtgctcaactaggatgggcgcgtgaacaatctttcaatacgtgtcacgaaatcgtaaatgcagtaaggcaatttgcggttcttgccatgaagggctttgaaatttccccccattcttacctttgccattcccggaggacatgaattaggtggtgtagcatatcggaatccggtgagtagttgtgtcacagatgtgttccctgaatgtgcttgaaactccgcccctcgacctcctctgtgatccaacgtagcaccaccacgtcaagtcggtctgaatgcagtattcgcaacgactccgctctagtgtaactttcaattctgcctcatcaactgagggaaatgttgtatattcaccggtgtagttggaatggacaccggccttagcgaccccggaatatcttcgttcgctgagaaagtgaagtcccagcatcaacgactaccggagcgtatatcttcagttgctccagtatagtattaagccagcatgtcttagtcccgttgagataatgttcttc

SEQ ID NO: 4230 - DNA, 501 bp, Muscodor strobelii
  misc_feature: SGI cDNA ID NO. 561093
  misc_feature: Encodes the peptide sequence at SEQ ID NO 4231
atgaactcatcgggtggcaacccaaatgttcaccctgtcacagaattcgagcatggagtgactggagaatgtctttgtggctctatcaaagtcaccattcacgactcggatctattcactcggcgcagggggcatctatgccattgcgtcaactgtcgcaagacatcggggagttttgctgcagcacttctgatcatcgaggcagacaaagtccagattgccgatacgtctgggactctgaaggtgtataaagactctgacacgacgtcaggggtcccattaatgcgattcttttgcagtgaagatgggagtccgataaagggcgaaactgaacaaatgccgggtatggttattctgaaaatggggctctttccacgaataccggccccggagatggagagctttacgcttcatcgacatgcatgggagcagacaatcaagggcactattcagtatagcaccttgcgtggtggggaaattatgaaaaatgattcctcctga

SEQ ID NO: 4231 - protein, 166 aa, Muscodor strobelii
  misc_feature: SGI Peptide ID NO. 561093
  misc_feature (45)..(145): Pfam Id: PF04828 Pfam Desc: Glutathione-dependent formaldehyde-activating enzyme
  misc_feature (6)..(159): NCBI GI: 169595512 Blast Desc: SNOG_00495 [Phaeosphaeria nodorum SN15] gi|111070870|gb|EAT91990.1| SNOG_00495 [Phaeosphaeria nodorum SN15]
  misc_feature (22)..(154): NCBI GI: 154294503 Blast Desc: [Botryotinia fuckeliana B05.10] gi|150844694|gb|EDN19887.1| [Botryotinia fuckeliana B05.10]
  misc_feature (20)..(154): NCBI GI: 145246212 Blast Desc: An12g02760 [Aspergillus niger] gi|134080069|emb|CAK41115.1| protein product [Aspergillus niger]
  misc_feature (20)..(153): NCBI GI: 67539870 Blast Desc: AN6105.2 [Aspergillus nidulans FGSC A4] gi|40738890|gb|EAA58080.1| [Aspergillus nidulans FGSC A4] gi|259479706|tpe|CBF70175.1| TPA: conserved [Aspergillus nidulans
  misc_feature (22)..(154): NCBI GI: 255931113 Blast Desc: Pc12g02210 [Penicillium chrysogenum Wisconsin 54-1255] gi|211581732|emb|CAP79848.1| Pc12g02210 [Penicillium chrysogenum Wisconsin 54-1255]
  misc_feature (20)..(155): NCBI GI: 238506325 Blast Desc: DUF636 domain protein [Aspergillus flavus NRRL3357] gi|220689077|gb|EED45428.1| DUF636 domain protein [Aspergillus flavus NRRL3357]
  misc_feature (20)..(155): NCBI GI: 169785329 Blast Desc: [Aspergillus oryzae RIB40] gi|83775873|dbj|BAE65992.1| protein product [Aspergillus oryzae]
  misc_feature (24)..(104): NCBI GI: 156032918 Blast Desc: [Sclerotinia sclerotiorum 1980] gi|154699267|gb|EDN99005.1| [Sclerotinia sclerotiorum 1980]
  misc_feature (20)..(155): NCBI GI: 159124606 Blast Desc: DUF636 domain protein [Aspergillus fumigatus A1163]
  misc_feature (20)..(155): NCBI GI: 119472081 Blast Desc: NFIA_057230 [Neosartorya fischeri NRRL 181] gi|119406423|gb|EAW16374.1| conserved [Neosartorya fischeri NRRL 181]
MNSSGGNPNVHPVTEFEHGVTGECLCGSIKVTIHDSDLFTRRRGHLCHCVNCRKTSGSFAAALLIIEADKVQIADTSGTLKVYKDSDTTSGVPLMRFFCSEDGSPIKGETEQMPGMVILKMGLFPRIPAPEMESFTLHRHAWEQTIKGTIQYSTLRGGEIMKNDSS

SEQ ID NO: 4232 - DNA, 706 bp, Muscodor strobelii
  misc_feature: SGI EST ID NO. CUFF.10677.0
  misc_feature: Variant of the nucleotide sequence at SEQ ID NO 4230
cttgcatatcgcctcgggtgtttataataaagagtgctagaaggattgtaaaacgaataatggtatgaaaaattgggatatttgtatagatcttctctctctcgacacttttcttcatgaactcatcgggtggcaacccaaatgttcaccctgtcacagaattcgagcatggagtgactggagaatgtctttgtggctctatcaaagtcaccattcacgactcggatctattcactcggcgcagggggcatctatgccattgcgtcaactgtcgcaagacatcggggagttttgctgcagcacttctgatcatcgaggcagacaaagtccagattgccgatacgtctgggactctgaaggtgtataaagactctgacacgacgtcaggggtcccattaatgcgattcttttgcagtgaagatgggagtccgataaagggcgaaactgaacaaatgccgggtatggttattctgaaaatggggctctttccacgaataccggccccggagatggagagctttacgcttcatcgacatgcatgggagcagacaatcaagggcactattcagtatagcaccttgcgtggtggggaaattatgaaaaatgattcctcctgaagtcttaagacagacttggtggatttataaagaccacatgtaatttttccgagatggccacagcgcaatccaaataccatacagagata

SEQ ID NO: 4233 - DNA, 1590 bp, Muscodor strobelii
  misc_feature: SGI cDNA ID NO. 561094
  misc_feature: Encodes the peptide sequence at SEQ ID NO 4234
atgtcttttccaaacgatcttccatcggacgggggtttgtcaattctatcccaagaaacgactaaaatatcataccttgttcttgccgtctcgctggcctttttctacttcttgcgtcgcgctaaggcgacgaactacccaatagtaaatccaagaaaatggttcgagttcagcgatgcaagagtcaagaaggatttcatgatcagcgcccgaacccttgtgcacgagggactgaagaaatatcctggtaggccgttcaaagtcaacaccgatatgacagacatgatcgttctgcccaacaactatgccgatgaagtccgcaacatacgcgaactaagcttcccggccagtatacgaaaacacttttattccgatcttaaaagcttcgaaagcatggcccctgctggcggcaacggatctcaattggcaaagtcggtcgtacaaagacaactgacgcaccagctggcgtacgtgacacaaccgctttctgaggaatgcgctacagtattgcaagaggtgttgacggacaacaaagactggcacgagctaccgtcgctgatgcagtctaccttgatgattgtctatagactctcgtcgagagtactacttggtgatgagctttgtcacgacgaatattggcgtaaaatagtcatggagcacacaaccaccgtcatggatgctgttctgcaagttagaatgtggccctcatggctgcgacccatcgtgcattggtttcttccttcgtgtcgcgaatcccgcaagcagctgcgacgggcacgagagatcattgatccagtgctcgagaagcggcgggagctgagaaaagaattgatagcaaagggtgagagcccgaagatgatgaacgacggtcttgaatggcttgaggaaaactcaaaaggcgaaaactatgacgcagctatcctccaattagccttgtcgatggttgccatgcatacaacaactgatctcctaacccagagcctgctggatattatgacgcatcctgagatcatcgggtcattgcgaaaagagatcattgaaacgatgggccagggccgctgggacaggacgtctttacagaacctcaagcttctcgatagtgtgctcaaagaaacgcaaagaatgaagccaatagagatggcaacaatgaaaagggttgctctgaaagacatcaagctatccgacgggtcacagataccgaaagggggagacatgattgtgtacgctggcaatcactgggaccctagtgttcatgaagacccgaatacttgggatccttaccgtttctataaccgccgccaagccgcaaaaacggagaaagaggagaaacaatatctgctgtcaagtaccagtcctgaccatatggccttcggacacggccagcacgcctgtccgggtcgtttctttgtcgcggacgagatcaagatcgctttatgtcatttgcttctcaagtatgattggaaactagcggagggatgcaatgccgattccatgacgatgggattcactttgctcgcgaatcccattgcgaaagtgatggtaaagaggagagaggaagaaataagccttgcgggtcgtattgattcgtag

SEQ ID NO: 4234 - protein, 529 aa, Muscodor strobelii
  misc_feature: SGI Peptide ID NO. 561094
  misc_feature (47)..(516): Pfam Id: PF00067 Pfam Desc: Cytochrome P450
  misc_feature (328)..(516): Pfam Id: PF00067 Pfam Desc: Cytochrome P450
  misc_feature (8)..(523): NCBI GI: 261204397 Blast Desc: trichothecene C-8 hydroxylase [Ajellomyces dermatitidis SLH14081] gi|239587197|gb|EEQ69840.1| trichothecene C-8 hydroxylase [Ajellomyces dermatitidis SLH14081]
  misc_feature (8)..(523): NCBI GI: 239614263 Blast Desc: trichothecene C-8 hydroxylase [Ajellomyces dermatitidis ER-3]
  misc_feature (8)..(523): NCBI GI: 240282093 Blast Desc: cytochrome P450 [Ajellomyces capsulatus H143]
  misc_feature (23)..(523): NCBI GI: 154273751 Blast Desc: HCAG_07149 [Ajellomyces capsulatus NAm1] gi|150415335|gb|EDN10688.1| HCAG_07149 [Ajellomyces capsulatus NAm1]
  misc_feature (23)..(523): NCBI GI: 226286236 Blast Desc: P450 monooxygenase [Paracoccidioides brasiliensis Pb01]
  misc_feature (23)..(523): NCBI GI: 225679929 Blast Desc: P450 monooxygenase [Paracoccidioides brasiliensis Pb03]
  misc_feature (13)..(523): NCBI GI: 122938156 Blast Desc: GA14 synthase [Fusarium proliferatum]
  misc_feature (13)..(523): NCBI GI: 3549879 Blast Desc: cytochrome P450 monooxygenase [Gibberella fujikuroi]
  misc_feature (19)..(523): NCBI GI: 42661492 Blast Desc: GA14-synthase [Fusarium proliferatum]
  misc_feature (14)..(518): NCBI GI: 256726660 Blast Desc: NECHADRAFT_32184 [Nectria haematococca mpVI 77-13-4]
  misc_feature (36)..(517): SWISSPROT Homolog: EC 1.14.13.78 Ent-kaurene oxidase
MSFPNDLPSDGGLSILSQETTKISYLVLAVSLAFFYFLRRAKATNYPIVNPRKWFEFSDARVKKDFMISARTLVHEGLKKYPGRPFKVNTDMTDMIVLPNNYADEVRNIRELSFPASIRKHFYSDLKSFESMAPAGGNGSQLAKSVVQRQLTHQLAYVTQPLSEECATVLQEVLTDNKDWHELPSLMQSTLMIVYRLSSRVLLGDELCHDEYWRKIVMEHTTTVMDAVLQVRMWPSWLRPIVHWFLPSCRESRKQLRRAREIIDPVLEKRRELRKELIAKGESPKMMNDGLEWLEENSKGENYDAAILQLALSMVAMHTTTDLLTQSLLDIMTHPEIIGSLRKEIIETMGQGRWDRTSLQNLKLLDSVLKETQRMKPIEMATMKRVALKDIKLSDGSQIPKGGDMIVYAGNHWDPSVHEDPNTWDPYRFYNRRQAAKTEKEEKQYLLSSTSPDHMAFGHGQHACPGRFFVADEIKIALCHLLLKYDWKLAEGCNADSMTMGFTLLANPIAKVMVKRREEEISLAGRIDS

SEQ ID NO: 4235 - DNA, 1918 bp, Muscodor strobelii
  misc_feature: SGI EST ID NO. CUFF.10686.0
  misc_feature: Variant of the nucleotide sequence at SEQ ID NO 4233
ttttaagggattgctctacttcattttgatcgtgcgatttgctattaaactaatagcatctccaattacttcccttcgaattgatatcccttagtgctgttggtatcttgagtatgtcttttccaaacgatcttccatcggacgggggtttgtcaattctatcccaagaaacgactaaaatatcataccttgttcttgccgtctcgctggcctttttctacttcttgcgtcgcgctaaggcgacgaactacccaatagtaaatccaagaaaatggttcgagttcagcgatgcaagagtcaagaaggatttcatgatcagcgcccgaacccttgtgcacgagggactgaagaaatatcctggtaggccgttcaaagtcaacaccgatatgacagacatgatcgttctgcccaacaactatgccgatgaagtccgcaacatacgcgaactaagcttcccggccagtatacgaaaacacttttattccgatcttaaaagcttcgaaagcatggcccctgctggcggcaacggatctcaattggcaaagtcggtcgtacaaagacaactgacgcaccagctggcgtacgtgacacaaccgctttctgaggaatgcgctacagtattgcaagaggtgttgacggacaacaaagactggcacgagctaccgtcgctgatgcagtctaccttgatgattgtctatagactctcgtcgagagtactacttggtgatgagctttgtcacgacgaatattggcgtaaaatagtcatggagcacacaaccaccgtcatggatgctgttctgcaagttagaatgtggccctcatggctgcgacccatcgtgcattggtttcttccttcgtgtcgcgaatcccgcaagcagctgcgacgggcacgagagatcattgatccagtgctcgagaagcggcgggagctgagaaaagaattgatagcaaagggtgagagcccgaagatgatgaacgacggtcttgaatggcttgaggaaaactcaaaaggcgaaaactatgacgcagctatcctccaattagccttgtcgatggttgccatgcatacaacaactgatctcctaacccagagcctgctggatattatgacgcatcctgagatcatcgggtcattgcgaaaagagatcattgaaacgatgggccagggccgctgggacaggacgtctttacagaacctcaagcttctcgatagtgtgctcaaagaaacgcaaagaatgaagccaatagagatggcaacaatgaaaagggttgctctgaaagacatcaagctatccgacgggtcacagataccgaaagggggagacatgattgtgtacgctggcaatcactgggaccctagtgttcatgaagacccgaatacttgggatccttaccgtttctataaccgccgccaagccgcaaaaacggagaaagaggagaaacaatatctgctgtcaagtaccagtcctgaccatatggccttcggacacggccagcacgcctgtccgggtcgtttctttgtcgcggacgagatcaagatcgctttatgtcatttgcttctcaagtatgattggaaactagcggagggatgcaatgccgattccatgacgatgggattcactttgctcgcgaatcccattgcgaaagtgatggtaaagaggagagaggaagaaataagccttgcgggtcgtattgattcgtagattgatatagagcaatatcaaagttacattctgcgaaagaaggattcccgatcaccctattcatatggcctcactgactacgcaaatgcgtatatgcctatatatatgaatacttgcttggcctagaatgtcgatgatcaagcgatagttacatcagattgctggactggttttggagatcttaggcttagaaatctgtgcctggtcaattctgg

SEQ ID NO: 4236 - DNA, 2538 bp, Muscodor strobelii
  misc_feature: SGI cDNA ID NO. 561095
  misc_feature: Encodes the peptide sequence at SEQ ID NO 4237
atgcgacgttatggggccagggcgttcaccggcccatccgctgagcgccttatattctcaatttcaacaataactctcctctcagtcaaatcattacacatctggctggcgctgcccgcattttcttatgtcgaggctctggtctgggggacgtcattttacgttccggaaatcgtcctattgctcttgctacgggggctcctttccacccctaccccgacaaaaacatggctacaatcggtagctctcatcaccggattcttgtggacggcatacttgctcggtatagcagctacagaattttgcttctttgctgttgttggctcagaagtgcattggagcaatgccagtgcctttatgggggactcaggcgggaagatggcattgacgggactgattccctttgtcattgcattagccatcctcgttaccactagttggctcgcgcaaagcgcatgtttcgaaatcggccattttgcgatagatacgattgggtttcttctacgcgcagcacacaaagaaatatccaccagactatcaccccggctaggaggaggaagagacgcaatgccatacgagttcttggaagtcttgagctggaaagagagcgaaggcagcgactcggattctcgatcggatacttcttcccctcaattccgacacaagattaccggcgttgtcctcgctgttcatttgctctctgtccttacacggcccgctaatgactatcctccgtcactcttcctgactgcgccactacttcctcttgctggattgtcgtccgaaagtctaggaagccctgatgtcgtcctttctaccgctaatggcctagatttctgctccttgaattcttcagcgatttccgatctacctaaatgggaatggctacctcatggtccgcctctagatggattttcggactggtatacccctggcctcgcgcattacagtgcacattcggatcccatcagactcacgaacctggaagacgagctcctgccgggcttagcggaatcgttgaagagtctacaaattagacatgtcatggtcattattctggagagcacacgagcagacgtgtttccacttaccgaagagagccacacatggaaaacgttaatgcaatcgtacccaaatacttcatcagtcagtgaagaggccagtatggctttgaagaaattcacgaagaccgccaaacatttaacagggtggaacggaaaacccggccgaggcggacttcatgcaacgaatgcattgacaactgcgtcctacacactgaaaagcatgattgggactttgtgcggcattagtcctatgctggtagacttcgctgtcgaacacacgagacatccttatcaaccttgtctgccccagatactgcgcgcgttcaacctattggaacaagacgacgatttggaacgcaccgaatcagaattgcaagatcctatgactttcaaatggtcaaccaagttcatgcaatctgtcgtgaaggactatgactaccaagacgttcttatggagaaaattggttacctctcggatgaggtgattagcaaagagtatttgagaagctacctggccaagttcggccgcgtgacagatgccgatgttaactggagagtaatgataagcaaagaggctgacaatacacgaacagattatggcatgcctgaagtaactttggacaaatatatccgagatgctttcgtcaccgcaaacgagaacaacgagagacttttccttacgcatctcaccagcacgtcacaccaccccttccatattccgaaaggcgatcctcgtcctctacccgaaggctccagtttccctgacctatggcattatatgacgagcgtcaactatgtcgatgaatggattggtacgattctaagaactctagacgaagaaaatgtagcgaatgacacgttggttgtcttcgtcggagatcatggcctttccatatccgagaaccatgcgatcactccctacgagaaccctcacaaggccaatttccacattcctctgatattctctcacccacaactacctccgatacggattgacgacgctgtttcctcgttacaaattctccccagtatcctagatttactccaggcgacagattcactcccgaacaagtcaaaggaagcggctctggatttaatgcacaactatgaaggtcaatctttgctccgacccctacgtactgagtccccagagacgaatcacgtgctctggcagttcgcgattagtaacccgggcggccgaatggttctcgtacgtgacgcccggcagccggaacgacatttgatattcccacttgtacaaggggagaagtggcgatataccgatgtggttcaagaccccgatgaaatcaatccagtattggcatttagtcttaagactcttgtctcattagttggagctcagttcgggaatgagaccggccagtggatatatgaggcggtttgtgtgacggagtggtggatcaaggataaccatctgcgttggaacccgccggagtctccagaccttgactag

SEQ ID NO: 4237 - protein, 845 aa, Muscodor strobelii
  misc_feature: SGI Peptide ID NO. 561095
  misc_feature (344)..(719): Pfam Id: PF00884 Pfam Desc: Sulfatase
  misc_feature (614)..(703): Pfam Id: PF00884 Pfam Desc: Sulfatase
  misc_feature (15)..(836): NCBI GI: 242792376 Blast Desc: sulfatase domain protein [Talaromyces stipitatus ATCC 10500] gi|218718528|gb|EED17948.1| sulfatase domain protein [Talaromyces stipitatus ATCC 10500]
  misc_feature (8)..(844): NCBI GI: 46112799 Blast Desc: FG02901.1 [Gibberella zeae PH-1]
  misc_feature (15)..(836): NCBI GI: 242811335 Blast Desc: conserved [Talaromyces stipitatus ATCC 10500] gi|218714066|gb|EED13489.1| conserved [Talaromyces stipitatus ATCC 10500]
  misc_feature (15)..(836): NCBI GI: 256730095 Blast Desc: NECHADRAFT_104910 [Nectria haematococca mpVI 77-13-4]
  misc_feature (3)..(844): NCBI GI: 256719896 Blast Desc: NECHADRAFT_65025 [Nectria haematococca mpVI 77-13-4]
  misc_feature (1)..(836): NCBI GI: 256724331 Blast Desc: NECHADRAFT_53482 [Nectria haematococca mpVI 77-13-4]
  misc_feature (15)..(826): NCBI GI: 46139231 Blast Desc: FG11130.1 [Gibberella zeae PH-1]
  misc_feature (15)..(836): NCBI GI: 46114958 Blast Desc: FG03321.1 [Gibberella zeae PH-1]
  misc_feature (13)..(837): NCBI GI: 121717193 Blast Desc: sulfatase domain protein [Aspergillus clavatus NRRL 1] gi|119404193|gb|EAW14610.1| sulfatase domain protein [Aspergillus clavatus NRRL 1]
  misc_feature (14)..(837): NCBI GI: 71002830 Blast Desc: sulfatase domain protein [Aspergillus fumigatus Af293] gi|66853734|gb|EAL94058.1| sulfatase domain protein [Aspergillus fumigatus Af293]
MRRYGARAFTGPSAERLIFSISTITLLSVKSLHIWLALPAFSYVEALVWGTSFYVPEIVLLLLLRGLLSTPTPTKTWLQSVALITGFLWTAYLLGIAATEFCFFAVVGSEVHWSNASAFMGDSGGKMALTGLIPFVIALAILVTTSWLAQSACFEIGHFAIDTIGFLLRAAHKEISTRLSPRLGGGRDAMPYEFLEVLSWKESEGSDSDSRSDTSSPQFRHKITGVVLAVHLLSVLTRPANDYPPSLFLTAPLLPLAGLSSESLGSPDVVLSTANGLDFCSLNSSAISDLPKWEWLPHGPPLDGFSDWYTPGLAHYSAHSDPIRLTNLEDELLPGLAESLKSLQIRHVMVIILESTRADVFPLTEESHTWKTLMQSYPNTSSVSEEASMALKKFTKTAKHLTGWNGKPGRGGLHATNALTTASYTLKSMIGTLCGISPMLVDFAVEHTRHPYQPCLPQILRAFNLLEQDDDLERTESELQDPMTFKWSTKFMQSVVKDYDYQDVLMEKIGYLSDEVISKEYLRSYLAKFGRVTDADVNWRVMISKEADNTRTDYGMPEVTLDKYIRDAFVTANENNERLFLTHLTSTSHHPFHIPKGDPRPLPEGSSFPDLWHYMTSVNYVDEWIGTILRTLDEENVANDTLVVFVGDHGLSISENHAITPYENPHKANFHIPLIFSHPQLPPIRIDDAVSSLQILPSILDLLQATDSLPNKSKEAALDLMHNYEGQSLLRPLRTESPETNHVLWQFAISNPGGRMVLVRDARQPERHLIFPLVQGEKWRYTDVVQDPDEINPVLAFSLKTLVSLVGAQFGNETGQWIYEAVCVTEWWIKDNHLRWNPPESPDLD

SEQ ID NO: 4238 - DNA, 3585 bp, Muscodor strobelii
  misc_feature: SGI cDNA ID NO. 561096
  misc_feature: Encodes the peptide sequence at SEQ ID NO 4239
atgccttcaattaccgtgggccccgagggcgatcccacatatccgacagatccgccgagagactcaccaacgccaactccttctcctgctcctactaatacaccgtttccgaccaacacgccttctccaaccaacacgccttcccctaccaagaagcccacacgtagttgtgagggcggcaagccaacatcggctggatcaacaacagcgtcgtctacatcttcgtcttcaacaagaattccgactccgctttgcacgggattgtcttctttttcacgattgctggtgtctatcaacggaaacgagtactacgtgccgtcgacgggagaccctgtcaatctggtactggacgataaggatgcaattgaagtgagcatcgcgcctgatcgggttgttgtgggtggcgttcaattctccgtgccggccactccgcttccttctgctacggacgtctcttctggaggatatcaggtgtccttctcgccccgacgcttaccaagtcccgccctagcatctagtggcgccgaaggccaagcatatgccaagaaagttgccgaagactatatcacattcgcggatggcatgactgagccggtcggcgcgtttttagctgtagtgcacgacctcttgattagggcggatgctccttcagttgacgcgggcgacgcattgcttggagatgagggggagttattcgagctacttgtgtccgttgctaaagacgtctctgttgcattcgacgatcctcaccaagaagaatgggagggatttctgaatgaggtctctctcttagattccgagaacgatgatgatgacgacccagatgacgacgacgatgatgatggggacgacgattcaccaccagattctcccgacgagtgcccagagcctggtgtcgatcccgatgggccggatggaccagataaccctgactcgggagacgagccagattctcgtaatcagactgcttcggagtacatagacggcgcatttgccggcttacctggcatacaaaatctttgccaaagagcaccatggactactgaacggcttcttaatgtggcgaaatctctctcggccattaatgcaacctcgagcaatcatacgacagtgatacaacggttgcaaagtaatcgcaagagtttattgagtaacgaacctcaaggcgcggacggtctcaaaagtggtggcggcgtcatcgtgtccggagctgctggattccacatcgtctctagaatacaaatgtcgactgtcacggatcttttcgcatatcgcgactggtacatgaagacagagcctgaagtttctgataatgatggagaatggtacttcaattcgaccgtcaactggcttgatggcggagcttccctcaggaatgggggtgggaaacactctgcaggctttgggtacttcgcccacttatctaccgctcaaggttaccctctcatgtgggcaatggagaacgccacagcaactatttcgtgggtgaacttacatggtcagcccagaagagttcaagcaatgaatcagccgatcgaaggtcaaggttttggttattgggatccggctggcgaagggaaaactgtttttatccttgactcaggattcggcttcagagccgcaggaaatctggaagaaattgggctcgatgcgaacaatttcgaagcaaatagttattgtgtgcctaacgctttgactttgccgggctacgacgaaaactatctgtaccgggaagatgcagacgatacctatttccatccgcagacacgccaatatcacgggcacggcactcaaaatgcaatgctggctgttggtcgcaattacggcattgcgcctggagccaacgcatacattgtgaaagtaacaaacgctttcacagctgaagataacctcccaactaccagtatgcttgagcctgaagcactagatcacgctcttacgtacattatcaacctagtagtgcagtacggaaaacaaggacaagctgtggtgagcttttccggatttctacagcctgacttgaggaacagaggagcctggcagaaaatgtacaaaaatcaattgaaccggcttgatctagtaggtgtagcttgggttcaagcagctggaaatgcaggattcggcgttcagaatatccagtatctgggccgaacattgcctcaaaagctgggaaagcgttcgaactcaatcataacagtcggtggtactaacgcaaagggtcgatactggcttcaaacaacgcctgaagggccacctggtgcttcggatcccggacacatcactgtttgggcacaagctaccgaaatccaagtgaagggtccagatggagtggaaaggcaatacgagggtacttcatactctgccccacaagtggctggtctcctcgcatattacctagcacaatatccagagtcgttcccccaaccagggaaagagctcgttatgcaattgaaaaggacgcttgtgcatttttcttacaggagaatacctatgaatcgacaggtccctcgtggcactcagctcccctatgcccggccaactgatatcaatgttgcatacaataattattggggccctcagccaaactgtgcagatgcgggtggcgctggcaataaaagatctttctctgcagacgaactcatcaaacatgaaaagcgccaatcggactcagatgacccagactcctcgggttgggcctgtccatactcgttagctacgtcaaccagaccgagtgaaagcaccatcagcacaggctctaccggcgcccctgaaagcagcgcaagcctgaccagtagtgccgctacgagcagcctcgtcacgtctagcattgcgtcgctgagtagcagcgcaagttcgacgacatcggatggtgaatggctgacaaacctactgactgtcacgctgccaccaggacctggcgaaacgacctctcaggagactgtgtttactttcacatctcctaagcccacctcgacaagtagtcaatctgcaattgcgagctctacaacatcgagtgaggaatggttaactaacttgctgactatcacgctacctccaggaccgggcgagacaggctcgagagaaaccgtctttactttcacatctcccaagggttcacctacgagtatcccggccaccaccgagagcccaacagtatcagctagcgaatggctaacaaacttacttacaatcacgttgcctcccggtccaggtgaaacgacctctagagaaactgtgtttactttcacgtctcctaaaccctctgagaccaatagtcaggtcgcgcccactgcgacagcggtgacgattggagtcagagctgcacagaaagcgattcatcctggagttgcgcatgtgtctggaaaggtgcgtgcgacggaaaggttgaagggaagtgcgctgagtcctgtggtgcatattccattggggattgcgacaccaatgtcgacaaaacctcgtatccatacggcaaatgttcctgcatgcaattaccctgccgagacactaggggttgcaccgtcggtacaacctgcccgcctggacaagaagcagtttgccacttcgacagcgttggcgctggactga

SEQ ID NO: 4239 - protein, 1194 aa, Muscodor strobelii
  misc_feature: SGI Peptide ID NO. 561096
  misc_feature (508)..(832): Pfam Id: PF00082 Pfam Desc: Subtilase family
  misc_feature (695)..(832): Pfam Id: PF00082 Pfam Desc: Subtilase family
  misc_feature (594)..(854): NCBI GI: 169605173 Blast Desc: SNOG_05604 [Phaeosphaeria nodorum SN15] gi|160706719|gb|EAT86668.2| SNOG_05604 [Phaeosphaeria nodorum SN15]
MPSITVGPEGDPTYPTDPPRDSPTPTPSPAPTNTPFPTNTPSPTNTPSPTKKPTRSCEGGKPTSAGSTTASSTSSSSTRIPTPLCTGLSSFSRLLVSINGNEYYVPSTGDPVNLVLDDKDAIEVSIAPDRVVVGGVQFSVPATPLPSATDVSSGGYQVSFSPRRLPSPALASSGAEGQAYAKKVAEDYITFADGMTEPVGAFLAVVHDLLIRADAPSVDAGDALLGDEGELFELLVSVAKDVSVAFDDPHQEEWEGFLNEVSLLDSENDDDDDPDDDDDDDGDDDSPPDSPDECPEPGVDPDGPDGPDNPDSGDEPDSRNQTASEYIDGAFAGLPGIQNLCQRAPWTTERLLNVAKSLSAINATSSNHTTVIQRLQSNRKSLLSNEPQGADGLKSGGGVIVSGAAGFHIVSRIQMSTVTDLFAYRDWYMKTEPEVSDNDGEWYFNSTVNWLDGGASLRNGGGKHSAGFGYFAHLSTAQGYPLMWAMENATATISWVNLHGQPRRVQAMNQPIEGQGFGYWDPAGEGKTVFILDSGFGFRAAGNLEEIGLDANNFEANSYCVPNALTLPGYDENYLYREDADDTYFHPQTRQYHGHGTQNAMLAVGRNYGIAPGANAYIVKVTNAFTAEDNLPTTSMLEPEALDHALTYIINLVVQYGKQGQAVVSFSGFLQPDLRNRGAWQKMYKNQLNRLDLVGVAWVQAAGNAGFGVQNIQYLGRTLPQKLGKRSNSIITVGGTNAKGRYWLQTTPEGPPGASDPGHITVWAQATEIQVKGPDGVERQYEGTSYSAPQVAGLLAYYLAQYPESFPQPGKELVMQLKRTLVHFSYRRIPMNRQVPRGTQLPYARPTDINVAYNNYWGPQPNCADAGGAGNKRSFSADELIKHEKRQSDSDDPDSSGWACPYSLATSTRPSESTISTGSTGAPESSASLTSSAATSSLVTSSIASLSSSASSTTSDGEWLTNLLTVTLPPGPGETTSQETVFTFTSPKPTSTSSQSAIASSTTSSEEWLTNLLTITLPPGPGETGSRETVFTFTSPKGSPTSIPATTESPTVSASEWLTNLLTITLPPGPGETTSRETVFTFTSPKPSETNSQVAPTATAVTIGVRAAQKAIHPGVAHVSGKVRATERLKGSALSPVVHIPLGIATPMSTKPRIHTANVPACNYPAETLGVAPSVQPARLDKKQFATSTALALD

SEQ ID NO: 4240 - DNA, 939 bp, Muscodor strobelii
  misc_feature: SGI cDNA ID NO. 561097
  misc_feature: Encodes the peptide sequence at SEQ ID NO 4241
atgatcgggatctctgtagtgctggaagatgaagtaacagacgggcttgtctctcctgatgacgttgaacctgaagtcgtttcctttgattctgaggtagttgatgagccgggatcttcgcttgatgttgacttcgtcgttgaatcattgcctgacgttggcgtcgatgttggtgtcgatgttggcttggttgtttcgggaggaggtggtggacttggaagcggactaggttcagttgttgttgggctgacagaaggcggcacacctccaataggagtctctgtagaggcactcgaggacggtggtggttcaacgaaagtatcagtgctacttgccgaaggtggtggtcccactagagtatcggttggagatgatggcggtggccaagccagagtatcagtacttgttggcggtggtagtgatccatctagagtagaagtagttggaaacggtacagtcccatccagggtagaggtactagaaaacgggaatgatccactgcttgactgcgatggaaaagtaggtataacgccagaggggtctgtcgaacttgacgaccccgactctgtcattggtactcccacagacgtggaggaaccactctccgacgtgctcgttcctataacaggtactgtcgagctactttgcgagacgatgtctgagctgaaggttgagctgcttataggaaccgatgatggcgtgccttctgtcgtaatagtagcaccactgctcgttggaagtgcagaagtcgagcttgtgtcagaatccgtggacacacccattggcgatgttccctctattgtgccaggggcagatacggaagagctggtcaaggtagtagtaccaagattagaagcggaggttaggctccccgaactctccgtaccagatgttggtaccgaggtgcttgagctggcaagagtagaagatccagcttga

SEQ ID NO: 4241 - protein, 312 aa, Muscodor strobelii
  misc_feature: SGI Peptide ID NO. 561097
MIGISVVLEDEVTDGLVSPDDVEPEVVSFDSEVVDEPGSSLDVDFVVESLPDVGVDVGVDVGLVVSGGGGGLGSGLGSVVVGLTEGGTPPIGVSVEALEDGGGSTKVSVLLAEGGGPTRVSVGDDGGGQARVSVLVGGGSDPSRVEVVGNGTVPSRVEVLENGNDPLLDCDGKVGITPEGSVELDDPDSVIGTPTDVEEPLSDVLVPITGTVELLCETMSELKVELLIGTDDGVPSVVIVAPLLVGSAEVELVSESVDTPIGDVPSIVPGADTEELVKVVVPRLEAEVRLPELSVPDVGTEVLELARVEDPA

SEQ ID NO: 4242 - DNA, 1485 bp, Muscodor strobelii
  misc_feature: SGI cDNA ID NO. 561098
  misc_feature: Elevated expression when VOC is produced
  misc_feature: Encodes the peptide sequence at SEQ ID NO 4243
atggattatgatacggagagctcagaacccctgagcggactcaacattctgctcatatgtttcataggctacttcgtgttggattctctttggaggatcacctacgatcctctagctgcggtaccagggccacgtttgtgtgcaatgactcggataccgtactggtatgcgacagtcagaggtcaaaatgtgttctggatacacaagcttcaccaaaaatacggtgatgttgttcggttcgggccgcgcgatgtatcatttgctagcgccgatgcgtggaagccagtaaacggagtcgtctggaataaacgggagaacgaaaaggcgttagagtacttcgtatcaccaatgaacggcgtccagagtatgcttactgcaaactatgagaaccatgccaaggttcgacgtgttttcgcgccgggtttctccgaaagagcagcccgacaacaggagccactggtcaagaaatacaccaaccttctggtaaccaagcttgcagagctctctaggaatgatcaacctatagagctgacaagcctattcaacttcaccttattcgacatcacggcggagatggctttcgggtgtcagctccgccagctggaaagagccgagtactcgtcatgggtaaaagcaatatttgggcagctcaaagcattgccagtgatgtccatcatacactattatcctgtcttgacatggatgttcaagatatttcagcctcaatggatgcagcagaagaggatagaccattgcgctttttcagctgagctttctgatcgccgtgtgcgcgacggtccgacatacgagaacgatctttggacgctcgcaaccaagggtctgacgaagaaagaaatgcactccaacgcagaattcttcatgattgcagggtccgagactgtcgcaacactcctcgctggcgcaatattctatctccaaaaaagcccgcatgtcatgaagcgactgaacaaagagcttcgcgacgccttttccacagtggacgacatcacattcgacggactagcccagctgccatatctcaatgcttgcgtgaaagagtctatgcgtatcttccctgctgtcgcagtcggatctcctcggcttgtgtatgaaggcggacaagagatctgtggatattggtttcctgaagcgactcggatctcggtgcatcactactcaacgtaccattctgctgcgaacttcaaagaccctgagaaattcgcgccagaacgctggctaggcgacccactctacgccgatgacgttcgtgaagcacaccaacctttctcctcgggtccacgagattgtatcggccaagccttcgcaagacacgagaccaagatggttctcgccgctgttttgctccagtttgatctcgagctatgtgatgagagtttagactgggacaagacgctgttgtgctacggactgtgggacaaaggttcgattgagtgtcgtctgcgtccttatacaggtcgagcatag

SEQ ID NO: 4243 - protein, 494 aa, Muscodor strobelii
  misc_feature: SGI Peptide ID NO. 561098
  misc_feature (41)..(486): Pfam Id: PF00067 Pfam Desc: Cytochrome P450
  misc_feature (293)..(470): Pfam Id: PF00067 Pfam Desc: Cytochrome P450
  misc_feature (11)..(494): NCBI GI: 46114698 Blast Desc: FG03191.1 [Gibberella zeae PH-1]
  misc_feature (10)..(488): NCBI GI: 189204680 Blast Desc: cytochrome P450 46A1 [Pyrenophora tritici-repentis Pt-1C-BFP] gi|187985774|gb|EDU51262.1| cytochrome P450 46A1 [Pyrenophora tritici-repentis Pt-1C-BFP]
  misc_feature (34)..(488): NCBI GI: 116208430 Blast Desc: CHGG_03508 [Chaetomium globosum CBS 148.51] gi|88184105|gb|EAQ91573.1| CHGG_03508 [Chaetomium globosum CBS 148.51]
  misc_feature (14)..(488): NCBI GI: 169609919 Blast Desc: SNOG_08051 [Phaeosphaeria nodorum SN15] gi|111063207|gb|EAT84327.1| SNOG_08051 [Phaeosphaeria nodorum SN15]
  misc_feature (22)..(492): NCBI GI: 145605329 Blast Desc: MGG_09945 [Magnaporthe grisea 70-15] gi|145013150|gb|EDJ97791.1| MGG_09945 [Magnaporthe grisea 70-15]
  misc_feature (9)..(489): NCBI GI: 145247518 Blast Desc: An12g09560 [Aspergillus niger] gi|134080747|emb|CAL00861.1| protein product [Aspergillus niger]
  misc_feature (30)..(492): NCBI GI: 169783630 Blast Desc: [Aspergillus oryzae RIB40] gi|83775021|dbj|BAE65144.1| protein product [Aspergillus oryzae]
  misc_feature (16)..(488): NCBI GI: 240108758 Blast Desc: Cytochrome P450 family protein [Coccidioides posadasii C735 delta SOWgp]
  misc_feature (10)..(489): NCBI GI: 115391773 Blast Desc: [Aspergillus terreus NIH2624] gi|114194315|gb|EAU36015.1| [Aspergillus terreus NIH2624]
  misc_feature (37)..(489): NCBI GI: 224969386 Blast Desc: cytochrome P450 ClCP1 [Glomerella lindemuthiana]
  misc_feature (129)..(465): SWISSPROT Homolog: EC 1.14.14.1 Unspecific monooxygenase
  misc_feature: Useful for introducing or modulating the production of volatile compounds
MDYDTESSEPLSGLNILLICFIGYFVLDSLWRITYDPLAAVPGPRLCAMTRIPYWYATVRGQNVFWIHKLHQKYGDVVRFGPRDVSFASADAWKPVNGVVWNKRENEKALEYFVSPMNGVQSMLTANYENHAKVRRVFAPGFSERAARQQEPLVKKYTNLLVTKLAELSRNDQPIELTSLFNFTLFDITAEMAFGCQLRQLERAEYSSWVKAIFGQLKALPVMSIIHYYPVLTWMFKIFQPQWMQQKRIDHCAFSAELSDRRVRDGPTYENDLWTLATKGLTKKEMHSNAEFFMIAGSETVATLLAGAIFYLQKSPHVMKRLNKELRDAFSTVDDITFDGLAQLPYLNACVKESMRIFPAVAVGSPRLVYEGGQEICGYWFPEATRISVHHYSTYHSAANFKDPEKFAPERWLGDPLYADDVREAHQPFSSGPRDCIGQAFARHETKMVLAAVLLQFDLELCDESLDWDKTLLCYGLWDKGSIECRLRPYTGRA

SEQ ID NO: 4244 - DNA, 4440 bp, Muscodor strobelii
  misc_feature: SGI EST ID NO. CUFF.10719.0
  misc_feature: Variant of the nucleotide sequence at SEQ ID NO 4242
gatatttgacctctgctgactgtgaactcaaaacctgcatgacatgtcgtctccaataagagatcgaaaggtacgggtatctcatcattgccgagagtgacacatcatgcgatccattctgcaaagaatttttgtttctttcaaattttgttctttaattcactgagcgcgcatgctgtggaccgccatcggcatgctagtgcatgcaatgctgcatagacgagcacaacttggaggagcctgcatgggtaaggcaaaagttccaaaccgggtgaatggccattggttcccacaacatcggatcgaaaccacttcttatcatacatcccttgcatcaccatagcggcagttattcataatgaccatcaatgggctggacactagaggtgagggtctggaggttatggagtcaccacagggcatctcatgaacaaccaaactcgttacacggatcgtagataatttccctacatcgctccttacatcgtgctcccccctcgcgtgcttcatctcagtacttttttttccccctcccttcattgcacgtaattatgcctctgtatgcgaaacaccaaataccttctagccctggttcatcatcatctcaagacgccgctacgatggattatgatacggagagctcagaacccctgagcggactcaacattctgctcatatgtttcataggctacttcgtgttggattctctttggaggatcacctacgatcctctagctgcggtaccagggccacgtttgtgtgcaatgactcggataccgtactggtatgcgacagtcagaggtcaaaatgtgttctggatacacaagcttcaccaaaaatacggtgatgttgttcggttcgggccgcgcgatgtatcatttgctagcgccgatgcgtggaagccagtaaacggagtcgtctggaataaacgggagaacgaaaaggcgttagagtacttcgtatcaccaatgaacggcgtccagagtatgcttactgcaaactatgagaaccatgccaaggttcgacgtgttttcgcgccgggtttctccgaaagagcagcccgacaacaggagccactggtcaagaaatacaccaaccttctggtaaccaagcttgcagagctctctaggaatgatcaacctatagagctgacaagcctattcaacttcaccttattcgacatcacggcggagatggctttcgggtgtcagctccgccagctggaaagagccgagtactcgtcatgggtaaaagcaatatttgggcagctcaaagcattgccagtgatgtccatcatacactattatcctgtcttgacatggatgttcaagatatttcagcctcaatggatgcagcagaagaggatagaccattgcgctttttcagctgagctttctgatcgccgtgtgcgcgacggtccgacatacgagaacgatctttggacgctcgcaaccaagggtctgacgaagaaagaaatgcactccaacgcagaattcttcatgattgcagggtccgagactgtcgcaacactcctcgctggcgcaatattctatctccaaaaaagcccgcatgtcatgaagcgactgaacaaagagcttcgcgacgccttttccacagtggacgacatcacattcgacggactagcccagctgccatatctcaatgcttgcgtgaaagagtctatgcgtatcttccctgctgtcgcagtcggatctcctcggcttgtgtatgaaggcggacaagagatctgtggatattggtttcctgaagcgactcggatctcggtgcatcactactcaacgtaccattctgctgcgaacttcaaagaccctgagaaattcgcgccagaacgctggctaggcgacccactctacgccgatgacgttcgtgaagcacaccaacctttctcctcgggtccacgagattgtatcggccaagccttcgcaagacacgagaccaagatggttctcgccgctgttttgctccagtttgatctcgagctatgtgatgagagtttagactgggacaagacgctgttgtgctacggactgtgggacaaaggttcgattgagtgtcgtctgcgtccttatacaggtcgagcatagcgcgatttggggcgagctcgggcttctgatagtggcccaagagcgtgctatgaaggagctgagtctgacgtttgggtctgcctaaggagcatcttagatccacggctctgttaatgtgatcagtgcattatcctggctagagcattctgctagaccttagaggttctacattgcgatgattttcatgatttatgattttacgagacagttctctcgtagtcgacaaaagttcctgttctccacggcttccacgatctttgtgatgccatctgatcggcacaccgcttcccttgatggcgaatctgctgctattattgtacatgcacgacacaaactgtggggagagggcaatacccctcgcattgccagattaggcagcccgtgttcccgagaaacaggggatgacgatctcaatgcaacacaattcgctctctcggatgtcagtgagcagtaaatctcaaggttttgatttatctcatgtccaattcatcgtgtctcaatcgctttcaatctcgcgactgtgtacatgaaaaactctgtagatttccacggtcataattaccgcgcggccgaagtgaagccggtgagggagctgaactcagggatcaagggtggtgatctgatcggaagacgagagctgcgagtagtcagcatcacatgcgtaaacttgcacgatctagaacacagctgagctcttggtatactggtttttgtggtagttcatatcctgcttcccatttccgggtatcttttatatacaaatgtaggacaatcgtttagttgcatctggaaatgcggtacaaattgctgcctgccctgctgtccccgttataatgattctatgtctaagcgtcggcgcgggaggaaggccgtccgtagttgatggtatatatacgcgaaaccgatggtctgattgagcttggggcagagtagaaattgcgaaatgtgtcgagtttgccattaatgtagctctttataatgtccctctcccattaactcgagagttcttctctgctctgggagctcgctcgcatgagggtgcggaggtggtacatggtagctgtcgtagcccgcatgatacgcctgatcgtaaccttcgccgtcacctgttggctgcgggatgtgttcaggtatcagatacatgttgctgctcgaaatgtcgtcgaaggatgtcatggttgcggacatgggtgcggcttggtgttgagaatgggatcgttctaatgtgtatccctgtgcttgatatactgattgatctggtggttggtagctgtattggaagtcacgactttgcacttgatttgcaactattggagcagccgtcgtcgcctccggttgtatccagccagcgccattctcatgttgatggtattgtaagggttgcgttggaggctggtaatgtgagtaagattgtgagtaagaggatccggcatatccattattgcttggggtaggagcaatgggtattgttccattataagtgtaattatcggttgaagtaattgatgaatgtgaaatcgtccgcgtcgtttgttgaggggcatacgccggctgaggctgtggtatcgctggatattcagacttttgtgacgggtgtgcgaactcatttgaatcttgctgaaatatttgctgttctcccctcgctgacggctgcccggctacggacggcgagttcgtaaagagcgcattctgtttccccttcaccaaatatgtctcctcgaaatgaatgccctcatcggcagctattgctgcgggcgctctcaccggccgttgtaatgccttccgtctccgccgtataatacagtaggtcgcgatggacccgaccaagagtatgaacgccagtgtgacggctacggatatgccgttcttggctcctgtgcttaagcctgaacgtctctcgagagcagatgtagctgtaaaaacgatatgctgagatgaaacagcgacggcctcactcggttcacaaaccgtggctacaaaagccatgaggatgggaaacggcgtccttataatcatggttgcaatgaagtcgaccctcagctcacattcctactatgcatccttcgagtaacgtgggggcgagtaatatctctagatgatacaatactcgtcgagtttcgtcccatctaggttggttgggagtagcgtcgtattagacagctcgggagaagtctggttcggctccaagctggatcgaaacatgaactgatatcatatcaaattgtgtttgaggcacatggttatcctggttcgacgcggctactgcagagaaatagacgcacgtgtagggaccggaagacattaagaacctagggaacttccgtaccgatgaact

SEQ ID NO: 4245 - DNA, 1056 bp, Muscodor strobelii
  misc_feature: SGI cDNA ID NO. 561099
  misc_feature: Encodes the peptide sequence at SEQ ID NO 4246
atgattataaggacgccgtttcccatcctcatggcttttgtagccacggtttgtgaaccgagtgaggccgtcgctgtttcatctcagcatatcgtttttacagctacatctgctctcgagagacgttcaggcttaagcacaggagccaagaacggcatatccgtagccgtcacactggcgttcatactcttggtcgggtccatcgcgacctactgtattatacggcggagacggaaggcattacaacggccggtgagagcgcccgcagcaatagctgccgatgagggcattcatttcgaggagacatatttggtgaaggggaaacagaatgcgctctttacgaactcgccgtccgtagccgggcagccgtcagcgaggggagaacagcaaatatttcagcaagattcaaatgagttcgcacacccgtcacaaaagtctgaatatccagcgataccacagcctcagccggcgtatgcccctcaacaaacgacgcggacgatttcacattcatcaattacttcaaccgataattacacttataatggaacaatacccattgctcctaccccaagcaataatggatatgccggatcctcttactcacaatcttactcacattaccagcctccaacgcaacccttacaataccatcaacatgagaatggcgctggctggatacaaccggaggcgacgacggctgctccaatagttgcaaatcaagtgcaaagtcgtgacttccaatacagctaccaaccaccagatcaatcagtatatcaagcacagggatacacattagaacgatcccattctcaacaccaagccgcacccatgtccgcaaccatgacatccttcgacgacatttcgagcagcaacatgtatctgatacctgaacacatcccgcagccaacaggtgacggcgaaggttacgatcaggcgtatcatgcgggctacgacagctaccatgtaccacctccgcaccctcatgcgagcgagctcccagagcagagaagaactctcgagttaatgggagagggacattataaagagctacattaa

SEQ ID NO: 4246 - protein, 351 aa, Muscodor strobelii
  misc_feature: SGI Peptide ID NO. 561099
  misc_feature (40)..(89): NCBI GI: 116195646 Blast Desc: CHGG_04421 [Chaetomium globosum CBS 148.51] gi|88180334|gb|EAQ87802.1| CHGG_04421 [Chaetomium globosum CBS 148.51]
MIIRTPFPILMAFVATVCEPSEAVAVSSQHIVFTATSALERRSGLSTGAKNGISVAVTLAFILLVGSIATYCIIRRRRKALQRPVRAPAAIAADEGIHFEETYLVKGKQNALFTNSPSVAGQPSARGEQQIFQQDSNEFAHPSQKSEYPAIPQPQPAYAPQQTTRTISHSSITSTDNYTYNGTIPIAPTPSNNGYAGSSYSQSYSHYQPPTQPLQYHQHENGAGWIQPEATTAAPIVANQVQSRDFQYSYQPPDQSVYQAQGYTLERSHSQHQAAPMSATMTSFDDISSSNMYLIPEHIPQPTGDGEGYDQAYHAGYDSYHVPPPHPHASELPEQRRTLELMGEGHYKELH

SEQ ID NO: 4247 - DNA, 501 bp, Muscodor strobelii
  misc_feature: SGI cDNA ID NO. 561100
  misc_feature: Elevated expression when VOC is produced
  misc_feature: Encodes the peptide sequence at SEQ ID NO 4248
atgctacgacaaggaagccagtgctcgtcattggattcgatatgcgcggaagccagcttgcgttgcagcaagaaaaacttgaagaatggcgatgtgctattctccaattcccccgagttcggagccttccattttcctgacttgaagatcatcacgcccgcgttcgaagtgcctggaaaggagattgtcttctgggctgcgtcgccgggtgggcgacgtcatcatcaaggcgtccagggcgtgtgcggcgagctggggtgcatgagcaacttcacgttcggcatcgacggcatgggcaggctcgggtactacgagacgatcgcggacagcggtggcggtggcgtggtgcgcgaagtggcattacgcgtgtccatgtcgtcggagcggcgtattttcgcgccctgcgatatgacgggaggttacgaatggggtcgcggcaaaaacacgtggatcaggacaagtggaagtgagacctcgatcggaggcgagagcggtgattga

SEQ ID NO: 4248 - protein, 166 aa, Muscodor strobelii
  misc_feature: SGI Peptide ID NO. 561100
  misc_feature (27)..(68): Pfam Id: PF02538 Pfam Desc: Hydantoinase B/oxoprolinase
  misc_feature (27)..(91): NCBI GI: 238481871 Blast Desc: 5-oxoprolinase, [Aspergillus flavus NRRL3357] gi|220700224|gb|EED56562.1| 5-oxoprolinase, [Aspergillus flavus NRRL3357]
  misc_feature (24)..(82): NCBI GI: 145246730 Blast Desc: An12g05460 [Aspergillus niger] gi|134080335|emb|CAK46257.1| protein product [Aspergillus niger]
  misc_feature (26)..(82): NCBI GI: 145234519 Blast Desc: An03g00010 [Aspergillus niger] gi|134057578|emb|CAK44555.1| protein product [Aspergillus niger]
  misc_feature (27)..(91): NCBI GI: 169765342 Blast Desc: [Aspergillus oryzae RIB40] gi|83764997|dbj|BAE55140.1| protein product [Aspergillus oryzae]
  misc_feature (26)..(82): NCBI GI: 212538971 Blast Desc: 5-oxoprolinase, [Penicillium marneffei ATCC 18224] gi|210069383|gb|EEA23474.1| 5-oxoprolinase, [Penicillium marneffei ATCC 18224]
  misc_feature (86)..(164): NCBI GI: 212538971 Blast Desc: 5-oxoprolinase, [Penicillium marneffei ATCC 18224] gi|210069383|gb|EEA23474.1| 5-oxoprolinase, [Penicillium marneffei ATCC 18224]
  misc_feature (13)..(82): NCBI GI: 258574397 Blast Desc: 5-oxoprolinase [Uncinocarpus reesii 1704] gi|237901646|gb|EEP76047.1| 5-oxoprolinase [Uncinocarpus reesii 1704]
  misc_feature (13)..(82): NCBI GI: 226281514 Blast Desc: 5-oxoprolinase [Paracoccidioides brasiliensis Pb01]
  misc_feature (24)..(80): NCBI GI: 207340171 Blast Desc: AWRI1631_10980030 [Saccharomyces cerevisiae AWRI1631]
  misc_feature (13)..(82): NCBI GI: 226293692 Blast Desc: 5-oxoprolinase [Paracoccidioides brasiliensis Pb18]
  misc_feature: Useful for introducing or modulating the production of volatile compounds
MLRQGSQCSSLDSICAEASLRCSKKNLKNGDVLFSNSPEFGAFHFPDLKIITPAFEVPGKEIVFWAASPGGRRHHQGVQGVCGELGCMSNFTFGIDGMGRLGYYETIADSGGGGVVREVALRVSMSSERRIFAPCDMTGGYEWGRGKNTWIRTSGSETSIGGESGD

SEQ ID NO: 4249 - DNA, 1164 bp, Muscodor strobelii
  misc_feature: SGI cDNA ID NO. 561101
  misc_feature: Encodes the peptide sequence at SEQ ID NO 4250
atggcatcttcattcaagtgcctagcctccgcggcaggtctgatggctgtactgcctacagctttagctggcttttctgctagctcacaggaaaatgtagctgtatactggggtcaaaactcatacggccaaggcactggcccttatgtccaagagcgtctagcatactactgtgccaatagtgatatcgacattatacccatcgcgtttatgaacggcatctcccctccagttactaactttgccaacgctggagacaactgcaccgcgtttgccgataacgccaatgtcttggactgtccgcagattgaggaggacatcaagacatgccagtcaaagggcaaaactattctcatctcgctcggcggcgccacatactaccaagggggttggggctcaaccagtgatgctgagagcgctgcacaaatggtttggaacatgttcggcccggtcaactcggcaagcaaagtagaccgcccctttggctccgcagttgtcaatggtttcgactttgactttgagaaccccgtgaataacctcccagctttcgcggccaagctccgaagtctcatggacgccagtggtacaaaatattacttgtctgctgcgccacagtgcgttttccccgattcggcagacggtgctgcattgaatgccgttgctttcgactttgtcatgattcaattctacaacaattggtgcggcagccaaaacttcaagcccggcaccgctacccagaatgccttcaacttcgatgtctgggataactgggccaagaacaccagccctaacaagagcgtgaagcttctgcttggtatgcctgccaacaccggtgctgctggaagcggttacgtcacaggttctcaactctcaagtgtcatttcatattccaagagctttagcagcttcggcggtgctatgctgtgggatatgtctcagctctatgcaaacaatggatacctgagtaccgtagtctcggatcttgcagcgcctgcaagtggcactggtggtggtggcagcactactcctggcggcggtggaagcagcggtggtaccgtgcctcaatggggtcagtgtggcggggagggctacactggtcccacgcaatgtcagtcgccctatacatgtgtcgcatctggcccctactggtcagcgtgccagtga

SEQ ID NO: 4250 - protein, 387 aa, Muscodor strobelii
  misc_feature: SGI Peptide ID NO. 561101
  misc_feature (355)..(383): Pfam Id: PF00734 Pfam Desc: Fungal cellulose binding domain
  misc_feature (31)..(314): Pfam Id: PF00704 Pfam Desc: Glycosyl hydrolases family 18
  misc_feature (31)..(233): Pfam Id: PF00704 Pfam Desc: Glycosyl hydrolases family 18
  misc_feature (6)..(387): NCBI GI: 209916680 Blast Desc: chitinase [Hypocrea virens]
  misc_feature (15)..(333): NCBI GI: 115387026 Blast Desc: ATEG_07368 [Aspergillus terreus NIH2624] gi|114191052|gb|EAU32752.1| ATEG_07368 [Aspergillus terreus NIH2624]
  misc_feature (8)..(328): NCBI GI: 209980058 Blast Desc: chitinase 33 [Hypocrea virens]
  misc_feature (18)..(328): NCBI GI: 1420880 Blast Desc: chitinase [Hypocrea lixii]
  misc_feature (8)..(386): NCBI GI: 85083182 Blast Desc: NCU04500 [Neurospora crassa OR74A] gi|28918153|gb|EAA27833.1| NCU04500 [Neurospora crassa OR74A]
  misc_feature (18)..(328): NCBI GI: 18765875 Blast Desc: AF397018_1 class III chitinase [Hypocrea virens] gi|19072993|gb|AAL84693.1|AF395754_1 class III chitinase precursor [Hypocrea virens] gi|254305181|gb|ACT66008.1| chitinase
  misc_feature (18)..(328): NCBI GI: 126032263 Blast Desc: TPA: TPA_inf: chitinase 18-12 [Hypocrea jecorina]
  misc_feature (4)..(387): NCBI GI: 126032273 Blast Desc: TPA: TPA_inf: chitinase 18-17 [Hypocrea jecorina]
  misc_feature (18)..(328): NCBI GI: 133753040 Blast Desc: endochitinase [Trichoderma atroviride]
  misc_feature (18)..(328): NCBI GI: 145864609 Blast Desc: chitinase [Hypocrea virens]
  misc_feature (17)..(318): SWISSPROT Homolog: EC 3.2.1.14 Chitinase
MASSFKCLASAAGLMAVLPTALAGFSASSQENVAVYWGQNSYGQGTGPYVQERLAYYCANSDIDIIPIAFMNGISPPVTNFANAGDNCTAFADNANVLDCPQIEEDIKTCQSKGKTILISLGGATYYQGGWGSTSDAESAAQMVWNMFGPVNSASKVDRPFGSAVVNGFDFDFENPVNNLPAFAAKLRSLMDASGTKYYLSAAPQCVFPDSADGAALNAVAFDFVMIQFYNNWCGSQNFKPGTATQNAFNFDVWDNWAKNTSPNKSVKLLLGMPANTGAAGSGYVTGSQLSSVISYSKSFSSFGGAMLWDMSQLYANNGYLSTVVSDLAAPASGTGGGGSTTPGGGGSSGGTVPQWGQCGGEGYTGPTQCQSPYTCVASGPYWSACQ

SEQ ID NO: 4251 - DNA, 1505 bp, Muscodor strobelii
  misc_feature: SGI EST ID NO. CUFF.10738.0
  misc_feature: Variant of the nucleotide sequence at SEQ ID NO 4249
gtcgggatgagatgacaatgtcgcttaacgtcacgtatgatttgattgagccttcatcctgcattaacgaagcagatattcgaaaggccgatatgtcaaaatgtaggtatataaaatatccgattctccccatattgatcttctacaatagcgacgatcatttccagacaaggtgacccgaattccctacacctcgattggcattcataattgtacatcaccgttatggcatcttcattcaagtgcctagcctccgcggcaggtctgatggctgtactgcctacagctttagctggcttttctgctagctcacaggaaaatgtagctgtatactggggtcaaaactcatacggccaaggcactggcccttatgtccaagagcgtctagcatactactgtgccaatagtgatatcgacattatacccatcgcgtttatgaacggcatctcccctccagttactaactttgccaacgctggagacaactgcaccgcgtttgccgataacgccaatgtcttggactgtccgcagattgaggaggacatcaagacatgccagtcaaagggcaaaactattctcatctcgctcggcggcgccacatactaccaagggggttggggctcaaccagtgatgctgagagcgctgcacaaatggtttggaacatgttcggcccggtcaactcggcaagcaaagtagaccgcccctttggctccgcagttgtcaatggtttcgactttgactttgagaaccccgtgaataacctcccagctttcgcggccaagctccgaagtctcatggacgccagtggtacaaaatattacttgtctgctgcgccacagtgcgttttccccgattcggcagacggtgctgcattgaatgccgttgctttcgactttgtcatgattcaattctacaacaattggtgcggcagccaaaacttcaagcccggcaccgctacccagaatgccttcaacttcgatgtctgggataactgggccaagaacaccagccctaacaagagcgtgaagcttctgcttggtatgcctgccaacaccggtgctgctggaagcggttacgtcacaggttctcaactctcaagtgtcatttcatattccaagagctttagcagcttcggcggtgctatgctgtgggatatgtctcagctctatgcaaacaatggatacctgagtaccgtagtctcggatcttgcagcgcctgcaagtggcactggtggtggtggcagcactactcctggcggcggtggaagcagcggtggtaccgtgcctcaatggggtcagtgtggcggggagggctacactggtcccacgcaatgtcagtcgccctatacatgtgtcgcatctggcccctactggtcagcgtgccagtgagcacaggaagatctcaactggaaggtcgatgagaggctctgaaacgatgggcacgattcaatgtatatatttatgagacccatttatgaagcgctcaatgaacatattaaatttca

SEQ ID NO: 4252 - DNA, 2088 bp, Muscodor strobelii
  misc_feature: SGI cDNA ID NO. 561102
  misc_feature: Encodes the peptide sequence at SEQ ID NO 4253
atggctttcgtcaaatctatttgccgggccgcgctcgccgctgctacttgcctcgcttggctcccattgaaagttttggccagcggcgcattagaagcccacatcgtcgctgagcgcagcattctcacggggcccgtagacggtcgcattgttctcatatttgctcccagtggcactgaccctctgtatgatactgatgtcacttcgtcgcctaattacatgtttggcatgaatgcttatggattcactgcggatgacaagattgtcatgtctggcggaagtaccaatggcactctaaaaggtgtctggggctggccagttgtcagcatggacgctgttcccgccgggcaatatagcgtccaggcattcctgaacccgtacgataaagcagagcgcagcgatgggtctgttgtgttcctcaaattcccatgtggcgatggcgccccgtatgttgatggtgtaggatcactacaaacgcccgttgtggatgtggaggtcaccggagaaccgcaaacattcagcctgacgttcgacagcacgagcccggtcccagaactcgctggaaatgagcccggcggttgctcccaaggaaactatgaggatatagagcttctcaaatatgtgaagatccgcagtaagaaactgagcgcattttggggccgagacatgtatgttggcgccaacgtgctgcttccggccggctatgatgctgcggacaagaagacgcgatatcctgttctctatgcgcagaaccactggacggccgacgaaacttcttacgggtacccaactaatagtgcgtttactactgcttgggataatggcatcatcaacggatcatccgcagcgctgaacgggcaaccaacacctaaactcatcatcgtgaccttccgccacgaagctccctactacgatgactcctatgcagtaaacactgcgaatctaggtccttatggcgacgcactcaacgacgagctaatccctcatcttgaaatgtctttcaacatgatccccgaaccctacgcccgtgtccaggatggtggttctacgggtggttgggaatcgattgccaacttgattttcaggccggatctctttggcacatgcttctcatcttatcccgactcgcttgacttccaccgacaccaagacatccaactctattcgaacgaaaatgcttacgttaacgcggatgggtcttcgatcccctcaatacgtacatttaaaaacgacacgcaggttattctagccagcacaatgcaagagaaccattgggagttggtttttggtacctcgtcgcgctctgcattgcaatgggatgtctggaatgcagttttcggagttcagggattgaacaactacccactagagccttgggacaaagtgactggagaaatccatcacggcgcagtcgagtattggaaagagtttgacttggccaactacatcgtcacaaactggaataaccacaagaagcttggagagacgttgcgcaaccgcattcacttgtatgttggaacacatgacacgtacttcctaaacgagggtgtgatggagttccagaagcgagtcaacggtctcggcggagcaaattgggccaatatcactatcctagaaggccaaacccatggtggcaattatcagcggcgtgagatctgggattatttgacgcttgtggacacttgggtaaaagaccatagtcccgaaggcaaaacacctttgccaagcgcatcgactcacccttcgacacgaggaaacatatgggaagatgttatcaggattggcggacatcgcgcagcattggcgcgtcaggctaatcctgaactcaccgtcaagaactcagctaagtgtggccccaagattacggcgacggccggccgttgggacccgggagtgaagctacaagctcaatggttcgtgaactcaaagccgagtgggagttcattcgcagtagtgccagatgaagtggtcaggtttacaccagggacaaaggagaagaaattcgagatttcgctccgcatcacaggaaccaagcgtaattatgccgacgatgttcgggagactgagcaaaaattggtattgttttga

SEQ ID NO: 4253 - protein, 695 aa, Muscodor strobelii
  misc_feature: SGI Peptide ID NO. 561102
  misc_feature (29)..(688): NCBI GI: 169603147 Blast Desc: SNOG_04581 [Phaeosphaeria nodorum SN15] gi|111067221|gb|EAT88341.1| SNOG_04581 [Phaeosphaeria nodorum SN15]
  misc_feature (31)..(693): NCBI GI: 189189252 Blast Desc: conserved [Pyrenophora tritici-repentis Pt-1C-BFP] gi|187972571|gb|EDU40070.1| conserved [Pyrenophora tritici-repentis Pt-1C-BFP]
  misc_feature (35)..(517): NCBI GI: 88710902 Blast Desc: FB2170_02290 [Flavobacteriales bacterium HTCC2170] gi|88709843|gb|EAR02075.1| FB2170_02290 [Flavobacteriales bacterium HTCC2170]
  misc_feature (46)..(517): NCBI GI: 284036262 Blast Desc: Slin_1343 [Spirosoma linguale DSM 74] gi|283815555|gb|ADB37393.1| Slin_1343 [Spirosoma linguale DSM 74]
  misc_feature (10)..(529): NCBI GI: 82523828 Blast Desc: [uncultured candidate division OP8 bacterium]
  misc_feature (23)..(517): NCBI GI: 260061943 Blast Desc: secreted protein [Robiginitalea biformata HTCC2501] gi|88786077|gb|EAR17246.1| secreted protein [Robiginitalea biformata HTCC2501]
  misc_feature (40)..(549): NCBI GI: 262095836 Blast Desc: conserved [Phytophthora infestans T30-4]
  misc_feature (40)..(549): NCBI GI: 262095835 Blast Desc: conserved [Phytophthora infestans T30-4]
  misc_feature (47)..(517): NCBI GI: 126648619 Blast Desc: secreted protein [Algoriphagus sp. PR1] gi|126575070|gb|EAZ79420.1| secreted protein [Algoriphagus sp. PR1]
  misc_feature (82)..(521): NCBI GI: 226228562 Blast Desc: GAU_3156 [Gemmatimonas aurantiaca T-27] gi|226091753|dbj|BAH40198.1| [Gemmatimonas aurantiaca T-27]
MAFVKSICRAALAAATCLAWLPLKVLASGALEAHIVAERSILTGPVDGRIVLIFAPSGTDPLYDTDVTSSPNYMFGMNAYGFTADDKIVMSGGSTNGTLKGVWGWPVVSMDAVPAGQYSVQAFLNPYDKAERSDGSVVFLKFPCGDGAPYVDGVGSLQTPVVDVEVTGEPQTFSLTFDSTSPVPELAGNEPGGCSQGNYEDIELLKYVKIRSKKLSAFWGRDMYVGANVLLPAGYDAADKKTRYPVLYAQNHWTADETSYGYPTNSAFTTAWDNGIINGSSAALNGQPTPKLIIVTFRHEAPYYDDSYAVNTANLGPYGDALNDELIPHLEMSFNMIPEPYARVQDGGSTGGWESIANLIFRPDLFGTCFSSYPDSLDFHRHQDIQLYSNENAYVNADGSSIPSIRTFKNDTQVILASTMQENHWELVFGTSSRSALQWDVWNAVFGVQGLNNYPLEPWDKVTGEIHHGAVEYWKEFDLANYIVTNWNNHKKLGETLRNRIHLYVGTHDTYFLNEGVMEFQKRVNGLGGANWANITILEGQTHGGNYQRREIWDYLTLVDTWVKDHSPEGKTPLPSASTHPSTRGNIWEDVIRIGGHRAALARQANPELTVKNSAKCGPKITATAGRWDPGVKLQAQWFVNSKPSGSSFAVVPDEVVRFTPGTKEKKFEISLRITGTKRNYADDVRETEQKLVLF

SEQ ID NO: 4254 - DNA, 3251 bp, Muscodor strobelii
  misc_feature: SGI EST ID NO. CUFF.10746.0
  misc_feature: Variant of the nucleotide sequence at SEQ ID NO 4252
tcctactgtcattagcagcctcatttacttgtgatagtactgtctttccatctcatatagcagttttaagggtttgattatcctgatgaattaatcccttacaaacaacacagaataggtccgttgcacgatgagtctttacgaggtcgggcatatttgcgcatctacgcacgggatgcttgcctctgctctagatgagtgcattttgtcggcttctagaattctgtcaccaccagacatcctcgacccgagctcaacattttaatggcctcgggcactgaaggaggagaagttagcgtgtcgcatagagacagccattgacctgcaaatgtacactccaataccagttgctgaacccggctagaattggcaggtccccaggttcttggcagcgccgaaccagaaccaggcggcgcaatctccgttatctttcaacatgatccgtcccaaggcaagaccggcttcgctacctgcattatcaggccggggacgtcatgacttccattttcccgccccgaagcctccctgctatcagcagtgctacctcgccatgcgacgcttgtaagcaatcggcgcaatgtcttggcgattggtgcttggcgatctggaaatgattgtcccgtcgcgtacttaaaaacttccctcgctcaaacacagcagtcgattcaggcgacgagcttcttacgagcctgagtcggacaagaaatttgtgacaatcgcagtgctggaaacccgatcccatcacccgagatcggctttcctcgcgagctccttcgtcgacatggctttcgtcaaatctatttgccgggccgcgctcgccgctgctacttgcctcgcttggctcccattgaaagttttggccagcggcgcattagaagcccacatcgtcgctgagcgcagcattctcacggggcccgtagacggtcgcattgttctcatatttgctcccagtggcactgaccctctgtatgatactgatgtcacttcgtcgcctaattacatgtttggcatgaatgcttatggattcactgcggatgacaagattgtcatgtctggcggaagtaccaatggcactctaaaaggtgtctggggctggccagttgtcagcatggacgctgttcccgccgggcaatatagcgtccaggcattcctgaacccgtacgataaagcagagcgcagcgatgggtctgttgtgttcctcaaattcccatgtggcgatggcgccccgtatgttgatggtgtaggatcactacaaacgcccgttgtggatgtggaggtcaccggagaaccgcaaacattcagcctgacgttcgacagcacgagcccggtcccagaactcgctggaaatgagcccggcggttgctcccaaggaaactatgaggatatagagcttctcaaatatgtgaagatccgcagtaagaaactgagcgcattttggggccgagacatgtatgttggcgccaacgtgctgcttccggccggctatgatgctgcggacaagaagacgcgatatcctgttctctatgcgcagaaccactggacggccgacgaaacttcttacgggtacccaactaatagtgcgtttactactgcttgggataatggcatcatcaacggatcatccgcagcgctgaacgggcaaccaacacctaaactcatcatcgtgaccttccgccacgaagctccctactacgatgactcctatgcagtaaacactgcgaatctaggtccttatggcgacgcactcaacgacgagctaatccctcatcttgaaatgtctttcaacatgatccccgaaccctacgcccgtgtccaggatggtggttctacgggtggttgggaatcgattgccaacttgattttcaggccggatctctttggcacatgcttctcatcttatcccgactcgcttgacttccaccgacaccaagacatccaactctattcgaacgaaaatgcttacgttaacgcggatgggtcttcgatcccctcaatacgtacatttaaaaacgacacgcaggttattctagccagcacaatgcaagagaaccattgggagttggtttttggtacctcgtcgcgctctgcattgcaatgggatgtctggaatgcagttttcggagttcagggattgaacaactacccactagagccttgggacaaagtgactggagaaatccatcacggcgcagtcgagtattggaaagagtttgacttggccaactacatcgtcacaaactggaataaccacaagaagcttggagagacgttgcgcaaccgcattcacttgtatgttggaacacatgacacgtacttcctaaacgagggtgtgatggagttccagaagcgagtcaacggtctcggcggagcaaattgggccaatatcactatcctagaaggccaaacccatggtggcaattatcagcggcgtgagatctgggattatttgacgcttgtggacacttgggtaaaagaccatagtcccgaaggcaaaacacctttgccaagcgcatcgactcacccttcgacacgaggaaacatatgggaagatgttatcaggattggcggacatcgcgcagcattggcgcgtcaggctaatcctgaactcaccgtcaagaactcagctaagtgtggccccaagattacggcgacggccggccgttgggacccgggagtgaagctacaagctcaatggttcgtgaactcaaagccgagtgggagttcattcgcagtagtgccagatgaagtggtcaggtttacaccagggacaaaggagaagaaattcgagatttcgctccgcatcacaggaaccaagcgtaattatgccgacgatgttcgggagactgagcaaaaattggtattgttttgagtacgtttgaactagtctattgcatgtttaatacaatcatcaataacgcgtcatgagacagtaatctggtcaggcacttggttcggtgcagctttatgtattaagaagttcgactgcaatatgttattcttcacctgatacttgtatgagaagtcaccgaaaggcggaaatcgagctggaacccagggtttcatcacattccttcgacttgggtgttgcagtggcgaaaacctgggccgaatgctctacgccaagtgtcgttggacaattcctaaagcctgataatataaaccgagttcttcaattggacggtgccaggcgctctcgagcgagccatttccatattataggcgacgctcgtatgtgctcaagatgtacactg

SEQ ID NO: 4255 - DNA, 1398 bp, Muscodor strobelii
  misc_feature: SGI cDNA ID NO. 561103
  misc_feature: Encodes the peptide sequence at SEQ ID NO 4256
atggacaataataggaacaaagtcttgacgcctcgagcgatcaaggacatgattgcagacgatcacataatcgtcatcttcgacggctcggttttgcgcctggactcgtggctaagcagacatcccggaggtcgcctggccattttgcacatggtgggaaaagatgccactgatgaaatgacagtatatcattcgattgagacgctccaaaccatgcgacgctaccaaattggaaggacagcttcggggccttggaccaacttgactccaccgatacgaggaggcctctaccacaacccgcccacgcaagaaaatggccttggtaatgtgaagcccgccctgacagagaaatttctggatgtggtcgagagagtagacacgacagagccgagtcccaatttcctggcacccggcatcagaagtcgaatatcccctgcttctagcgtctcgagcaagctttcctcgcaatcccagagcgaatacacggattgggcatgccagcaggcaatcgagcaggacattcgagattacccgtctctgaatcctgccgtgcaactccagatcgctcgaaagtatcgccttctgcaccagagaatccgcgcacagggattgtatgcctgtccactcttcgaatacggcaaagagctcgctcgatacactgtactattcctcgtattccttttgactttgcaccacggatggtacttgacgtctgcagtcttcctcggccttttctggcaccagatcatgttcacggcgcatgatgccggacatttggccatcacgcacaattttgtcatagacacgcttatcggaatgttcgttgcggatttctgctgcggcatgtcgatcgggtggtggaagagtagccataacgtccatcacctcatcacaaatcaacccgaacatgatccggacatccagaatgtgcccctcttcgcaacatgtccatccttcttccggtcgataacctccacgtattatgacggcttcactttcgtctgggatgctgtagccgacttgatggtcccttatcagcgttatacttattacccggtcatgggtattgcccgcttcaatctgtacctcctctcgtggctacacgtgctctcgactcgatcatcctctcttggcgcttggcttgatttcatccatggcggtctgcagtttcaggcagtccatcacttattcccacgcgtaccgcgacacaacttgcgcaaggcgcaggtactagtgcgagatttctgtcaggacgtcggcataccgtacaccatcttgaactttgtcgacgggaacaagaaggtgcttgggcggttagacgaagtcagtgagcagttgaagatcctgttgagctgccagagtcacatggcggaaactggcgagagtggtctacactaa

SEQ ID NO: 4256 - protein, 465 aa, Muscodor strobelii
  misc_feature: SGI Peptide ID NO. 561103
  misc_feature (8)..(81): Pfam Id: PF00173 Pfam Desc: Cytochrome b5-like Heme/Steroid binding domain
  misc_feature (239)..(416): Pfam Id: PF00487 Pfam Desc: Fatty acid desaturase
  misc_feature (25)..(81): Pfam Id: PF00173 Pfam Desc: Cytochrome b5-like Heme/Steroid binding domain
  misc_feature (239)..(367): Pfam Id: PF00487 Pfam Desc: Fatty acid desaturase
  misc_feature (370)..(416): Pfam Id: PF00487 Pfam Desc: Fatty acid desaturase
  misc_feature (1)..(379): NCBI GI: 116204459 Blast Desc: CHGG_10113 [Chaetomium globosum CBS 148.51] gi|88176241|gb|EAQ83709.1| CHGG_10113 [Chaetomium globosum CBS 148.51]
  misc_feature (4)..(378): NCBI GI: 256730688 Blast Desc: [Nectria haematococca mpVI 77-13-4]
  misc_feature (4)..(380): NCBI GI: 46109670 Blast Desc: FG01717.1 [Gibberella zeae PH-1]
  misc_feature (4)..(369): NCBI GI: 171678755 Blast Desc: protein product [Podospora anserina] gi|170937447|emb|CAP62105.1| protein product [Podospora anserina]
  misc_feature (4)..(378): NCBI GI: 261358792 Blast Desc: fatty acid desaturase [Verticillium albo-atrum VaMs.102]
  misc_feature (4)..(379): NCBI GI: 238842267 Blast Desc: fatty acid desaturase [Microsporum canis CBS 113480]
  misc_feature (4)..(379): NCBI GI: 189195258 Blast Desc: delta 8-(E)-sphingolipid desaturase [Pyrenophora tritici-repentis Pt-1C-BFP] gi|187979846|gb|EDU46472.1| delta 8-(E)-sphingolipid desaturase [Pyrenophora tritici-repentis
  misc_feature (4)..(379): NCBI GI: 169597193 Blast Desc: SNOG_01379 [Phaeosphaeria nodorum SN15] gi|160707466|gb|EAT91028.2| SNOG_01379 [Phaeosphaeria nodorum SN15]
  misc_feature (3)..(380): NCBI GI: 255944439 Blast Desc: Pc20g04400 [Penicillium chrysogenum Wisconsin 54-1255] gi|211587722|emb|CAP85769.1| Pc20g04400 [Penicillium chrysogenum Wisconsin 54-1255]
  misc_feature (5)..(383): NCBI GI: 255953863 Blast Desc: Pc21g06390 [Penicillium chrysogenum Wisconsin 54-1255] gi|211589395|emb|CAP95536.1| Pc21g06390 [Penicillium chrysogenum Wisconsin 54-1255]
MDNNRNKVLTPRAIKDMIADDHIIVIFDGSVLRLDSWLSRHPGGRLAILHMVGKDATDEMTVYHSIETLQTMRRYQIGRTASGPWTNLTPPIRGGLYHNPPTQENGLGNVKPALTEKFLDVVERVDTTEPSPNFLAPGIRSRISPASSVSSKLSSQSQSEYTDWACQQAIEQDIRDYPSLNPAVQLQIARKYRLLHQRIRAQGLYACPLFEYGKELARYTVLFLVFLLTLHHGWYLTSAVFLGLFWHQIMFTAHDAGHLAITHNFVIDTLIGMFVADFCCGMSIGWWKSSHNVHHLITNQPEHDPDIQNVPLFATCPSFFRSITSTYYDGFTFVWDAVADLMVPYQRYTYYPVMGIARFNLYLLSWLHVLSTRSSSLGAWLDFIHGGLQFQAVHHLFPRVPRHNLRKAQVLVRDFCQDVGIPYTILNFVDGNKKVLGRLDEVSEQLKILLSCQSHMAETGESGLH

SEQ ID NO: 4257 - DNA, 618 bp, Muscodor strobelii
  misc_feature: SGI cDNA ID NO. 561104
  misc_feature: Reduced expression when VOC is produced
  misc_feature: Encodes the peptide sequence at SEQ ID NO 4258
atggctgacctcgcagcagctccagcccaggccaggccgtccatccttcaacgctctccggacgccatcgccctgccgtcagacgcgagctcaagccccctcgtcagcagccagccatcggccatcggccatcgctgctcactgatcagccatgcagtccccggattacaccagccagaggcggcacaacaacaaaaacagcagcaagcatcgccccgacctgcccagcatcaacacctcgcagcaggtgtcgagggcccgcgacgtggtagcctcttaccaccaccagcagcagcagcaacagcaacagtatctctcgtctccgccggtgtcgagcaggaagcacagtggtggcaacgggccgggtaccgcaagccgacgtccaaggccagctcggaagggtcgttcctggacaatgactcgcccgtcgacaggcactcgggcgactaccgcagcccgccgatgcgcgactcgcacgacctgtcgctgcccaaccaggacttcctccgcgactcgctgctgggcaacatgctgaactcgctcgaccagttctccctgagccacatccacaccccgaccggccccggctttggcttcaccgcgcgggcgacgttggcg

SEQ ID NO: 4258 - protein, 206 aa, Muscodor strobelii
  misc_feature: SGI Peptide ID NO. 561104
  misc_feature (124)..(195): NCBI GI: 46125229 Blast Desc: FG06992.1 [Gibberella zeae PH-1]
  misc_feature (131)..(191): NCBI GI: 261354595 Blast Desc: Sec7 domain-containing protein [Verticillium albo-atrum VaMs.102]
  misc_feature (128)..(195): NCBI GI: 119195363 Blast Desc: CIMG_02056 [Coccidioides immitis RS]
  misc_feature (121)..(191): NCBI GI: 169622749 Blast Desc: SNOG_14601 [Phaeosphaeria nodorum SN15] gi|160704844|gb|EAT78141.2| SNOG_14601 [Phaeosphaeria nodorum SN15]
  misc_feature (124)..(194): NCBI GI: 85092586 Blast Desc: NCU11254 [Neurospora crassa OR74A] gi|28920898|gb|EAA30233.1| conserved [Neurospora crassa OR74A] gi|40804593|emb|CAF05854.1| conserved [Neurospora crassa]
  misc_feature (135)..(189): NCBI GI: 189200755 Blast Desc: Sec7 domain containing protein [Pyrenophora tritici-repentis Pt-1C-BFP] gi|187983813|gb|EDU49301.1| Sec7 domain containing protein [Pyrenophora tritici-repentis
  misc_feature (128)..(191): NCBI GI: 240104953 Blast Desc: Sec7 domain containing protein [Coccidioides posadasii C735 delta SOWgp]
  misc_feature (135)..(195): NCBI GI: 116179486 Blast Desc: CHGG_00371 [Chaetomium globosum CBS 148.51] gi|88184668|gb|EAQ92136.1| CHGG_00371 [Chaetomium globosum CBS 148.51]
  misc_feature (79)..(186): NCBI GI: 154295158 Blast Desc: BC1G_13522 [Botryotinia fuckeliana B05.10] gi|150844205|gb|EDN19398.1| BC1G_13522 [Botryotinia fuckeliana B05.10]
  misc_feature (79)..(186): NCBI GI: 156039657 Blast Desc: SS1G_11965 [Sclerotinia sclerotiorum 1980] gi|154697702|gb|EDN97440.1| SS1G_11965 [Sclerotinia sclerotiorum 1980]
  misc_feature: Useful for introducing or modulating the production of volatile compounds
MADLAAAPAQARPSILQRSPDAIALPSDASSSPLVSSQPSAIGHRCSLISHAVPGLHQPEAAQQQKQQQASPRPAQHQHLAAGVEGPRRGSLLPPPAAAATATVSLVSAGVEQEAQWWQRAGYRKPTSKASSEGSFLDNDSPVDRHSGDYRSPPMRDSHDLSLPNQDFLRDSLLGNMLNSLDQFSLSHIHTPTGPGFGFTARATLA

SEQ ID NO: 4259 - DNA, 1974 bp, Muscodor strobelii
  misc_feature: SGI cDNA ID NO. 561105
  misc_feature: Encodes the peptide sequence at SEQ ID NO 4260
atgatgatggcgcccggctattacagggtaactccatcagctgagattcaaaatgttaccagcacgcacttccaacatcctatccagattaacaccttacctagccaatatggatcaccagtgacttccgcctttcatacagacacaccttcgcaacaaccaaattctgtgcctacgtcgtctacgcgaggaccgaattggtttctggaatatgctgcactagctctgtgctgggccactatcgtagctatcatcattcttatgacgaagattgacgagatgccgttgtccagctggtctgcaccaataaccccaaatgccgttgtgtccgttttggcggcgattgctcgggcgcccctaggattcgcaattgggtcatgtatagggcaggccaaatggaattggttccgaaagcgctccgatagtctcctggcgttcgatcgattagatgatgcaagccgtggtccctggggcagcgtctggctgatcgtttgggtcaaagcttctcattgggtggcaataggcgcagcaatagtaattgcgttgttagcattcgagcctttcctacaggctgtcttgtcattcgatgggcggattgatcctgtattgcataatggtgcagcacaaattggtcgtagcgaatttctcgaagcgggttctacgacctttcctcttgcctcggaccctgctgaccggaaggtacatacgataatcctaccagagaataaaacggtggctttaagtcctatagaaacctctccggactttcgaatggtgttcgcgctgaataatgcctttgacgatttggaattggccgcaaaacaaaatcccttattcagctgtcctacggccaattgtacttgggcgttgtcaacctcattagcagtgtgcagttcctgtacaaatgtgactaatcacatcaagaaagatgtatggagagaattcaaccgaacttggattgagaagtacctaccgtctgtcggtatagctaacctctcaggctcaaatggcacaacaatcggttcttcttatactgccacaatgaaattgacagacactcaccaaactatttcatttcggaatcttagcactatgataacagctgtccaggtgatccaagcagcagatagctacagacaaaacgagctgccttgggacaaggttccgattataggtactgaatgcgctctttatttctgcgtcaaagcttccgaagtctctgtaaagcagggggtcttgaatgagacagcagtcatgacttgggcccatcgtaattttagctcgtacaccggcgatttgtccacgcccgacggtcaactttgggacaaacacaactattactctctactacctagaacaatcaacggcacgcttgtagatataccccgagacgaccttattctatccgtaccaactgaagatattcaacaactcggcctgccgaagaacactactacaagattcaagatcacgcaaaatgccgtggcaagcatggtgacatgggtcaacaacgaatttctcctttacggcgaaacagaggcatatgagggtcgaggaacaggccctataacgcaatctcttcataagaacattagcctcacaacctctttcaaccaggctgcaatcagcctgtcaaactggatccgcgatacttctagaaccgctgaatcaggaatgatagaggaatgggtagttcatatcaaggtgcaatgggcatatataacgttgcctttactagcactgattctaggcaccgcattttgttgcaagtcgatactcgaaactcgcgcactgggtctcgaagcttggaagacagatacaatcgccactctcacatattcagttgatgccgagacgcgtgctcacttgagacaagctcgtcgcgatagaaatctagctaagacggcaagggctataaaggtgcggcttgaggatgcagacggtggttatgagcttcgcgcgaagcaagcatga

SEQ ID NO: 4260 - protein, 657 aa, Muscodor strobelii
  misc_feature: SGI Peptide ID NO. 561105
  misc_feature (70)..(656): NCBI GI: 256725830 Blast Desc: NECHADRAFT_94612 [Nectria haematococca mpVI 77-13-4]
  misc_feature (81)..(644): NCBI GI: 256728432 Blast Desc: NECHADRAFT_53935 [Nectria haematococca mpVI 77-13-4]
  misc_feature (64)..(653): NCBI GI: 85093286 Blast Desc: NCU08172 [Neurospora crassa OR74A] gi|28921111|gb|EAA30428.1| [Neurospora crassa OR74A]
  misc_feature (67)..(653): NCBI GI: 46135647 Blast Desc: FG09346.1 [Gibberella zeae PH-1]
  misc_feature (67)..(654): NCBI GI: 145236391 Blast Desc: An06g00150 [Aspergillus niger] gi|134075297|emb|CAK44931.1| protein product [Aspergillus niger]
  misc_feature (60)..(654): NCBI GI: 169782207 Blast Desc: [Aspergillus oryzae RIB40] gi|83774309|dbj|BAE64433.1| protein product [Aspergillus oryzae]
  misc_feature (66)..(653): NCBI GI: 169599855 Blast Desc: SNOG_02753 [Phaeosphaeria nodorum SN15] gi|111068364|gb|EAT89484.1| SNOG_02753 [Phaeosphaeria nodorum SN15]
  misc_feature (35)..(654): NCBI GI: 115400213 Blast Desc: [Aspergillus terreus NIH2624] gi|114191361|gb|EAU33061.1| [Aspergillus terreus NIH2624]
  misc_feature (52)..(647): NCBI GI: 119467105 Blast Desc: NFIA_047990 [Neosartorya fischeri NRRL 181] gi|119405511|gb|EAW15462.1| NFIA_047990 [Neosartorya fischeri NRRL 181]
  misc_feature (34)..(652): NCBI GI: 238495142 Blast Desc: conserved [Aspergillus flavus NRRL3357] gi|220695457|gb|EED51800.1| conserved [Aspergillus flavus NRRL3357]
MMMAPGYYRVTPSAEIQNVTSTHFQHPIQINTLPSQYGSPVTSAFHTDTPSQQPNSVPTSSTRGPNWFLEYAALALCWATIVAIIILMTKIDEMPLSSWSAPITPNAVVSVLAAIARAPLGFAIGSCIGQAKWNWFRKRSDSLLAFDRLDDASRGPWGSVWLIVWVKASHWVAIGAAIVIALLAFEPFLQAVLSFDGRIDPVLHNGAAQIGRSEFLEAGSTTFPLASDPADRKVHTIILPENKTVALSPIETSPDFRMVFALNNAFDDLELAAKQNPLFSCPTANCTWALSTSLAVCSSCTNVTNHIKKDVWREFNRTWIEKYLPSVGIANLSGSNGTTIGSSYTATMKLTDTHQTISFRNLSTMITAVQVIQAADSYRQNELPWDKVPIIGTECALYFCVKASEVSVKQGVLNETAVMTWAHRNFSSYTGDLSTPDGQLWDKHNYYSLLPRTINGTLVDIPRDDLILSVPTEDIQQLGLPKNTTTRFKITQNAVASMVTWVNNEFLLYGETEAYEGRGTGPITQSLHKNISLTTSFNQAAISLSNWIRDTSRTAESGMIEEWVVHIKVQWAYITLPLLALILGTAFCCKSILETRALGLEAWKTDTIATLTYSVDAETRAHLRQARRDRNLAKTARAIKVRLEDADGGYELRAKQA

SEQ ID NO: 4261 - DNA, 1287 bp, Muscodor strobelii
  misc_feature: SGI cDNA ID NO. 561106
  misc_feature: Encodes the peptide sequence at SEQ ID NO 4262
atgggtaaacgcgcccgccagaatcaccaatgccttgatcagcaagatttcttcatcgctagaggcaccaagttctcgtctgaagatgttgagaacgataccattcgctctgccctattgggcgatgtatctgacgaagataacaatgaggttgccgacaaggtcggcgagttgttaactcgtctttatgatatctctcttgcaaacaagtcgctcgctctcgcgtcgcgcctaggcaatgcatactggagtctcgtaagccaacaatggcacgcacatgcccccttagaggctcgacaagtccaggccatcgtcaacgtttacgccgacgctcgcgagcggggagtcgccaagggatggcctgcctcgactcaactctcccagctcgtcactgattatatcgccatacgcaaggaggtccgctccctgtcgcccttggacacacttaccatggcataccgaccgtctttagccacccaaacagctgaggcattccaagaccttactgtctcgcgtgatacgctctctgcatctgcgcccctaacctactggcctcctgcgcatctgagcgccacagaagtggagtggattacggacccttctgtcgtcgctagattgtccggtgtaagctatctcaacgatcccggccgagctcagcttgtcgcccctgatggacacacacaccctcgcgatatcaccgcgtaccttgtcgtcacagtgctattcaaccagaaccccgtctcgcacgactggtcgctttatatgcggcctattagattctttagcgcgcaacagaaaaaaagccggtataccgcgacgggatctgcctctaagtactatgataccgtcggtcaattcatcacttacgtcaacgacaactttgacacggttttcatggggtcgcgacacaccgtatttgggttcttctcgtattggcctcgtgcaactcccaaggactatgcaaccctcaactccaccctctatgcagatcatagcgagcaatgggtcaaggaatgcgccaaatacggtatgcttgtgctcattgttcgcgacacgaatggctccctgaatatgatcatgtacgatcattaccatacgaagctgcagaacgagcagaatcccaacccgctcgagtggcaagtgaaaagggacatctgcaatcgacttgacgaagcattcggctttgccagagtcttccatgggggcgacgagtcagtcttgaaatgggacaatggagagcccgcacacgacgtagtgagccattcgttgacttccctctggagatag

SEQ ID NO: 4262 - protein, 428 aa, Muscodor strobelii
  misc_feature: SGI Peptide ID NO. 561106
MGKRARQNHQCLDQQDFFIARGTKFSSEDVENDTIRSALLGDVSDEDNNEVADKVGELLTRLYDISLANKSLALASRLGNAYWSLVSQQWHAHAPLEARQVQAIVNVYADARERGVAKGWPASTQLSQLVTDYIAIRKEVRSLSPLDTLTMAYRPSLATQTAEAFQDLTVSRDTLSASAPLTYWPPAHLSATEVEWITDPSVVARLSGVSYLNDPGRAQLVAPDGHTHPRDITAYLVVTVLFNQNPVSHDWSLYMRPIRFFSAQQKKSRYTATGSASKYYDTVGQFITYVNDNFDTVFMGSRHTVFGFFSYWPRATPKDYATLNSTLYADHSEQWVKECAKYGMLVLIVRDTNGSLNMIMYDHYHTKLQNEQNPNPLEWQVKRDICNRLDEAFGFARVFHGGDESVLKWDNGEPAHDVVSHSLTSLWR

SEQ ID NO: 4263 - DNA, 351 bp, Muscodor strobelii
  misc_feature: SGI cDNA ID NO. 561107
  misc_feature: Encodes the peptide sequence at SEQ ID NO 4264
atgcttttcatcaacttgattggcctagcatctgcggtcgctgcagcgaccattgaccctcgtgccactcggccaaaggccaatgagtacaagagtggcgattgctctggttcgttcagctacggtcacaactcatttactttgcacgacgtaaccatggacgacacgacgaagtctgtgtatttgaccggcaattgggagctttggagtgggaagtctggaaatggaggctcctgcacgggcacaaagtctctcgatgtgagctaccctagcggagcgtgtattagcacctccgctaagtcctggcatgcgaaccttccggtcaagtgtgtgcgcaacaaggactattag

SEQ ID NO: 4264 - protein, 116 aa, Muscodor strobelii
  misc_feature: SGI Peptide ID NO. 561107
  misc_feature (1)..(95): NCBI GI: 256727931 Blast Desc: small secreted protein [Nectria haematococca mpVI 77-13-4]
  misc_feature (7)..(114): NCBI GI: 85085501 Blast Desc: NCU04447 [Neurospora crassa OR74A] gi|28918616|gb|EAA28288.1| [Neurospora crassa OR74A] gi|40882174|emb|CAF06000.1| conserved [Neurospora crassa]
  misc_feature (22)..(81): NCBI GI: 46138155 Blast Desc: FG10592.1 [Gibberella zeae PH-1]
  misc_feature (4)..(112): NCBI GI: 256721060 Blast Desc: NECHADRAFT_88706 [Nectria haematococca mpVI 77-13-4]
  misc_feature (1)..(82): NCBI GI: 85102169 Blast Desc: NCU04126 [Neurospora crassa OR74A] gi|16944424|emb|CAC28780.2| [Neurospora crassa] gi|28922825|gb|EAA32046.1| [Neurospora crassa OR74A]
  misc_feature (6)..(112): NCBI GI: 121703263 Blast Desc: conserved [Aspergillus clavatus NRRL 1] gi|119398039|gb|EAW08470.1| conserved [Aspergillus clavatus NRRL 1]
MLFINLIGLASAVAAATIDPRATRPKANEYKSGDCSGSFSYGHNSFTLHDVTMDDTTKSVYLTGNWELWSGKSGNGGSCTGTKSLDVSYPSGACISTSAKSWHANLPVKCVRNKDY

SEQ ID NO: 4265 - DNA, 535 bp, Muscodor strobelii
  misc_feature: SGI EST ID NO. CUFF.10823.0
  misc_feature: Variant of the nucleotide sequence at SEQ ID NO 4263
cccggttgaaactcgagactcatacacgatcatttacctccagcccaatatgcttttcatcaacttgattggcctagcatctgcggtcgctgcagcgaccattgaccctcgtgccactcggccaaaggccaatgagtacaagagtggcgattgctctggttcgttcagctacggtcacaactcatttactttgcacgacgtaaccatggacgacacgacgaagtctgtgtatttgaccggcaattgggagctttggagtgggaagtctggaaatggaggctcctgcacgggcacaaagtctctcgatgtgagctaccctagcggagcgtgtattagcacctccgctaagtcctggcatgcgaaccttccggtcaagtgtgtgcgcaacaaggactattaggtgcacaggagcagctgggtgaaattgggtttgatgtaactagggcccccttgaccggcgcgtagtcttcagaagactcaagtttgaggatatttgatcatgtctgttcgtgttttgcgtagttagctctctgcc

SEQ ID NO: 4266 - DNA, 1206 bp, Muscodor strobelii
  misc_feature: SGI cDNA ID NO. 561108
  misc_feature: Encodes the peptide sequence at SEQ ID NO 4267
atgagtatgaacaagagccgacttgtgtcaacacaacacatgatcttaaagcactcgtccagttggcttactttggtcaacttagtcttcgcagccgctgccctagccatcgagattccacctcctactgggccctaccatgttggtaagacgaagttgacaatacatcactacaacgaccatgatccgctagcccctaataatatcagcaccgcctttctggccacggtgttctatcccaccttgcaaaagccctgtgggccgccaaagccttacctagatcccgagcttgctaagtactacgagaacagatggaattatagctcgggctttcttcaatcactcacctcagtcgtccaggacgatgctcctttcttgccggattccacagagaagtctctattgccaacccttttgtatggagccgccggcggaggtccacccgtcgatggtaccaccatcctgctttccgacttggcctcatatgggtacaccatcttcggcctagatcacccatttgatcagccttttatccgtttcccaaatggaacgggagtcaaaggaacggagtgggataggtattattcaagcgagcagttacctcctctgtttgagatgagactagaagacaatcgagtcttcctcgacagacttcccagtattgtgcaagagcttaattttccgttgaatacgagtctcatcggcgcactcgggttttcatttggtggagctgcagcgattggatcaatgtataacttcgactctattgcttcgagtatcgacttggatggaacgctctttggcagagcagctctgaattcgacccatgccgacgtcaaaaagcccgtactgcttttcggagccgagcgagagccaaacgacaacactaacgagatacggggtgattcatgggccacttttcccatgtggcaaacgggattcttcccttatctatttgttaacggcacgacggagttggacttctgtgataatacgttctggcgcatgattgaacccaaccctttgctcggtggaaccatcgagccgctgcgtatgctgaacattacacgttcgtacgtcaaagcattcttcgatcggactttgctaagtgcagattcgtcgttgatgaaagggccatctcctgaatatcccgatgttctctggtatgataaccagagcggtcagattattaatcctcctagttag

SEQ ID NO: 4267 - protein, 401 aa, Muscodor strobelii
  misc_feature: SGI Peptide ID NO. 561108
  misc_feature (22)..(386): NCBI GI: 39977415 Blast Desc: MGG_06610 [Magnaporthe grisea 70-15] gi|145015942|gb|EDK00432.1| MGG_06610 [Magnaporthe grisea 70-15]
  misc_feature (35)..(386): NCBI GI: 225936774 Blast Desc: lipase [Streptomyces violaceoruber]
  misc_feature (31)..(386): NCBI GI: 254404791 Blast Desc: lipase [Streptomyces sviceus ATCC 29083] gi|197714248|gb|EDY58282.1| lipase [Streptomyces sviceus ATCC 29083]
  misc_feature (37)..(389): NCBI GI: 254390140 Blast Desc: lipase [Streptomyces clavuligerus ATCC 27064] gi|197703847|gb|EDY49659.1| lipase [Streptomyces clavuligerus ATCC 27064]
  misc_feature (36)..(391): NCBI GI: 121704577 Blast Desc: PAF acetylhydrolase family protein [Aspergillus clavatus NRRL 1] gi|119398697|gb|EAW09126.1| PAF acetylhydrolase family protein [Aspergillus clavatus NRRL 1]
  misc_feature (32)..(386): NCBI GI: 261406689 Blast Desc: protein of function DUF214 [Geobacillus sp. Y412MC10] gi|261283152|gb|ACX65123.1| protein of function DUF214 [Geobacillus sp. Y412MC10]
  misc_feature (23)..(387): NCBI GI: 71002852 Blast Desc: PAF acetylhydrolase family protein [Aspergillus fumigatus Af293] gi|66853745|gb|EAL94069.1| PAF acetylhydrolase family protein [Aspergillus fumigatus Af293]
  misc_feature (23)..(386): NCBI GI: 271964743 Blast Desc: Sros_3253 [Streptosporangium roseum DSM 43021] gi|270507918|gb|ACZ86196.1| conserved [Streptosporangium roseum DSM 43021]
  misc_feature (31)..(386): NCBI GI: 29827360 Blast Desc: lipase [Streptomyces avermitilis MA-4680] gi|29604459|dbj|BAC68529.1| hydrolase [Streptomyces avermitilis MA-4680]
  misc_feature (36)..(387): NCBI GI: 159130162 Blast Desc: PAF acetylhydrolase family protein [Aspergillus fumigatus A1163]
MSMNKSRLVSTQHMILKHSSSWLTLVNLVFAAAALAIEIPPPTGPYHVGKTKLTIHHYNDHDPLAPNNISTAFLATVFYPTLQKPCGPPKPYLDPELAKYYENRWNYSSGFLQSLTSVVQDDAPFLPDSTEKSLLPTLLYGAAGGGPPVDGTTILLSDLASYGYTIFGLDHPFDQPFIRFPNGTGVKGTEWDRYYSSEQLPPLFEMRLEDNRVFLDRLPSIVQELNFPLNTSLIGALGFSFGGAAAIGSMYNFDSIASSIDLDGTLFGRAALNSTHADVKKPVLLFGAEREPNDNTNEIRGDSWATFPMWQTGFFPYLFVNGTTELDFCDNTFWRMIEPNPLLGGTIEPLRMLNITRSYVKAFFDRTLLSADSSLMKGPSPEYPDVLWYDNQSGQIINPPS

SEQ ID NO: 4268 - DNA, 1340 bp, Muscodor strobelii
  misc_feature: SGI EST ID NO. CUFF.10830.0
  misc_feature: Variant of the nucleotide sequence at SEQ ID NO 4266
caagacttgtcgcacaactctgcagtaagagatcaagtctcacctctccctagtgtctatcgttatacttatgtgattattaaacaaagacattcatccacaatgagtatgaacaagagccgacttgtgtcaacacaacacatgatcttaaagcactcgtccagttggcttactttggtcaacttagtcttcgcagccgctgccctagccatcgagattccacctcctactgggccctaccatgttggtaagacgaagttgacaatacatcactacaacgaccatgatccgctagcccctaataatatcagcaccgcctttctggccacggtgttctatcccaccttgcaaaagccctgtgggccgccaaagccttacctagatcccgagcttgctaagtactacgagaacagatggaattatagctcgggctttcttcaatcactcacctcagtcgtccaggacgatgctcctttcttgccggattccacagagaagtctctattgccaacccttttgtatggagccgccggcggaggtccacccgtcgatggtaccaccatcctgctttccgacttggcctcatatgggtacaccatcttcggcctagatcacccatttgatcagccttttatccgtttcccaaatggaacgggagtcaaaggaacggagtgggataggtattattcaagcgagcagttacctcctctgtttgagatgagactagaagacaatcgagtcttcctcgacagacttcccagtattgtgcaagagcttaattttccgttgaatacgagtctcatcggcgcactcgggttttcatttggtggagctgcagcgattggatcaatgtataacttcgactctattgcttcgagtatcgacttggatggaacgctctttggcagagcagctctgaattcgacccatgccgacgtcaaaaagcccgtactgcttttcggagccgagcgagagccaaacgacaacactaacgagatacggggtgattcatgggccacttttcccatgtggcaaacgggattcttcccttatctatttgttaacggcacgacggagttggacttctgtgataatacgttctggcgcatgattgaacccaaccctttgctcggtggaaccatcgagccgctgcgtatgctgaacattacacgttcgtacgtcaaagcattcttcgatcggactttgctaagtgcagattcgtcgttgatgaaagggccatctcctgaatatcccgatgttctctggtatgataaccagagcggtcagattattaatcctcctagttagtggagtccgatagaatctatgagatcaccgag

SEQ ID NO: 4269 - DNA, 2031 bp, Muscodor strobelii
  misc_feature: SGI cDNA ID NO. 561109
  misc_feature: Encodes the peptide sequence at SEQ ID NO 4270
atggctgctacttgtcggagtcctctctggagctgtgtcgtgttgttccttggcgttctatcgatcttccatttttgcaggattaatagccagagcgagaagaataatgatttttatgttggatatgatggaacgggacatgttattggtattgaatactcccgtgtagcatttcagagctcttcaaataatatcgagatcttggagatcgatcatggagaacgcttcatgccctcttgcgtcgcgtttacacaggcaggaattgcattcggagaagacgctcggaaacatgcgcaatacgaacctgaaaacactatttgcggttggagaagactagtaggagtaaactgggacgacgcaaaagttcgagaatacgcccagaccctcccgtacgcaatagttggtgaacggatcgagtcgctccaggtcaggccagtcatcaaagtcaaacagaatggcggtgtaaggactttcttacctgaagacatcttagcattgttcttgggcaaactgaagcaagtcgcgggagacatattggggaaagaagttgctggagcggtattgacaacatccccaactaccagtgacgcagggagacaagccatgaaagaagcaggaaaacgtgcgcgtatcgatatattgcgcatcacaaacgagcctctgtcggcatctgtggcctatgggttggatcgtgtggattgctatggaattggagagcaattggcccttgttgtagacattggaaacactgctgatattaccgtcatggatgtcgactgtggcgtcttcgaaattttagggcactcgaatgtccctatcggcggacaagccttcaatcagcgcgtagtggaccatatcttgaatgagtttaacgttgcgcgtggtgttcagcataccccaccacgacgtcgcgtcttcgagcttaaagaacaagtcgagaacgccaaacggctcctatcttcgactcggacagctgaaatcttcgttgataatttctccgatttgatacttctgaacaagacacttagccgggcgagattcgaagacctgaataaagatctctttcatactattgtaagctctgtggaccaagtattgaaagatgctaaagtgaacgtcaatgatatcaatgatctaatcattgtcggaggctcttcacacataccaaaggtcgttgagatgttagaagagcatctgaataagtccaagcgcgcggaggcagaggccaacgcggaggaggccgtcgttatcggtgcggctatcatgggcggggtgttatccggtaatgatctgggctgtatggtttcagcgtatgacgtgactcctttgagtttaggaattgaggtaaccggcggtctcatgaagaagatcatgcaccgccacactgccgtaccatctcggaagacacagaacttctcaacagcgggggacaaccagtcagcgatcgcaataaaggtctttgagggtgaacgagtcatgtcgcgggataacaacctgcttgggacgctagatatacttggtattgagcctgctccgcgaggagcaccagtgatcgaagtatctttttcaatgtcggcggactatgttctagaggtcgttgcacagaacatggatactgggacaaacgcatctttacgtattaacccttctgattggggagtttggaagagagacacaattgatgagcttatcatggaatatgaaattcacagagaagccgatcaggccatctacgaaaatttcgaagctctcatggatctagagagctacgtcttcggcgtgcggcattgggtggatgcgcactacgagaagtcgggaggtcaagcctttccgaagatagagaacgctctcgaacagactgaagactggctgaactgcagcgtcgcgactgcaacggccctcgagttgaacgagcagaagctgagactttctaatctcgtaaagaagtggcttggcgaaccaatcacatttcagtcaatggctcgcatcgatggatttgtaggagaggcggagatacacgatgagctgtga

SEQ ID NO: 4270 - protein, 676 aa, Muscodor strobelii
  misc_feature: SGI Peptide ID NO. 561109
  misc_feature (48)..(656): Pfam Id: PF00012 Pfam Desc: Hsp70 protein
  misc_feature (6)..(676): NCBI GI: 85080590 Blast Desc: 78 kDa glucose-regulated protein precursor [Neurospora crassa OR74A] gi|45645170|sp|P78695.3|GRP78_NEUCR RecName: Full=78 kDa glucose-regulated protein homolog; AltName: Full=GRP
  misc_feature (1)..(676): NCBI GI: 156060255 Blast Desc: SS1G_02266 [Sclerotinia sclerotiorum 1980] gi|154699674|gb|EDN99412.1| SS1G_02266 [Sclerotinia sclerotiorum 1980]
  misc_feature (1)..(676): NCBI GI: 154315635 Blast Desc: dnaK-type molecular chaperone BiP [Botryotinia fuckeliana B05.10] gi|150847330|gb|EDN22523.1| dnaK-type molecular chaperone BiP [Botryotinia fuckeliana B05.10]
  misc_feature (4)..(646): NCBI GI: 115399258 Blast Desc: 78 kDa glucose-regulated protein precursor [Aspergillus terreus NIH2624] gi|114192101|gb|EAU33801.1| 78 kDa glucose-regulated protein precursor [Aspergillus terreus NIH2624]
  misc_feature (10)..(676): NCBI GI: 261359408 Blast Desc: hsp70-like protein [Verticillium albo-atrum VaMs.102]
  misc_feature (4)..(646): NCBI GI: 70989489 Blast Desc: Hsp70 chaperone BiP/Kar2 [Aspergillus fumigatus Af293] gi|66847225|gb|EAL87556.1| Hsp70 chaperone BiP/Kar2, [Aspergillus fumigatus Af293] gi|159129003|gb|EDP54117.1| ER Hsp70 chaperone
  misc_feature (4)..(646): NCBI GI: 119480127 Blast Desc: ER Hsp70 chaperone BiP, [Neosartorya fischeri NRRL 181] gi|119408246|gb|EAW18195.1| ER Hsp70 chaperone BiP, [Neosartorya fischeri NRRL 181]
  misc_feature (6)..(676): NCBI GI: 171682512 Blast Desc: protein product [Podospora anserina] gi|170941215|emb|CAP66865.1| protein product [Podospora anserina]
  misc_feature (6)..(676): NCBI GI: 2505906 Blast Desc: grp78 homologue [Neurospora crassa]
  misc_feature (43)..(676): NCBI GI: 256727099 Blast Desc: [Nectria haematococca mpVI 77-13-4]
MAATCRSPLWSCVVLFLGVLSIFHFCRINSQSEKNNDFYVGYDGTGHVIGIEYSRVAFQSSSNNIEILEIDHGERFMPSCVAFTQAGIAFGEDARKHAQYEPENTICGWRRLVGVNWDDAKVREYAQTLPYAIVGERIESLQVRPVIKVKQNGGVRTFLPEDILALFLGKLKQVAGDILGKEVAGAVLTTSPTTSDAGRQAMKEAGKRARIDILRITNEPLSASVAYGLDRVDCYGIGEQLALVVDIGNTADITVMDVDCGVFEILGHSNVPIGGQAFNQRVVDHILNEFNVARGVQHTPPRRRVFELKEQVENAKRLLSSTRTAEIFVDNFSDLILLNKTLSRARFEDLNKDLFHTIVSSVDQVLKDAKVNVNDINDLIIVGGSSHIPKVVEMLEEHLNKSKRAEAEANAEEAVVIGAAIMGGVLSGNDLGCMVSAYDVTPLSLGIEVTGGLMKKIMHRHTAVPSRKTQNFSTAGDNQSAIAIKVFEGERVMSRDNNLLGTLDILGIEPAPRGAPVIEVSFSMSADYVLEVVAQNMDTGTNASLRINPSDWGVWKRDTIDELIMEYEIHREADQAIYENFEALMDLESYVFGVRHWVDAHYEKSGGQAFPKIENALEQTEDWLNCSVATATALELNEQKLRLSNLVKKWLGEPITFQSMARIDGFVGEAEIHDEL

SEQ ID NO: 4271 - DNA, 1188 bp, Muscodor strobelii
  misc_feature: SGI EST ID NO. CUFF.10833.0
  misc_feature: Variant of the nucleotide sequence at SEQ ID NO 4269
tccggtaatgatctgggctgtatggtttcagcgtatgacgtgactcctttgagtttaggaattgaggtaaccggcggtctcatgaagaagatcatgcaccgccacactgccgtaccatctcggaagacacagaacttctcaacagcgggggacaaccagtcagcgatcgcaataaaggtctttgagggtgaacgagtcatgtcgcgggataacaacctgcttgggacgctagatatacttggtattgagcctgctccgcgaggagcaccagtgatcgaagtatctttttcaatgtcggcggactatgttctagaggtcgttgcacagaacatgggtgaacaatgtacccgaggtttacatattatgtatcagctgactatcgagcagatactgggacaaacgcatctttacgtattaacccttctgattggggagtttggaagagagacacaattgatgagcttatcatggaatatgagtacgattatgtcgtcatcccaagcagcgagcatgaaagacactaacaggttcaatcagaattcacagagaagccgatcaggccatctacgaaaatttcgaagctctcatggatctagagagctacgtcttcggcgtgcggcattgggtggatgcgcactacgagaagtcgggaggtcaagcctttccgaagatagagaacgctctcgaacagactgaagactggctgaactgcagcgtcgcgactgcaacggccctcgagttgaacgagcagaagctgagactttctaatctcgtaaagaagtggcttggcgaaccaatcacatttcagtcaatggctcgcatcgatggatttgtaggagaggcggagatacacgatgagctgtgacatcttaacttcgaacgtccatattatttacttttcaaatctacaactttggattgtataatcaggtgatatatgatcatttggctcgcaacatagaactcaaaaagtgaaaagtgtcagattatttcgcgaaccacgatctgaatccttcgcagccggtgacatcacgctacatataggttgtaggaccatctaggacctgtggattgctgctaaaacgtacgtaacgcgatagcttgaggtaatccggtcatttcccctagcgacagtgtgaccagatagcgtcttccaagtcgtattttcattcatttcctacctcgcca

SEQ ID NO: 4272 - DNA, 2028 bp, Muscodor strobelii
  misc_feature: SGI cDNA ID NO. 561110
  misc_feature: Encodes the peptide sequence at SEQ ID NO 4273
atggctgctacttgtcggagtcctctctggagctgtgtcgtgttgttccttggcgttctatcgatcttccatttttgcaggattaatagccagagcgagaagaataatgatttttatgttggatatgatggaacgggacatgttattggtattgaatactcccgtgtagcatttcagagctcttcaaataatatcgagatcttggagatcgatcatggagaacgcttcatgccctcttgcgtcgcgtttacacaggcaggaattgcattcggagaagacgctcggaaacatgcgcaatacgaacctgaaaacactatttgcggttggagaagactagtaggagtaaactgggacgacgcaaaagttcgagaatacgcccagaccctcccgtacgcaatagttggtgaacggatcgagtcgctccaggtcaggccagtcatcaaagtcaaacagaatggcggtgtaaggactttcttacctgaagacatcttagcattgttcttgggcaaactgaagcaagtcgcgggagacatattggggaaagaagttgctggagcggtattgacaacatccccaactaccagtgacgcagggagacaagccatgaaagaagcaggaaaacgtgcgcgtatcgatatattgcgcatcacaaacgagcctctgtcggcatctgtggcctatgggttggatcgtgtggattgctatggaattggagagcaattggcccttgttgtagacattggaaacactgctgatattaccgtcatggatgtcgactgtggcgtcttcgaaattttagggcactcgaatgtccctatcggcggacaagccttcaatcagcgcgtagtggaccatatcttgaatgagtttaacgttgcgcgtggtgttcagcataccccaccacgacgtcgcgtcttcgagcttaaagaacaagtcgagaacgccaaacggctcctatcttcgactcggacagctgaaatcttcgttgataatttctccgatttgatacttctgaacaagacacttagccgggcgagattcgaagacctgaataaagatctctttcatactattgtaagctctgtggaccaagtattgaaagatgctaaagtgaacgtcaatgatatcaatgatctaatcattgtcggaggctcttcacacataccaaaggtagaaacatgcgaagagcatctgaataagtccaagcgcgcggaggcagaggccaacgcggaggaggccgtcgttatcggtgcggctatcatgggcggggtgttatccggtaatgatctgggctgtatggtttcagcgtatgacgtgactcctttgagtttaggaattgaggtaaccggcggtctcatgaagaagatcatgcaccgccacactgccgtaccatctcggaagacacagaacttctcaacagcgggggacaaccagtcagcgatcgcaataaaggtctttgagggtgaacgagtcatgtcgcgggataacaacctgcttgggacgctagatatacttggtattgagcctgctccgcgaggagcaccagtgatcgaagtatctttttcaatgtcggcggactatgttctagaggtcgttgcacagaacatggatactgggacaaacgcatctttacgtattaacccttctgattggggagtttggaagagagacacaattgatgagcttatcatggaatatgaaattcacagagaagccgatcaggccatctacgaaaatttcgaagctctcatggatctagagagctacgtcttcggcgtgcggcattgggtggatgcgcactacgagaagtcgggaggtcaagcctttccgaagatagagaacgctctcgaacagactgaagactggctgaactgcagcgtcgcgactgcaacggccctcgagttgaacgagcagaagctgagactttctaatctcgtaaagaagtggcttggcgaaccaatcacatttcagtcaatggctcgcatcgatggatttgtaggagaggcggagatacacgatgagctgtga

SEQ ID NO: 4273 - protein, 675 aa, Muscodor strobelii
  misc_feature: SGI Peptide ID NO. 561110
  misc_feature (48)..(655): Pfam Id: PF00012 Pfam Desc: Hsp70 protein
  misc_feature (6)..(675): NCBI GI: 85080590 Blast Desc: 78 kDa glucose-regulated protein precursor [Neurospora crassa OR74A] gi|45645170|sp|P78695.3|GRP78_NEUCR RecName: Full=78 kDa glucose-regulated protein homolog; AltName: Full=GRP
  misc_feature (1)..(675): NCBI GI: 156060255 Blast Desc: SS1G_02266 [Sclerotinia sclerotiorum 1980] gi|154699674|gb|EDN99412.1| SS1G_02266 [Sclerotinia sclerotiorum 1980]
  misc_feature (4)..(645): NCBI GI: 115399258 Blast Desc: 78 kDa glucose-regulated protein precursor [Aspergillus terreus NIH2624] gi|114192101|gb|EAU33801.1| 78 kDa glucose-regulated protein precursor [Aspergillus terreus NIH2624]
  misc_feature (1)..(675): NCBI GI: 154315635 Blast Desc: dnaK-type molecular chaperone BiP [Botryotinia fuckeliana B05.10] gi|150847330|gb|EDN22523.1| dnaK-type molecular chaperone BiP [Botryotinia fuckeliana B05.10]
  misc_feature (4)..(645): NCBI GI: 70989489 Blast Desc: Hsp70 chaperone BiP/Kar2 [Aspergillus fumigatus Af293] gi|66847225|gb|EAL87556.1| Hsp70 chaperone BiP/Kar2, [Aspergillus fumigatus Af293] gi|159129003|gb|EDP54117.1| ER Hsp70 chaperone
  misc_feature (6)..(675): NCBI GI: 171682512 Blast Desc: protein product [Podospora anserina] gi|170941215|emb|CAP66865.1| protein product [Podospora anserina]
  misc_feature (4)..(645): NCBI GI: 119480127 Blast Desc: ER Hsp70 chaperone BiP, [Neosartorya fischeri NRRL 181] gi|119408246|gb|EAW18195.1| ER Hsp70 chaperone BiP, [Neosartorya fischeri NRRL 181]
  misc_feature (6)..(675): NCBI GI: 2505906 Blast Desc: grp78 homologue [Neurospora crassa]
  misc_feature (10)..(675): NCBI GI: 261359408 Blast Desc: hsp70-like protein [Verticillium albo-atrum VaMs.102]
  misc_feature (43)..(675): NCBI GI: 256727099 Blast Desc: [Nectria haematococca mpVI 77-13-4]
MAATCRSPLWSCVVLFLGVLSIFHFCRINSQSEKNNDFYVGYDGTGHVIGIEYSRVAFQSSSNNIEILEIDHGERFMPSCVAFTQAGIAFGEDARKHAQYEPENTICGWRRLVGVNWDDAKVREYAQTLPYAIVGERIESLQVRPVIKVKQNGGVRTFLPEDILALFLGKLKQVAGDILGKEVAGAVLTTSPTTSDAGRQAMKEAGKRARIDILRITNEPLSASVAYGLDRVDCYGIGEQLALVVDIGNTADITVMDVDCGVFEILGHSNVPIGGQAFNQRVVDHILNEFNVARGVQHTPPRRRVFELKEQVENAKRLLSSTRTAEIFVDNFSDLILLNKTLSRARFEDLNKDLFHTIVSSVDQVLKDAKVNVNDINDLIIVGGSSHIPKVETCEEHLNKSKRAEAEANAEEAVVIGAAIMGGVLSGNDLGCMVSAYDVTPLSLGIEVTGGLMKKIMHRHTAVPSRKTQNFSTAGDNQSAIAIKVFEGERVMSRDNNLLGTLDILGIEPAPRGAPVIEVSFSMSADYVLEVVAQNMDTGTNASLRINPSDWGVWKRDTIDELIMEYEIHREADQAIYENFEALMDLESYVFGVRHWVDAHYEKSGGQAFPKIENALEQTEDWLNCSVATATALELNEQKLRLSNLVKKWLGEPITFQSMARIDGFVGEAEIHDEL

SEQ ID NO: 4274 - DNA, 1188 bp, Muscodor strobelii; identical to SEQ ID NO: 4271
  misc_feature: SGI EST ID NO. CUFF.10833.0
  misc_feature: Variant of the nucleotide sequence at SEQ ID NO 4272

SEQ ID NO: 4275 - DNA, 471 bp, Muscodor strobelii
  misc_feature: SGI cDNA ID NO. 561111
  misc_feature: Reduced expression when VOC is produced
  misc_feature: Encodes the peptide sequence at SEQ ID NO 4276
atgcctaagaataagggaaagggaggaaagaaccgaagaaggggaaagaacgagtccgacaaggagaagcgtgagctcgtcttcaaggaggaaggccaggagtacgcccaggtcgtcaagatgcttggctccggccgtctctcctgctcctgcttcgacggccagacccgtctcgcccacatccgcggcaagctgcgcaagaaggtctggatcaacaacggcgacatcatccttctgtcgctgcgtgactatcaggacgacaagggtgacgtcctcatcaagtacaccgccgacgaggcccgctccctcaaggcctacggtgaactccccgagagcgccaggatcaacgagaccgacacctacggccccggcgacgagggcgagtgcaacttcgatttcgccgacgaccaggactccgacgacgattccgattccgagggcaacaaggagatcgcgatcgacgacatctag

SEQ ID NO: 4276 - protein, 156 aa, Muscodor strobelii
  misc_feature: SGI Peptide ID NO. 561111
  misc_feature (30)..(94): Pfam Id: PF01176 Pfam Desc: Translation initiation factor 1A / IF-1
  misc_feature (1)..(156): NCBI GI: 171684921 Blast Desc: protein product [Podospora anserina] gi|170942421|emb|CAP68073.1| protein product [Podospora anserina]
  misc_feature (1)..(156): NCBI GI: 169778857 Blast Desc: [Aspergillus oryzae RIB40] gi|238499433|ref|XP_002380951.1| eukaryotic translation initiation factor eIF-1A subunit, [Aspergillus flavus NRRL3357]
  misc_feature (1)..(156): NCBI GI: 154291587 Blast Desc: eukaryotic translation initiation factor eIF-1A [Botryotinia fuckeliana B05.10] gi|150846699|gb|EDN21892.1| eukaryotic translation initiation factor eIF-1A [Botryotinia
  misc_feature (1)..(156): NCBI GI: 121704030 Blast Desc: eukaryotic translation initiation factor eIF-1A subunit, [Aspergillus clavatus NRRL 1] gi|119398423|gb|EAW08853.1| eukaryotic translation initiation 1]
  misc_feature (1)..(156): NCBI GI: 156056494 Blast Desc: translation initiation factor 1A [Sclerotinia sclerotiorum 1980] gi|154703383|gb|EDO03122.1| translation initiation factor 1A [Sclerotinia sclerotiorum 1980]
  misc_feature (1)..(156): NCBI GI: 259483094 Blast Desc: TPA: eukaryotic translation initiation factor eIF-1A subunit, (AFU_orthologue; AFUA_6G02520) [Aspergillus nidulans FGSC A4]
  misc_feature (1)..(156): NCBI GI: 119467268 Blast Desc: eukaryotic translation initiation factor eIF-1A subunit, [Neosartorya fischeri NRRL 181] gi|119405592|gb|EAW15543.1| eukaryotic translation initiation
  misc_feature (1)..(156): NCBI GI: 115386692 Blast Desc: eukaryotic translation initiation factor 1A [Aspergillus terreus NIH2624] gi|114190885|gb|EAU32585.1| eukaryotic translation initiation factor 1A [Aspergillus terreus
  misc_feature (1)..(156): NCBI GI: 145247184 Blast Desc: An12g07900 [Aspergillus niger] gi|134080572|emb|CAK41240.1| protein product [Aspergillus niger]
  misc_feature (1)..(156): NCBI GI: 212526682 Blast Desc: eukaryotic translation initiation factor eIF-1A subunit, [Penicillium marneffei ATCC 18224] gi|210072896|gb|EEA26983.1| eukaryotic translation initiation
  misc_feature: Useful for introducing or modulating the production of volatile compounds
MPKNKGKGGKNRRRGKNESDKEKRELVFKEEGQEYAQVVKMLGSGRLSCSCFDGQTRLAHIRGKLRKKVWINNGDIILLSLRDYQDDKGDVLIKYTADEARSLKAYGELPESARINETDTYGPGDEGECNFDFADDQDSDDDSDSEGNKEIAIDDI

SEQ ID NO: 4277 - DNA, 1197 bp, Muscodor strobelii
  misc_feature: SGI EST ID NO. CUFF.10866.0
  misc_feature: Variant of the nucleotide sequence at SEQ ID NO 4275
cccactccgactggcactcacttgtccaccacatcatctcaacaaccgccgccaccaacactgcaattcctacacccttttcccccctacacacacatcaactccataacacattctctcgcttccagtgtctcgcgagacatctagtcaacatgcctaagaataagggaaagggaggaaagaaccgaagaaggggaaagaacgagtccgacaaggagaagcgtgagctcgtcttcaaggaggaaggccaggagtacgcccaggtcgtcaagatgcttggctccggccgtctctcctgctcctgcttcgacggccagacccgtctcgcccacatccgcggcaagctgcgcaagaaggtctggatcaacaacggcgacatcatccttctgtcgctgcgtgactatcaggacgacaagggtgacgtcctcatcaagtacaccgccgacgaggcccgctccctcaaggcctacggtgaactccccgagagcgccaggatcaacgagaccgacacctacggccccggcgacgagggcgagtgcaacttcgatttcgccgacgaccaggactccgacgacgattccgattccgagggcaacaaggagatcgcgatcgacgacatctagatacacttcagcactcttcgtcccttcgcgccccaatatctatcactcggcttctgctgtccatttttccggcaacggatacatttagaccacgtcagcacacgcaagctaccatagtctcgggtgctagggagcactgttcacagagtccaccatcatcatggcccattccggtatcttcttgactggtagactcattgcatctgtcttctctctctaactcgcatatgcccaatttccctccctccacggcgcaggaaacgacatcccccatgtatcatattcgggttccccgacagcaacaactggacagcgcaggcgttcccggccagagaaaaattgtctggcaacgacttgtttccttttccgtatcagaacaatcgtagtccgtgatgggagagacgtcgctggactcggttggggggatgaccttgtttttcctttgtacgcttcatggctcatgcgcattgtttaatggtaacgatgtaatgttggtagtcatgaacaataaacatatctaaaaaagagatcgtattgagactgcgtgatgtaattttctggtaatcctttgcag

SEQ ID NO: 4278 - DNA, 1281 bp, Muscodor strobelii
  misc_feature: SGI cDNA ID NO. 561112
  misc_feature: Reduced expression when VOC is produced
  misc_feature: Encodes the peptide sequence at SEQ ID NO 4279
atggctcctatcgtatgcaccgggcgcgcacacctcttccgtacagtccaggtcaagcccctagagcagctgcccaacatccggaaacccttgcccaagcccgagcctatctcacgaaccggtggccattaccaggtcccgttcgccgccccctcccagcccgatgccctagccgacctccggtccttccccaagcaagtccctccgcatctccaggctgtatctgccgagcatggtttcgccatgccctcgaccatgactgccgtccggcacacgcacacgcaggcgctgcaaggcaagccctggaagatctggctctccgtctcccaccagcactgcttcgacccccgccaccggaagtacttcgaggatctcgagcatccctggaccaggtcccaggtggactactacgtcgacaagagcaaagagcccctgtggctatggggcttcttctacggcgctcgcccctgcgctgtccgcaagagcgagaaggccatgaagcaggcttttcgttgggccatggcccagaagcgctacgaccgctacggcacgcagaccgaccgccggggcgtcgtcacggggacaatgcacggcacgctccagatcagctgcaacacgccttgcgagctgttcaaggagaagacgatgcggccgattgcccaggccatcctcgaggcggtcgagcccatgctgcagaagcgcgtcaacacgccccatctcccggtggtgccggacgggttgagtatgcacgacttacgaacacggagccagatctttcaggccaactcggcgattcggaacgtcacagactctgcaggcaaggccctatttcctcccgtattgcaacagcccaagcccaagtcagtctggctgccgagggcggcgtcggcggtgccgctaccccctccggtgccaataagtaaaagaggcgacacagcagcagcggcttctccgatccccaaggctgtaccgaagtacggagtcgaagcgaatatgaggaaatcgaaagaaatacagagggccaaccgacgtagccaggaggggctgaaaaacgactggccaacgagttttgacgagatgaatagcaagcccaagaaggcgcgcaaggctaagactactcctgtgtcagtgcccgacttgagcaaggtgtacgcacgggtcccgatgtccatcgccagtctgctcatgcaaaagcaaaagcgggacgcgcaggacaagcagggcgaacagggcgaacagggacagacacataagccactcgatacgtcgagctggggctag

SEQ ID NO: 4279 - protein, 426 aa, Muscodor strobelii
  misc_feature: SGI Peptide ID NO. 561112
  misc_feature: Useful for introducing or modulating the production of volatile compounds
MAPIVCTGRAHLFRTVQVKPLEQLPNIRKPLPKPEPISRTGGHYQVPFAAPSQPDALADLRSFPKQVPPHLQAVSAEHGFAMPSTMTAVRHTHTQALQGKPWKIWLSVSHQHCFDPRHRKYFEDLEHPWTRSQVDYYVDKSKEPLWLWGFFYGARPCAVRKSEKAMKQAFRWAMAQKRYDRYGTQTDRRGVVTGTMHGTLQISCNTPCELFKEKTMRPIAQAILEAVEPMLQKRVNTPHLPVVPDGLSMHDLRTRSQIFQANSAIRNVTDSAGKALFPPVLQQPKPKSVWLPRAASAVPLPPPVPISKRGDTAAAASPIPKAVPKYGVEANMRKSKEIQRANRRSQEGLKNDWPTSFDEMNSKPKKARKAKTTPVSVPDLSKVYARVPMSIASLLMQKQKRDAQDKQGEQGEQGQTHKPLDTSSWG

SEQ ID NO: 4280 - DNA, 1782 bp, Muscodor strobelii
  misc_feature: SGI EST ID NO. CUFF.10862.0
  misc_feature: Variant of the nucleotide sequence at SEQ ID NO 4278
aaaccctttgtacctcttaccttttatgtctttcccatgtaaaccgtattcgacgaatggcgtagtccagagtctataaatggatttcctaaggtctcaatgtctagtatagatcagaaacgacccagcgttcgtgcataccgggtacactactctcaccaacaccatcactctcatcgtgtgtcgcggcgcgcagtgtgttgcggcccgtatcgtcgccgccttcatcatgatactcaggatactctcccactagactctctcaccggctagctatggctcctatcgtatgcaccgggcgcgcacacctcttccgtacagtccaggtcaagcccctagagcagctgcccaacatccggaaacccttgcccaagcccgagcctatctcacgaaccggtggccattaccaggtcccgttcgccgccccctcccagcccgatgccctagccgacctccggtccttccccaagcaagtccctccgcatctccaggctgtatctgccgagcatggtttcgccatgccctcgaccatgactgccgtccggcacacgcacacgcaggcgctgcaaggcaagccctggaagatctggctctccgtctcccaccagcactgcttcgacccccgccaccggaagtacttcgaggatctcgagcatccctggaccaggtcccaggtggactactacgtcgacaagagcaaagagcccctgtggctatggggcttcttctacggcgctcgcccctgcgctgtccgcaagagcgagaaggccatgaagcaggcttttcgttgggccatggcccagaagcgctacgaccgctacggcacgcagaccgaccgccggggcgtcgtcacggggacaatgcacggcacgctccagatcagctgcaacacgccttgcgagctgttcaaggagaagacgatgcggccgattgcccaggccatcctcgaggcggtcgagcccatgctgcagaagcgcgtcaacacgccccatctcccggtggtgccggacgggttgagtatgcacgacttacgaacacggagccagatctttcaggccaactcggcgattcggaacgtcacagactctgcaggcaaggccctatttcctcccgtattgcaacagcccaagcccaagtcagtctggctgccgagggcggcgtcggcggtgccgctaccccctccggtgccaataagtaaaagaggcgacacagcagcagcggcttctccgatccccaaggctgtaccgaagtacggagtcgaagcgaatatgaggaaatcgaaagaaatacagagggccaaccgacgtagccaggaggggctgaaaaacgactggccaacgagttttgacgagatgaatagcaagcccaagaaggcgcgcaaggctaagactactcctgtgtcagtgcccgacttgagcaaggtgtacgcacgggtcccgatgtccatcgccagtctgctcatgcaaaagcaaaagcgggacgcgcaggacaagcagggcgaacagggcgaacagggacagacacataagccactcgatacgtcgagctggggctaggcagtcgtagcaaaacagtgtacttccatgcttgtacaaatttgcaataactgtatcatatgcagcgccagatggattaggcctgctcctgtatatatacgcgtacttactctgtcctcccaggtaagcgaggaaacggagtatttgtatatcacaagtcagtgtaccatagctaagagatacccatgtcatattacattttagagaaaatgaatagaatcggctt

SEQ ID NO: 4281 - DNA, 1098 bp, Muscodor strobelii
  misc_feature: SGI cDNA ID NO. 561113
  misc_feature: Reduced expression when VOC is produced
  misc_feature: Encodes the peptide sequence at SEQ ID NO 4282
atgctggtctccctcaccgtcggcaaggtcgacgccggcgtcacggtgctcctgacgccagacaaacgcctaatcgaattcccctccatcctcctgccacccaacatcgtgtccggctccatcgtcgacatcaccgtagcccgcaaccacgcctccgagtcctcagccgacgccaagttctccgctctgcaagacaagatcttctcctccttcggcgactccgcccccagcacgcccgtcctgcgctgccgcaatgcgacacagacctctgtcgtcctcgagtgggaccccatcgagctggccaccgcagacctcatctccctctccctctaccgcaacggccagaaagcaggcaacatcccccgccctctgcagatgcatagcaccaagatcagcggcctcgcagtcgacaccgagtacaccttccacctcgtcctgcgcacctcggccggcacgacgacgagcaaacaggtcgctgtacggacgcacaagatgactgatctctccggtatcaccatcaccaccggcatcctccccgctcagatgcgcgagaatctcgctgcggccgtcgagagaatcggtgccaagatcatagatagcgtgcgcatcgacaccacacacttcgtcaccaccgagggccgcggcgtgccctgggagaaggccgtcgagcagaatatccccgtcgtgagacctgagtgggtgaccgcctgcgaggagagcgggaggattctgggagttacgaaattttaccttgatgcgcttagacctgggccgccctcagaagtcccgacgccagctcaaacgccagccccgacccagacgcagaaggagttgcctcagagtccgccgcccaaggaggagtctaaggagagtgagagtggcagtggtagtgaggaggacgatgaagacaacggagccgaggataaggctaaggccaatgctgatgagcagaagatgaggctggaggataaggaggagcagaaggtggctttgagaccgaaacagagtgaggacggcgaggaagaaggtacgggcgatgagaaaccggcacccagccctaatggggatggagcgagtttccaggacgttgcgttgtaa

SEQ ID NO: 4282 - protein, 365 aa, Muscodor strobelii
  misc_feature: SGI Peptide ID NO. 561113
  misc_feature (163)..(238): Pfam Id: PF00533 Pfam Desc: BRCA1 C Terminus (BRCT) domain
  misc_feature (76)..(153): Pfam Id: PF00041 Pfam Desc: Fibronectin type III domain
  misc_feature (1)..(365): NCBI GI: 46128551 Blast Desc: FG08653.1 [Gibberella zeae PH-1]
  misc_feature (1)..(365): NCBI GI: 39970665 Blast Desc: MGG_02799 [Magnaporthe grisea 70-15] gi|149210141|ref|XP_001522445.1| MGCH7_ch7g552 [Magnaporthe grisea 70-15] gi|86196507|gb|EAQ71145.1| MGCH7_ch7g552 grisea
  misc_feature (1)..(365): NCBI GI: 171684925 Blast Desc: protein product [Podospora anserina] gi|170942423|emb|CAP68075.1| protein product [Podospora anserina]
  misc_feature (1)..(265): NCBI GI: 256733642 Blast Desc: NECHADRAFT_5257 [Nectria haematococca mpVI 77-13-4]
  misc_feature (1)..(365): NCBI GI: 116193565 Blast Desc: CHGG_06500 [Chaetomium globosum CBS 148.51] gi|88182413|gb|EAQ89881.1| CHGG_06500 [Chaetomium globosum CBS 148.51]
  misc_feature (1)..(365): NCBI GI: 154291583 Blast Desc: BC1G_15060 [Botryotinia fuckeliana B05.10] gi|150846697|gb|EDN21890.1| BC1G_15060 [Botryotinia fuckeliana B05.10]
  misc_feature (1)..(257): NCBI GI: 85114030 Blast Desc: NCU07435 [Neurospora crassa OR74A] gi|28926411|gb|EAA35386.1| conserved [Neurospora crassa OR74A]
  misc_feature (1)..(365): NCBI GI: 156056498 Blast Desc: SS1G_05603 [Sclerotinia sclerotiorum 1980] gi|154703385|gb|EDO03124.1| SS1G_05603 [Sclerotinia sclerotiorum 1980]
  misc_feature (1)..(356): NCBI GI: 240273317 Blast Desc: chitin biosynthesis protein CHS5 [Ajellomyces capsulatus H143]
  misc_feature (1)..(303): NCBI GI: 239610212 Blast Desc: chitin biosynthesis protein [Ajellomyces dermatitidis ER-3]
  misc_feature: Useful for introducing or modulating the production of volatile compounds
MLVSLTVGKVDAGVTVLLTPDKRLIEFPSILLPPNIVSGSIVDITVARNHASESSADAKFSALQDKIFSSFGDSAPSTPVLRCRNATQTSVVLEWDPIELATADLISLSLYRNGQKAGNIPRPLQMHSTKISGLAVDTEYTFHLVLRTSAGTTTSKQVAVRTHKMTDLSGITITTGILPAQMRENLAAAVERIGAKIIDSVRIDTTHFVTTEGRGVPWEKAVEQNIPVVRPEWVTACEESGRILGVTKFYLDALRPGPPSEVPTPAQTPAPTQTQKELPQSPPPKEESKESESGSGSEEDDEDNGAEDKAKANADEQKMRLEDKEEQKVALRPKQSEDGEEEGTGDEKPAPSPNGDGASFQDVAL

SEQ ID NO: 4283 - DNA, 1563 bp, Muscodor strobelii
  misc_feature: SGI EST ID NO. CUFF.11133.0
  misc_feature: Variant of the nucleotide sequence at SEQ ID NO 4281
caagtagcatctatttgcgacaaggtaacacaattgtacagctcgcacccagaatcacaactcaacaccaacagcgacctacaaactcgtcacattctcggcgtacatatctctctcttagtcgacttgaaacttgccagaccttaatcgcattggtgtcgagatgctggtctccctcaccgtcggcaaggtcgacgccggcgtcacggtgctcctgacgccagacaaacgcctaatcgaattcccctccatcctcctgccacccaacatcgtgtccggctccatcgtcgacatcaccgtagcccgcaaccacgcctccgagtcctcagccgacgccaagttctccgctctgcaagacaagatcttctcctccttcggcgactccgcccccagcacgcccgtcctgcgctgccgcaatgcgacacagacctctgtcgtcctcgagtgggaccccatcgagctggccaccgcagacctcatctccctctccctctaccgcaacggccagaaagcaggcaacatcccccgccctctgcagatgcatagcaccaagatcagcggcctcgcagtcgacaccgagtacaccttccacctcgtcctgcgcacctcggccggcacgacgacgagcaaacaggtcgctgtacggacgcacaagatgactgatctctccggtatcaccatcaccaccggcatcctccccgctcagatgcgcgagaatctcgctgcggccgtcgagagaatcggtgccaagatcatagatagcgtgcgcatcgacaccacacacttcgtcaccaccgagggccgcggcgtgccctgggagaaggccgtcgagcagaatatccccgtcgtgagacctgagtgggtgaccgcctgcgaggagagcgggaggattctgggagttacgaaattttaccttgatgcgcttagacctgggccgccctcagaagtcccgacgccagctcaaacgccagccccgacccagacgcagaaggagttgcctcagagtccgccgcccaaggaggagtctaaggagagtgagagtggcagtggtagtgaggaggacgatgaagacaacggagccgaggataaggctaaggccaatgctgatgagcagaagatgaggctggaggataaggaggagcagaaggtggctttgagaccgaaacagagtgaggacggcgaggaagaaggtacgggcgatgagaaaccggcacccagccctaatggggatggagcgagtttccaggacgttgcgttgtaagaattccaggcgagactctcgtggaatcgagaagtccctctcttttgatggtcaagtaccaggcggagtacgatcatcaagcaggtgatgagttcgggttgcgaaaagggatatgtataattgtacaccgtttaatcgtagcatggagttgttcagatcggcaggtatggggacttcgaaatactgagccatgttcagaattacggaatatttttctaatgttttgattgatttgtgatttaattaaagtatcctttttcgtcacatgaatgtcaagtcttctagacggaaatggaagatag

SEQ ID NO: 4284 - DNA, 780 bp, Muscodor strobelii
  misc_feature: SGI cDNA ID NO. 561114
  misc_feature: Elevated expression when VOC is produced
  misc_feature: Encodes the peptide sequence at SEQ ID NO 4285
atgtactttggcatgtcagcgcagatagcgttttgggcttacttaccgagtatgcagaccctatacgagctgacgataggccaacttgtaacaagaatgacagcctgcggcatagcattaacgttctggggaatgaagcgacccttcaccgcactagaaaccgtcctaattcccatcgggctcctcggatctgccgcactcgcaatcttcagcttcttcagttcaacctacgccgagcagaactccttcatcgacacatactgccagaaagtatactacatcccactcgtgctcatccgagtatctgcatccttctacctcttctgtgccgtcctcgtcgtcttggcacttggtttaagtagtcgcctagatcaaacgataaatacactcgatagcatccgtgtcttcgacatttcttttcggggctggttcaatatcttcttcgctgccacagaattctttttgttatgggcgacattggtcctcataatcgttgttcgtgagcgggctaagacaattttcgggtcgtcttacggagataatgcaataggatatggtcaggttatggcaatcgggttcgggttacagaccgtttttcaggctggagaagtaatcttccgaaaacttcaacaccgcgcaaatcagtccaatgccagagcgactacctatgaaaacgacagagacagtgccgagagcgtcagccagaactatctgaaagagtgggtgcagtaccgctttgtcacaataacggatcatcacttgcgaacagatcctccatga

SEQ ID NO: 4285 - protein, 259 aa, Muscodor strobelii
  misc_feature: SGI Peptide ID NO. 561114
  misc_feature: Useful for introducing or modulating the production of volatile compounds
MYFGMSAQIAFWAYLPSMQTLYELTIGQLVTRMTACGIALTFWGMKRPFTALETVLIPIGLLGSAALAIFSFFSSTYAEQNSFIDTYCQKVYYIPLVLIRVSASFYLFCAVLVVLALGLSSRLDQTINTLDSIRVFDISFRGWFNIFFAATEFFLLWATLVLIIVVRERAKTIFGSSYGDNAIGYGQVMAIGFGLQTVFQAGEVIFRKLQHRANQSNARATTYENDRDSAESVSQNYLKEWVQYRFVTITDHHLRTDPP

SEQ ID NO: 4286 - DNA, 1819 bp, Muscodor strobelii
  misc_feature: SGI EST ID NO. CUFF.11165.1
  misc_feature: Variant of the nucleotide sequence at SEQ ID NO 4284
ttctcatttacggactgagcgacgacttgcttggccttcacttacattatggtgcataagcgaatttaacaatttaggagtactgtgtaaaacctctttctcctcgtctttccctcacgaaatgagttttagctctgcttaattcgttgagtctatgatcatgaatgcgatatgaacaatgcttaaatcatgagccaccttgaattcgactttgcggataattgcacaaaatcggtggacttatacaatgggcttcatggaggcggaccagacatagtgtctttacttcgaggatcacttcgaccaaatcaaaacgtctccgacgctttcttattggcacaaatcaactcaggatcgttcatcaaagatgtatcagaacagattgcaggcgtttgcaacagccttctgtgccactcattagacttcacaggtaatgccgatatagctggaatcggggcactggttgcctatgcattcatcgcttttctatcagcgacgttcttcttgatcggttaccgattcgacgcaagacataataggacgccctacgatgaactggccgatactttcttccaaggcatcatgtactttggcatgtcagcgcagatagcgttttgggcttacttaccgagtatgcagaccctatacgagctgacgataggccaacttgtaacaagaatgacagcctgcggcatagcattaacgttctggggaatgaagcgacccttcaccgcactagaaaccgtcctaattcccatcgggctcctcggatctgccgcactcgcaatcttcagcttcttcagttcaacctacgccgagcagaactccttcatcgacacatactgccagaaagtatactacatcccactcgtgctcatccgagtatctgcatccttctacctcttctgtgccgtcctcgtcgtcttggcacttggtttaagtagtcgcctagatcaaacgataaatacactcgatagcatccgtgtcttcgacatttcttttcggggctggttcaatatcttcttcgctgccacagaattctttttgttatgggcgacattggtcctcataatcgttgttcgtgagcgggctaagacaattttcgggtcgtcttacggagataatgcaataggatatggtcaggttatggcaatcgggttcgggttacagaccgtttttcaggctggagaagtaatcttccgaaaacttcaacaccgcgcaaatcagtccaatgccagagcgactacctatgaaaacgacagagacagtgccgagagcgtcagccagaactatctgaaagagtgggtgcagtaccgctttgtcacaataacggatcatcacttgcgaacagatcctccatgatggacaggtagaggttctgccaccgcgccaagcgggcaattggtaataaagcaaaaggctcgagctggaggctgaacgcctgcctccctgcactgacaccaaatccagcctcggacatgagcaaacgcagcccaactgagatgcactcagaaactaagaggttgaagtctctggtattaaaaatatcggactgcgggctatagagtcaagagttaaagggcgaattgaaatgcagagtgtgagaggttgcgagaagatcgtctttggcaatttgaatgtcgtgagttgtgggacgcttcttcatcatctttaagttgacgatgagtccttttgtactaagctccacacatgaggtccggtttataccttcaacttgttaatagaatgcagctgtcgctatcgtcttgagaagtacccgttttgggcacttccctctgaaggtcggttaaaaaaaagg

SEQ ID NO: 4287 - DNA, 1173 bp, Muscodor strobelii
  misc_feature: SGI cDNA ID NO. 561115
  misc_feature: Elevated expression when VOC is produced
  misc_feature: Encodes the peptide sequence at SEQ ID NO 4288
atgagccaccttgaattcgactttgcggataattgcacaaaatcggtggacttatacaatgggcttcatggaggcggaccagacatagtgtctttacttcgaggatcacttcgaccaaatcaaaacgtctccgacgctttcttattggcacaaatcaactcaggatcgttcatcaaagatgtatcagaacagattgcaggcgtttgcaacagccttctgtgccactcattagacttcacaggtaatgccgatatagctggaatcggggcactggttgcctatgcattcatcgcttttctatcagcgacgttcttcttgatcggttaccgattcgacgcaagacataataggacgccctacgatgaactggccgatactttcttccaaggcatcatgtactttggcatgtcagcgcagatagcgttttgggcttacttaccgagtatgcagaccctatacgagctgacgataggccaacttgtaacaagaatgacagcctgcggcatagcattaacgttctggggaatgaagcgacccttcaccgcactagaaaccgtcctaattcccatcgggctcctcggatctgccgcactcgcaatcttcagcttcttcagttcaacctacgccgagcagaactccttcatcgacacatactgccagaaagtatactacatcccactcgtgctcatccgagtatctgcatccttctacctcttctgtgccgtcctcgtcgtcttggcacttggtttaagtagtcgcctagatcaaacgataaatacactcgatagcatccgtgtcttcgacatttcttttcggggctggttcaatatcttcttcgctgccacagaattctttttgttatgggcgacattggtcctcataatcgttgttcgtgagcgggctaagacaattttcgggtcgtcttacggagataatgcaataggatatggtcaggttatggcaatcgggttcgggttacagaccgtttttcaggctggagaagtaatcttccgaaaacttcaacaccgcgcaaatcagtccaatgccagagcgactacctatgaaaacgacagagacagtgccgagagcgtcagccagaactatctgaaagagtgggtgcagtaccgctttgtcacaataacggatcatcacttgcgaacagatcctccatga

SEQ ID NO: 4288 - protein, 390 aa, Muscodor strobelii
  misc_feature: SGI Peptide ID NO. 561115
  misc_feature: Useful for introducing or modulating the production of volatile compounds
MSHLEFDFADNCTKSVDLYNGLHGGGPDIVSLLRGSLRPNQNVSDAFLLAQINSGSFIKDVSEQIAGVCNSLLCHSLDFTGNADIAGIGALVAYAFIAFLSATFFLIGYRFDARHNRTPYDELADTFFQGIMYFGMSAQIAFWAYLPSMQTLYELTIGQLVTRMTACGIALTFWGMKRPFTALETVLIPIGLLGSAALAIFSFFSSTYAEQNSFIDTYCQKVYYIPLVLIRVSASFYLFCAVLVVLALGLSSRLDQTINTLDSIRVFDISFRGWFNIFFAATEFFLLWATLVLIIVVRERAKTIFGSSYGDNAIGYGQVMAIGFGLQTVFQAGEVIFRKLQHRANQSNARATTYENDRDSAESVSQNYLKEWVQYRFVTITDHHLRTDPP

SEQ ID NO: 4289 - DNA, 1819 bp, Muscodor strobelii; identical to SEQ ID NO: 4286
  misc_feature: SGI EST ID NO. CUFF.11165.1
  misc_feature: Variant of the nucleotide sequence at SEQ ID NO 4287

SEQ ID NO: 4290 - DNA, 903 bp, Muscodor strobelii
  misc_feature: SGI cDNA ID NO. 561116
  misc_feature: Elevated expression when VOC is produced
  misc_feature: Encodes the peptide sequence at SEQ ID NO 4291
atgcaagctctaaagctggacgaaatcttgtattctttgaggaactgccaccatggcgaagagacaatgaatatatactgtctagttaccagtagcaacgctcggtcccgaagattcatcacaatctctaaaatttatgccaggccgacaacgaactccattaagcatagcctaaaaggaatattcgcaattcacaatgagacaatcaacatccactcccatcttcaaggcgcagtgctcttcgcttgtctgttgatatacttctttcacgaactcgaatcatggagccccggcatagaagcggcggatcttgttgtgttcagcatgtatttcttcggggtaagcgtgtgtctgcttttatcaagcgcctaccatactctcatgaaccacagccccagagtcgcagcgttcggtaatcaactagattacttaggcattctcttcttcatgtggggagcctgcataccgcagatctactacggcttctgggagaatcctggactatgcaagttctattggacgacatctacccttctttgtctgggttccgcagtcgtcacaatcagtccaaaatttagaacgcccgcttttcgaacacaaagaactgcgttatacacatcgcttggattgaccgctattgtctatatgctgcatggcgtatttcttcatgggtggaagattcaaagtctgcgcatgagtctattgtgggaacttctgactgcgacattattcatgttcggagctggtctatatgctttcaggatccccgagaaatggtatcccctacgcttcgatatttacggagccagtcatcagatattccacttcatggtattgttaggtggacttgctcatactgctgggcttgtacaggcttgtagatacgttcatggttcttcttag

SEQ ID NO: 4291 - protein, 300 aa, Muscodor strobelii
  misc_feature: SGI Peptide ID NO. 561116
  misc_feature (62)..(286): Pfam Id: PF03006 Pfam Desc: Haemolysin-III related
  misc_feature (66)..(300): NCBI GI: 154320263 Blast Desc: BC1G_02112 [Botryotinia fuckeliana B05.10] gi|150854851|gb|EDN30043.1| BC1G_02112 [Botryotinia fuckeliana B05.10]
  misc_feature (66)..(295): NCBI GI: 154314909 Blast Desc: [Botryotinia fuckeliana B05.10] gi|150848334|gb|EDN23527.1| [Botryotinia fuckeliana B05.10]
  misc_feature (51)..(298): NCBI GI: 154324234 Blast Desc: BC1G_00516 [Botryotinia fuckeliana B05.10] gi|150842745|gb|EDN17938.1| BC1G_00516 [Botryotinia fuckeliana B05.10]
  misc_feature (48)..(297): NCBI GI: 261191248 Blast Desc: hemolysin-III channel protein Izh2 [Ajellomyces dermatitidis SLH14081] gi|239589798|gb|EEQ72441.1| hemolysin-III channel protein Izh2 [Ajellomyces dermatitidis SLH14081]
  misc_feature (48)..(297): NCBI GI: 239606869 Blast Desc: hemolysin-III channel protein Izh2 [Ajellomyces dermatitidis ER-3]
  misc_feature (48)..(297): NCBI GI: 225556629 Blast Desc: hemolysin-III family protein [Ajellomyces capsulatus G186AR]
  misc_feature (48)..(298): NCBI GI: 169609615 Blast Desc: SNOG_07900 [Phaeosphaeria nodorum SN15] gi|111063056|gb|EAT84176.1| SNOG_07900 [Phaeosphaeria nodorum SN15]
  misc_feature (48)..(297): NCBI GI: 258563712 Blast Desc: conserved [Uncinocarpus reesii 1704] gi|237908108|gb|EEP82509.1| conserved [Uncinocarpus reesii 1704]
  misc_feature (64)..(297): NCBI GI: 154284552 Blast Desc: conserved [Ajellomyces capsulatus NAm1] gi|150406712|gb|EDN02253.1| conserved [Ajellomyces capsulatus NAm1]
  misc_feature (48)..(297): NCBI GI: 240108320 Blast Desc: Hemolysin-III related family protein [Coccidioides posadasii C735 delta SOWgp]
  misc_feature: Useful for introducing or modulating the production of volatile compounds
MQALKLDEILYSLRNCHHGEETMNIYCLVTSSNARSRRFITISKIYARPTTNSIKHSLKGIFAIHNETINIHSHLQGAVLFACLLIYFFHELESWSPGIEAADLVVFSMYFFGVSVCLLLSSAYHTLMNHSPRVAAFGNQLDYLGILFFMWGACIPQIYYGFWENPGLCKFYWTTSTLLCLGSAVVTISPKFRTPAFRTQRTALYTSLGLTAIVYMLHGVFLHGWKIQSLRMSLLWELLTATLFMFGAGLYAFRIPEKWYPLRFDIYGASHQIFHFMVLLGGLAHTAGLVQACRYVHGSS

SEQ ID NO: 4292 - DNA, 2724 bp, Muscodor strobelii
  misc_feature: SGI EST ID NO. CUFF.10914.1
  misc_feature: Variant of the nucleotide sequence at SEQ ID NO 4290
ggaatattagtttgtattcatcgctttggggatcacgccgatgcgctctagcaatacaattcttttactgtgttgaaatcctaagctcggagttactacgatcaatgtctcgtcgctccggtgccagacagaagtcaatgccggagtcgagtcagactccattacttaacgaaaatgcaagctctaaagctggacgaaatcttgtattctttgaggaactgccaccatggcgaagagacaatgaatatatactgtctagttaccagccgacaacgaactccattaagcatagcctaaaaggaatattcgcaattcacaatgagacaatcaacatccactcccatcttcaaggcgcagtgctcttcgcttgtctgttgatatacttctttcacgaactcgaatcatggagccccggcatagaagcggcggatcttgttgtgttcagcatgtatttcttcggggtaagcgtgtgtctgcttttatcaagcgcctaccatactctcatgaaccacagccccagagtcgcagcgttcggtaatcaactagattacttaggcattctcttcttcatgtggggagcctgcataccgcagatctactacggcttctgggagaatcctggactatgcaagttctattggacgacatctacccttctttgtctgggttccgcagtcgtcacaatcagtccaaaatttagaacgcccgcttttcgaacacaaagaactgcgttatacacatcgcttggattgaccgctattgtctatatgctgcatggcgtatttcttcatgggtggaagattcaaagtctgcgcatgagtctattgtgggaacttctgactgcgacattattcatgttcggagctggtctatatgctttcaggatccccgagaaatggtatcccctacgcttcgatatttacggagccagtcatcagatattccacttcatggtattgttaggtggacttgctcatactgctgggcttgtacaggcttgtagatacgttcatggttcttcttagacttcgccatatgcattaggtttagagatactaaacagatctacatatacttaccctacgtcaatgcatagggatatggactgtactgcaagaagaaatcaaattccgcctggtaatcccttggatccagcacagtctcctgcgtcgtcttactgcatccattcttcgcctcaacagcagaaaatcggtctgcgatccagtcaagatagtatttctgccctgctaaggcaataggctggtgatctacgcccggaaattcgacgtattcgatctgtgcgtttctcaccgcgtcgcaggtaacatctacagcgtgtgatgtacccgtggagttaatcgtgtagtcaccagtcccttgaagaacaagcaatggccccgcgaacggtttcgcgatattgcttgttagtgtttcgaatgcgtttgcgtaccaggatgatgtattccaatccgaacgtagaacagatggggaggagagtaattcgagggcaacggattgacagccttttatatcttggaggagtgaggccccggcgacgccggctggtgtgagccagtcacttggagtgaaggtcgggaagattgatgagatgcctgcggcggcgcgcgatataattgatgataatgccgctgggattgttgtataggtcgcgaagttttgaatagacaggaagggagacatcactgcagttcctaggtatcctttcctcagccatgcaacatctttgtcttctccaccgagcactacggctgctccccatgccgcactgccaccttgcgagtgtccaacgataacgtgctcctcgccgagcagatccgaccatgctttttgtgcggctttagtagcgtacaaaacatcgtagcctcctgcgggatttgcaagatattgagctgggatcgtgttgccgttaccgtcgtggccgactcctagacctgcgtaatccgccgctacaacgacatagccttgaagcgcgaggttaaagacccgatagtcgtatagtagatcacgcatatgagacggcgcgcactcagacgagaagcccgccgtgccatgtgcccatgatatcacaggtaaaccttgactgccatttctaccgctcgaggaaaatgacctgggactgtaaggccacagcacaaacgcagaagccggtacagtcgtcccgttgaggttcttgctcgtgtacaaaatcctcgataatgccagggccggcgcaatagtatacagtccggtactagtccgctgctcgaccttcaacacgctgcctggtgggaattcgctccaatttgtcggcaactcggcgtagaatggatctagttctacggatcccccggcccagagtgtgcgctcggagtcaagcgctacctggacagctgctgctgtatcagatgagagatttgcggcctgaatgcgggaggtgatctcggatggcgaatagggtggttgtgtgccgttgaatgtgttgcagattggggctgccgggatggtctgcgccaaggttagcggaaggaccgacaccacggccaagacttgacgtaaacgcatcgcagcgacaatagatggccactaccagtctacttaggtctggctaagtcgcttatatttgggcaaggttataaatacttgggagatttcgcttcacgaggttatgttatgtacgacaaaattgtttactaagctctaagtcaaatggagtttacggtctgg

SEQ ID NO: 4293 - DNA, 522 bp, Muscodor strobelii
  misc_feature: SGI cDNA ID NO. 561117
  misc_feature: Elevated expression when VOC is produced
  misc_feature: Encodes the peptide sequence at SEQ ID NO 4294
atgaaccacagccccagagtcgcagcgttcggtaatcaactagattacttaggcattctcttcttcatgtggggagcctgcataccgcagatctactacggcttctgggagaatcctggactatgcaagttctattggacgacatctacccttctttgtctgggttccgcagtcgtcacaatcagtccaaaatttagaacgcccgcttttcgaacacaaagaactgcgttatacacatcgcttggattgaccgctattgtctatatgctgcatggcgtatttcttcatgggtggaagattcaaagtctgcgcatgagtctattgtgggaacttctgactgcgacattattcatgttcggagctggtctatatgctttcaggatccccgagaaatggtatcccctacgcttcgatatttacggagccagtcatcagatattccacttcatggtattgttaggtggacttgctcatactgctgggcttgtacaggcttgtagatacgttcatggttcttcttag

SEQ ID NO: 4294 - protein, 173 aa, Muscodor strobelii
  misc_feature: SGI Peptide ID NO. 561117
  misc_feature (1)..(159): Pfam Id: PF03006 Pfam Desc: Haemolysin-III related
  misc_feature (2)..(173): NCBI GI: 154320263 Blast Desc: BC1G_02112 [Botryotinia fuckeliana B05.10] gi|150854851|gb|EDN30043.1| BC1G_02112 [Botryotinia fuckeliana B05.10]
  misc_feature (2)..(170): NCBI GI: 261191248 Blast Desc: hemolysin-III channel protein Izh2 [Ajellomyces dermatitidis SLH14081] gi|239589798|gb|EEQ72441.1| hemolysin-III channel protein Izh2 [Ajellomyces dermatitidis SLH14081]
  misc_feature (2)..(170): NCBI GI: 239606869 Blast Desc: hemolysin-III channel protein Izh2 [Ajellomyces dermatitidis ER-3]
  misc_feature (2)..(170): NCBI GI: 154284552 Blast Desc: conserved [Ajellomyces capsulatus NAm1] gi|150406712|gb|EDN02253.1| conserved [Ajellomyces capsulatus NAm1]
  misc_feature (2)..(168): NCBI GI: 154314909 Blast Desc: [Botryotinia fuckeliana B05.10] gi|150848334|gb|EDN23527.1| [Botryotinia fuckeliana B05.10]
  misc_feature (2)..(170): NCBI GI: 225556629 Blast Desc: hemolysin-III family protein [Ajellomyces capsulatus G186AR]
  misc_feature (2)..(170): NCBI GI: 240281489 Blast Desc: adipor-like receptor [Ajellomyces capsulatus H143]
  misc_feature (2)..(171): NCBI GI: 169609615 Blast Desc: SNOG_07900 [Phaeosphaeria nodorum SN15] gi|111063056|gb|EAT84176.1| SNOG_07900 [Phaeosphaeria nodorum SN15]
  misc_feature (1)..(171): NCBI GI: 154324234 Blast Desc: BC1G_00516 [Botryotinia fuckeliana B05.10] gi|150842745|gb|EDN17938.1| BC1G_00516 [Botryotinia fuckeliana B05.10]
  misc_feature (2)..(171): NCBI GI: 169770593 Blast Desc: [Aspergillus oryzae RIB40] gi|83767625|dbj|BAE57764.1| protein product [Aspergillus oryzae]
  misc_feature: Useful for introducing or modulating the production of volatile compounds
MNHSPRVAAFGNQLDYLGILFFMWGACIPQIYYGFWENPGLCKFYWTTSTLLCLGSAVVTISPKFRTPAFRTQRTALYTSLGLTAIVYMLHGVFLHGWKIQSLRMSLLWELLTATLFMFGAGLYAFRIPEKWYPLRFDIYGASHQIFHFMVLLGGLAHTAGLVQACRYVHGSS

SEQ ID NO: 4295 - DNA, 2724 bp, Muscodor strobelii; identical to SEQ ID NO: 4292
  misc_feature: SGI EST ID NO. CUFF.10914.1
  misc_feature: Variant of the nucleotide sequence at SEQ ID NO 4293

SEQ ID NO: 4296 - DNA, 1482 bp, Muscodor strobelii
  misc_feature: SGI cDNA ID NO. 561118
  misc_feature: Encodes the peptide sequence at SEQ ID NO 4297
atgcgtttacgtcaagtcttggccgtggtgtcggtccttccgctaaccttggcgcagaccatcccggcagccccaatctgcaacacattcaacggcacacaaccaccctattcgccatccgagatcacctcccgcattcaggccgcaaatctctcatctgatacagcagcagctgtccaggtagcgcttgactccgagcgcacactctgggccgggggatccgtagaactagatccattctacgccgagttgccgacaaattggagcgaattcccaccaggcagcgtgttgaaggtcgagcagcggactagtaccggactgtatactattgcgccggccctggcattatcgaggattttgtacacgagcaagaacctcaacgggacgactgtaccggcttctgcgtttgtgctgtggccttacagtcccaggtcattttcctcgagcggtagaaatggcagtcaaggtttacctgtgatatcatgggcacatggcacggcgggcttctcgtctgagtgcgcgccgtctcatatgcgtgatctactatacgactatcgggtctttaacctcgcgcttcaaggctatgtcgttgtagcggcggattacgcaggtctaggagtcggccacgacggtaacggcaacacgatcccagctcaatatcttgcaaatcccgcaggaggctacgatgttttgtacgctactaaagccgcacaaaaagcatggtcggatctgctcggcgaggagcacgttatcgttggacactcgcaaggtggcagtgcggcatggggagcagccgtagtgctcggtggagaagacaaagatgttgcatggctgaggaaaggatacctaggaactgcagtgatgtctcccttcctgtctattcaaaacttcgcgacctatacaacaatcccagcggcattatcatcaattatatcgcgcgccgccgcaggcatctcatcaatcttcccgaccttcactccaagtgactggctcacaccagccggcgtcgccggggcctcactcctccaagatataaaaggctgtcaatccgttgccctcgaattactctcctccccatctgttctacgttcggattggaatacatcatcctggtacgcaaacgcattcgaaacactaacaagcaatatcgcgaaaccgttcgcggggccattgcttgttcttcaagggactggtgactacacgattaactccacgggtacatcacacgctgtagatgttacctgcgacgcggtgagaaacgcacagatcgaatacgtcgaatttccgggcgtagatcaccagcctattgccttagcagggcagaaatactatcttgactggatcgcagaccgattttctgctgttgaggcgaagaatggatgcagtaagacgacgcaggagactgtgctggatccaagggattaccaggcggaatttgatttcttcttgcagtacagtccatatccctatgcattgacgtag

SEQ ID NO: 4297 - protein, 493 aa, Muscodor strobelii
  misc_feature: SGI Peptide ID NO. 561118
  misc_feature (16)..(464): NCBI GI: 256724130 Blast Desc: NECHADRAFT_86384 [Nectria haematococca mpVI 77-13-4]
  misc_feature (15)..(489): NCBI GI: 256729151 Blast Desc: NECHADRAFT_80111 [Nectria haematococca mpVI 77-13-4]
  misc_feature (3)..(482): NCBI GI: 119474547 Blast Desc: secretory lipase, [Neosartorya fischeri NRRL 181] gi|119407302|gb|EAW17252.1| secretory lipase, [Neosartorya fischeri NRRL 181]
  misc_feature (51)..(482): NCBI GI: 146323255 Blast Desc: secretory lipase [Aspergillus fumigatus Af293] gi|129556542|gb|EAL86671.2| secretory lipase, [Aspergillus fumigatus Af293]
  misc_feature (62)..(482): NCBI GI: 169614175 Blast Desc: SNOG_10223 [Phaeosphaeria nodorum SN15] gi|111061438|gb|EAT82558.1| SNOG_10223 [Phaeosphaeria nodorum SN15]
  misc_feature (93)..(465): NCBI GI: 256729559 Blast Desc: NECHADRAFT_84257 [Nectria haematococca mpVI 77-13-4]
  misc_feature (51)..(482): NCBI GI: 159128120 Blast Desc: secretory lipase, [Aspergillus fumigatus A1163]
  misc_feature (80)..(484): NCBI GI: 212530382 Blast Desc: secretory lipase, [Penicillium marneffei ATCC 18224] gi|210074746|gb|EEA28833.1| secretory lipase, [Penicillium marneffei ATCC 18224]
  misc_feature (58)..(294): NCBI GI: 154319267 Blast Desc: BC1G_02585 [Botryotinia fuckeliana B05.10] gi|150857016|gb|EDN32208.1| BC1G_02585 [Botryotinia fuckeliana B05.10]
  misc_feature (80)..(464): NCBI GI: 242818867 Blast Desc: secretory lipase, [Talaromyces stipitatus ATCC 10500] gi|218713667|gb|EED13091.1| secretory lipase, [Talaromyces stipitatus ATCC 10500]
MRLRQVLAVVSVLPLTLAQTIPAAPICNTFNGTQPPYSPSEITSRIQAANLSSDTAAAVQVALDSERTLWAGGSVELDPFYAELPTNWSEFPPGSVLKVEQRTSTGLYTIAPALALSRILYTSKNLNGTTVPASAFVLWPYSPRSFSSSGRNGSQGLPVISWAHGTAGFSSECAPSHMRDLLYDYRVFNLALQGYVVVAADYAGLGVGHDGNGNTIPAQYLANPAGGYDVLYATKAAQKAWSDLLGEEHVIVGHSQGGSAAWGAAVVLGGEDKDVAWLRKGYLGTAVMSPFLSIQNFATYTTIPAALSSIISRAAAGISSIFPTFTPSDWLTPAGVAGASLLQDIKGCQSVALELLSSPSVLRSDWNTSSWYANAFETLTSNIAKPFAGPLLVLQGTGDYTINSTGTSHAVDVTCDAVRNAQIEYVEFPGVDHQPIALAGQKYYLDWIADRFSAVEAKNGCSKTTQETVLDPRDYQAEFDFFLQYSPYPYALT

SEQ ID NO: 4298 - DNA, 2940 bp, Muscodor strobelii
  misc_feature: SGI cDNA ID NO. 561119
  misc_feature: Encodes the peptide sequence at SEQ ID NO 4299
atggtcgatttattgtacgcctttgatcgctccctcctcaaagatttaagctttgtcgaagggaatacaacccagctcgccaagaacaccatagtacccaacccgacgaagggcgcgcgtctactggtcactgtagagggacggggtgacgcaatcccgaaggcctcgactggctccattttggtcgaaacagagatcattgttcatgaagacaataatgtcaacagtctaacccactcacatccgccgtctgtcagatctgtttgtcgttcaatgtctcgaacgctggtggaggttaggccagcggaggagccagccgacgagagtaataatggtgcttcacaggctcgacaagtcatgagccgtcctcgatcccgccaagcgctcgatggagatcatggcgttcacgatgtgatcgagtacgacggcacagataatgaatttaaggacttaatccaattcttaaagaagacacctccaccatctaattatatgtcggtacccgacagttttagcagctcttccgaagatgataaatggcacaaactgaaacacaaagtcctacgacaacagcgcagaaatcgaagataccgtccgcccgtaatccgacttcccgattctgcggttgctgctaccactatcgatggccatcgccatatcgccatatccataccactgcaacattctcatttagcggcattcccgatctctcaataccctgtttacgattctatagaggcagcgtttcagcgagaggttgaatctagatttggatcgtggaggggcaacccctctgatcgtatagtaacagttcttaaccctgtagccgaggaccgagaatctctgtcatcggtcccgatgtcaccgagagcgtctccattactgcaacaacaccagactgctttatcaccacctcccaagagagcacgcccacattctgtttcactgctgccgaatcaagagcagcgatataatcctaacaaaccccgagatccagcaaaacggagatcactaactgggagtagtcgtcccgtgtcgcaaatttctgacccaactggtgcgagccaaagtgaacaagagccggcaagccagcatacgtcttgggcgagtaccggaaccggaaacaggaaatcgcgagacagctaccgatacattccaacactcgatcctgcacccaatattcgatcacccaagccaagatcaccaccgaaggagaaggagcgagaagcagagaaagagccatcagtccgaggagacgaagcgagtacaagccaaactgcacgagaggtctcagaagatagagaagtaatcgcgacaataccggctcgtcagtcgggccagccacaactcgttttaacactaccctcgaggacgtcaagtaaacgaggtggactgagggactttccggcggaacaacatcccaatatcttgatcactgaccaagatgagcttgtcaggagtcagagatcttcactaagtggtcacgggaatgctcaagttggtggcaatggcgctagtagcggaagtaatggccatcgaccgcgtggatccgtcgctgagagtctaatcacaacaacctcttcaccaaaggttctcaaggctcagatggctacggtatatcaatcaattcctatagtagcacatccatcaggtatcgaagtggaatctccactcaacctgaactttccccagccaccctcacaccaggccactcaaaccttacaagtcgaggctgggtatccaccgaacattgataccgaagaaagaggtagaagtagaaaacaacgagtgcgggaaaagaagatgcgcgacgtggagaatttgaaggccaagaaagagcaagagcaggcagaaaacccagcttcagagccaagtgcaaattttgaggcagccgatatctctaagccgccggtagatgtatcacccatgcttagtcacttcagctctcattcaggatcgcggtcagcatcgctacctccttcattagagaagaaaatgaagcagccagaacgacgaccatactccatgggtatgactcctggtatgcctgctgctcttcccaaaatgactccgagcgccatcctcggaaaatacaacaagactccgaaaagctcaccatctcaaccgtcttcttcatctgtgtgggacaatgattctgatcgaacttcgtatcgtcgacgtagagaacggcaaactcagcgcgaggaacgggaggaacgaaaggcgcgacagatggccaagatgatggcagaagaaaaagaaagtttggatagactatcacgtgaggagatacttcgccgctatgaagtcctacgagagactcgtatttatgagacggaaaggcgactgcacaagcttgaacataacagagatacatgggttcgcactgttcctctactcctcgagactctcaataggcttctacaagagcagcaataccttcttcgggatgcaaaggtcacatatacggttcctacaggcgccggactctctcagcaccgaagccgccgtccgccatccgttgaaccatcatcgagttccttaccatcgcggcaaagtcctcgtcatggtcacgaccctcttggtattcggagcagtagtgattcacattcgagtcgtcggtctcgagaagccagtgggcttcgtggtggtcaacttgtccctcggcccgagctcagccctcttcaggacgtgcttgataagggattcaaagagcgacaaataggtctggatcgtaaagggcataacaggtctcgacaaaggagatacaagtcggtcgacgcacttacgattaccacgccaactgagagagatgcaggctattacagcactcgaagcaccgatagcattgccgaagctgctgaccagatcgagcctcttgtgcgcggactgcaagaagcagcgcgacttgcacacgctattcgaacgtcgcaaaaatag

SEQ ID NO: 4299 - protein, 979 aa, Muscodor strobelii
  misc_feature: SGI Peptide ID NO. 561119
  misc_feature (113)..(295): NCBI GI: 46128547 Blast Desc: FG08651.1 [Gibberella zeae PH-1]
  misc_feature (105)..(280): NCBI GI: 256734137 Blast Desc: NECHADRAFT_77953 [Nectria haematococca mpVI 77-13-4]
  misc_feature (19)..(243): NCBI GI: 39970659 Blast Desc: [Magnaporthe grisea 70-15] gi|145017390|gb|EDK01753.1| [Magnaporthe grisea 70-15]
  misc_feature (151)..(231): NCBI GI: 171684929 Blast Desc: protein product [Podospora anserina] gi|170942425|emb|CAP68077.1| protein product [Podospora anserina]
  misc_feature (720)..(808): NCBI GI: 46128547 Blast Desc: FG08651.1 [Gibberella zeae PH-1]
MVDLLYAFDRSLLKDLSFVEGNTTQLAKNTIVPNPTKGARLLVTVEGRGDAIPKASTGSILVETEIIVHEDNNVNSLTHSHPPSVRSVCRSMSRTLVEVRPAEEPADESNNGASQARQVMSRPRSRQALDGDHGVHDVIEYDGTDNEFKDLIQFLKKTPPPSNYMSVPDSFSSSSEDDKWHKLKHKVLRQQRRNRRYRPPVIRLPDSAVAATTIDGHRHIAISIPLQHSHLAAFPISQYPVYDSIEAAFQREVESRFGSWRGNPSDRIVTVLNPVAEDRESLSSVPMSPRASPLLQQHQTALSPPPKRARPHSVSLLPNQEQRYNPNKPRDPAKRRSLTGSSRPVSQISDPTGASQSEQEPASQHTSWASTGTGNRKSRDSYRYIPTLDPAPNIRSPKPRSPPKEKEREAEKEPSVRGDEASTSQTAREVSEDREVIATIPARQSGQPQLVLTLPSRTSSKRGGLRDFPAEQHPNILITDQDELVRSQRSSLSGHGNAQVGGNGASSGSNGHRPRGSVAESLITTTSSPKVLKAQMATVYQSIPIVAHPSGIEVESPLNLNFPQPPSHQATQTLQVEAGYPPNIDTEERGRSRKQRVREKKMRDVENLKAKKEQEQAENPASEPSANFEAADISKPPVDVSPMLSHFSSHSGSRSASLPPSLEKKMKQPERRPYSMGMTPGMPAALPKMTPSAILGKYNKTPKSSPSQPSSSSVWDNDSDRTSYRRRRERQTQREEREERKARQMAKMMAEEKESLDRLSREEILRRYEVLRETRIYETERRLHKLEHNRDTWVRTVPLLLETLNRLLQEQQYLLRDAKVTYTVPTGAGLSQHRSRRPPSVEPSSSSLPSRQSPRHGHDPLGIRSSSDSHSSRRSREASGLRGGQLVPRPELSPLQDVLDKGFKERQIGLDRKGHNRSRQRRYKSVDALTITTPTERDAGYYSTRSTDSIAEAADQIEPLVRGLQEAARLAHAIRTSQK

SEQ ID NO: 4300 - DNA, 888 bp, Muscodor strobelii
  misc_feature: SGI cDNA ID NO. 561120
  misc_feature: Encodes the peptide sequence at SEQ ID NO 4301
atgtcaaagccttggatattcataacaccctccagccgaggaataggccacgccctgaccgcctccctccttcgccgaaccaccctccccatcctcgcaaccgcacgctcagatctcagcggcgtcaaaaactccctcctcgacaccgcattctcacacccatcacacagcacaacccaagcaacgcgagaagacacagcatcacgcctccacataacgcacctcgacgtaacagacgaatccagcatctcatcagcagcatcaaaagcctcagagctcttccccccatcatctcaccacctacatctagcgttcgtgctacccggtatactgacaccggagaaatcaccaaaacaagtagagtacgaagatgctttgcaaatgctcaaggtcaatacgctggggccgttgatgtgtatgaagtatttcggggagttactacccaagaaggggacggatatgggcgttatcgaacaattaaacgagaaaatcggagaagaaaacgagaaaaacgatagttcggacagacagttggtcttaccgtgccatgcgacatatctcacgaattccgctagagtggggagtacgactgataacgggcttggcggatggtacacgtaccgcgcttctaaagctggtataaactctataaccaagtcttttgatttatatttacaaacgaggagtaaagacaaggttattgcgatggcgtaccaccctgggacagtaaagactggcttgagcaaggaattctgggggaatgtcaaagaagagaagttgtttagtcctgaatttgccgttgagaagatgctggaggttgtggagggaaggaagatagaggataggggacggtgctgggattggaaaggggaggagattcttccgtag

SEQ ID NO: 4301 - protein, 295 aa, Muscodor strobelii
  misc_feature: SGI Peptide ID NO. 561120
  misc_feature (1)..(295): NCBI GI: 46128549 Blast Desc: FG08652.1 [Gibberella zeae PH-1]
  misc_feature (1)..(295): NCBI GI: 261353222 Blast Desc: oxidoreductase [Verticillium albo-atrum VaMs.102]
  misc_feature (5)..(295): NCBI GI: 154291581 Blast Desc: BC1G_15059 [Botryotinia fuckeliana B05.10] gi|150846696|gb|EDN21889.1| BC1G_15059 [Botryotinia fuckeliana B05.10]
  misc_feature (1)..(295): NCBI GI: 39970663 Blast Desc: MGG_02798 [Magnaporthe grisea 70-15] gi|149210139|ref|XP_001522444.1| MGCH7_ch7g551 [Magnaporthe grisea 70-15] gi|86196506|gb|EAQ71144.1| MGCH7_ch7g551 grisea
  misc_feature (1)..(295): NCBI GI: 171684927 Blast Desc: protein product [Podospora anserina] gi|170942424|emb|CAP68076.1| protein product [Podospora anserina]
  misc_feature (5)..(295): NCBI GI: 242774291 Blast Desc: short-chain dehydrogenase, [Talaromyces stipitatus ATCC 10500] gi|218722032|gb|EED21450.1| short-chain dehydrogenase, [Talaromyces stipitatus ATCC 10500]
  misc_feature (65)..(295): NCBI GI: 85114026 Blast Desc: NCU07434 [Neurospora crassa OR74A] gi|28926410|gb|EAA35385.1| conserved [Neurospora crassa OR74A]
  misc_feature (5)..(295): NCBI GI: 255940404 Blast Desc: Pc16g06350 [Penicillium chrysogenum Wisconsin 54-1255] gi|211585594|emb|CAP93305.1| Pc16g06350 [Penicillium chrysogenum Wisconsin 54-1255]
  misc_feature (4)..(295): NCBI GI: 169609170 Blast Desc: SNOG_07671 [Phaeosphaeria nodorum SN15] gi|160701796|gb|EAT85137.2| SNOG_07671 [Phaeosphaeria nodorum SN15]
  misc_feature (7)..(295): NCBI GI: 145247895 Blast Desc: An13g00560 [Aspergillus niger] gi|134080941|emb|CAK41457.1| protein product [Aspergillus niger]
MSKPWIFITPSSRGIGHALTASLLRRTTLPILATARSDLSGVKNSLLDTAFSHPSHSTTQATREDTASRLHITHLDVTDESSISSAASKASELFPPSSHHLHLAFVLPGILTPEKSPKQVEYEDALQMLKVNTLGPLMCMKYFGELLPKKGTDMGVIEQLNEKIGEENEKNDSSDRQLVLPCHATYLTNSARVGSTTDNGLGGWYTYRASKAGINSITKSFDLYLQTRSKDKVIAMAYHPGTVKTGLSKEFWGNVKEEKLFSPEFAVEKMLEVVEGRKIEDRGRCWDWKGEEILP

SEQ ID NO: 4302 - DNA, 911 bp, Muscodor strobelii
  misc_feature: SGI EST ID NO. CUFF.10892.0
  misc_feature: Variant of the nucleotide sequence at SEQ ID NO 4300
gttgatgtgtatgaagtatttcggggagttactacccaagaaggggacggatatgggcgttatcgaacaattaaacgagaaaatcggagaagaaaacgagaaaaacgatagttcggacagacagttggtcttaccgtgccatgcgacatatctcacgaattccgctagagtggggagtacgactgataacgggcttggcggatggtacacgtaccgcgcttctaaagctggtataaactctataaccaagtcttttgatttatatttacaaacgaggagtaaagacaaggttattgcgatggcgtaccaccctgggacagtaaagactggcttgagcaaggaattctgggggaatgtcaaagaagagaagttgtttagtcctgaatttgccgttgagaagatgctggaggttgtggagggaaggaagatagaggataggggacggtgctgggattggaaaggggaggagattcttccgtaggggttatataggatgaataataggaaatataaaattttacgaggttcatctgatctgtttcctggagtagtcttaaccccaacggaaactcagcgcttttgattcactatcgcatacgcagtgagcacacctctttagaagccacatctcatacagtccaaacccagagaacaagagaggcatattaacaatcaacgatcaacccgtctctccccccatcagcacccagaaaaggaaccaaaacccttcgacgagtagtcagcaaccttcaaacagtatcaacactgcaactaccacacatatcgcaggcatatcttcggcagaccagatttaaacttcgatatagagtttcccatctaccaatcacagcccgccgctcatttcgcatgagaatcaaagtatataaattccaaaaatagttggattacca

SEQ ID NO: 4303 - DNA, 6258 bp, Muscodor strobelii
  misc_feature: SGI cDNA ID NO. 561121
  misc_feature: Reduced expression when VOC is produced
  misc_feature: Encodes the peptide sequence at SEQ ID NO 4304
atggccgatgtacccaacatactgcagacggccttcgataagctcgagagcatccccgaaggctgccacctgttctgccccaaggtctccttcgaggatgaggaggtctacgactcgcccgatgtcgccaccgagggcctcaccaccgaggagaagcagcagcgcatcgccgacagccaggagcgcctcgactccatgtaccactgctcgctgatcctcgggctcgaccgcgacgccgccggcgagctgcgcacccgcttcgacgccatgagcgacaccttcctgcgcacctgctccgagtgcgcccgcaactggcacaaggcccgcaagcccttcctcaaggacatgcgcgagtactacgacgacgccgtcgtcgacgagctggccctccgcctcgacgctttcgacttcgagcgcatccacaggggccttgccgccgccgaggccttcatcctcgagcgcgacggcgccagcgtctcccagaccaccttcatcaaggagggcaaggccgagctgctcatcgccctctacgagtccctctgcagcatggccttcctcaggctgcccgagaaccgcaaagccttcaacgtcgtcttcgagaccatccaggagcgcaggatcctccggctcgacgagatcctgcccactatgacccacttcctgttgactgacaagcacgagagtagcagcgaggccagcgcggatcgcggggtcaccccggatcacgagatccgcaggcgctttgccgagcaggccttcaagcgccccaacattaccatcaccaaggagaccttcgactgggccatcgacgagagcctcgcgaccgccatccgcctcgctaacaaccgagacacggacgccgactccctcgtccgcttctgggagggcgtcgagctcatcatcaatgccattgacgctgacgtactggctgagtgcttgcggggcatgaccgtctcgccgaccatgtacaacctcatgattgaccagatgccacaaatcaaaagccacgacttcaaggtcttgagtgccgcgctgagggtcttctgcaccctagtcaagaaatctcccacctcgctttggagtgcctttagccagtggtcacccccggccgtgctcgagcagatcatccgcagtcctgcctttcaccccctcctttcacagtctggcgagcacgacatgaccaccgacggcccgatcgccatcgcgtgggtgaggccttgtatcgactccatcacagcaaaccagaagacagatgtctgtgacaagctgatccaccacctgctcggagccgacctggccgccagcccagaaatgtcccccgacggcaaatttgcatgttatcgaggtgtcactgaggctctttcctcgacgctcgcggcctttgtcgcccccaaatttcgcctcaccggcgctaccatcatccaggccaacaccatactcaatatcacgttgaagtataaggatctgatcattgacttaggtcaacttcgtggctccgatctgcatcaaatgtctatggtcaaggccagtctggcggtcatcggatctgcgctggcgctcaactctcgtatcactgccgaggaatgtaatatcatcatgggcgacgagaagcagatgcagcgggaggtgaagcgggattcgcctggtctctgggaagcttttctcgaggtgctccagccgggagcatacgacctcgccacagccatgctcgtcgctttccaacccctcatcaccatcgaggtttttcggcccgcgaagaaggaaactctctctcaagttaagcgcgaattcaataccgagtttcagggaaccctagaagttatcggtagaatgatcgaacgtctggaagatttccaacagagcgctatgggccgactctgtttggaacctactaccatgtattctcttgtcgcgggcttggtccatggtgaagacatagttagccaggccagcgcgtcgttcatcaaagctttgacaaaacaagagaggcggacagacgccgtccaggcactcctcgagatgcatctagttccggtcttgtctgccttcatccgcgttgtggatgacatcacggacagaaaggctctttgggcaccccagttcaacatccttcgctattcaagagaaatactcgattcgctgtgtagcccaacatctggtatactgagagacagggttctgaactctaccgagcgagagattttgactacctggtggaggtctcagtggacgttccttgacaattgtttcaatcagactgaaggctggagtcgcatggacgttaacctcgataacatgaagaacttttgccgagacgccatggagcacgctgatgccatcctttcgcaagacggactactagctttggcgctgagctctggacagaagcaaacttctcaaggcgttgatgctgtggcgtctccggaatccatgaagagcatcttggaccaacctcggagaaactgtatgggtctatgcaaaatgctccgattgaaagatctttatctcgtcgatatcagtgtcaatgttgtgctcaagcttctgaagcgccttcatcgatatgccctggatatgcccgggcagcctgcagcctgggtgaagaacgcttgcacgaagaccgccgacaatcgctacagaacgaacaccaacttgaatagtagacagcgagcagagctttctaaagcccttggcgatgaatcagatacggcagatgatctagaaatcctcgcggaccgaaaagtcgagattcctaaaaagcagaaacagacaaggctcgacgaatggtccaagtctggcagcgagacaccgagtgctgcgtcgaaggataagcccgtttcggtgccggttactaagtccagtaaggatgatatacgtgagctactaaagcattcaacgtccgacaagagccgttccattctaactgagatgagcgctcgtcttccggcccctaaatcactacctcaagcccctgctctttcgtcagtatcatccattcgtgaaaaacgtgccaaagaagccgaggagaaaaaacagcgaaatgctgccgccattgccaaagtccaagcccttcgcacggggcggccgactgtggccggcgaaggatccggtctccaaggtctatcaggtgtccatggcaaggagcatgctccggcgcaaaaaagcgagataatggtcaactcgtcgtcagaagacgaagacgattcagaggatgatgacgagtccgagttcctcgcacgaactgggactctgcgcaaacctacagatgacgctaagaatcggataggctctatgaaaatggcctcacgcggtccagtgaagaaaatgaaaatccaacggtccgcgaaagatatgcgagcgcgtctcatccctcctatggacgtattgcatcaggctattctggaatgggacattttccacgaaggacacgaccctcccaatggtatcctgtgctcccaggttgctgactcctaccatgatccacgccagtacaaggagacttttcttccgcttctgatcaatgaagcatggagatcatttgtgacctcgaaagacgagatcaccgcaaagcctttcgaaaccaaaatcactgcccgtatgaatgttgataaattcatcgaagtaagcacctctatgcctaaagcggagagcaaggatagatttctctcagaaggcgatatcgttttactctcgcatgcgcccaatcccttagctgccaaagacgagctccactgccttgcccgtatctggcgtattctgttcaagggtgcccatctcgaggttcaatatcgcctgagcggcaaggctggacctatcttgagtacgctgatgccacagtccgaggtatatgcaatcaagatcaccaacatgacaacaatcgagcgagagtacgcatcgctggagagtctacaatactatgatctggctcccgagatcctggaagccaaaccgtctcctatgcttacgttcagtaacgaagccgtggaaaaggccatgagcaattatcacctgaaccaaggccaggctaaagcagtattgcacgcgaaagagaatgatgcattcacattagtccaagggcccccgggaactggaaagacgaagacaatcatcgctatggttggtgcactgctggctggaagccctgttgctactggtacggccatcaaacgacctggcggtgctgctcctgtgagtaagagcacctcgaagaaactcctggtctgcgcgccaagtaacgccgctgtcgatgagttggtcctacgtctcaaggaaggagtgaagtctatgaatggaacgttcaacaagatcaatgtactgcggttgggacgaagtgacgccatcaatgctgccgtcaaggatgtcaccttggacgaactggttaaggctcgagtcgaagcctcctcaaaggaaaattcggggccaagctctagagagctgatccaccaagaggccgccgcaatcaagatggcgctcaatgacttgcgccctctattagagtcggcacgagagcggggagatcgagcagaggtcaataagttgcaacgccaattcgatgagcacaaacgtcgtcaggctcaaattggcgcgaagattgatgctgacaaagagtccggtactcaccaagttcgagacagtgagatcaaacgtcggcagtaccagcaagagatcctcgattcagcccaagtgctgtgtgctacactgagcggcagtggccacgagatgttcaaaaatctgaacgtcgagttcgagaccgttatcatcgacgaggcagcacagtgtgttgagctgagtgcactaattccgcttaaatatggctgctccaaatgtgtcttggtaggagatccaaagcaattgccacccacagtcctgtcacaatctgccgctcggtatggatatgaccaaagtctcttcgttcgaatgcagcgcaattgtccaaaggatatacacctactcgacactcagtatcgtatgcaccctgagattagttccttcccaagtctggagttctacgaacgtcttctcgttgatggtaacaatatggcccagcttcgtcgccagccatggcatcagagcgaactcctgggcccctatcgcttcttcgatgtcaaaggtatacaggagaaaggtcgccgtggccagtcacttgtcaactacgaggagcttaaggttgccatgcagctctatgaaaggttcaaagttgactatccaacggtcgacatcaagggtaaagtgggtatcattacaccctacaaagctcagctttttgagcttcgggaccaatttactcgccgctatgggccccaaatcaccgaagatatcgagttcaatacaaccgatgcttttcaaggacgagagtgcgaaatcatcattttctcttgcgtccgagccagctctacgggtggcattggtttcatgaccgacattcggcgtatgaacgttggtctgacacgtgcgaaatcctcactctgggttcttggagattctcgtgctcttatccagggcgaattctggaacaagctgatcattgacgccaaagcaagagatcgctacacatcgggtgatgttctctctcttctgaaaaagccaggcgacaaatccttctcatcgaaatctccagcgctagtacctcccgcccagctcgctcgagacggatacagaagcgctcaagcgggtaactcatatccgcactctactagtatccgtcctgatgaagatgtgatcatggaggacgcaccgcctcccgcaccaaaaatacctaataaacagccaatgcatcagatgtcacagtcatacacagtcgtgggccctgcccatagtggtaggccaatctcccgagaagctagtggtatcaacgaacgtggagaagcagttgcctactctgggacaacgtcccagcgccccgtaatccatacatctggcgccaagcgtccccgagaggacgcagataaaggtcacggcaatgctgcaaagaaggcaaaagaggcgatacctggtctgacggcgccgtctcgtcctcggcatatgcccagaccccaagacccagcggccatggctgctcttgggatccccccgcccagtagtagcatgacttcgcgtccgcctatcaacgcccccaagggcccttctgggtctcagcattctgctgggccacaacgtccttctggaactcaacctcccaagggcaaaatcgtccccccaaagagaaagccgccccctccagtagacccttttatcagacgcaaacccaacaagcctcgttga

SEQ ID NO: 4304 - protein, 2085 aa, Muscodor strobelii
  misc_feature: SGI Peptide ID NO. 561121
  misc_feature (15)..(2083): NCBI GI: 116193595 Blast Desc: CHGG_06515 [Chaetomium globosum CBS 148.51] gi|88182428|gb|EAQ89896.1| CHGG_06515 [Chaetomium globosum CBS 148.51]
  misc_feature (2)..(2025): NCBI GI: 16945408 Blast Desc: related to SEN1 protein [Neurospora crassa]
  misc_feature (6)..(2085): NCBI GI: 171684931 Blast Desc: protein product [Podospora anserina] gi|170942426|emb|CAP68078.1| protein product [Podospora anserina]
  misc_feature (3)..(2052): NCBI GI: 256734138 Blast Desc: [Nectria haematococca mpVI 77-13-4]
  misc_feature (8)..(2024): NCBI GI: 149210111 Blast Desc: MGCH7_ch7g537 [Magnaporthe grisea 70-15] gi|86196492|gb|EAQ71130.1| MGCH7_ch7g537 [Magnaporthe grisea 70-15]
  misc_feature (3)..(2045): NCBI GI: 46128545 Blast Desc: FG08650.1 [Gibberella zeae PH-1]
  misc_feature (2)..(1911): NCBI GI: 154291609 Blast Desc: BC1G_15073 [Botryotinia fuckeliana B05.10] gi|150846710|gb|EDN21903.1| BC1G_15073 [Botryotinia fuckeliana B05.10]
  misc_feature (4)..(1729): NCBI GI: 261353227 Blast Desc: helicase sen1 [Verticillium albo-atrum VaMs.102]
  misc_feature (764)..(1859): NCBI GI: 145610022 Blast Desc: MGG_02784 [Magnaporthe grisea 70-15] gi|145017402|gb|EDK01765.1| MGG_02784 [Magnaporthe grisea 70-15]
  misc_feature (14)..(1861): NCBI GI: 212526670 Blast Desc: tRNA-splicing endonuclease, [Penicillium marneffei ATCC 18224] gi|210072890|gb|EEA26977.1| tRNA-splicing endonuclease, [Penicillium marneffei ATCC 18224]
  misc_feature: Useful for introducing or modulating the production of volatile compounds
MADVPNILQTAFDKLESIPEGCHLFCPKVSFEDEEVYDSPDVATEGLTTEEKQQRIADSQERLDSMYHCSLILGLDRDAAGELRTRFDAMSDTFLRTCSECARNWHKARKPFLKDMREYYDDAVVDELALRLDAFDFERIHRGLAAAEAFILERDGASVSQTTFIKEGKAELLIALYESLCSMAFLRLPENRKAFNVVFETIQERRILRLDEILPTMTHFLLTDKHESSSEASADRGVTPDHEIRRRFAEQAFKRPNITITKETFDWAIDESLATAIRLANNRDTDADSLVRFWEGVELIINAIDADVLAECLRGMTVSPTMYNLMIDQMPQIKSHDFKVLSAALRVFCTLVKKSPTSLWSAFSQWSPPAVLEQIIRSPAFHPLLSQSGEHDMTTDGPIAIAWVRPCIDSITANQKTDVCDKLIHHLLGADLAASPEMSPDGKFACYRGVTEALSSTLAAFVAPKFRLTGATIIQANTILNITLKYKDLIIDLGQLRGSDLHQMSMVKASLAVIGSALALNSRITAEECNIIMGDEKQMQREVKRDSPGLWEAFLEVLQPGAYDLATAMLVAFQPLITIEVFRPAKKETLSQVKREFNTEFQGTLEVIGRMIERLEDFQQSAMGRLCLEPTTMYSLVAGLVHGEDIVSQASASFIKALTKQERRTDAVQALLEMHLVPVLSAFIRVVDDITDRKALWAPQFNILRYSREILDSLCSPTSGILRDRVLNSTEREILTTWWRSQWTFLDNCFNQTEGWSRMDVNLDNMKNFCRDAMEHADAILSQDGLLALALSSGQKQTSQGVDAVASPESMKSILDQPRRNCMGLCKMLRLKDLYLVDISVNVVLKLLKRLHRYALDMPGQPAAWVKNACTKTADNRYRTNTNLNSRQRAELSKALGDESDTADDLEILADRKVEIPKKQKQTRLDEWSKSGSETPSAASKDKPVSVPVTKSSKDDIRELLKHSTSDKSRSILTEMSARLPAPKSLPQAPALSSVSSIREKRAKEAEEKKQRNAAAIAKVQALRTGRPTVAGEGSGLQGLSGVHGKEHAPAQKSEIMVNSSSEDEDDSEDDDESEFLARTGTLRKPTDDAKNRIGSMKMASRGPVKKMKIQRSAKDMRARLIPPMDVLHQAILEWDIFHEGHDPPNGILCSQVADSYHDPRQYKETFLPLLINEAWRSFVTSKDEITAKPFETKITARMNVDKFIEVSTSMPKAESKDRFLSEGDIVLLSHAPNPLAAKDELHCLARIWRILFKGAHLEVQYRLSGKAGPILSTLMPQSEVYAIKITNMTTIEREYASLESLQYYDLAPEILEAKPSPMLTFSNEAVEKAMSNYHLNQGQAKAVLHAKENDAFTLVQGPPGTGKTKTIIAMVGALLAGSPVATGTAIKRPGGAAPVSKSTSKKLLVCAPSNAAVDELVLRLKEGVKSMNGTFNKINVLRLGRSDAINAAVKDVTLDELVKARVEASSKENSGPSSRELIHQEAAAIKMALNDLRPLLESARERGDRAEVNKLQRQFDEHKRRQAQIGAKIDADKESGTHQVRDSEIKRRQYQQEILDSAQVLCATLSGSGHEMFKNLNVEFETVIIDEAAQCVELSALIPLKYGCSKCVLVGDPKQLPPTVLSQSAARYGYDQSLFVRMQRNCPKDIHLLDTQYRMHPEISSFPSLEFYERLLVDGNNMAQLRRQPWHQSELLGPYRFFDVKGIQEKGRRGQSLVNYEELKVAMQLYERFKVDYPTVDIKGKVGIITPYKAQLFELRDQFTRRYGPQITEDIEFNTTDAFQGRECEIIIFSCVRASSTGGIGFMTDIRRMNVGLTRAKSSLWVLGDSRALIQGEFWNKLIIDAKARDRYTSGDVLSLLKKPGDKSFSSKSPALVPPAQLARDGYRSAQAGNSYPHSTSIRPDEDVIMEDAPPPAPKIPNKQPMHQMSQSYTVVGPAHSGRPISREASGINERGEAVAYSGTTSQRPVIHTSGAKRPREDADKGHGNAAKKAKEAIPGLTAPSRPRHMPRPQDPAAMAALGIPPPSSSMTSRPPINAPKGPSGSQHSAGPQRPSGTQPPKGKIVPPKRKPPPPVDPFIRRKPNKPR

SEQ ID NO: 4305 - DNA, 7703 bp, Muscodor strobelii
  misc_feature: SGI EST ID NO. CUFF.10942.0
  misc_feature: Variant of the nucleotide sequence at SEQ ID NO 4303
tgcttaacgcgacgaccctggaagcttttaatgcggcaggggagtgacaatcgacaatatgatccaaatgctatccgagttggatgcgtgcatcaccaccacttttctttggccgtgggcttctcgccatcaatgctgcaccaacacacccgcccacactgctgtcgtctttgctcatttgtcttgcttgatactagaatactgaatgggcgagattcttgtccactaatgttttcattcaatctacttgcttttcttcattgatcggtcacccactgttccccggccgtccagccgtcgcccaccacagcaaaccttctctctcgcacctcatcatcctctcgcgaactggtgcctctctcttcttggggagctgttaattggtctaccatagagcagtgacctctgtacatcgtctatctgcgggagcatcttcagctcatccgccctcgatcatcccaactctggccctaccttcctcttgccggccgccctcgtgaccgcccctctcctgccaccattgccctctcgagataccacatacatcctcccaaaaacacactgtagaaatacatacacactctcctcaacctagataccacgatccctctgtccaagccctgttcccggtctcgactgggcgacatgccctggcccacccaacatggccgatgtacccaacatactgcagacggccttcgataagctcgagagcatccccgaaggctgccacctgttctgccccaaggtctccttcgaggatgaggaggtctacgactcgcccgatgtcgccaccgagggcctcaccaccgaggagaagcagcagcgcatcgccgacagccaggagcgcctcgactccatgtaccactgctcgctgatcctcgggctcgaccgcgacgccgccggcgagctgcgcacccgcttcgacgccatgagcgacaccttcctgcgcacctgctccgagtgcgcccgcaactggcacaaggcccgcaagcccttcctcaaggacatgcgcgagtactacgacgacgccgtcgtcgacgagctggccctccgcctcgacgctttcgacttcgagcgcatccacaggggccttgccgccgccgaggccttcatcctcgagcgcgacggcgccagcgtctcccagaccaccttcatcaaggagggcaaggccgagctgctcatcgccctctacgagtccctctgcagcatggccttcctcaggctgcccgagaaccgcaaagccttcaacgtcgtcttcgagaccatccaggagcgcaggatcctccggctcgacgagatcctgcccactatgacccacttcctgttgactgacaagcacgagagtagcagcgaggccagcgcggatcgcggggtcaccccggatcacgagatccgcaggcgctttgccgagcaggccttcaagcgccccaacattaccatcaccaaggagaccttcgactgggccatcgacgagagcctcgcgaccgccatccgcctcgctaacaaccgagacacggacgccgactccctcgtccgcttctgggagggcgtcgagctcatcatcaatgccattgacgctgacgtactggctgagtgcttgcggggcatgaccgtctcgccgaccatgtacaacctcatgattgaccagatgccacaaatcaaaagccacgacttcaaggtcttgagtgccgcgctgagggtcttctgcaccctagtcaagaaatctcccacctcgctttggagtgcctttagccagtggtcacccccggccgtgctcgagcagatcatccgcagtcctgcctttcaccccctcctttcacagtctggcgagcacgacatgaccaccgacggcccgatcgccatcgcgtgggtgaggccttgtatcgactccatcacagcaaaccagaagacagatgtctgtgacaagctgatccaccacctgctcggagccgacctggccgccagcccagaaatgtcccccgacggcaaatttgcatgttatcgaggtgtcactgaggctctttcctcgacgctcgcggcctttgtcgcccccaaatttcgcctcaccggcgctaccatcatccaggccaacaccatactcaatatcacgttgaagtataaggatctgatcattgacttaggtcaacttcgtggctccgatctgcatcaaatgtctatggtcaaggccagtctggcggtcatcggatctgcgctggcgctcaactctcgtatcactgccgaggaatgtaatatcatcatgggcgacgagaagcagatgcagcgggaggtgaagcgggattcgcctggtctctgggaagcttttctcgaggtgctccagccgggagcatacgacctcgccacagccatgctcgtcgctttccaacccctcatcaccatcgaggtttttcggcccgcgaagaaggaaactctctctcaagttaagcgcgaattcaataccgagtttcagggaaccctagaagttatcggtagaatgatcgaacgtctggaagatttccaacagagcgctatgggccgactctgtttggaacctactaccatgtattctcttgtcgcgggcttggtccatggtgaagacatagttagccaggccagcgcgtcgttcatcaaagctttgacaaaacaagagaggcggacagacgccgtccaggcactcctcgagatgcatctagttccggtcttgtctgccttcatccgcgttgtggatgacatcacggacagaaaggctctttgggcaccccagttcaacatccttcgctattcaagagaaatactcgattcgctgtgtagcccaacatctggtatactgagagacagggttctgaactctaccgagcgagagattttgactacctggtggaggtctcagtggacgttccttgacaattgtttcaatcagactgaaggctggagtcgcatggacgttaacctcgataacatgaagaacttttgccgagacgccatggagcacgctgatgccatcctttcgcaagacggactactagctttggcgctgagctctggacagaagcaaacttctcaaggcgttgatgctgtggcgtctccggaatccatgaagagcatcttggaccaacctcggagaaactgtatgggtctatgcaaaatgctccgattgaaagatctttatctcgtcgatatcagtgtcaatgttgtgctcaagcttctgaagcgccttcatcgatatgccctggatatgcccgggcagcctgcagcctgggtgaagaacgcttgcacgaagaccgccgacaatcgctacagaacgaacaccaacttgaatagtagacagcgagcagagctttctaaagcccttggcgatgaatcagatacggcagatgatctagaaatcctcgcggaccgaaaagtcgagattcctaaaaagcagaaacagacaaggctcgacgaatggtccaagtctggcagcgagacaccgagtgctgcgtcgaaggataagcccgtttcggtgccggttactaagtccagtaaggatgatatacgtgagctactaaagcattcaacgtccgacaagagccgttccattctaactgagatgagcgctcgtcttccggcccctaaatcactacctcaagcccctgctctttcgtcagtatcatccattcgtgaaaaacgtgccaaagaagccgaggagaaaaaacagcgaaatgctgccgccattgccaaagtccaagcccttcgcacggggcggccgactgtggccggcgaaggatccggtctccaaggtctatcaggtgtccatggcaaggagcatgctccggcgcaaaaaagcgagataatggtcaactcgtcgtcagaagacgaagacgattcagaggatgatgacgagtccgagttcctcgcacgaactgggactctgcgcaaacctacagatgacgctaagaatcggataggctctatgaaaatggcctcacgcggtccagtgaagaaaatgaaaatccaacggtccgcgaaagatatgcgagcgcgtctcatccctcctatggacgtattgcatcaggctattctggaatgggacattttccacgaaggacacgaccctcccaatggtatcctgtgctcccaggttgctgactcctaccatgatccacgccagtacaaggagacttttcttccgcttctgatcaatgaagcatggagatcatttgtgacctcgaaagacgagatcaccgcaaagcctttcgaaaccaaaatcactgcccgtatgaatgttgataaattcatcgaagtaagcacctctatgcctaaagcggagagcaaggatagatttctctcagaaggcgatatcgttttactctcgcatgcgcccaatcccttagctgccaaagacgagctccactgccttgcccgtatctggcgtattctgttcaagggtgcccatctcgaggttcaatatcgcctgagcggcaaggctggacctatcttgagtacgctgatgccacagtccgaggtatatgcaatcaagatcaccaacatgacaacaatcgagcgagagtacgcatcgctggagagtctacaatactatgatctggctcccgagatcctggaagccaaaccgtctcctatgcttacgttcagtaacgaagccgtggaaaaggccatgagcaattatcacctgaaccaaggccaggctaaagcagtattgcacgcgaaagagaatgatgcattcacattagtccaagggcccccgggaactggaaagacgaagacaatcatcgctatggttggtgcactgctggctggaagccctgttgctactggtacggccatcaaacgacctggcggtgctgctcctgtgagtaagagcacctcgaagaaactcctggtctgcgcgccaagtaacgccgctgtcgatgagttggtcctacgtctcaaggaaggagtgaagtctatgaatggaacgttcaacaagatcaatgtactgcggttgggacgaagtgacgccatcaatgctgccgtcaaggatgtcaccttggacgaactggttaaggctcgagtcgaagcctcctcaaaggaaaattcggggccaagctctagagagctgatccaccaagaggccgccgcaatcaagatggcgctcaatgacttgcgccctctattagagtcggcacgagagcggggagatcgagcagaggtcaataagttgcaacgccaattcgatgagcacaaacgtcgtcaggctcaaattggcgcgaagattgatgctgacaaagagtccggtactcaccaagttcgagacagtgagatcaaacgtcggcagtaccagcaagagatcctcgattcagcccaagtgctgtgtgctacactgagcggcagtggccacgagatgttcaaaaatctgaacgtcgagttcgagaccgttatcatcgacgaggcagcacagtgtgttgagctgagtgcactaattccgcttaaatatggctgctccaaatgtgtcttggtaggagatccaaagcaattgccacccacagtcctgtcacaatctgccgctcggtatggatatgaccaaagtctcttcgttcgaatgcagcgcaattgtccaaaggatatacacctactcgacactcagtatcgtatgcaccctgagattagttccttcccaagtctggagttctacgaacgtcttctcgttgatggtaacaatatggcccagcttcgtcgccagccatggcatcagagcgaactcctgggcccctatcgcttcttcgatgtcaaaggtatacaggagaaaggtcgccgtggccagtcacttgtcaactacgaggagcttaaggttgccatgcagctctatgaaaggttcaaagttgactatccaacggtcgacatcaagggtaaagtgggtatcattacaccctacaaagctcagctttttgagcttcgggaccaatttactcgccgctatgggccccaaatcaccgaagatatcgagttcaatacaaccgatgcttttcaaggacgagagtgcgaaatcatcattttctcttgcgtccgagccagctctacgggtggcattggtttcatgaccgacattcggcgtatgaacgttggtctgacacgtgcgaaatcctcactctgggttcttggagattctcgtgctcttatccagggcgaattctggaacaagctgatcattgacgccaaagcaagagatcgctacacatcgggtgatgttctctctcttctgaaaaagccaggcgacaaatccttctcatcgaaatctccagcgctagtacctcccgcccagctcgctcgagacggatacagaagcgctcaagcgggtaactcatatccgcactctactagtatccgtcctgatgaagatgtgatcatggaggacgcaccgcctcccgcaccaaaaatacctaataaacagccaatgcatcagatgtcacagtcatacacagtcgtgggccctgcccatagtggtaggccaatctcccgagaagctagtggtatcaacgaacgtggagaagcagttgcctactctgggacaacgtcccagcgccccgtaatccatacatctggcgccaagcgtccccgagaggacgcagataaaggtcacggcaatgctgcaaagaaggcaaaagaggcgatacctggtctgacggcgccgtctcgtcctcggcatatgcccagaccccaagacccagcggccatggctgctcttgggatccccccgcccagtagtagcatgacttcgcgtccgcctatcaacgcccccaagggcccttctgggtctcagcattctgctgggccacaacgtccttctggaactcaacctcccaagggcaaaatcgtccccccaaagagaaagccgccccctccagtagacccttttatcagacgcaaacccaacaagcctcgttgattggcggctcaggatttctctctctcgctgtaatttagattatacctttagaataaggttcaagaaatcaccgtccggagggcaaaatggtacataaaatggcgttatgagacgggtagaggttctgcattgcgaaatggacggagaggtcatttgttgcaatctgcacagatacccaaggcgtctcggacttatgttgcattttcggagcatgctggtacaatggcttgagaggatatggctagaaactcatgtaggtcagctagagacttcgcacgagtgcaccacgtgatttaagctatgctacggcatggctgttccaacgtgctttgcggtcccaatagcccgatcaagctaagtcgtgtagtcagtccccttgcggcctgcatcaaatcggaggaaaatggtaccgtaaatcccaatgggtcgatggtcctaacgtactgcacgccacagctggcccctacggacgaatgaagtcattttacggtgaaatattcccatttccaatttcctggtatgtggttatcgccggtacttgtgactgtcgtaatatattggaatacccctatgagacaaaccagcccttggatgattcattttcctgtggcttgtggccttcacgccgacccagatgataattcgtccaaacacattcgcgtgtgtgagatcacttcaactggttacatattgctagactgctcatgccttatgtttgcgcctcaggctgtctctattgattggcaacacataccttacacctgtatcctacatatgccca

SEQ ID NO: 4306 - DNA, 774 bp, Muscodor strobelii
  misc_feature: SGI cDNA ID NO. 561122
  misc_feature: Encodes the peptide sequence at SEQ ID NO 4307
atgagccgtccattgaagagagcgcgagtcgagccggacgatgccagtctcagcttgccatcagccccgccccttgttgacggtcccacctacgaggagatgatagacgcactgagcgacgaccagctgaggtggatcatcacgcatctatctaagacctccccgtcggcccaggccgcgatttccgagacatacagacacactttgcgtgttcaccaacggcgcgtcatcaacttcgaccactacagcaaggaagtttggaacattctcaacagaagcccgtacgcacgagtgagctccagcaaacagtacgagttctcgggcgcagccatgagagaaattgaggattgtatagagtctatttcacaagaaacgcccaacgaaagctccttcggtacaaaactcagcgctctcgagacgctccgcaagatcggcaagaccatcatattaggcgacggagacacgctcggccacgagatccacatgaacttccaatggaactgttgcctcgggaatgcgatgctgcgcattgctgaatcaatgactcccgatgagttgttgtgtgctggggagaacgcagacgagaagggctctcttctcgataagatgaactgggtccatcatgcggcccagagttactgcctgggaggttttgccgccgtggaacaggtattagagctccttggaggagcagtgggagatgtctcggaagagcaagtctcggtagaggaagaagctgaggactctgccgaagatgaccgggtcgatgagtag

SEQ ID NO: 4307 - protein, 257 aa, Muscodor strobelii
  misc_feature: SGI Peptide ID NO. 561122
  misc_feature (3)..(185): NCBI GI: 238508132 Blast Desc: conserved [Aspergillus flavus NRRL3357] gi|220688786|gb|EED45138.1| conserved [Aspergillus flavus NRRL3357]
  misc_feature (2)..(232): NCBI GI: 115433020 Blast Desc: [Aspergillus terreus NIH2624] gi|114189499|gb|EAU31199.1| [Aspergillus terreus NIH2624]
  misc_feature (70)..(228): NCBI GI: 171692305 Blast Desc: protein product [Podospora anserina] gi|170946101|emb|CAP72902.1| protein product [Podospora anserina]
  misc_feature (114)..(230): NCBI GI: 39974297 Blast Desc: [Magnaporthe grisea 70-15] gi|145018361|gb|EDK02640.1| [Magnaporthe grisea 70-15]
MSRPLKRARVEPDDASLSLPSAPPLVDGPTYEEMIDALSDDQLRWIITHLSKTSPSAQAAISETYRHTLRVHQRRVINFDHYSKEVWNILNRSPYARVSSSKQYEFSGAAMREIEDCIESISQETPNESSFGTKLSALETLRKIGKTIILGDGDTLGHEIHMNFQWNCCLGNAMLRIAESMTPDELLCAGENADEKGSLLDKMNWVHHAAQSYCLGGFAAVEQVLELLGGAVGDVSEEQVSVEEEAEDSAEDDRVDE

SEQ ID NO: 4308 - DNA, 1612 bp, Muscodor strobelii
  misc_feature: SGI EST ID NO. CUFF.10908.0
  misc_feature: Variant of the nucleotide sequence at SEQ ID NO 4306
cgcctccaaccattaaaaccgctttgaagccgaccaaattccagcgagcaaatggattgagttctggcttgtaagattttctaatgcatatcattaactttaaagagctctgtagatcggcatcagtagggtatggccattgtcgtgccaaccagctagtccacaacggacattaggcagagccatgtcgatagtcgcgtcacgcgtatatgaacctggaggcgcgtttccagtagatctcatgtagttgccagtcccaacagcgcgatcgcaatcatcataccttattgtcaaccaagaagaacgctcccaagctaggttggctgtctttgcacgacaatgagccgtccattgaagagagcgcgagtcgagccggacgatgccagtctcagcttgccatcagccccgccccttgttgacggtcccacctacgaggagatgatagacgcactgagcgacgaccagctgaggtggatcatcacgcatctatctaagacctccccgtcggcccaggccgcgatttccgagacatacagacacactttgcgtgttcaccaacggcgcgtcatcaacttcgaccactacagcaaggaagtttggaacattctcaacagaagcccgtacgcacgagtgagctccagcaaacagtacgagttctcgggcgcagccatgagagaaattgaggattgtatagagtctatttcacaagaaacgcccaacgaaagctccttcggtacaaaactcagcgctctcgagacgctccgcaagatcggcaagaccatcatattaggcgacggagacacgctcggccacgagatccacatgaacttccaatggaactgttgcctcgggaatgcgatgctgcgcattgctgaatcaatgactcccgatgagttgttgtgtgctggggagaacgcagacgagaagggctctcttctcgataagatgaactgggtccatcatgcggcccagagttactgcctgggaggttttgccgccgtggaacaggtattagagctccttggaggagcagtgggagatgtctcggaagagcaagtctcggtagaggaagaagctgaggactctgccgaagatgaccgggtcgatgagtagggcatgatgacgaaatatgcgcggatcaaagggaggcactcggcaactaccacactaacatgtcaaattatgtgagcagacatcctcttcggcttgcccatcgggtgctcgttgacgacacgcgcaatggttccaatctgcgatgacacgctggtctgagtatcctacctagctgcgctctcgtagtgtctcgctccttatgcgcactgcgtgcgcattcggccctcctctcataaacaattgtaggttattcgtttcacgcaatatatgtgatacaatgatagtgtatacatttccaagagccgttggtctagctgaggaatcacaccctctcccccatctctacaaaaaaacgcagcaactaagctcgtttacaactatccgagtttagaccggctacagtgatgatagtcaaagcgggttggctgtatgtcattaatcgatgattcatacttcttgttgacacatttgaacattggtttgtagacggctttgaact

SEQ ID NO: 4309 - DNA, 1797 bp, Muscodor strobelii
  misc_feature: SGI cDNA ID NO. 561123
  misc_feature: Encodes the peptide sequence at SEQ ID NO 4310
atgagtgcaaatcctcacggagcctggaacaccggattctggcggcggttcccgtggctagcagggctctccatcattgtctttcttgtctcagctggcgcgatagctgcagtcctcggcagttcgcataaccaggacgtggcgtcttggccgtcttctcagcgacctgtatccgttcaggtcatcttgtcaatattggtcaacatcgtcaatctaagcctcgcagtagccctgagcgaaggctacaagatcagttggtggctcaaggctctgaaaggagcttctctatccgacctacaattcgacttagaggtacagaagagtcttggcgccttcttgcattcatcacggtcatttgaccggttcgctatattggcactcattgcattggccgtgagcgtggccgatggcccgttaatacagcgcgctacgtcgacgggggcgaggatcgttacactcaaggaagactctgtcacggtttttgtgtcccccgacatgttaccgagcaatttcagcgggtggaatggaggaagtacggctaaggccctacttcttcagcccgtgttcgccaacgtgagcagagcctatactgcaaatgacccgattctcctaccgagctcgggctgtggggaaaatcgaacctgcattgcgtctatgttggctcccggtctcgatatcacttgcgacgaaaatcgtgtgccctatgactataacgacttgggttctgcagaccctaaccataacaacattacggcgttcgatgtcaactttgaaatctcagacaacggaaatgtcacaacgctaagtaccgtaaatttcacgacaacatacaagcccgacacgtcatgcgtgggcgaattcgtaaagaagcgatgcttcacgaggctcgccacagtgcgataccccgtaacgctgagcaatgggacggcgatactccagaagtggcagacgggcatggatgaaacggtcgaggtgccacagttcaacacatcaatcttttcatctgatttattccagctgattgctgttcctggcacttcaggacagcaatggggatacgcgtcgatgctaggaggtatcgtacttgccgcgaaaacgcaatacgaatccatggccaacttacggctcccgtctaaaacgcaagccacgccgtggatggtcaatgctaccggtcaggctgccacgaattatctgacatccacggtggacacgtacggcaactgcagtatgacctggtcggatccgtcgactgacatattcaacacactgcgtgagctgatgtttcgcagcgcagtaagcaacagcatagcaaacgcctcatacgccacaccacaagtaattcctgccaaggtgaccaagatcatcactgcgtatcagtccaaatacgagtatctcggcatagtactcgcaatcacggtcttggagcttgtcttgatattcgtcctgctgactgggtggtggcgtctagggcgcaacatgtctttggatacgtttgagatcggcaaagccctgggtgtccctattcttagcgaggttggctcgaacagtaccattgacggaatattgaaatttgcagggactagaaatttgaaatacggggagatggaaatgaggttcgaaggagaaacagacgcgaggccatcgatgtcgttactttcggcagatcgttattcaacgatccgaaaggacccaggcgatatctcaactgaattccacgatgggccgactctcaggagactaggattaggtgatcttagtcaagtatcggatgtacgcacgggaatagattactactag

SEQ ID NO: 4310 - protein, 598 aa, Muscodor strobelii
  misc_feature: SGI Peptide ID NO. 561123
  misc_feature (13)..(532): NCBI GI: 256734892 Blast Desc: NECHADRAFT_75613 [Nectria haematococca mpVI 77-13-4]
  misc_feature (5)..(546): NCBI GI: 258572772 Blast Desc: [Uncinocarpus reesii 1704] gi|237905418|gb|EEP79819.1| [Uncinocarpus reesii 1704]
  misc_feature (9)..(523): NCBI GI: 256724043 Blast Desc: NECHADRAFT_101993 [Nectria haematococca mpVI 77-13-4]
  misc_feature (18)..(543): NCBI GI: 171678165 Blast Desc: protein product [Podospora anserina] gi|170937152|emb|CAP61809.1| protein product [Podospora anserina]
  misc_feature (9)..(537): NCBI GI: 46139365 Blast Desc: FG11197.1 [Gibberella zeae PH-1]
  misc_feature (42)..(507): NCBI GI: 85076161 Blast Desc: NCU07235 [Neurospora crassa OR74A] gi|28916916|gb|EAA26653.1| [Neurospora crassa OR74A]
  misc_feature (33)..(531): NCBI GI: 169607104 Blast Desc: SNOG_06606 [Phaeosphaeria nodorum SN15] gi|111065317|gb|EAT86437.1| SNOG_06606 [Phaeosphaeria nodorum SN15]
  misc_feature (125)..(507): NCBI GI: 85108040 Blast Desc: NCU07342 [Neurospora crassa OR74A] gi|28924107|gb|EAA33264.1| [Neurospora crassa OR74A]
  misc_feature (334)..(515): NCBI GI: 169598646 Blast Desc: SNOG_02128 [Phaeosphaeria nodorum SN15] gi|160704441|gb|EAT90340.2| SNOG_02128 [Phaeosphaeria nodorum SN15]
  misc_feature (2)..(228): NCBI GI: 171689488 Blast Desc: protein product [Podospora anserina] gi|170944706|emb|CAP70817.1| protein product [Podospora anserina]
MSANPHGAWNTGFWRRFPWLAGLSIIVFLVSAGAIAAVLGSSHNQDVASWPSSQRPVSVQVILSILVNIVNLSLAVALSEGYKISWWLKALKGASLSDLQFDLEVQKSLGAFLHSSRSFDRFAILALIALAVSVADGPLIQRATSTGARIVTLKEDSVTVFVSPDMLPSNFSGWNGGSTAKALLLQPVFANVSRAYTANDPILLPSSGCGENRTCIASMLAPGLDITCDENRVPYDYNDLGSADPNHNNITAFDVNFEISDNGNVTTLSTVNFTTTYKPDTSCVGEFVKKRCFTRLATVRYPVTLSNGTAILQKWQTGMDETVEVPQFNTSIFSSDLFQLIAVPGTSGQQWGYASMLGGIVLAAKTQYESMANLRLPSKTQATPWMVNATGQAATNYLTSTVDTYGNCSMTWSDPSTDIFNTLRELMFRSAVSNSIANASYATPQVIPAKVTKIITAYQSKYEYLGIVLAITVLELVLIFVLLTGWWRLGRNMSLDTFEIGKALGVPILSEVGSNSTIDGILKFAGTRNLKYGEMEMRFEGETDARPSMSLLSADRYSTIRKDPGDISTEFHDGPTLRRLGLGDLSQVSDVRTGIDYY

SEQ ID NO: 4311 - DNA, 216 bp, Muscodor strobelii
  misc_feature: SGI EST ID NO. CUFF.10917.0
  misc_feature: Variant of the nucleotide sequence at SEQ ID NO 4309
tttagcttcctcccacggtgtgaacgtcgaggcttacgctgtctaccagacttgctcttgcccctgatttccactgtgacgcgagtgaagtcaaatatgagtgcaaatcctcacggagcctggaacaccggattctggcggcggttcccgtggctagcagggctctccatcattgtctttcttgtctcagctggcgcgatagctgcagtcctcggc

SEQ ID NO: 4312 - DNA, 1212 bp, Muscodor strobelii
  misc_feature: SGI cDNA ID NO. 561124
  misc_feature: Encodes the peptide sequence at SEQ ID NO 4313
atggctcgtaacactaagaagtccgccgccgccccccttcgcagcgacgtcgccctgcatgatacaggcatagtcaccagtgcacccgccacctctgttacttcgccgtctgccacgttgttgcctgccattccgccgcctgctagacgttcgtctagacagaccgcccgtaagcgcaaaagcgagcccaacgaccagtctagcgacactcccgcgccgaaaaagggcaagaaaaggggcaagaaagcaggcatgtccactgggcccactacatctgctgaaccaccaaagaaaccaaagtcagggtataaatatcgccctgacgtcacccctcacccgcaacatcaagaacccagtgccgaccagtgcgaggtcgtgaaccagcttctgatcaacctatatggaccaagaactccgcctacatctctccctacaagatccttcactattgctacttgcggagaggtgtactatgtgctcgatgctctgctgagagcctacatcagcggtgcagtaaagatcccgctcgccaataaagtcatccaggcaattgctcactgggcatactatggcgtccacaagacagacttcactgttccagataccgtcctcgagaaggaggccgagacgatcaactgggctaagatacacctctcgtccattgaggatcttgctgtttgtctcaaacctgcaggattgcaggtcaagaaggcgggttacatcaagcagatccttgaccaggttcacgagtggaacgaagagcgctgccagaaggacaatatcgatccaagccagacggacatgctctcactcgaatggctgcgggacctacgcaccgaggaggccatgcttaagctcaccacgttggaggggatcggcgtcaagacggccgcttgcgtcatgctcttctgtctcaaacgtcctgtcttcgctgtggacacccacgtccacaggtttgccaactggctgggatgggttcccaagctagctagccgcgacaaaactttcgcgcacctcgaggtccgctgcccagaccacctcaaatacagcctgcatcagctctttatccagcacggtattgactgtcaccgctgcggaggcaaggccacagttggttcggagcggtggaatgatacgaactgccccctggaaagtatcattgatcgcttcaatatgaacagcgaaaagggcaaggacacaagcgcggaataa

SEQ ID NO: 4313 - protein, 403 aa, Muscodor strobelii
  misc_feature: SGI Peptide ID NO. 561124
  misc_feature (220)..(345): Pfam Id: PF00730 Pfam Desc: HhH-GPD superfamily base excision DNA repair protein
  misc_feature (90)..(397): NCBI GI: 154302382 Blast Desc: BC1G_09975 [Botryotinia fuckeliana B05.10] gi|150855463|gb|EDN30655.1| BC1G_09975 [Botryotinia fuckeliana B05.10]
  misc_feature (103)..(389): NCBI GI: 116193597 Blast Desc: CHGG_06516 [Chaetomium globosum CBS 148.51] gi|88182429|gb|EAQ89897.1| CHGG_06516 [Chaetomium globosum CBS 148.51]
  misc_feature (47)..(389): NCBI GI: 256734139 Blast Desc: NECHADRAFT_77955 [Nectria haematococca mpVI 77-13-4]
  misc_feature (95)..(400): NCBI GI: 261353228 Blast Desc: HhH-GPD family base excision DNA repair protein [Verticillium albo-atrum VaMs.102]
  misc_feature (103)..(403): NCBI GI: 46128543 Blast Desc: FG08649.1 [Gibberella zeae PH-1]
  misc_feature (103)..(389): NCBI GI: 171684933 Blast Desc: protein product [Podospora anserina] gi|170942427|emb|CAP68079.1| protein product [Podospora anserina]
  misc_feature (65)..(389): NCBI GI: 156055880 Blast Desc: SS1G_05292 [Sclerotinia sclerotiorum 1980] gi|154703076|gb|EDO02815.1| SS1G_05292 [Sclerotinia sclerotiorum 1980]
  misc_feature (97)..(389): NCBI GI: 255946089 Blast Desc: Pc20g13320 [Penicillium chrysogenum Wisconsin 54-1255] gi|211588547|emb|CAP86661.1| Pc20g13320 [Penicillium chrysogenum Wisconsin 54-1255]
  misc_feature (97)..(389): NCBI GI: 85114220 Blast Desc: NCU02035 [Neurospora crassa OR74A] gi|10303298|emb|CAC10093.1| conserved [Neurospora crassa] gi|28926447|gb|EAA35421.1| [Neurospora crassa OR74A]
  misc_feature (58)..(389): NCBI GI: 240111791 Blast Desc: HhH-GPD family base excision DNA repair protein [Coccidioides posadasii C735 delta SOWgp]
MARNTKKSAAAPLRSDVALHDTGIVTSAPATSVTSPSATLLPAIPPPARRSSRQTARKRKSEPNDQSSDTPAPKKGKKRGKKAGMSTGPTTSAEPPKKPKSGYKYRPDVTPHPQHQEPSADQCEVVNQLLINLYGPRTPPTSLPTRSFTIATCGEVYYVLDALLRAYISGAVKIPLANKVIQAIAHWAYYGVHKTDFTVPDTVLEKEAETINWAKIHLSSIEDLAVCLKPAGLQVKKAGYIKQILDQVHEWNEERCQKDNIDPSQTDMLSLEWLRDLRTEEAMLKLTTLEGIGVKTAACVMLFCLKRPVFAVDTHVHRFANWLGWVPKLASRDKTFAHLEVRCPDHLKYSLHQLFIQHGIDCHRCGGKATVGSERWNDTNCPLESIIDRFNMNSEKGKDTSAE

SEQ ID NO: 4314 - DNA, 402 bp, Muscodor strobelii
  misc_feature: SGI cDNA ID NO. 561125
  misc_feature: Encodes the peptide sequence at SEQ ID NO 4315
atgtcctggctcccacaagatgaaggctatctgcctagattcctcttactgccggcaacaatggcagcgatacacaccgtcgtctgctacgtagctccgccatcagcatcaacaaagcaattcagcggtcctgcggcgccaccaccccacgggcttttggctcggacctatggcgtgaagaacttctataccagcgctattcggttctatgctgcgtatcacattacgaaccctcaggtttatgaccttgcaactctaactttcgctggtgtgctcttcttgtacactggtgaggtcttcgtgtacaagacatcgcgcatgcgagagctgtggtcttcgttcttaatggctggtacagggtttatttggatgatatctcagcgcgattggtatctatcataa

SEQ ID NO: 4315 - protein, 133 aa, Muscodor strobelii
  misc_feature: SGI Peptide ID NO. 561125
  misc_feature (1)..(120): Pfam Id: PF03694 Pfam Desc: Erg28 like protein
  misc_feature (51)..(120): Pfam Id: PF03694 Pfam Desc: Erg28 like protein
  misc_feature (8)..(132): NCBI GI: 242770528 Blast Desc: conserved [Talaromyces stipitatus ATCC 10500] gi|218725195|gb|EED24612.1| conserved [Talaromyces stipitatus ATCC 10500]
  misc_feature (4)..(132): NCBI GI: 240104712 Blast Desc: Erg28 like family protein [Coccidioides posadasii C735 delta SOWgp]
  misc_feature (4)..(130): NCBI GI: 119178774 Blast Desc: CIMG_08189 [Coccidioides immitis RS]
  misc_feature (1)..(132): NCBI GI: 225559139 Blast Desc: ergosterol biosynthetic protein [Ajellomyces capsulatus G186AR]
  misc_feature (2)..(133): NCBI GI: 238839752 Blast Desc: ergosterol biosynthesis protein [Microsporum canis CBS 113480]
  misc_feature (2)..(130): NCBI GI: 258577487 Blast Desc: conserved [Uncinocarpus reesii 1704] gi|237903191|gb|EEP77592.1| conserved [Uncinocarpus reesii 1704]
  misc_feature (1)..(133): NCBI GI: 159129556 Blast Desc: ergosterol biosynthesis protein Erg28, [Aspergillus fumigatus A1163]
  misc_feature (1)..(133): NCBI GI: 71001612 Blast Desc: ergosterol biosynthesis protein Erg28 [Aspergillus fumigatus Af293] gi|66853125|gb|EAL93449.1| ergosterol biosynthesis protein Erg28, [Aspergillus fumigatus Af293]
  misc_feature (1)..(131): NCBI GI: 225679905 Blast Desc: ergosterol biosynthesis protein [Paracoccidioides brasiliensis Pb03] gi|226291673|gb|EEH47101.1| ergosterol biosynthesis protein [Paracoccidioides brasiliensis Pb18]
  misc_feature (1)..(131): NCBI GI: 226286209 Blast Desc: ergosterol biosynthesis protein [Paracoccidioides brasiliensis Pb01]
MSWLPQDEGYLPRFLLLPATMAAIHTVVCYVAPPSASTKQFSGPAAPPPHGLLARTYGVKNFYTSAIRFYAAYHITNPQVYDLATLTFAGVLFLYTGEVFVYKTSRMRELWSSFLMAGTGFIWMISQRDWYLS

SEQ ID NO: 4316 - DNA, 3947 bp, Muscodor strobelii
  misc_feature: SGI EST ID NO. CUFF.11151.0
  misc_feature: Variant of the nucleotide sequence at SEQ ID NO 4314
ctcaaggacaaatttgtcgatgcctgttatcgcctgtagttgttctgcatgggtggccttctctgcgacttttcgccaggtttgatcaaaaaaatggacggtctttggggctaagagttcctgtagagtccagcctcgggtgaaccaccggcaatgacccatgccaacttgagtccctttccaagccagggttttaggttgacccggcacaaaatcctcaagaaaggcatagcaaatagctgatcgctggtaccatttaaacatagaattgatcgcttcccccaattccgagctgctgaatttgttaatgcagcacgtatcaacccaggcatattctaagccatgctctctggccaatttgcatgtcgctttaactttgtcgaatgcggggctcctcttctggcgacggggttttggcgttcgcaaatcggctattgtgatttccttggtaccccatgtatgtgacaatattgcatacggtggcggcgctttccctacaaactcgtgaagccgtaatgtgtgagtatttatgagcctcatggtaatcgctccatcgccgtgggcagagccaatgtagtgaaggcataggtcatcgctgacgtgatgggatttcgttattgagaggttgctgacatggggttactgaaatcctgcaggtcaaggtcgcccctagccagtacggtggccggcgaagatgtaacgtaatctaggtatgctaccctgttttcgaatatatcgacaacatgatgcatcgacacagcctcgacgacaccgtggataggatactgtctctttcgcatatcaatcgcgcaagctgcagagtgtgtcaagaagagtgtgagtggcatcacagggaagccaaaagtgggcctgaagagctagccgcctcagtggaaagaatgtaccgcgccttgatagttaaactcaacctcaattgtaatacaagcacggcggttgtatcgagagtgtttcaaacagtagaaagaggaaggaacggagcggcacaccctccatttagatgtgagagatttggacgaggcttagacaccaaaggaatgggttatacgtgaaggattgtgggcaagtggtcagaatttcaactctattctcgttggctattgaaccttcaacgacataattaaagtgacggaatgagaataaacgtaatgattcaatttttggctatgcgcaacacaatacatttcgcaaagaaagggccggtttccaattcgctgtctaaattacgcagtgtccaaaataacaacttccgcctccgcttctcctacgctctcaacgaataccttatcgccggcatcgacggcatccacaaatgcgccatcgccctctgcaaacagctcttctcttccatcgatacgaatcttggcctttcctttcttagtcatgggtaaatgaatgaagacctttcttttcgtgctctcggtcgcacccgcaccaatcttccattcaaatttctgctgaggaggaatgataccggcacccatgacgaagtccgcatgtataggtatcgtatcaggaatcgaaggctcggcagcctgctcctgttgatgcgttgcgtcgatacctccttttagcggactcaagatcgggacaaatcccttcctcttctcctcatcgtcaaagtggcgggtatgatatctgggagtgaggccgcgcttccacggcagtgcccatatctgtaagaagtggacggtatccttgttgtgctcattctgctcggaatgggcaatccctgttcctccggtggtgaactggacgtcgccgcgatgcatgcggaagaacttgtcggactgagcaccttcagcgcctttcttaagcatgctgtctctatgtgtcaactctccggagatgatgtagctgaaaatctcgaaatcactgtgaggatgcgttggaaaccctgtgtttggcgctacgcgatcctcgttgagaactctaagagaaccaaaatgcatgaatgccgggttgtaccagtcagcgaaagagaagctgtgatacgaatttagccagccgtgatcagaatgtcctcgcgtcgctgagcgatgcggcactatcttcgcgtgtgagagtgtcttcgacatggtgttcttgattgcgttcatgtgcttttcgtctgtaagaatggtggggcttatgattgaaactgcagatatagtagtattttcgtacaaaatgttttttaagaaatgtttgattgatgaattatatgcgacgatcgaaattgaggcgaccagaatggagacgacgagagtgggatgcttcatatatacctcgtcgcgcacttggagaaggcgcgagagaaagcgagaatatctacagaccttaccaagcagacaagaatgattgacaagattacgaaagtcgaggactcaaggaaatcttagtacttattgtagacgagacatcgtcctcggcttcgaaaactttgcctcgtcttgcgacgtcttaatcatcaccaagagagtggcctttgtggagaggtcttgatgaccacgcacctagcgccattaggtcattgctgaatgatgctgagtgaagggcggctagtcccagaacggtaaggacctagaagctcaagggagttggtccactacagcgggagccaattacaccctattaattacctaagcatgagcatccaccttgagtgccgcgaaaaattatctgccagccattcgaaactccaaattcttcgaagttcttcacctatctgcctcttcaagtcctcgaagaactggtgtgcatcgtctccggaccttcgataactatcgccgctgccgttgactgtatgtcttcacggcctagctcggtagtgtgatgtcagcggttggcacacgatcgaccattgaaaatatttgcattccataacaggttctgacaaaaggtcgtgatattataatggcgttgttctcttcagtatcactaagagtggtgtgagtcccgtgcatgattacataacgacgtcaagggagctttacataaacgacataaacgatacctcatgttcgctagatattctcccgattttctagaagaattgagcgactctactacaagttcaatgttcagatagagttcgctacaataactccaccatcacggttcctccgtctcttttcttcaacctccaggttagtcgtcttgagagtctggctcgccaactatctctcaggacacgtggagttcatgcaacattgtatcttttaagtgacatgaatacatgtatctaaatcctgacaaagtcgagactagcttgacgatcgtttcaagtgcgatgcctgcaatggtgacagagtctacaccgtaatattccctgttgtaatttgtattcgccggaccctagccctatccccggccgggactgtagtctcccttgcaaccacgcgttacactagcgctgacagcgatcctggtcatgcccttcacttctgaaggtccatcaacatccgagtctttcctctcgttttgatgccgcaacacagcgactttcaatatcgaatttggcgcacgaaacaaagagtataaatcaattgtattgaggatacatccactacgatgtcctggctcccacaagatgaaggctatctgcctagattcctcttactgccggcaacaatggcagcgatacacaccgtcgtctgctacgtagctccgccatcagcatcaacaaagcaattcagcggtcctgcggcgccaccaccccacgggcttttggctcggacctatggcgtgaagaacttctataccagcgctattcggttctatgctgcgtatcacattacgaaccctcaggtttatgaccttgcaactctaactttcgctggtgtgctcttcttgtacactggtgaggtcttcgtgtacaagacatcgcgcatgcgagagctgtggtcttcgttcttaatggctggtacagggtttatttggatgatatc

SEQ ID NO: 4317 - DNA, 855 bp, Muscodor strobelii
  misc_feature: SGI cDNA ID NO. 561126
  misc_feature: Reduced expression when VOC is produced
  misc_feature: Encodes the peptide sequence at SEQ ID NO 4318
atgtcgaagacactctcacacgcgaagatagtgccgcatcgctcagcgacgcgaggacattctgatcacggctggctaaattcgtatcacagcttctctttcgctgactggtacaacccggcattcatgcattttggttctcttagagttctcaacgaggatcgcgtagcgccaaacacagggtttccaacgcatcctcacagtgatttcgagattttcagctacatcatctccggagagttgacacatagagacagcatgcttaagaaaggcgctgaaggtgctcagtccgacaagttcttccgcatgcatcgcggcgacgtccagttcaccaccggaggaacagggattgcccattccgagcagaatgagcacaacaaggataccgtccacttcttacagatatgggcactgccgtggaagcgcggcctcactcccagatatcatacccgccactttgacgatgaggagaagaggaagggatttgtcccgatcttgagtccgctaaaaggaggtatcgacgcaacgcatcaacaggagcaggctgccgagccttcgattcctgatacgatacctatacatgcggacttcgtcatgggtgccggtatcattcctcctcagcagaaatttgaatggaagattggtgcgggtgcgaccgagagcacgaaaagaaaggtcttcattcatttacccatgactaagaaaggaaaggccaagattcgtatcgatggaagagaagagctgtttgcagagggcgatggcgcatttgtggatgccgtcgatgccggcgataaggtattcgttgagagcgtaggagaagcggaggcggaagttgttattttggacactgcgtaa

SEQ ID NO: 4318 - protein, 284 aa, Muscodor strobelii
  misc_feature: SGI Peptide ID NO. 561126
  misc_feature (11)..(137): Pfam Id: PF02678 Pfam Desc: Pirin
  misc_feature (1)..(284): NCBI GI: 46128421 Blast Desc: FG08588.1 [Gibberella zeae PH-1]
  misc_feature (1)..(284): NCBI GI: 256733567 Blast Desc: [Nectria haematococca mpVI 77-13-4]
  misc_feature (5)..(283): NCBI GI: 39970775 Blast Desc: MGG_02854 [Magnaporthe grisea 70-15] gi|149210269|ref|XP_001522509.1| MGCH7_ch7g612 [Magnaporthe grisea 70-15] gi|86196567|gb|EAQ71205.1| MGCH7_ch7g612 grisea
  misc_feature (1)..(282): NCBI GI: 242777801 Blast Desc: pirin domain protein, [Talaromyces stipitatus ATCC 10500] gi|218722726|gb|EED22144.1| pirin domain protein, [Talaromyces stipitatus ATCC 10500]
  misc_feature (1)..(283): NCBI GI: 212533335 Blast Desc: pirin domain protein, [Penicillium marneffei ATCC 18224] gi|210072188|gb|EEA26277.1| pirin domain protein, [Penicillium marneffei ATCC 18224]
  misc_feature (1)..(284): NCBI GI: 171684509 Blast Desc: protein product [Podospora anserina] gi|170942215|emb|CAP67867.1| protein product [Podospora anserina]
  misc_feature (1)..(283): NCBI GI: 115433560 Blast Desc: ATEG_08296 [Aspergillus terreus NIH2624] gi|114189769|gb|EAU31469.1| ATEG_08296 [Aspergillus terreus NIH2624]
  misc_feature (1)..(283): NCBI GI: 154319692 Blast Desc: BC1G_02327 [Botryotinia fuckeliana B05.10] gi|150855985|gb|EDN31177.1| BC1G_02327 [Botryotinia fuckeliana B05.10]
  misc_feature (1)..(283): NCBI GI: 145242386 Blast Desc: An09g04970 [Aspergillus niger] gi|134078358|emb|CAK40350.1| protein product [Aspergillus niger]
  misc_feature (1)..(283): NCBI GI: 121711102 Blast Desc: pirin domain protein, [Aspergillus clavatus NRRL 1] gi|119401317|gb|EAW11741.1| pirin domain protein, [Aspergillus clavatus NRRL 1]
  misc_feature: Useful for introducing or modulating the production of volatile compounds
MSKTLSHAKIVPHRSATRGHSDHGWLNSYHSFSFADWYNPAFMHFGSLRVLNEDRVAPNTGFPTHPHSDFEIFSYIISGELTHRDSMLKKGAEGAQSDKFFRMHRGDVQFTTGGTGIAHSEQNEHNKDTVHFLQIWALPWKRGLTPRYHTRHFDDEEKRKGFVPILSPLKGGIDATHQQEQAAEPSIPDTIPIHADFVMGAGIIPPQQKFEWKIGAGATESTKRKVFIHLPMTKKGKAKIRIDGREELFAEGDGAFVDAVDAGDKVFVESVGEAEAEVVILDTA

SEQ ID NO: 4319 - DNA, 5097 bp, Muscodor strobelii
  misc_feature: SGI EST ID NO. CUFF.11150.1
  misc_feature: Variant of the nucleotide sequence at SEQ ID NO 4317
attcgatattgaaagtcgctgtgttgcggcatcaaaacgagaggaaagactcggatgttgatggaccttcagaagtgaagggcatgaccaggatcgctgtcagcgctagtgtaacgcgtggttgcaagggagactacagtcccggccggggatagggctagggtccggcgaatacaaattacaacagggaatattacggtgtagactctgtcaccattgcaggcatcgcacttgaaacgatcgtcaagctagtctcgactttgtcaggatttagatacatgtattcatgtcacttaaaagatacaatgttgcatgaactccacgtgtcctgagagatagttggcgagccagactctcaagacgactaacctggaggttgaagaaaagagacggaggaaccgtgatggtggagttattgtagcgaactctatctgaacattgaacttgtagtagagtcgctcaattcttctagaaaatcgggagaatatctagcgaacatgaggtatcgtttatgtcgtttatgtaaagctcccttgacgtcgttatgtaatcatgcacgggactcacaccactcttagtgatactgaagagaacaacgccattctgaagacatgtattagtcgatatgccccaataaacaatgagacatgaatgtggtgtgataattgtgtcagagtatatttatcctcattaatgatcagaagtcgaacatttgataaataataaaaactcatcatccgagaagcgtggattgcaaaggttatgaagcaacagctaattgcgtctgggcacgaacggacgttgaggagacttacataatatcacgaccttttgtcagaacctgttatggaatgcaaatattttcaatggtcgatcgtgtgccaaccgctgacatcacactaccgagctaggccgtgaagacatacagtcaacggcagcggcgatagttatcgaaggtccggagacgatgcacaccagttcttcgaggacttgaagaggcagataggtgaagaacttcgaagaatttggagtttcgaatggctggcagataatttttcgcggcactcaaggtggatgctcatgcttaggtaattaatagggtgtaattggctcccgctgtagtggaccaactcccttgagcttctaggtccttaccgttctgggactagccgcccttcactcagcatcattcagcaatgacctaatggcgctaggtgcgtggtcatcaagacctctccacaaaggccactctcttggtgatgattaagacgtcgcaagacgaggcaaagttttcgaagccgaggacgatgtctcgtctacaataagtactaagatttccttgagtcctcgactttcgtaatcttgtcaatcattcttgtctgcttggtaaggtctgtagatattctcgctttctctcgcgccttctccaagtgcgcgacgaggtatatatgaagcatcccactctcgtcgtctccattctggtcgcctcaatttcgatcgtcgcatataattcatcaatcaaacatttcttaaaaaacattttgtacgaaaatactactatatctgcagtttcaatcataagccccaccattcttacagacgaaaagcacatgaacgcaatcaagaacaccatgtcgaagacactctcacacgcgaagatagtgccgcatcgctcagcgacgcgaggacattctgatcacggctggctaaattcgtatcacagcttctctttcgctgactggtacaacccggcattcatgcattttggttctcttagagttctcaacgaggatcgcgtagcgccaaacacagggtttccaacgcatcctcacagtgatttcgagattttcagctacatcatctccggagagttgacacatagagacagcatgcttaagaaaggcgctgaaggtgctcagtccgacaagttcttccgcatgcatcgcggcgacgtccagttcaccaccggaggaacagggattgcccattccgagcagaatgagcacaacaaggataccgtccacttcttacagatatgggcactgccgtggaagcgcggcctcactcccagatatcatacccgccactttgacgatgaggagaagaggaagggatttgtcccgatcttgagtccgctaaaaggaggtatcgacgcaacgcatcaacaggagcaggctgccgagccttcgattcctgatacgatacctatacatgcggacttcgtcatgggtgccggtatcattcctcctcagcagaaatttgaatggaagattggtgcgggtgcgaccgagagcacgaaaagaaaggtcttcattcatttacccatgactaagaaaggaaaggccaagattcgtatcgatggaagagaagagctgtttgcagagggcgatggcgcatttgtggatgccgtcgatgccggcgataaggtattcgttgagagcgtaggagaagcggaggcggaagttgttattttggacactgcgtaatttagacagcgaattggaaaccggccctttctttgcgaaatgtattgtgttgcgcatagccaaaaattgaatcattacgtttattctcattccgtcactttaattatgtcgttgaaggttcaatagccaacgagaatagagttgaaattctgaccacttgcccacaatccttcacgtataacccattcctttggtgtctaagcctcgtccaaatctctcacatctaaatggagggtgtgccgctccgttccttcctctttctactgtttgaaacactctcgatacaaccgccgtgcttgtattacaattgaggttgagtttaactatcaaggcgcggtacattctttccactgaggcggctagctcttcaggcccacttttggcttccctgtgatgccactcacactcttcttgacacactctgcagcttgcgcgattgatatgcgaaagagacagtatcctatccacggtgtcgtcgaggctgtgtcgatgcatcatgttgtcgatatattcgaaaacagggtagcatacctagattacgttacatcttcgccggccaccgtactggctaggggcgaccttgacctgcaggatttcagtaaccccatgtcagcaacctctcaataacgaaatcccatcacgtcagcgatgacctatgccttcactacattggctctgcccacggcgatggagcgattaccatgaggctcataaatactcacacattacggcttcacgagtttgtagggaaagcgccgccaccgtatgcaatattgtcacatacatggggtaccaaggaaatcacaatagccgatttgcgaacgccaaaaccccgtcgccagaagaggagccccgcattcgacaaagttaaagcgacatgcaaattggccagagagcatggcttagaatatgcctgggttgatacgtgctgcattaacaaattcagcagctcggaattgggggaagcgatcaattctatgtttaaatggtaccagcgatcagctatttgctatgcctttcttgaggattttgtgccgggtcaacctaaaaccctggcttggaaagggactcaagttggcatgggtcattgccggtggttcacccgaggctggactctacaggaactcttagccccaaagaccgtccatttttttgatcaaacctggcgaaaagtcgcagagaaggccacccatgcagaacaactacaggcgataacaggcatcgacaaatttgtccttgagggcggcccccttcatgaagtgagtgtcgggcggcgcatgagctgggccgctggtcgacgtacaactcgcaaagaagacatggcatacagtctacttggaatctttgacgtgaacatgccgctcgtctacggcgagggttccaaggcattcattcgcttgcaagaacaaattcttaagcggtccgatgaccacactttgtttgcatggcgaacggaaccgtcttcgaggagggcgaagagtgtcaccggtctgctagcttcctctccgaatgacttccgaaattttgctcacaatcgtggtcactacagcacaactgacaatctgatacgggttcggggttctcgaacgcctaatgacccaatcactattaataacaagggtattcagatcacagctccggttgaatatttgccagctccatgggcccctgagaacctcttggtcctcgccttgaactgtgctttcagcggtgacactgcacagactgcgggtatatatcttcagcgcttggcggaagataaatacgcacgagtacgacccgacgaacttgcaaatatacagttccatcgtcagaggctagttactcgtatgctgcacggactaccttcattaacagattccaatccgctccagcatgatgagccttggattacttctgggcagattcaaaaatcggcaatgcagaatctaagctcgcacgagccccttgaaataccagaagagtctgttccagtatcagagttgccatatgcacatgcactctatttggcaccgcaatctctacgtagtgcgacgctttatggcgcctgcacagtgcatggcatgttgacgaccaagagcgggacaactgcgaagtcattccgtgtccatgcctttgacacgcccgatatggtcatacatactggtctcgggttcaatggcgccatcatgatgaattgtaacaattcaacgcaactgatactaatacttttaaaatgcatgcctgctcatttgcaaacgaggcatttccatgattgttgctcatttgacgttgtacatttgacacaagagcaaatcaaagagtcgccgggaattcttctaaagctgatacaaaacaataacgaaaatggttggttaggtatcaaaaagaccgcgaagatctctgatctaggactcagggttgaagtctggttggaggaaacgattgtagagggattgccgatgacagctgtgcgagtcaagggccccaggccgatatccttcgggaatttcaagatcctccagaacttagagtttattgtatttgccagctggatattaaatggcctgctgcttgtggcagcactaccgggatttgtaatagaattgattatgcgcctatgaataatgac

SEQ ID NO: 4320 - DNA, 1446 bp, Muscodor strobelii
  misc_feature: SGI cDNA ID NO. 561127
  misc_feature: Encodes the peptide sequence at SEQ ID NO 4321
atgtttaaatggtaccagcgatcagctatttgctatgcctttcttgaggattttgtgccgggtcaacctaaaaccctggcttggaaagggactcaagttggcatgggtcattgccggtggttcacccgaggctggactctacaggaactcttagccccaaagaccgtccatttttttgatcaaacctggcgaaaagtcgcagagaaggccacccatgcagaacaactacaggcgataacaggcatcgacaaatttgtccttgagggcggcccccttcatgaagtgagtgtcgggcggcgcatgagctgggccgctggtcgacgtacaactcgcaaagaagacatggcatacagtctacttggaatctttgacgtgaacatgccgctcgtctacggcgagggttccaaggcattcattcgcttgcaagaacaaattcttaagcggtccgatgaccacactttgtttgcatggcgaacggaaccgtcttcgaggagggcgaagagtgtcaccggtctgctagcttcctctccgaatgacttccgaaattttgctcacaatcgtggtcactacagcacaactgacaatctgatacgggttcggggttctcgaacgcctaatgacccaatcactattaataacaagggtattcagatcacagctccggttgaatatttgccagctccatgggcccctgagaacctcttggtcctcgccttgaactgtgctttcagcggtgacactgcacagactgcgggtatatatcttcagcgcttggcggaagataaatacgcacgagtacgacccgacgaacttgcaaatatacagttccatcgtcagaggctagttactcgtatgctgcacggactaccttcattaacagattccaatccgctccagcatgatgagccttggattacttctgggcagattcaaaaatcggcaatgcagaatctaagctcgcacgagccccttgaaataccagaagagtctgttccagtatcagagttgccatatgcacatgcactctatttggcaccgcaatctctacgtagtgcgacgctttatggcgcctgcacagtgcatggcatgttgacgaccaagagcgggacaactgcgaagtcattccgtgtccatgcctttgacacgcccgatatggtcatacatactggtctcgggttcaatggcgccatcatgatgaattgtatcaaaaagaccgcgaagatctctgatctaggactcagggttgaagtctggttggaggaaacgattgtagagggattgccgatgacagctgtgcgagtcaagggccccaggccgatatccttcgggaatttcaagatcctccagaacttagagtttattgtatttgccagctggatattaaatggcctgctgcttgtggcagcactaccgggatttgtaatagaattgattatgcgcctatga

SEQ ID NO: 4321 - protein, 481 aa, Muscodor strobelii
  misc_feature: SGI Peptide ID NO. 561127
  misc_feature (38)..(49): Pfam Id: PF06985 Pfam Desc: Heterokaryon incompatibility protein (HET)
  misc_feature (1)..(266): NCBI GI: 256720502 Blast Desc: NECHADRAFT_55867 [Nectria haematococca mpVI 77-13-4]
  misc_feature (1)..(275): NCBI GI: 256720984 Blast Desc: NECHADRAFT_82249 [Nectria haematococca mpVI 77-13-4]
  misc_feature (1)..(271): NCBI GI: 46126619 Blast Desc: FG07687.1 [Gibberella zeae PH-1]
  misc_feature (1)..(219): NCBI GI: 116182922 Blast Desc: CHGG_02089 [Chaetomium globosum CBS 148.51] gi|88186386|gb|EAQ93854.1| CHGG_02089 [Chaetomium globosum CBS 148.51]
  misc_feature (1)..(265): NCBI GI: 238493477 Blast Desc: conserved [Aspergillus flavus NRRL3357] gi|220696469|gb|EED52811.1| conserved [Aspergillus flavus NRRL3357]
  misc_feature (1)..(266): NCBI GI: 119481395 Blast Desc: HET domain protein [Neosartorya fischeri NRRL 181] gi|119408880|gb|EAW18829.1| HET domain protein [Neosartorya fischeri NRRL 181]
  misc_feature (1)..(276): NCBI GI: 115397489 Blast Desc: conserved [Aspergillus terreus NIH2624] gi|114192527|gb|EAU34227.1| conserved [Aspergillus terreus NIH2624]
  misc_feature (1)..(266): NCBI GI: 238841528 Blast Desc: HET domain-containing protein [Microsporum canis CBS 113480]
  misc_feature (1)..(241): NCBI GI: 164425178 Blast Desc: NCU06304 [Neurospora crassa OR74A] gi|157070820|gb|EAA33330.2| conserved [Neurospora crassa OR74A]
  misc_feature (1)..(284): NCBI GI: 256728051 Blast Desc: NECHADRAFT_83471 [Nectria haematococca mpVI 77-13-4]
MFKWYQRSAICYAFLEDFVPGQPKTLAWKGTQVGMGHCRWFTRGWTLQELLAPKTVHFFDQTWRKVAEKATHAEQLQAITGIDKFVLEGGPLHEVSVGRRMSWAAGRRTTRKEDMAYSLLGIFDVNMPLVYGEGSKAFIRLQEQILKRSDDHTLFAWRTEPSSRRAKSVTGLLASSPNDFRNFAHNRGHYSTTDNLIRVRGSRTPNDPITINNKGIQITAPVEYLPAPWAPENLLVLALNCAFSGDTAQTAGIYLQRLAEDKYARVRPDELANIQFHRQRLVTRMLHGLPSLTDSNPLQHDEPWITSGQIQKSAMQNLSSHEPLEIPEESVPVSELPYAHALYLAPQSLRSATLYGACTVHGMLTTKSGTTAKSFRVHAFDTPDMVIHTGLGFNGAIMMNCIKKTAKISDLGLRVEVWLEETIVEGLPMTAVRVKGPRPISFGNFKILQNLEFIVFASWILNGLLLVAALPGFVIELIMRL

SEQ ID NO: 4322 - DNA, 5097 bp, Muscodor strobelii; identical to SEQ ID NO: 4319
  misc_feature: SGI EST ID NO. CUFF.11150.1
  misc_feature: Variant of the nucleotide sequence at SEQ ID NO 4320

SEQ ID NO: 4323 - DNA, 2334 bp, Muscodor strobelii
  misc_feature: SGI cDNA ID NO. 561128
  misc_feature: Encodes the peptide sequence at SEQ ID NO 4324
atgtctctgtcaccacatcgtggagttcacgatttcatcgtaatcccccacgatgacgatatcagaagtagcgaggctcctcaaattgagcaggagctaaacaagttgcgtcaaatttcacagactggtaactacgcccacctgtcgaatttgatcgatctcacgctcgacagcgagcgagggagcgaagcaacacattatgtccagatactagaggacgaaatcgaccaagagttgctcatttccgatgtgcgacctgtgcctgcccgcaacccggacgtgccacaacgatacaagggcaccctgatcaaaccaggcacggtcgttgaagtggaggaaagaccgtcgagcgaatactcttggcagtttctccgagttgagatgatatatatcgatggaagtggcacgacgatgctaagaggaattcggctcacaagacaaggatttttaaagggcatgctctcggaccttcgaaacgaagtttgcgctcttttggatgtcgatgaggaagacagtcgacctcaccaccttcaagctgcatgtgagcttccgctcacagatgtcatccgcactcgtatattgcacacaacaaacacaaaattccccaagcaccgatttggcccataccgttttagtacaggggccgagactgagaacgaagctctcgttcaacgatggaagtttgtcaggtactgggcatccctaagcaaattacgatcgggcaaatcttattcgggcgcatttatccgtcttcgctcgaccgatgtgtcagatgacgatctcaggatatccgacaatgaactcagaaatgagtttcgtgggggtatagttcgcggagggtcttggaagggtggcaagctcgcgatcccagaaatcagcctcgattggaaggacgccaatatccctgacacaattgcgagagaaaagaggtgtgggcagaaatataccgtagatgatatgttctgcggtgctggtggtgcttctcgtggcataaaacaagccgatttcaaactgcgacttgcgtgcgacctcgaccccgtcgcttgcgattcctatgaagcaaataagtttgacgcggatttgaaaagagaggacatatttgatctagtgaaatccttgcgtcaagagaaatgcgtcgaccatgcagatatactgcacatttctcctccttgtcaatttttctcgccggcacacacgtctcctggccgtaatgacatggcaaatgtggcagctctcttggcttgtgcccaaatactcgaacgaaggagaccaaggattagcaccggtgaacagacttttggtttactgcatgctaagcatgaagagtatttcttttcgctgattcgtcaatacaccgaccttgggtactcatttcgatggaaacttatgcattttaaggactatggtattgcgtcgacccggaagcggctggtttggatcgctgcctgccctggcgaggctcttcctgattttcctgcggcaacgcacagtgacactaatcagaatctgccgcctttcgtgacattaagccaggttctgaacaccataaagcccggccagtcgttacataacgtacaagaaatgctcgatttggctaagcaaagcttgaaattccccaagccatcttacaacgctaatatactggttgatactatcacgactggtggctctctgaagtactatccttctggcactcgaagctttacgattcgcgaacaagctgcactgcagagtttcccggcctatcacaagttcattggctatcgctctcatatcattaagcaaatcggaaacgcctttcctccgcttgttgtgaaagttctatacactcacctacgaaaatggctgttgcaacaagaccgagtgaaagaggtcagcctgaacgccgatgtcatagatctggacgaagctcctactaaacgcaaccccatattcattgaagactcttttaacgagctcgagctcgatcctattgtcattgacgatgacgtggacaactcgaatcacaatcttcctgttgttcttgatagtatcgaagaggacaacgaagactacccgatgcttagtatcgacagcaacgggtacaacgacggcattgatagagcctcccgcgaaagctctacaactcttgttggaagcgatgacgacgtcatgataatcgaccagtatgatacgggctacagcaacgcctcacgagacaggtctgctacattaggcgaagagaatgatgtgatgattgttgatgatgccgatgatttcaagatggtcaaaacgactcgcgacatcttgaaaaaacgacctgccgcgcttgggaaccgacctcgaccgacgtaa

SEQ ID NO: 4324 - protein, 777 aa, Muscodor strobelii
  misc_feature: SGI Peptide ID NO. 561128
  misc_feature (315)..(614): Pfam Id: PF00145 Pfam Desc: C-5 cytosine-specific DNA methylase
  misc_feature (562)..(614): Pfam Id: PF00145 Pfam Desc: C-5 cytosine-specific DNA methylase
  misc_feature (315)..(395): Pfam Id: PF00145 Pfam Desc: C-5 cytosine-specific DNA methylase
  misc_feature (100)..(622): NCBI GI: 145610006 Blast Desc: MGG_02795 [Magnaporthe grisea 70-15] gi|145017391|gb|EDK01754.1| MGG_02795 [Magnaporthe grisea 70-15]
  misc_feature (100)..(622): NCBI GI: 149210133 Blast Desc: MGCH7_ch7g548 [Magnaporthe grisea 70-15] gi|86196503|gb|EAQ71141.1| MGCH7_ch7g548 [Magnaporthe grisea 70-15]
  misc_feature (100)..(691): NCBI GI: 116193601 Blast Desc: CHGG_06518 [Chaetomium globosum CBS 148.51] gi|88182431|gb|EAQ89899.1| CHGG_06518 [Chaetomium globosum CBS 148.51]
  misc_feature (46)..(620): NCBI GI: 261353229 Blast Desc: RIP defective [Verticillium albo-atrum VaMs.102]
  misc_feature (97)..(620): NCBI GI: 256733644 Blast Desc: NECHADRAFT_35564 [Nectria haematococca mpVI 77-13-4]
  misc_feature (68)..(622): NCBI GI: 16945407 Blast Desc: related to cytosine C5-DNA methyltransferase [Neurospora crassa]
  misc_feature (68)..(622): NCBI GI: 20531189 Blast Desc: AF500227_1 RIP defective [Neurospora crassa]
  misc_feature (32)..(627): NCBI GI: 171684935 Blast Desc: protein product [Podospora anserina] gi|170942428|emb|CAP68080.1| protein product [Podospora anserina]
  misc_feature (92)..(622): NCBI GI: 20531193 Blast Desc: AF500229_1 RIP defective [Neurospora tetrasperma]
  misc_feature (68)..(622): NCBI GI: 20531191 Blast Desc: AF500228_1 RIP defective [Neurospora intermedia]
MSLSPHRGVHDFIVIPHDDDIRSSEAPQIEQELNKLRQISQTGNYAHLSNLIDLTLDSERGSEATHYVQILEDEIDQELLISDVRPVPARNPDVPQRYKGTLIKPGTVVEVEERPSSEYSWQFLRVEMIYIDGSGTTMLRGIRLTRQGFLKGMLSDLRNEVCALLDVDEEDSRPHHLQAACELPLTDVIRTRILHTTNTKFPKHRFGPYRFSTGAETENEALVQRWKFVRYWASLSKLRSGKSYSGAFIRLRSTDVSDDDLRISDNELRNEFRGGIVRGGSWKGGKLAIPEISLDWKDANIPDTIAREKRCGQKYTVDDMFCGAGGASRGIKQADFKLRLACDLDPVACDSYEANKFDADLKREDIFDLVKSLRQEKCVDHADILHISPPCQFFSPAHTSPGRNDMANVAALLACAQILERRRPRISTGEQTFGLLHAKHEEYFFSLIRQYTDLGYSFRWKLMHFKDYGIASTRKRLVWIAACPGEALPDFPAATHSDTNQNLPPFVTLSQVLNTIKPGQSLHNVQEMLDLAKQSLKFPKPSYNANILVDTITTGGSLKYYPSGTRSFTIREQAALQSFPAYHKFIGYRSHIIKQIGNAFPPLVVKVLYTHLRKWLLQQDRVKEVSLNADVIDLDEAPTKRNPIFIEDSFNELELDPIVIDDDVDNSNHNLPVVLDSIEEDNEDYPMLSIDSNGYNDGIDRASRESSTTLVGSDDDVMIIDQYDTGYSNASRDRSATLGEENDVMIVDDADDFKMVKTTRDILKKRPAALGNRPRPT

SEQ ID NO: 4325 - DNA, 2475 bp, Muscodor strobelii
  misc_feature: SGI EST ID NO. CUFF.10957.0
  misc_feature: Variant of the nucleotide sequence at SEQ ID NO 4323
gttgaagtggaggaaagaccgtcgagcgaatactcttggcagtttctccgagttgagatgatatatatcgatggaagtggcacgacgatgctaagaggaattcggctcacaagacaaggatttttaaagggcatgctctcggaccttcgaaacgaagtttgcgctcttttggatgtcgatgaggaagacagtcgacctcaccaccttcaagctgcatgtgagcttccgctcacagatgtcatccgcactcgtatattgcacacaacaaacacaaaattccccaagcaccgatttggcccataccgttttagtacaggggccgagactgagaacgaagctctcgttcaacgatggaagtttgtcaggtactgggcatccctaagcaaattacgatcgggcaaatcttattcgggcgcatttatccgtcttcgctcgaccgatgtgtcagatgacgatctcaggatatccgacaatgaactcagaaatgagtttcgtgggggtatagttcgcggagggtcttggaagggtggcaagctcgcgatcccagaaatcagcctcgattggaaggacgccaatatccctgacacaattgcgagagaaaagaggtgtgggcagaaatataccgtagatgatatgttctgcggtgctggtggtgcttctcgtggcataaaacaagccgatttcaaactgcgacttgcgtgcgacctcgaccccgtcgcttgcgattcctatgaagcaaataagtttgacgcggatttgaaaagagaggacatatttgatctagtgaaatccttgcgtcaagagaaatgcgtcgaccatgcagatatactgcacatttctcctccttgtcaatttttctcgccggcacacacgtctcctggccgtaatgacatggcaaatgtggcagctctcttggcttgtgcccaaatactcgaacgaaggagaccaaggattagcaccggtgaacagacttttggtttactgcatgctaagcatgaagagtatttcttttcgctgattcgtcaatacaccgaccttgggtactcatttcgatggaaacttatgcattttaaggactatggtattgcgtcgacccggaagcggctggtttggatcgctgcctgccctggcgaggctcttcctgattttcctgcggcaacgcacagtgacactaatcagaatctgccgcctttcgtgacattaagccaggttctgaacaccataaagcccggccagtcgttacataacgtacaagaaatgctcgatttggctaagcaaagcttgaaattccccaagccatcttacaacgctaatatactggttgatactatcacgactggtggctctctgaagtactatccttctggcactcgaagctttacgattcgcgaacaagctgcactgcagagtttcccggcctatcacaagttcattggctatcgctctcatatcattaagcaaatcggaaacgcctttcctccgcttgttgtgaaagttctatacactcacctacgaaaatggctgttgcaacaagaccgagtgaaagaggtcagcctgaacgccgatgtcatagatctggacgaagctcctactaaacgcaaccccatattcattgaagactcttttaacgagctcgagctcgatcctattgtcattgacgatgacgtggacaactcgaatcacaatcttcctgttgttcttgatagtatcgaagaggacaacgaagactacccgatgcttagtatcgacagcaacgggtacaacgacggcattgatagagcctcccgcgaaagctctacaactcttgttggaagcgatgacgacgtcatgataatcgaccagtatgatacgggctacagcaacgcctcacgagacaggtctgctacattaggcgaagagaatgatgtgatgattgttgatgatgccgatgatttcaagatggtcaaaacgactcgcgacatcttgaaaaaacgacctgccgcgcttgggaaccgacctcgaccgacgtaattgttgcgagatgagatttgtcagatgcacaacttttgtctgttgtataacgacgtgtgtatacgatgcttgatacacgcccttctagacgaagccggagttcctatggaggactattgccttgctggtggtgcaaagaaagatatccattggttgatttgatggacgattgttggttttggtgaacgacgattgcagttgtactggcaattggagaagcatctatatttggctctgatgtggctgtacagtattgagcataccagacgcctctagtacgcaagccgtaacctagacccagctatcctaaaggcaatcatgcatgaggagctttggagctattgcatatggatccttctagccaaagcagaactgattattgttgattagattacaccagcatcttcgcattcgtaaatcgcgtctgcttgtttaaacatcagacaccctgaatttaaatgttct

SEQ ID NO: 4326 - DNA, 441 bp, Muscodor strobelii
  misc_feature: SGI cDNA ID NO. 561129
  misc_feature: Elevated expression when VOC is produced
  misc_feature: Encodes the peptide sequence at SEQ ID NO 4327
atgcagttcactactctcgccctttccattctcgccgctgcgaacgctgtgtcggctgcctgcatcaaatgcgaaactaccggctccatcgactcgccctacttcgtcatgagcaagaatgccgagaccgactatgatcttgccgctactctgaagtggactggcgtcgagtccactggcacctgctctctggttgccaaaatcgaggccaatcaccctaggcttattaccgatggtcctgtcactgttgaggcttgggagggtaagacgaagattggctctttcgactacaccaagggcaaggctaccaacaccgtcatcggcaaattcccttgcaagtccgactttaccttcacattcacacctcccgcttccgtcagcgacgccaacctggctttcaccgagctcaccaactccggtatcttcttgaaggcttgctag

SEQ ID NO: 4327 - protein, 146 aa, Muscodor strobelii
  misc_feature: SGI Peptide ID NO. 561129
  misc_feature: Useful for introducing or modulating the production of volatile compounds
MQFTTLALSILAAANAVSAACIKCETTGSIDSPYFVMSKNAETDYDLAATLKWTGVESTGTCSLVAKIEANHPRLITDGPVTVEAWEGKTKIGSFDYTKGKATNTVIGKFPCKSDFTFTFTPPASVSDANLAFTELTNSGIFLKAC

SEQ ID NO: 4328 - DNA, 1075 bp, Muscodor strobelii
  misc_feature: SGI EST ID NO. CUFF.10971.0
  misc_feature: Variant of the nucleotide sequence at SEQ ID NO 4326
gctcaatcagtcaacaccatcgcatacggacgtacccagtatcgcgagctaccaggatcctacggaatgtttttcctttggtaattatgtagctaggctatgacatgtaacatgggttagtgcccgtaacggtgctcctcttggcaggctgtgcatgatatataacaacaccatgatcatcgctcgtgtaagtccacctctttgctgggcattcgcttcttcattgctatcagttcaagtcatacttgatagtgtataattccattcgttcttttgaccgttacttcaagatacccaaagaaagctgaatcactttctcttaatacgccctttcacaaccgcaaacatgcagttcactactctcgccctttccattctcgccgctgcgaacgctgtgtcggctgcctgcatcaaatgcgaaactaccggctccatcgactcgccctacttcgtcatgagcaagaatgccgagaccgactatgatcttgccgctactctgaagtggactggcgtcgagtccactggcacctgctctctggttgccaaaatcgaggccaatcaccctaggcttattaccgatggtcctgtcactgttgaggcttgggagggtaagacgaagattggctctttcgactacaccaagggcaaggctaccaacaccgtcatcggcaaattcccttgcaagtccgactttaccttcacattcacacctcccgcttccgtcagcgacgccaacctggctttcaccgagctcaccaactccggtatcttcttgaaggcttgctagacagttcaatgggccgcatcgtattggtttcagtgggtagtcagtgggagttggaacatagggtctttagcagcatttggtagcattgggtggcgttcatcggtataccaaccgacaatttgcttttattatacttctctacgttccttcgaccatattgcccgtgttccagaccattgaaaccaatacacttatgatgctctctatctcaacaataccctctcatcccggtctccatgttttcctcttttgcacatagacttgatatccagcaatgatgaaatttca

SEQ ID NO: 4329 - DNA, 1299 bp, Muscodor strobelii
  misc_feature: SGI cDNA ID NO. 561130
  misc_feature: Encodes the peptide sequence at SEQ ID NO 4330
atgctcgtgagatctgtagcggccagcgcggctttgcttgtaacagtttcagggaaggctgtcatttcacgaccgaacgttcagccatttccttataataccggccgatcaagaccggtgtcgcaatctcgagcaaaagagtgttccgtagcagcattaggcggaggtgcagatgactctgatgcgattctcgaggcattcaatagctgcaacaatgggggcaccgtcattcttgacggcgattacacaatcggcacggcattggacttgacattcctggagagcgttgatatcgcattgacgggatcaatcaatttttctgacgatatcgaatactggacagccaactcattcaagtatgcctttcagaactcaacagcttattggaagattggcggtaaggacgtcaacttctacggaggaggtgttggtatcatcaacggtaatgggcagatctggtgggacgcgtttgccgccaactcatcgcttttacggccaattacgctggtgattgatagcctggatgggggctcagtgactgggattcacatgaacaatccgcctaactggttcaattttattacgacaagctcagatatcctaattagtgatatggtcctcactgtcaaagtcactggcgcgaacccatcccacaacactgacggctgggatacgtatcgctccgatcatgtcgtgatacaaaactcgcaagttgacaatacggatgactgcgtttcattcaagccaaacagcacgaatatcgtagtgcaagggttgagctgcaacggatctcacggaatatctgtcggttcccttggtcaatatctaggcgagttcgacattgttgagaacgtatatgtctacaacaacacaatgtcgaatgcgagcgatgcagcacgtatcaaggtctggccaggtattaactctattttccagccgactttgtccggaggcggtggcagcgggtacgtaaagaatattacgtatgagaattatcacagtatcaacaacgattgggcgatcgaagtcaaccaatgctatgggcaatcgaataagacgctttgcgaattatatccctccaacatgacaatctccgacatatggttcatcaacatgtatgggacgacatcgaagaaatacgatccagatgtcggtacgctcgtgtgctcttctccggagcaatgctacgactttcacgctcgagatattgatattaaatcacccactggaaaatcagaatggatatgctctaacttcgacacatctgatttggagggatttgactgtgcttcggaatga

SEQ ID NO: 4330 - protein, 432 aa, Muscodor strobelii
  misc_feature: SGI Peptide ID NO. 561130
  misc_feature (70)..(431): Pfam Id: PF00295 Pfam Desc: Glycosyl hydrolases family 28
  misc_feature (142)..(431): Pfam Id: PF00295 Pfam Desc: Glycosyl hydrolases family 28
  misc_feature (3)..(425): NCBI GI: 109945464 Blast Desc: exopolygalacturonase [Fusarium oxysporum f. sp. melonis] gi|109945494|dbj|BAE97184.1| exopolygalacturonase [Fusarium oxysporum f. sp. tulipae] gi|109945496|dbj|BAE97185.1|
  misc_feature (3)..(425): NCBI GI: 109945416 Blast Desc: exopolygalacturonase [Fusarium oxysporum f. sp. cucumerinum] gi|109945418|dbj|BAE97146.1| exopolygalacturonase [Fusarium oxysporum f. sp. cucumerinum] exopolygalacturonase f.
  misc_feature (3)..(425): NCBI GI: 109945486 Blast Desc: exopolygalacturonase [Fusarium oxysporum f. sp. spinaciae] gi|109945488|dbj|BAE97181.1| exopolygalacturonase [Fusarium oxysporum f. sp. spinaciae]
  misc_feature (3)..(425): NCBI GI: 109945444 Blast Desc: exopolygalacturonase [Fusarium oxysporum f. sp. lycopersici] gi|109945446|dbj|BAE97160.1| exopolygalacturonase [Fusarium oxysporum f. sp. lycopersici] exopolygalacturonase f.
  misc_feature (3)..(425): NCBI GI: 109945408 Blast Desc: exopolygalacturonase [Fusarium oxysporum f. sp. colocasiae] gi|109945410|dbj|BAE97142.1| exopolygalacturonase [Fusarium oxysporum f. sp. colocasiae] exopolygalacturonase f. f.
  misc_feature (3)..(425): NCBI GI: 109945414 Blast Desc: exopolygalacturonase [Fusarium oxysporum f. sp. conglutinans] gi|109945472|dbj|BAE97173.1| exopolygalacturonase [Fusarium oxysporum f. sp. phaseoli]
  misc_feature (3)..(425): NCBI GI: 62898622 Blast Desc: exo-polygalacturonase [Fusarium oxysporum f. sp. radicis-lycopersici]
  misc_feature (3)..(425): NCBI GI: 109945424 Blast Desc: exopolygalacturonase [Fusarium oxysporum f. sp. fragariae]
  misc_feature (3)..(425): NCBI GI: 109945412 Blast Desc: exopolygalacturonase [Fusarium oxysporum f. sp. conglutinans] gi|109945452|dbj|BAE97163.1| exopolygalacturonase [Fusarium oxysporum f. sp. lycopersici] exopolygalacturonase f.
  misc_feature (20)..(425): NCBI GI: 15029348 Blast Desc: AF395107_1 exopolygalacturonase PGX1 [Fusarium oxysporum f. sp. radicis-lycopersici] gi|62898626|dbj|BAD97414.1| exo-polygalacturonase [Fusarium oxysporum f. sp. [Fusarium f. sp.
  misc_feature (31)..(424): SWISSPROT Homolog: EC 3.2.1.67 Galacturan 1,4-alpha-galacturonidase
MLVRSVAASAALLVTVSGKAVISRPNVQPFPYNTGRSRPVSQSRAKECSVAALGGGADDSDAILEAFNSCNNGGTVILDGDYTIGTALDLTFLESVDIALTGSINFSDDIEYWTANSFKYAFQNSTAYWKIGGKDVNFYGGGVGIINGNGQIWWDAFAANSSLLRPITLVIDSLDGGSVTGIHMNNPPNWFNFITTSSDILISDMVLTVKVTGANPSHNTDGWDTYRSDHVVIQNSQVDNTDDCVSFKPNSTNIVVQGLSCNGSHGISVGSLGQYLGEFDIVENVYVYNNTMSNASDAARIKVWPGINSIFQPTLSGGGGSGYVKNITYENYHSINNDWAIEVNQCYGQSNKTLCELYPSNMTISDIWFINMYGTTSKKYDPDVGTLVCSSPEQCYDFHARDIDIKSPTGKSEWICSNFDTSDLEGFDCASE

SEQ ID NO: 4331 - DNA, 522 bp, Muscodor strobelii
  misc_feature: SGI cDNA ID NO. 561131
  misc_feature: Elevated expression when VOC is produced
  misc_feature: Encodes the peptide sequence at SEQ ID NO 4332
atgtctcaagcttctgtccacgattttccaaagccaacattcgtcactggcggttgtttgtgcggatcgattcggtatcgagttgactttcccgaagatcatgatttcctgcaggcgagtgggagttgtcaatgcacacaatgtcgtcgcaacactggctcgcttttctacgtgtcgcactcaatcaggcaagacagcataagctacaccacatctctagagaccctcaagaacttcagcgtaacgccaggaatcaatcgcggcatttgcacaaactgtggtagctttatttactggcaggacacatcgactgataatattgagttggcaatcgggtgcatagatcctgagttcctgttcgaggaagaaggcaagggtgaggcttttggttttgcgcttgcaaacatggccgggggaaatgtctggtgtcgcaatcagatccaaggcgtcacagataagatgattggaatcaatgatggcgtcaaatgggcgaaaagtggcgacgaaggcatcaaaatatag

SEQ ID NO: 4332 - protein, 173 aa, Muscodor strobelii
  misc_feature: SGI Peptide ID NO. 561131
  misc_feature (41)..(130): Pfam Id: PF04828 Pfam Desc: Glutathione-dependent formaldehyde-activating enzyme
  misc_feature (41)..(116): Pfam Id: PF04828 Pfam Desc: Glutathione-dependent formaldehyde-activating enzyme
  misc_feature (2)..(168): NCBI GI: 170940145 Blast Desc: protein product [Podospora anserina]
  misc_feature (10)..(114): NCBI GI: 261357821 Blast Desc: conserved [Verticillium albo-atrum VaMs.102]
  misc_feature (14)..(163): NCBI GI: 46115028 Blast Desc: FG03356.1 [Gibberella zeae PH-1]
  misc_feature (42)..(170): NCBI GI: 256733649 Blast Desc: NECHADRAFT_35952 [Nectria haematococca mpVI 77-13-4]
  misc_feature (10)..(170): NCBI GI: 258572758 Blast Desc: [Uncinocarpus reesii 1704] gi|237905411|gb|EEP79812.1| [Uncinocarpus reesii 1704]
  misc_feature (15)..(156): NCBI GI: 212538533 Blast Desc: DUF636 domain protein [Penicillium marneffei ATCC 18224] gi|210069164|gb|EEA23255.1| DUF636 domain protein [Penicillium marneffei ATCC 18224]
  misc_feature (42)..(170): NCBI GI: 46128527 Blast Desc: FG08641.1 [Gibberella zeae PH-1]
  misc_feature (12)..(163): NCBI GI: 238845516 Blast Desc: [Microsporum canis CBS 113480]
  misc_feature (14)..(115): NCBI GI: 152987373 Blast Desc: PSPA7_3983 [Pseudomonas aeruginosa PA7] gi|150962531|gb|ABR84556.1| PSPA7_3983 [Pseudomonas aeruginosa PA7]
  misc_feature (14)..(115): NCBI GI: 116050691 Blast Desc: PA14_29150 [Pseudomonas aeruginosa UCBPP-PA14] gi|115585912|gb|ABJ11927.1| conserved [Pseudomonas aeruginosa UCBPP-PA14]
  misc_feature: Useful for introducing or modulating the production of volatile compounds
MSQASVHDFPKPTFVTGGCLCGSIRYRVDFPEDHDFLQASGSCQCTQCRRNTGSLFYVSHSIRQDSISYTTSLETLKNFSVTPGINRGICTNCGSFIYWQDTSTDNIELAIGCIDPEFLFEEEGKGEAFGFALANMAGGNVWCRNQIQGVTDKMIGINDGVKWAKSGDEGIKI

SEQ ID NO: 4333 - DNA, 742 bp, Muscodor strobelii
  misc_feature: SGI EST ID NO. CUFF.10989.0
  misc_feature: Variant of the nucleotide sequence at SEQ ID NO 4331
caacgtttgatcattaactttcgactcattcacacttgatactaatttcataacaagtaatcgaagatgtctcaagcttctgtccacgattttccaaagccaacattcgtcactggcggttgtttgtgcggatcgattcggtatcgagttgactttcccgaagatcatgatttcctgcaggcgagtgggagttgtcaatgcacacaatgtcgtcgcaacactggctcgcttttctacgtgtcgcactcaatcaggcaagacagcataagctacaccacatctctagagaccctcaagaacttcagcgtaacgccaggaatcaatcgcggcatttgcacaaactgtggtagctttatttactggcaggacacatcgactgataatattgagttggcaatcgggtgcatagatcctgagttcctgttcgaggaagaaggcaagggtgaggcttttggttttgcgcttgcaaacatggccgggggaaatgtctggtgtcgcaatcagatccaaggcgtcacagataagatgattggaatcaatgatggcgtcaaatgggcgaaaagtggcgacgaaggcatcaaaatatagaatgcacgatgctaaaatgccgtttctctgtcgcttctttgtcgcgtagcatcttaagaccagtcagtgcatcaggtgggcaccgcagcgttaggaactagctatattgaacaatcatacaaataagtccgaacagcttctaattcgagcctcc

SEQ ID NO: 4334 - DNA, 2106 bp, Muscodor strobelii
  misc_feature: SGI cDNA ID NO. 561132
  misc_feature: Elevated expression when VOC is produced
  misc_feature: Encodes the peptide sequence at SEQ ID NO 4335
atgacttcgtccatcattgattctcatgtacacatcggtccttggactgattggtctcagggtcatatcatggggcaaaggttgaccttatcacgccgtgatgcgaacttgctcattgctttcacagcttctttcatagccattgtgtctactcgtttctggaggatcatctgtctgttgcttcacagatggtactccagatctacaccacaaaatgcattgttctaccagcgacaagttctcttacgcaacactgctagctccgagaacggagtaacatctttcttccaactcattataagctggcgtcgcatcggcttgcgtcggctattacaagtaattccagtcttcgtacttgctgtgttcatcacagtttctttcaccatcgctggagggttttcttccttattgtcctcagctgtaggggaccgtgtgcttctggatagccacaactgtggtttcatacaaccgccggagaattattcttcagtagcgcccctcgccgtgttctattcagagaaactaaatgacgcggctaactacgctcagcaatgctatctcaacaatagtgctgggcttctcggatgtgaccgctttgtcgtcgacaaaataccgtgggctgctgaaacaaacgcgtcatgcccattttccgacacgatatgccgaaacaagcatggcagtattcgtctggacactggccacgtcgacacgaataacttcctaggattgaacgcgcctccgggtgacagatcttcatctagatacgtattacattgctcacccttagtcaccgagggatataagacgaccatcaacacttcagaagaaggaccattggtcctgtacacatatggacagtcaaccaagggaggtagcacaaatttaacggttcaaaactacacgtatgatatacccgacctcggctcacaatatctccatagcaatagaggggagaacctcaagttgaacatacagacgtggacaatatttgatggtgtatcgggtggactctctaatatcaccgtcattccggagctcgcacggtcagatggcgacatccacgtccttttcctctcaggcaacggcgttgttttcgaccaaccaatgacggatgactggtaccgagtatctatagtgagcggcaccacctcttcagccgggtatgttggtgcttcggtgaactttatacccgaagaagctgcttcacctcttggctgtgtagaacagtttcagtactgcaatgttgccgactcggcgacctcgtgcgggcctctcgccagtttcaacgacgccgtcaatggcgctgcgccattctttaactcgacacctgaggaactaaatacgggcgatccgccactaggcaatcgagatgcgacccgtctatggcgtatggcaatgatatggagctacaacccacttaatcttcgaaatctaatacttgaactcggagccaagagtcttatatcgcaatcgtcgctgtacagcggaacccagtacgtaacgaatgctcagagtcaatggcaactcgacgtggccaaatggttcggcagtctacaagcgggcttgcaagcagcttatcttgccacagccgttggtcccacagatgaacttctcgacagttggagaatcccgccaacgggtacaattgaaggggacatgtgcaatagccagaaaatccgcagctccaagtacgcatcgtttagcgtcttcggccttgtgtttacgtacactgttggcggcgtcattatcctcttgtcagcgcttgctgagcccgccgcgacttttctacacagagtcttcgattatcagaggtaccagcagcttgaatggaattctaatgatcagttgcaactccttcgtctcgctcaggaggaatctggtcacggtaattggatcgattgtaccaaaaccgtgccaatcgccaatatcgacgaccctcttggaccattggacatcactgatataaaccacactaagatcgccagatcgatagggaggcattacagtcaaaccagcgacgacgtccatggcaacttttatgtgtcaaaaggaggtgctcttgaagtacccacggctatcaatgagaaggtaatgggagcaaactaa

SEQ ID NO: 4335 - protein, 701 aa, Muscodor strobelii
  misc_feature: SGI Peptide ID NO. 561132
  misc_feature (4)..(659): NCBI GI: 169615058 Blast Desc: SNOG_10683 [Phaeosphaeria nodorum SN15] gi|111060957|gb|EAT82077.1| SNOG_10683 [Phaeosphaeria nodorum SN15]
  misc_feature (7)..(660): NCBI GI: 189194015 Blast Desc: conserved [Pyrenophora tritici-repentis Pt-1C-BFP] gi|187978910|gb|EDU45536.1| conserved [Pyrenophora tritici-repentis Pt-1C-BFP]
  misc_feature (9)..(654): NCBI GI: 119474227 Blast Desc: NFIA_004500 [Neosartorya fischeri NRRL 181] gi|119407142|gb|EAW17092.1| conserved [Neosartorya fischeri NRRL 181]
  misc_feature (9)..(642): NCBI GI: 115399382 Blast Desc: [Aspergillus terreus NIH2624] gi|114192163|gb|EAU33863.1| [Aspergillus terreus NIH2624]
  misc_feature (9)..(642): NCBI GI: 70986226 Blast Desc: conserved [Aspergillus fumigatus Af293] gi|66846236|gb|EAL86569.1| conserved [Aspergillus fumigatus Af293]
  misc_feature (9)..(642): NCBI GI: 159128250 Blast Desc: conserved [Aspergillus fumigatus A1163]
  misc_feature (1)..(646): NCBI GI: 121699395 Blast Desc: ACLA_082720 [Aspergillus clavatus NRRL 1] gi|119396149|gb|EAW06581.1| ACLA_082720 [Aspergillus clavatus NRRL 1]
  misc_feature (10)..(633): NCBI GI: 169772941 Blast Desc: [Aspergillus oryzae RIB40] gi|83768800|dbj|BAE58937.1| protein product [Aspergillus oryzae]
  misc_feature (10)..(663): NCBI GI: 169618215 Blast Desc: SNOG_12297 [Phaeosphaeria nodorum SN15] gi|160703576|gb|EAT80110.2| SNOG_12297 [Phaeosphaeria nodorum SN15]
  misc_feature (5)..(639): NCBI GI: 46116086 Blast Desc: FG03885.1 [Gibberella zeae PH-1]
  misc_feature: Useful for introducing or modulating the production of volatile compounds
MTSSIIDSHVHIGPWTDWSQGHIMGQRLTLSRRDANLLIAFTASFIAIVSTRFWRIICLLLHRWYSRSTPQNALFYQRQVLLRNTASSENGVTSFFQLIISWRRIGLRRLLQVIPVFVLAVFITVSFTIAGGFSSLLSSAVGDRVLLDSHNCGFIQPPENYSSVAPLAVFYSEKLNDAANYAQQCYLNNSAGLLGCDRFVVDKIPWAAETNASCPFSDTICRNKHGSIRLDTGHVDTNNFLGLNAPPGDRSSSRYVLHCSPLVTEGYKTTINTSEEGPLVLYTYGQSTKGGSTNLTVQNYTYDIPDLGSQYLHSNRGENLKLNIQTWTIFDGVSGGLSNITVIPELARSDGDIHVLFLSGNGVVFDQPMTDDWYRVSIVSGTTSSAGYVGASVNFIPEEAASPLGCVEQFQYCNVADSATSCGPLASFNDAVNGAAPFFNSTPEELNTGDPPLGNRDATRLWRMAMIWSYNPLNLRNLILELGAKSLISQSSLYSGTQYVTNAQSQWQLDVAKWFGSLQAGLQAAYLATAVGPTDELLDSWRIPPTGTIEGDMCNSQKIRSSKYASFSVFGLVFTYTVGGVIILLSALAEPAATFLHRVFDYQRYQQLEWNSNDQLQLLRLAQEESGHGNWIDCTKTVPIANIDDPLGPLDITDINHTKIARSIGRHYSQTSDDVHGNFYVSKGGALEVPTAINEKVMGAN

SEQ ID NO: 4336 - DNA, 2088 bp, Muscodor strobelii
  misc_feature: SGI EST ID NO. CUFF.11070.0
  misc_feature: Variant of the nucleotide sequence at SEQ ID NO 4334
gcttgcgtcggctattacaagtaattccagtcttcgtacttgctgtgttcatcacagtttctttcaccatcgctggagggttttcttccttattgtcctcagctgtaggggaccgtgtgcttctggatagccacaactgtggtttcatacaaccgccggagaattattcttcagtagcgcccctcgccgtgttctattcagagaaactaaatgacgcggctaactacgctcagcaatgctatctcaacaatagtgctgggcttctcggatgtgaccgctttgtcgtcgacaaaataccgtgggctgctgaaacaaacgcgtcatgcccattttccgacacgatatgccgaaacaagcatggcagtattcgtctggacactggccacgtcgacacgaataacttcctaggattgaacgcgcctccgggtgacagatcttcatctagatacgtattacattgctcacccttagtcaccgagggatataagacgaccatcaacacttcagaagaaggaccattggtcctgtacacatatggacagtcaaccaagggaggtagcacaaatttaacggttcaaaactacacgtatgatatacccgacctcggctcacaatatctccatagcaatagaggggagaacctcaagttgaagtgagtctaatgctgtgtggctgaaacctaagctatcgcaagaccaacgattttgacaccgcctcttagcatacagacgtggacaatatttgatggtgtatcgggtggactctctaatatcaccgtcattccggagctcgcacggtcagatggcgacatccacgtccttttcctctcaggcaacggcgttgttttcgaccaaccaatgacggatgactggtaccgagtatctatagtgagcggcaccacctcttcagccgggtatgttggtgcttcggtgaactttatacccgaagaagctgcttcacctcttggctgtgtagaacagtttcagtactgcaatgttgccgactcggcgacctcgtgcgggcctctcgccagtttcaacgacgccgtcaatggcgctgcgccattctttaactcgacacctgaggaactaaatacgggcgatccgccactaggcaatcgagatgcgacccgtctatggcgtatggcaatgatatggagctacaacccacttaatcttcgaaatctaatacttgaactcggagccaagagtcttatatcgcaatcgtcgctgtacagcggaacccagtacgtaacgaatgctcagagtcaatggcaactcgacgtggccaaatggttcggcagtctacaagcgggcttgcaagcagcttatcttgccacagccgttggtcccacagatgaacttctcgacagttggagaatcccgccaacgggtacaattgaaggggacatgtgcaatagccagaaaatccgcagctccaagtacgcatcgtttagcgtcttcggccttgtgtttacgtacactgttggcggcgtcattatcctcttgtcagcgcttgctgagcccgccgcgacttttctacacagagtcttcgattatcagaggtaccagcagcttgaatggaattctaatgatcagttgcaactccttcgtctcgctcaggaggaatctggtcacggtaattggatcgattgtaccaaaaccgtgccaatcgccaatatcgacgaccctcttggaccattggacatcactgatataaaccacactaagatcgccagatcgatagggaggcattacagtcaaaccagcgacgacgtccatggcaacttttatgtgtcaaaaggaggtgctcttgaagtacccacggctatcaatgagaaggtaatgggagcaaactaaacacaagattgcaaggtagaaatttgccacatagagcaagactggaacagaacggcttcattgacgaggtttgaaaaatggcatatgatgattgcagatcttgtagcaaatatgacatcaattggccaacagccgaacttgtagtttaattgaatttcatattgctcctggaatacatgtagttacacaacactttgaagatatcaagaagccgtacggatctacaata

SEQ ID NO: 4337 - DNA, 1065 bp, Muscodor strobelii
  misc_feature: SGI cDNA ID NO. 561133
  misc_feature: Elevated expression when VOC is produced
  misc_feature: Encodes the peptide sequence at SEQ ID NO 4338
atgaggctattcgcaggaatcttcttcaccgcgagcctggctgcccttgccgtcagctcgccactgacaccaaagaagcttccccatctcacctggaagcttcactctacaaacactacccaccgattccgcggcctagccccagtgtcggataaagtcgcatgggtttctggaacagaagccagcgtcctcctcactaccgatgggggccgaacctggacctctgttggcccagccctaggacccgaggacgtagcactcgaattccgtgatatcgaggcttggtcagcccacgaggccgtaatcctgtcaattggcgcgggcgcagactcccgtatatatcggacacgcgacggcggcgcatcctggacgcaggtcttcaccaacgccgaggcggacgcgttttacgactgcgtagcattcgacgagcatgggcgcgggatcgccatgagcgatcccgtagatggcaagttccggctcatagagtcccgagaccgaggactcagctgggcagtcgttgatcccgcggggatgccgcctgctctggaaggcgaatttgggtttgctgccagcggcacctgtattgcgacagcagcgggccgatggtatgttgcttcaggtggtgtcgacccagggagagtgtttagcagtgcggacgggcataattgggccgttgcgaatagctcgattgctggcggcgatgccgggggtgtattctcggtgcaatttagggatgccaggcatgggatcgctgttggtggcgactacgagtctcccacaggtgctgtgaataatgcggcttggtcgtatgatgggggagttacttggacggcagcttcgtcattccctggcgggtatcgatcaggatcgtcatgggttcccgggctctgcgatgtcgcggttgcagttggcccgactggatctgatgttacgattgacggtggccggacttggcatggcttcgacaatggtacctttgacagcgtagagtgtgtcaaaggtcttgcgtgttgggcatcaggagagtcaggcagagttgcgcggctgtcattgtcattgtcgtag

SEQ ID NO: 4338 - protein, 354 aa, Muscodor strobelii
  misc_feature: SGI Peptide ID NO. 561133
  misc_feature (16)..(351): NCBI GI: 261359323 Blast Desc: oxidoreductase [Verticillium albo-atrum VaMs.102]
  misc_feature (43)..(352): NCBI GI: 169599356 Blast Desc: SNOG_02495 [Phaeosphaeria nodorum SN15] gi|160704587|gb|EAT90707.2| SNOG_02495 [Phaeosphaeria nodorum SN15]
  misc_feature (3)..(349): NCBI GI: 284034342 Blast Desc: related to photosystem II stability/assembly factor [Kribbella flavida DSM 17836] gi|283813635|gb|ADB35474.1| related to photosystem II stability/assembly factor [Kribbella flavida
  misc_feature (26)..(350): NCBI GI: 260645413 Blast Desc: oxidoreductase ( secreted protein) [Streptomyces scabiei 87.22]
  misc_feature (25)..(350): NCBI GI: 29828228 Blast Desc: oxidoreductase [Streptomyces avermitilis MA-4680] gi|29605330|dbj|BAC69397.1| oxidoreductase [Streptomyces avermitilis MA-4680]
  misc_feature (32)..(350): NCBI GI: 254402369 Blast Desc: oxidoreductase [Streptomyces sviceus ATCC 29083] gi|197711844|gb|EDY55878.1| oxidoreductase [Streptomyces sviceus ATCC 29083]
  misc_feature (10)..(351): NCBI GI: 229860831 Blast Desc: uncharacterized photosystem II stability/assembly factor-like protein, COG4447 [Stackebrandtia nassauensis DSM 44728] gi|229749482|gb|EEP07274.1| uncharacterized photosystem II
  misc_feature (32)..(350): NCBI GI: 21225017 Blast Desc: oxidoreductase (secreted protein) [Streptomyces coelicolor A3(2)] gi|4584470|emb|CAB40673.1| oxidoreductase ( secreted protein) [Streptomyces coelicolor A3(2)]
  misc_feature (32)..(350): NCBI GI: 256775175 Blast Desc: oxidoreductase [Streptomyces hygroscopicus ATCC 53653]
  misc_feature (32)..(350): NCBI GI: 256783829 Blast Desc: oxidoreductase (secreted protein) [Streptomyces lividans TK24]
  misc_feature: Useful for introducing or modulating the production of volatile compounds
MRLFAGIFFTASLAALAVSSPLTPKKLPHLTWKLHSTNTTHRFRGLAPVSDKVAWVSGTEASVLLTTDGGRTWTSVGPALGPEDVALEFRDIEAWSAHEAVILSIGAGADSRIYRTRDGGASWTQVFTNAEADAFYDCVAFDEHGRGIAMSDPVDGKFRLIESRDRGLSWAVVDPAGMPPALEGEFGFAASGTCIATAAGRWYVASGGVDPGRVFSSADGHNWAVANSSIAGGDAGGVFSVQFRDARHGIAVGGDYESPTGAVNNAAWSYDGGVTWTAASSFPGGYRSGSSWVPGLCDVAVAVGPTGSDVTIDGGRTWHGFDNGTFDSVECVKGLACWASGESGRVARLSLSLS

SEQ ID NO: 4339 - DNA, 1963 bp, Muscodor strobelii
  misc_feature: SGI EST ID NO. CUFF.10995.0
  misc_feature: Variant of the nucleotide sequence at SEQ ID NO 4337
ttaattaccatcctcacctgccattgaaggtaaggtcgctcatttagctagaacaagggtccccagtgcgcaagccaagactttagagagatatgacctcagcgatcagatatgacggtaaataaaccgtctttgtcactcccacaattcctctgaccttcatgaactcaagcgaatgacccaccgccaatatgaggctattcgcaggaatcttcttcaccgcgagcctggctgcccttgccgtcagctcgccactgacaccaaagaagcttccccatctcacctggaagcttcactctacaaacactacccaccgattccgcggcctagccccagtgtcggataaagtcgcatgggtttctggaacagaagccagcgtcctcctcactaccgatgggggccgaacctggacctctgttggcccagccctaggacccgaggacgtagcactcgaattccgtgatatcgaggcttggtcagcccacgaggccgtaatcctgtcaattggcgcgggcgcagactcccgtatatatcggacacgcgacggcggcgcatcctggacgcaggtcttcaccaacgccgaggcggacgcgttttacgactgcgtagcattcgacgagcatgggcgcgggatcgccatgagcgatcccgtagatggcaagttccggctcatagagtcccgagaccgaggactcagctgggcagtcgttgatcccgcggggatgccgcctgctctggaaggcgaatttgggtttgctgccagcggcacctgtattgcgacagcagcgggccgatggtatgttgcttcaggtggtgtcgacccagggagagtgtttagcagtgcggacgggcataattgggccgttgcgaatagctcgattgctggcggcgatgccgggggtgtattctcggtgcaatttagggatgccaggcatgggatcgctgttggtggcgactacgagtctcccacaggtgctgtgaataatgcggcttggtcgtatgatgggggagttacttggacggcagcttcgtcattccctggcgggtatcgatcaggatcgtcatgggttcccgggctctgcgatgtcgcggttgcagttggcccgactggatctgatgttacgattgacggtggccggacttggcatggcttcgacaatggtacctttgacagcgtagagtgtgtcaaaggtcttgcgtgttgggcatcaggagagtcaggcagagttgcgcggctgtcattgtcattgtcgtagggaggacatcactctaataaaaatatgtcttatactactgtcctgaatctagctgtttgttgtacttaagcaaacttctataactactgcttgctctcaacagatcccagctcgggtacttctgctacggcctgtacagctagcttccacgaatcatcgccatatagctggcctctcagataggctgttgtcatcctctgcacaaatgctagcctctcagggctctcatcctgcgtctctccagcatcccaaccgctgatcccaccaaatccatgatgccctcccttcacaacgacaagatccttaggacccgggccgtaagtgaacccatcccaatgccaatcagcaccacgagaggacaagtgtggactgacatctatatcaccgccgacacacaatgtaggtgtagtcatagtcgcaaagtcaagattcatgaacgggaccatctttttaccgttctctgacatactatcaccaccactaccaaccccaccaataagaacgcctgctttgatgcgcttctcaaagggatggtatttgcttccatctcgggcatcggtgttggttgcaccaagaagcaaagcggatgtgtggccaccaaaagaatggccaacaacagctacttgatccttgtcaagtcgacccttcaggccagggactgtttcttcaatgtcgttcagatgatcaaggattcggctcatgtcctg

SEQ ID NO: 4340 - DNA, 966 bp, Muscodor strobelii
  misc_feature: SGI cDNA ID NO. 561134
  misc_feature: Encodes the peptide sequence at SEQ ID NO 4341
atgacgactgtacacactctcattggcaaagccgccaagattcctactaaaaccgcttctcctatcttctctttcattcctgttatcatccctgtccagggtcgacctaccgatttacagcttcgcatcacggtgcccacttcaggtgacaagcttcccatcgtcctcctatctcatggacacggtcgcagcaactggctatcatcccaccacggctatgcccctctcgccgaattttgggcaaagcatggctttgctgtcattcagcccacccatctttcgtcggcaactcttggcttgccgagcgtttcgggcaacgagatgtactggcaagatcggccacaggacatgagccgaatccttgatcatctgaacgacattgaagaaacagtccctggcctgaagggtcgacttgacaaggatcaagtagctgttgttggccattcttttggtggccacacatccgctttgcttcttggtgcaaccaacaccgatgcccgagatggaagcaaataccatccctttgagaagcgcatcaaagcaggcgttcttattggtggggttggtagtggtggtgatagtatgtcagagaacggtaaaaagatggtcccgttcatgaatcttgactttgcgactatgactacacctacattgtgtgtcggcggtgatatagatgtcagtccacacttgtcctctcgtggtgctgattggcattgggatgggttcacttacggcccgggtcctaaggatcttgtcgttgtgaagggagggcatcatggatttggtgggatcagcggttgggatgctggagagacgcaggatgagagccctgagaggctagcatttgtgcagaggatgacaacagcctatctgagaggccagctatatggcgatgattcgtggaagctagctgtacaggccgtagcagaagtacccgagctgggatctgttgagagcaagcagtag

SEQ ID NO: 4341 - protein, 321 aa, Muscodor strobelii
  misc_feature: SGI Peptide ID NO. 561134
  misc_feature (134)..(161): Pfam Id: PF03403 Pfam Desc: Platelet-activating factor acetylhydrolase, plasma/intracellular isoform II
  misc_feature (6)..(320): NCBI GI: 256723467 Blast Desc: NECHADRAFT_81072 [Nectria haematococca mpVI 77-13-4]
  misc_feature (7)..(320): NCBI GI: 46116166 Blast Desc: FG03925.1 [Gibberella zeae PH-1]
  misc_feature (20)..(321): NCBI GI: 282864629 Blast Desc: conserved [Streptomyces sp. ACTE] gi|282560568|gb|EFB66115.1| conserved [Streptomyces sp. ACTE]
  misc_feature (19)..(321): NCBI GI: 256789947 Blast Desc: SlivT_36158 [Streptomyces lividans TK24]
  misc_feature (19)..(321): NCBI GI: 21219041 Blast Desc: SCO0503 [Streptomyces coelicolor A3(2)] gi|5763954|emb|CAB53333.1| [Streptomyces coelicolor A3(2)]
  misc_feature (20)..(319): NCBI GI: 145595488 Blast Desc: Strop_2969 [Salinispora tropica CNB-440] gi|145304825|gb|ABP55407.1| Strop_2969 [Salinispora tropica CNB-440]
  misc_feature (20)..(320): NCBI GI: 115377623 Blast Desc: conserved [Stigmatella aurantiaca DW4/3-1] gi|115365374|gb|EAU64413.1| conserved [Stigmatella aurantiaca DW4/3-1]
  misc_feature (11)..(320): NCBI GI: 254394150 Blast Desc: conserved [Streptomyces pristinaespiralis ATCC 25486] gi|197717887|gb|EDY61795.1| conserved [Streptomyces pristinaespiralis ATCC 25486]
  misc_feature (20)..(320): NCBI GI: 117164724 Blast Desc: conserved [Streptomyces ambofaciens ATCC 23877]
  misc_feature (15)..(320): NCBI GI: 229204802 Blast Desc: NdasDRAFT_0327 [Nocardiopsis dassonvillei subsp. dassonvillei DSM 43111] gi|228572645|gb|EEK37154.1| NdasDRAFT_0327 [Nocardiopsis dassonvillei subsp. dassonvillei DSM
MTTVHTLIGKAAKIPTKTASPIFSFIPVIIPVQGRPTDLQLRITVPTSGDKLPIVLLSHGHGRSNWLSSHHGYAPLAEFWAKHGFAVIQPTHLSSATLGLPSVSGNEMYWQDRPQDMSRILDHLNDIEETVPGLKGRLDKDQVAVVGHSFGGHTSALLLGATNTDARDGSKYHPFEKRIKAGVLIGGVGSGGDSMSENGKKMVPFMNLDFATMTTPTLCVGGDIDVSPHLSSRGADWHWDGFTYGPGPKDLVVVKGGHHGFGGISGWDAGETQDESPERLAFVQRMTTAYLRGQLYGDDSWKLAVQAVAEVPELGSVESKQ

SEQ ID NO: 4342 - DNA, 1963 bp, Muscodor strobelii
  misc_feature: SGI EST ID NO. CUFF.10995.0
  misc_feature: Variant of the nucleotide sequence at SEQ ID NO 4340
caggacatgagccgaatccttgatcatctgaacgacattgaagaaacagtccctggcctgaagggtcgacttgacaaggatcaagtagctgttgttggccattcttttggtggccacacatccgctttgcttcttggtgcaaccaacaccgatgcccgagatggaagcaaataccatccctttgagaagcgcatcaaagcaggcgttcttattggtggggttggtagtggtggtgatagtatgtcagagaacggtaaaaagatggtcccgttcatgaatcttgactttgcgactatgactacacctacattgtgtgtcggcggtgatatagatgtcagtccacacttgtcctctcgtggtgctgattggcattgggatgggttcacttacggcccgggtcctaaggatcttgtcgttgtgaagggagggcatcatggatttggtgggatcagcggttgggatgctggagagacgcaggatgagagccctgagaggctagcatttgtgcagaggatgacaacagcctatctgagaggccagctatatggcgatgattcgtggaagctagctgtacaggccgtagcagaagtacccgagctgggatctgttgagagcaagcagtagttatagaagtttgcttaagtacaacaaacagctagattcaggacagtagtataagacatatttttattagagtgatgtcctccctacgacaatgacaatgacagccgcgcaactctgcctgactctcctgatgcccaacacgcaagacctttgacacactctacgctgtcaaaggtaccattgtcgaagccatgccaagtccggccaccgtcaatcgtaacatcagatccagtcgggccaactgcaaccgcgacatcgcagagcccgggaacccatgacgatcctgatcgatacccgccagggaatgacgaagctgccgtccaagtaactcccccatcatacgaccaagccgcattattcacagcacctgtgggagactcgtagtcgccaccaacagcgatcccatgcctggcatccctaaattgcaccgagaatacacccccggcatcgccgccagcaatcgagctattcgcaacggcccaattatgcccgtccgcactgctaaacactctccctgggtcgacaccacctgaagcaacataccatcggcccgctgctgtcgcaatacaggtgccgctggcagcaaacccaaattcgccttccagagcaggcggcatccccgcgggatcaacgactgcccagctgagtcctcggtctcgggactctatgagccggaacttgccatctacgggatcgctcatggcgatcccgcgcccatgctcgtcgaatgctacgcagtcgtaaaacgcgtccgcctcggcgttggtgaagacctgcgtccaggatgcgccgccgtcgcgtgtccgatatatacgggagtctgcgcccgcgccaattgacaggattacggcctcgtgggctgaccaagcctcgatatcacggaattcgagtgctacgtcctcgggtcctagggctgggccaacagaggtccaggttcggcccccatcggtagtgaggaggacgctggcttctgttccagaaacccatgcgactttatccgacactggggctaggccgcggaatcggtgggtagtgtttgtagagtgaagcttccaggtgagatggggaagcttctttggtgtcagtggcgagctgacggcaagggcagccaggctcgcggtgaagaagattcctgcgaatagcctcatattggcggtgggtcattcgcttgagttcatgaaggtcagaggaattgtgggagtgacaaagacggtttatttaccgtcatatctgatcgctgaggtcatatctctctaaagtcttggcttgcgcactggggacccttgttctagctaaatgagcgaccttaccttcaatggcaggtgaggatggtaattaa

SEQ ID NO: 4343 - DNA, 1194 bp, Muscodor strobelii
  misc_feature: SGI cDNA ID NO. 561135
  misc_feature: Encodes the peptide sequence at SEQ ID NO 4344
atgggctctactcggccacctaagaaaaagccatgtcggggtggttccaccctaggcggacgcattcgcccacataggaacacttactctcgtcaaaaccgagcttcattttccaaccaattaactcgtgaacagagagaagctgaagatagacgcctatgggcattattcgaagttcacttcttgccacaagagcatcggacgacagaagaaatgcgcctccagattgctgctgcaaatagtgccacgcttccaaccgctcctcaaagatcaagaaacgggatattatcaggtcgctcacttagggctcttcaagacagacacatccagtcgaagtccgcaagtcaatccacagcaaatgggattcaaaatgcgctggacggtcttgaacacgaacacgatcataatgccgtctccccgcaaaattatcctccctctcaatcacatgatcctacttctccggcatggagccctaggtcgccgcaatggtcccccgcatctcccacttacggtgttagatctcctacttatggtacaacttccacggcattcagtcctagcttatcgctttggagacctgacgattctacctccccggcacagcatcctattacctcgccacagtccagtccttcctttccaacgggtcataatcccaagtatcagcaacgtaatcttaaacaggagtctcgtcccgcccccgcgcgaccgaaaactcgtcgcggacctattgatccgattaacattgcagtggccaaccaggatgggcagcaagaaccgtttgctagatcaaacaatccaagcccttcacgcacacctcaagctcctgtcccgccaccaaggccgctacctccagcaccaccgttaccgccacaaatcaaggtcacaccaccaacaccgccccaacagactcaagttccccaggacgatggtctctctgtgaatcatgtttaccgagagctattcaggcgttgcacaaaggcaaaccgcgtcatagatcagcggaaccaggagctggagacgctagctactatatgggagagggagtttcagatcaaactggaagataccgctgatgttaacgttctcaaagaagctgttatgcaggtcatagcagacaaagatcaggctgaagagggtagagataagttcaaaatgttatacgagcaacttatacaagccactggcgtatag

SEQ ID NO: 4344 - protein, 397 aa, Muscodor strobelii
  misc_feature: SGI Peptide ID NO. 561135
  misc_feature (135)..(214): NCBI GI: 262101000 Blast Desc: DNA-directed RNA polymerase II largest subunit [Phytophthora infestans T30-4]
  misc_feature (139)..(214): NCBI GI: 262101000 Blast Desc: DNA-directed RNA polymerase II largest subunit [Phytophthora infestans T30-4]
  misc_feature (139)..(214): NCBI GI: 159467413 Blast Desc: DNA-directed RNA polymerase II, largest subunit [Chlamydomonas reinhardtii] gi|158278613|gb|EDP04376.1| DNA-directed RNA polymerase II, largest subunit [Chlamydomonas
  misc_feature (139)..(214): NCBI GI: 219127092 Blast Desc: [Phaeodactylum tricornutum CCAP 1055/1] gi|217405014|gb|EEC44959.1| [Phaeodactylum tricornutum CCAP 1055/1]
  misc_feature (139)..(214): NCBI GI: 255079898 Blast Desc: [Micromonas sp. RCC299] gi|226518796|gb|ACO64787.1| [Micromonas sp. RCC299]
  misc_feature (139)..(213): NCBI GI: 262101000 Blast Desc: DNA-directed RNA polymerase II largest subunit [Phytophthora infestans T30-4]
  misc_feature (135)..(214): NCBI GI: 120561201 Blast Desc: RNA polymerase II largest subunit [Pichia kudriavzevii]
  misc_feature (139)..(216): NCBI GI: 73955463 Blast Desc: : similar to polymerase (RNA) II (DNA directed) polypeptide A isoform 13 [Canis familiaris]
  misc_feature (139)..(216): NCBI GI: 73955439 Blast Desc: : similar to DNA-directed RNA polymerase II largest subunit (RPB1) isoform 2 [Canis familiaris]
  misc_feature (139)..(216): NCBI GI: 73955461 Blast Desc: : similar to DNA-directed RNA polymerase II largest subunit (RPB1) isoform 12 [Canis familiaris]
MGSTRPPKKKPCRGGSTLGGRIRPHRNTYSRQNRASFSNQLTREQREAEDRRLWALFEVHFLPQEHRTTEEMRLQIAAANSATLPTAPQRSRNGILSGRSLRALQDRHIQSKSASQSTANGIQNALDGLEHEHDHNAVSPQNYPPSQSHDPTSPAWSPRSPQWSPASPTYGVRSPTYGTTSTAFSPSLSLWRPDDSTSPAQHPITSPQSSPSFPTGHNPKYQQRNLKQESRPAPARPKTRRGPIDPINIAVANQDGQQEPFARSNNPSPSRTPQAPVPPPRPLPPAPPLPPQIKVTPPTPPQQTQVPQDDGLSVNHVYRELFRRCTKANRVIDQRNQELETLATIWEREFQIKLEDTADVNVLKEAVMQVIADKDQAEEGRDKFKMLYEQLIQATGV

SEQ ID NO: 4345 - DNA, 753 bp, Muscodor strobelii
  misc_feature: SGI EST ID NO. CUFF.11001.0
  misc_feature: Variant of the nucleotide sequence at SEQ ID NO 4343
acacgaacacgatcataatgccgtctccccgcaaaattatcctccctctcaatcacatgatcctacttctccggcatggagccctaggtcgccgcaatggtcccccgcatctcccacttacggtgttagatctcctacttatggtacaacttccacggcattcagtcctagcttatcgctttggagacctgacgattctacctccccggcacagcatcctattacctcgccacagtccagtccttcctttccaacgggtcataatcccaagtatcagcaacgtaatcttaaacaggagtctcgtcccgcccccgcgcgaccgaaaactcgtcgcggacctattgatccgattaacattgcagtggccaaccaggatgggcagcaagaaccgtttgctagatcaaacaatccaagcccttcacgcacacctcaagctcctgtcccgccaccaaggccgctacctccagcaccaccgttaccgccacaaatcaaggtcacaccaccaacaccgccccaacagactcaagttccccaggacgatggtctctctgtgaatcatgtttaccgagagctattcaggcgttgcacaaaggcaaaccgcgtcatagatcagcggaaccaggagctggagacgctagctactatatgggagagggagtttcagatcaaactggaagataccgctgatgttaacgttctcaaagaagctgttatgcaggtcatagcagacaaagatcaggctgaagagggtag

SEQ ID NO: 4346 - DNA, 2286 bp, Muscodor strobelii
  misc_feature: SGI cDNA ID NO. 561136
  misc_feature: Elevated expression when VOC is produced
  misc_feature: Encodes the peptide sequence at SEQ ID NO 4347
atggtgacggtactcttgagtgccatgagaagtagcgatgtgcacaatgagccagattcacatatgcagcgtctatgtggcgaggcggctcgtttatctcagtttcaaagctcttcaacacgtactgttgcactcattggagaatctggtgttggcaaaagcagcctacttaattccatactggactgtgatggcttagctcgaacgagcaacagtggagcagcttgtacttgtgtagtgacagaataccactatcaccgagatgcgtctttcgcaatcgacgtagatcgcttctccatggatgagatcaagattcagcttcaaaacttgcttcgagactatcgacatttttattgcaaccgagacatgttagattcggacgagtataaatatttcgaaaagcgggctgtccttgcgaaagatacctttcaagcgatgtttcgtgcttctctacgaaatgacgatattttgacttccaacacggagtctgaagtactcgaaatattcaatacatgggtcaacaagagttccccgaacatagctcaagggaagcagtggataatctatctgaatgcccacatcttgcgtaaagggcttattcttgtcgatctaccaggccttcgagatctaaactccgcgcgacgaaatatcactgagcggtatcttctcgattgcgacgagattttcgtgatctgcaatgaaggacgcgcgactaccgacgagggggttcaggatgtggtcgaccttgccaacaaggccaaactatccaatgttggaatcatttgcactaagtcagatgatatcaaagcctctgaagcgaaaagagactggaaagggagcaaagcaaaagaggtccagaggaagctcgatgtccttaagcaggatgcagaagaaatagataaaattcaccaagagattaaagagcttgaggaaattcaagaagaattcgatgacggactgaatgaggaagagaaggccgagcttttgaaactatataacagacgtttaaaggccaaacagatgaagaacgaacacagattcgatcttaaccgctacctcatgcaaaaacgcaacgagagcgtcgaaagcaagctactcgagctttacaaggaccaagttccaggcaacttgttgaaagtcttctgcgttagcaacagcatgtactgggatcatcgtaaagagcccaaagacaaggcgatgcgacacctacagctaagtgggatcttggccattcgacaacattgcatgtcgatggtatcagaaagccaatactcggctgcgaaagattacatggagaatgaaatagatgtactccttggacaagtgactctttgggtgcagtcaggtcaaggctcactaagtgtagaaagaaagcaaaaaatccggtcgactcttgataccatagaggataagcttcgtgagggacttcgccatgacgagcagaacattgggaatcttccagatttgtataaagcagaatttgagtcgcagatttatctgagttcaagcagcaaactaggtaactggagcttggcagctcggcgagcgagctctcagtggaatagttggcaccattcatcttatgctgcattcgttcgtaattatggcaactataacacacccacaattggacgacgaaattggaatgaggaaataatcgcaagtatggtgagcgatgttgcgcctatatggcacgacctgagtgctgctctcgttcagcgaaatagtgaagtatttcatctcattgatgatctcttcagatctgccatacaactcctagacaccaacatgccagattctcgtgatctgaaatctacactcctatcacacaaacgtgttttgaaaacagacctcgaggccgctctagaagaactcaacaaaaattttcataccctcagtgcagatatcctgtcaagccatcgcacctcattcatcggcgaagccatggaaaacgcttacggttccgcccaacgagaaagcggacgtggtagtgatgcacgcagaaaagacgatatcaatcgcgcggtcagccggaacgatctgtttgccattctcatgcggagcttccgaagaggtttcttcgaccacgcagacgagcttcaagaaagtatcgaagaggcggtcgacgagcacttggaagatattcatgacatgtttgatattgtacggagcgaaaatgtggctttggagagtgaacgggacccccaatttcgcacacgagttgaaaatgctgttcaggtggccagaactgagatggatacagtgcttcgggttctggaggattga

SEQ ID NO: 4347 - protein, 761 aa, Muscodor strobelii
  misc_feature: SGI Peptide ID NO. 561136
  misc_feature (1)..(758): NCBI GI: 256724409 Blast Desc: NECHADRAFT_102212 [Nectria haematococca mpVI 77-13-4]
  misc_feature (5)..(753): NCBI GI: 189195090 Blast Desc: conserved [Pyrenophora tritici-repentis Pt-1C-BFP] gi|187979762|gb|EDU46388.1| conserved [Pyrenophora tritici-repentis Pt-1C-BFP]
  misc_feature (15)..(472): NCBI GI: 242812309 Blast Desc: conserved [Talaromyces stipitatus ATCC 10500] gi|218714270|gb|EED13693.1| conserved [Talaromyces stipitatus ATCC 10500]
  misc_feature (2)..(598): NCBI GI: 115387411 Blast Desc: [Aspergillus terreus NIH2624] gi|114195295|gb|EAU36995.1| [Aspergillus terreus NIH2624]
  misc_feature (32)..(761): NCBI GI: 238488587 Blast Desc: conserved [Aspergillus flavus NRRL3357] gi|220697919|gb|EED54259.1| conserved [Aspergillus flavus NRRL3357]
  misc_feature (33)..(760): NCBI GI: 145236783 Blast Desc: An06g02180 [Aspergillus niger] gi|134075500|emb|CAK48061.1| protein product [Aspergillus niger]
  misc_feature (52)..(761): NCBI GI: 67526139 Blast Desc: AN3527.2 [Aspergillus nidulans FGSC A4] gi|40739662|gb|EAA58852.1| AN3527.2 [Aspergillus nidulans FGSC A4]
  misc_feature (5)..(477): NCBI GI: 119479925 Blast Desc: NFIA_080380 [Neosartorya fischeri NRRL 181] gi|119408145|gb|EAW18094.1| conserved [Neosartorya fischeri NRRL 181]
  misc_feature (347)..(761): NCBI GI: 259481955 Blast Desc: TPA: conserved [Aspergillus nidulans FGSC A4]
  misc_feature (70)..(690): NCBI GI: 121720126 Blast Desc: conserved [Aspergillus clavatus NRRL 1] gi|119404973|gb|EAW15335.1| conserved [Aspergillus clavatus NRRL 1]
  misc_feature: Useful for introducing or modulating the production of volatile compounds
MVTVLLSAMRSSDVHNEPDSHMQRLCGEAARLSQFQSSSTRTVALIGESGVGKSSLLNSILDCDGLARTSNSGAACTCVVTEYHYHRDASFAIDVDRFSMDEIKIQLQNLLRDYRHFYCNRDMLDSDEYKYFEKRAVLAKDTFQAMFRASLRNDDILTSNTESEVLEIFNTWVNKSSPNIAQGKQWIIYLNAHILRKGLILVDLPGLRDLNSARRNITERYLLDCDEIFVICNEGRATTDEGVQDVVDLANKAKLSNVGIICTKSDDIKASEAKRDWKGSKAKEVQRKLDVLKQDAEEIDKIHQEIKELEEIQEEFDDGLNEEEKAELLKLYNRRLKAKQMKNEHRFDLNRYLMQKRNESVESKLLELYKDQVPGNLLKVFCVSNSMYWDHRKEPKDKAMRHLQLSGILAIRQHCMSMVSESQYSAAKDYMENEIDVLLGQVTLWVQSGQGSLSVERKQKIRSTLDTIEDKLREGLRHDEQNIGNLPDLYKAEFESQIYLSSSSKLGNWSLAARRASSQWNSWHHSSYAAFVRNYGNYNTPTIGRRNWNEEIIASMVSDVAPIWHDLSAALVQRNSEVFHLIDDLFRSAIQLLDTNMPDSRDLKSTLLSHKRVLKTDLEAALEELNKNFHTLSADILSSHRTSFIGEAMENAYGSAQRESGRGSDARRKDDINRAVSRNDLFAILMRSFRRGFFDHADELQESIEEAVDEHLEDIHDMFDIVRSENVALESERDPQFRTRVENAVQVARTEMDTVLRVLED

SEQ ID NO: 4348 - DNA, 3867 bp, Muscodor strobelii
  misc_feature: SGI EST ID NO. CUFF.11007.1
  misc_feature: Variant of the nucleotide sequence at SEQ ID NO 4346
gaaggatggctatgctagacaaccccggagtccttcttcactgacctccgccgaaacagcgattgtctcatcacttctttcatgaacatcacacgcatatcaatagcaaacaaagtgtagaacatgtgaattaattttttctgtgttttgattcacaatcaattctcagtcaattgttaagactgccactctgggaatcccaggtcgttgatacttactttaacgatcgcggcgcagggttcatcatggctcaaacacagcgttctcgtagtgccaatcctccctctcggtcaagcagtgacacatctggtactctgaaatcatctcggaccgcatctccttcaagccatactggattcgagacacctcgaaactcttttgattttcggctttcctctgatacggtcttgccgtcaattgagagcgatattagcctcaataacgtcttccaattcgggtcgaacgcaactacgatatcgcagaaccgtgacgtttcctaccccggattgccctcgctttcgccgcagcgaacaccgtcagtgtccgtcacctgcacagactctccgtccacacgcctgtttacatcgaacaatggtagcagccaatccatctctcgtgaatcagatacgagtagtctgggggaacagctcgaagggctgcgattttcaacagctagtccaggtctcgacctatctggcatagaaaatgcgttgcaagaagttacagaagggttagactccattggacctttcttacatccgaggtctccaggcgtggccagtccgacaccaagtacccagagctcacatcgtaggcgatcaagctctagacttctgcaagaaatccataaggttgaagacgaagtaccacctagggaccgctttaatagtccagcgtttcaacaagctttggagaatgcaaggcaaatggtgacggtactcttgagtgccatgagaagtagcgatgtgcacaatgagccagattcacatatgcagcgtctatgtggcgaggcggctcgtttatctcagtttcaaagctcttcaacacgtactgttgcactcattggagaatctggtgttggcaaaagcagcctacttaattccatactggactgtgatggcttagctcgaacgagcaacagtggagcagcttgtacttgtgtagtgacagaataccactatcaccgagatgcgtctttcgcaatcgacgtagatcgcttctccatggatgagatcaagattcagcttcaaaacttgcttcgagactatcgacatttttattgcaaccgagacatgttagattcggacgagtataaatatttcgaaaagcgggctgtccttgcgaaagatacctttcaagcgatgtttcgtgcttctctacgaaatgacgatattttgacttccaacacggagtctgaagtactcgaaatattcaatacatgggtcaacaagagttccccgaacatagctcaagggaagcagtggatgtctagcgccaatgactgttctgaactactaatgggactcacctcggaggacgcatcagcagagagctctgcagtctggccatggataaagaaaattaaaatctatctgaatgcccacatcttgcgtaaagggcttattcttgtcgatctaccaggccttcgagatctaaactccgcgcgacgaaatatcactgagcggtatcttctcgattgcgacgagattttcgtgatctgcaatgaaggacgcgcgactaccgacgagggggttcaggatgtggtcgaccttgccaacaaggccaaactatccaatgttggaatcatttgcactaagtcagatgatatcaaagcctctgaagcgaaaagagactggaaagggagcaaagcaaaagaggtccagaggaagctcgatgtccttaagcaggatgcagaagaaatagataaaattcaccaagagattaaagagcttgaggaaattcaagaagaattcgatgacggactgaatgaggaagagaaggccgagcttttgaaactatataacagacgtttaaaggccaaacagatgaagaacgaacacagattcgatcttaaccgctacctcatgcaaaaacgcaacgagagcgtcgaaagcaagctactcgagctttacaaggaccaagttccaggcaacttgttgaaagtcttctgcgttagcaacagcatgtactgggatcatcgtaaagagcccaaagacaaggcgatgcgacacctacagctaagtgggatcttggccattcgacaacattgcatgtcgatggtatcagaaagccaatactcggctgcgaaagattacatggagaatgaaatagatgtactccttggacaagtgactctttgggtgcagtcaggtcaaggctcactaagtgtagaaagaaagcaaaaaatccggtcgactcttgataccatagaggataagcttcgtgagggacttcgccatgacgagcagaacattgggaatcttccagatttgtataaagcagaatttgagtcgcagatttatctgagttcaagcagcaaactaggtaactggagcttggcagctcggcgagcgagctctcagtggaatagttggcaccattcatcttatgctgcattcgttcgtaattatggcaactataacacacccacaattggacgacgaaattggaatgaggaaataatcgcaagtatggtgagcgatgttgcgcctatatggcacgacctgagtgctgctctcgttcagcgaaatagtgaagtatttcatctcattgatgatctcttcagatctgccatacaactcctagacaccaacatgccagattctcgtgatctgaaatctacactcctatcacacaaacgtgttttgaaaacagacctcgaggccgctctagaagaactcaacaaaaattttcataccctcagtgcagatatcctgtcaagccatcgcacctcattcatcggcgaagccatggaaaacgcttacggttccgcccaacgagaaagcggacgtggtagtgatgcacgcagaaaagacgatatcaatcgcgcggtcagccggaacgatctgtttgccattctcatgcggagcttccgaagaggtttcttcgaccacgcagacgagcttcaagaaagtatcgaagaggcggtcgacgagcacttggaagatattcatgacatgtttgatattgtacggagcgaaaatgtggctttggagagtgaacgggacccccaatttcgcacacgagttgaaaatgctgttcaggtggccagaactgagatggatacagtgcttcgggttctggaggattgaggatttaacatcattgctgtctcattttgtcacaaacccacatcatacattcatcttggtttcaacgatcaatttcatacttgtacttttgcctccaagaagatgacattatatgatgtagatttgatgatagcctcctgactcgctttccgaatcaaattagcataaagacacatgtgtgtatatatggctaagcacttgcactacgcccacacgagcattgtggatgattcatggaggcgagagattcgtgatcgtggggagcgtgtggaagtgctgtacatgatcattcagaggagaatagcaattaggatgactctgtctaactgccgaattgacttgcggataatcaccgtatatatacactcctggacccctgtatcaagtgccactgaacatgacgtattacctcacaaccctgactttgtttaagttggccacttggtgacagattacggatggtgaggattcagaagagttagcgaccacttgacacctacgaccggaggcgtattcaagcaacaagatcaggcagtcctatatttaatgaaaaaat

SEQ ID NO: 4349 - DNA, 1266 bp, Muscodor strobelii
  misc_feature: SGI cDNA ID NO. 561137
  misc_feature: Encodes the peptide sequence at SEQ ID NO 4350
atggccccgaagccagtgttttgcgaagggtcaccatcatggataccggacacatacctcgccgacaccgaattacacgcccgcgccagcgcactgctcgccaacaacgacctaagatccgctatcacgacgtctttctcgctacgcaagaccgattcctatgtataccacgccatagtcgctacgaacctagcccaagtccagcaagttgtatctctcggcgacgcccacggactacataattggtatttcgacgaaccatcacctcccaagaaagaaaaagcagcagactccaatggcgactcgacgccaaattcaagatcacaacctctaccgcccccacctaaagccgatatcgaagcctacctatctatattctcaccttcaaactctgccccgacggcattacgaaacttcacatccaacgcgaaaaaaggctccttacggcaacaaataggagcacacctaatagaaaaacgctacatccacccatccttcaccaacacactcaacaagctcccacgcataaaatccaagcccgcaccatgtaacccctacctcacatatttatcctgggcaatcacaaatctcgaattcgcaggaccctgttccctatcagagcgtagtccacacagaccgccaaactcccagctgaccctacccatactgatgcaccacttcggctgcgtctgtccgtcacacgaggctctagagatcttgcggttgctcgcagatggacgggagattatagatgtcgggagcggaaacgggtattggactaggatgctgcgagactactatgtgtttcacaagtctaataagacgactgaggtgccacttgtcacaccggttgatagtgcgcagagtgcttggagggttaattgggtgtctgatacgattgttgctgatggcgctcagtatttaagggagactagacagggggcgaaggatgcggtgctgttgatggtctatcctattgtgggcggtgggattgcgggtggtagtgagggtggtttcacaagggggtgtttggatgcgtttgagggcgatacggtcgcggtggttggcacgcagaatgggaatggatatacggggtttcggagcatgactatggatcagtttatggaaagggagagaaaagaatgggtgaaggttgttcaggtgccgttgccgagttttccggggaaggatgaggcgctgtttgtttttcaaagaggtgaaagggcgccgaagattgagaatggggaagaggagaacgggagttag

SEQ ID NO: 4350 - protein, 421 aa, Muscodor strobelii
  misc_feature: SGI Peptide ID NO. 561137
  misc_feature (8)..(413): NCBI GI: 256734008 Blast Desc: NECHADRAFT_59031 [Nectria haematococca mpVI 77-13-4]
  misc_feature (6)..(415): NCBI GI: 38567168 Blast Desc: [Neurospora crassa]
  misc_feature (3)..(400): NCBI GI: 46128725 Blast Desc: FG08740.1 [Gibberella zeae PH-1]
  misc_feature (6)..(415): NCBI GI: 164427835 Blast Desc: NCU02651 [Neurospora crassa OR74A] gi|157071904|gb|EAA36188.2| conserved [Neurospora crassa OR74A]
  misc_feature (6)..(396): NCBI GI: 149209931 Blast Desc: MGCH7_ch7g447 [Magnaporthe grisea 70-15] gi|86196402|gb|EAQ71040.1| MGCH7_ch7g447 [Magnaporthe grisea 70-15]
  misc_feature (6)..(378): NCBI GI: 145610107 Blast Desc: MGG_02704 [Magnaporthe grisea 70-15] gi|145017489|gb|EDK01852.1| MGG_02704 [Magnaporthe grisea 70-15]
  misc_feature (42)..(405): NCBI GI: 169606087 Blast Desc: SNOG_06077 [Phaeosphaeria nodorum SN15] gi|160706914|gb|EAT87141.2| SNOG_06077 [Phaeosphaeria nodorum SN15]
  misc_feature (13)..(405): NCBI GI: 189197703 Blast Desc: conserved [Pyrenophora tritici-repentis Pt-1C-BFP] gi|187981137|gb|EDU47763.1| conserved [Pyrenophora tritici-repentis Pt-1C-BFP]
  misc_feature (31)..(405): NCBI GI: 154297681 Blast Desc: BC1G_12252 [Botryotinia fuckeliana B05.10] gi|150858381|gb|EDN33573.1| BC1G_12252 [Botryotinia fuckeliana B05.10]
  misc_feature (24)..(405): NCBI GI: 156043901 Blast Desc: SS1G_10954 [Sclerotinia sclerotiorum 1980] gi|154695341|gb|EDN95079.1| SS1G_10954 [Sclerotinia sclerotiorum 1980]
MAPKPVFCEGSPSWIPDTYLADTELHARASALLANNDLRSAITTSFSLRKTDSYVYHAIVATNLAQVQQVVSLGDAHGLHNWYFDEPSPPKKEKAADSNGDSTPNSRSQPLPPPPKADIEAYLSIFSPSNSAPTALRNFTSNAKKGSLRQQIGAHLIEKRYIHPSFTNTLNKLPRIKSKPAPCNPYLTYLSWAITNLEFAGPCSLSERSPHRPPNSQLTLPILMHHFGCVCPSHEALEILRLLADGREIIDVGSGNGYWTRMLRDYYVFHKSNKTTEVPLVTPVDSAQSAWRVNWVSDTIVADGAQYLRETRQGAKDAVLLMVYPIVGGGIAGGSEGGFTRGCLDAFEGDTVAVVGTQNGNGYTGFRSMTMDQFMERERKEWVKVVQVPLPSFPGKDEALFVFQRGERAPKIENGEEENGS

SEQ ID NO: 4351 - DNA, 3614 bp, Muscodor strobelii
  misc_feature: SGI EST ID NO. CUFF.11010.0
  misc_feature: Variant of the nucleotide sequence at SEQ ID NO 4349
tgtcgatatctcacaattttctgatcctcacgtcatagcttacatactgctttagcaagttttctctttctttgtttttctgattttacctcgtatgctagatctctttaaaaggcaaggcatttgaagccaaacagttcatcggcactcgatatacgacatggccccgaagccagtgttttgcgaagggtcaccatcatggataccggacacatacctcgccgacaccgaattacacgcccgcgccagcgcactgctcgccaacaacgacctaagatccgctatcacgacgtctttctcgctacgcaagaccgattcctatgtataccacgccatagtcgctacgaacctagcccaagtccagcaagttgtatctctcggcgacgcccacggactacataattggtatttcgacgaaccatcacctcccaagaaagaaaaagcagcagactccaatggcgactcgacgccaaattcaagatcacaacctctaccgcccccacctaaagccgatatcgaagcctacctatctatattctcaccttcaaactctgccccgacggcattacgaaacttcacatccaacgcgaaaaaaggctccttacggcaacaaataggagcacacctaatagaaaaacgctacatccacccatccttcaccaacacactcaacaagctcccacgcataaaatccaagcccgcaccatgtaacccctacctcacatatttatcctgggcaatcacaaatctcgaattcgcaggaccctgttccctatcagagcgtagtccacacagaccgccaaactcccagctgaccctacccatactgatgcaccacttcggctgcgtctgtccgtcacacgaggctctagagatcttgcggttgctcgcagatggacgggagattatagatgtcgggagcggaaacgggtattggactaggatgctgcgagactactatgtgtttcacaagtctaataagacgactgaggtgccacttgtcacaccggttgatagtgcgcagagtgcttggagggttaattgggtgtctgatacgattgttgctgatggcgctcagtatttaagggagactagacagggggcgaaggatgcggtgctgttgatggtctatcctattgtgggcggtgggattgcgggtggtagtgagggtggtttcacaagggggtgtttggatgcgtttgagggcgatacggtcgcggtggttggcacgcagaatgggaatggatatacggggtttcggagcatgactatggatcagtttatggaaagggagagaaaagaatgggtgaaggttgttcaggtgccgttgccgagttttccggggaaggatgaggcgctgtttgtttttcaaagaggtgaaagggcgccgaagattgagaatggggaagaggagaacgggagttaggaatcggaataggttaggatggggttggggtaatgataatattagatttgtgcacattgagtctccggtatgtacctgcttatatgtctcgtcaccaaatcgtcactcttttcttctttgccttaccagctttccatgccttgatcatctcgccctgcattactccgtctatatatccttctcctactaatcggtatgtttcttcactatcggttggtcgtagtatgtatggtacacgtcccccgaaaagtatgaagacaacgtctcctaccatcgtgtttgagggtccgaggccgataactccgttttcgaggtagaaccgacaccgatttggcataattagggtctcgggggataggcgtggagattggagcgtcgaaaaaagggcccgacggagggatttcgatacttcgctgttagagtgtgttctagattgagggtgggaatcgagtacggagtttacgcgccagaggtagatacctgatacaatgagatgctcggaggatcttgggtcttcgatgaaggtatgatgcgtccctgccgaggcgttaaaccgactacgtgccgcgaagcaggctagtatttctgaggagccggggttcgaagatatgtcccattggggcacccatgatgcgtgagttggcgagatagtctgagactggacatatgataggatatccagattaagtgtagattttatgagtttagtggccagagaaaggtagacagcttgcgttgttacagagtagtctgcgtacatgaagagtaaatctgagagtgttgttggttgttgaagggtccttgagaggatgtagcagacgcgagagaggaaacccgatagaccttggatgaaagagctagagagcaataggccagatgagacaaaagttagatgatagggaaggatgaggacaattagggtcattgccaatgtgtgagatgagaagacgaatgatgagaagatgtgatttatgaggtatcctagtgcaaaggcctgtgagatgaatgagctgtatttttgccatggaaaagattgatattgtaaattgcgttgcgtcttcactcgtcggattggtgtgttgagcatggcgtagactttgtcccttggatcactggctttgaaatttcgtgtcagctgcaaaagttctggagttttatttaagctagagatcgatctgcaccatgtcatagtgacgacattctgcaagccgttcatcttgagcttgcgctgagggagcccgctgttgtatagcattgctacagcggttgtgagcacattattccatgggacgtatgtttgtccgatcaagacgcgcgcggtcttgcttgaattcgcctcttgaattacccagatcctactgaaccaaggattatcaaagaatagaccgagaattggccagataggagctcccggtttaacaagtgaggggttgtctccgaatttcataagatatctgcagagtgctgtcgtttggtggggagacagattggagtgacatggacggataaatattgtcacgattgaagctttgcgatatatgtgcctcatgagattaacctgcgtctttctttcttgtagatcggattgattgatacatagtgcgtcgacccaaaggatcgtacattttgtggaatggcggatgccggcgagtgcttggtgaaggttctctgagattttgagcgagcgatcatcgcatatgagttgatggttaggatctccaatgccccagacgtaggacaaggcctggaattcggggattcttgtttcctgccagccgattctccgtctttcttcctgccaggtgagtccatctaatcgaggtcgagatatttgaatatcatgccagttgactattccggattgaaatgttcgaataagttgatgttctgtgagagtgcagtggagtgcatctgaagagctgccgggctgaagggtcaggagccggaaggctcctaagctgtccagtggtgtgtaggcgtattgcttcatttgtatggcatgaactcatcaggtctttaagtaagcatcttgatttgacgtgaataagaagttgttaactacatgtaagcctcgcgttaggaggacgtcgtatttgggggttcgtgtggaggcccttgcacgatcgtggctatgttcgacttcgccctcagatcttcagtggctgcatcggcatgacctgcatactag

SEQ ID NO: 4352 - DNA, 597 bp, Muscodor strobelii
  misc_feature: SGI cDNA ID NO. 561138
  misc_feature: Encodes the peptide sequence at SEQ ID NO 4353
atgcaccacttcggctgcgtctgtccgtcacacgaggctctagagatcttgcggttgctcgcagatggacgggagattatagatgtcgggagcggaaacgggtattggactaggatgctgcgagactactatgtgtttcacaagtctaataagacgactgaggtgccacttgtcacaccggttgatagtgcgcagagtgcttggagggttaattgggtgtctgatacgattgttgctgatggcgctcagtatttaagggagactagacagggggcgaaggatgcggtgctgttgatggtctatcctattgtgggcggtgggattgcgggtggtagtgagggtggtttcacaagggggtgtttggatgcgtttgagggcgatacggtcgcggtggttggcacgcagaatgggaatggatatacggggtttcggagcatgactatggatcagtttatggaaagggagagaaaagaatgggtgaaggttgttcaggtgccgttgccgagttttccggggaaggatgaggcgctgtttgtttttcaaagaggtgaaagggcgccgaagattgagaatggggaagaggagaacgggagttag

SEQ ID NO: 4353 - protein, 198 aa, Muscodor strobelii
  misc_feature: SGI Peptide ID NO. 561138
  misc_feature (1)..(190): NCBI GI: 256734008 Blast Desc: NECHADRAFT_59031 [Nectria haematococca mpVI 77-13-4]
  misc_feature (1)..(192): NCBI GI: 38567168 Blast Desc: [Neurospora crassa]
  misc_feature (1)..(192): NCBI GI: 164427835 Blast Desc: NCU02651 [Neurospora crassa OR74A] gi|157071904|gb|EAA36188.2| conserved [Neurospora crassa OR74A]
  misc_feature (1)..(177): NCBI GI: 46128725 Blast Desc: FG08740.1 [Gibberella zeae PH-1]
  misc_feature (1)..(173): NCBI GI: 149209931 Blast Desc: MGCH7_ch7g447 [Magnaporthe grisea 70-15] gi|86196402|gb|EAQ71040.1| MGCH7_ch7g447 [Magnaporthe grisea 70-15]
  misc_feature (2)..(184): NCBI GI: 169606087 Blast Desc: SNOG_06077 [Phaeosphaeria nodorum SN15] gi|160706914|gb|EAT87141.2| SNOG_06077 [Phaeosphaeria nodorum SN15]
  misc_feature (2)..(182): NCBI GI: 189197703 Blast Desc: conserved [Pyrenophora tritici-repentis Pt-1C-BFP] gi|187981137|gb|EDU47763.1| conserved [Pyrenophora tritici-repentis Pt-1C-BFP]
  misc_feature (1)..(155): NCBI GI: 145610107 Blast Desc: MGG_02704 [Magnaporthe grisea 70-15] gi|145017489|gb|EDK01852.1| MGG_02704 [Magnaporthe grisea 70-15]
  misc_feature (2)..(182): NCBI GI: 154297681 Blast Desc: BC1G_12252 [Botryotinia fuckeliana B05.10] gi|150858381|gb|EDN33573.1| BC1G_12252 [Botryotinia fuckeliana B05.10]
  misc_feature (1)..(182): NCBI GI: 171684417 Blast Desc: protein product [Podospora anserina] gi|170942169|emb|CAP67821.1| protein product [Podospora anserina]
MHHFGCVCPSHEALEILRLLADGREIIDVGSGNGYWTRMLRDYYVFHKSNKTTEVPLVTPVDSAQSAWRVNWVSDTIVADGAQYLRETRQGAKDAVLLMVYPIVGGGIAGGSEGGFTRGCLDAFEGDTVAVVGTQNGNGYTGFRSMTMDQFMERERKEWVKVVQVPLPSFPGKDEALFVFQRGERAPKIENGEEENGS

SEQ ID NO: 4354 - DNA, 3614 bp, Muscodor strobelii; identical to SEQ ID NO: 4351
  misc_feature: SGI EST ID NO. CUFF.11010.0
  misc_feature: Variant of the nucleotide sequence at SEQ ID NO 4352

SEQ ID NO: 4355 - DNA, 2559 bp, Muscodor strobelii
  misc_feature: SGI cDNA ID NO. 561139
  misc_feature: Encodes the peptide sequence at SEQ ID NO 4356
atggctgctaccgattggggcggccctgccaagggtatcgctcgatcgctgacccctactgccaacgagttcatcccggttcccttcaagtcccaaccccaggtccttgacgcaaccttcgtcacacagactgttcccgacgttcctaacacggctggtgtcgttgccgtttgtgctgtccaggacacccaagccagcatggaagagatgggttggtacattgcagacttcttggccttcaaatcactggtctgtggcgagaaccatcccgcatcgcagtcttggctctcaatgtgcgacgttgaggctgaggtacagcgccatcctgagctgggaatccacggcaccagcaaccgacgagttgtttccgaggcaagcaagcccaagacttttaccaaaaatggtgtcgagcaagccagagaggacaatgtcaagacctacaccaccgtcactgatctcaagaccaagttcgttgaggctgcaaaggcgaagatcaggatctgcaagcagcgtggctaccctgtcatctttatcatctgcggccttacttcacttcagcaagatgtttatctcggaagcctcgaagacaagtggagcttctgcgatatccgtgctagtctcggcgagggcatcgacagtgtacaagctgtcttcatcacgccctccttgttctcagctggctggcaagtcaatcccatgttcgggggacgccctttccctcttcgcgccagtcgcaacgagtttctcgcaagacagtttggaggcttgttggccaaggatcttgtcgtcaactatttcggatggcgttgccctatgttggatctgggcaaagtagatcgacatgttcgtgagaagcttggagccaagcccactccacttctcgttgaggatgaagtcacgcacaaaatcgggaaagctgagttgctccttcactctcgcctgtctggccgatgcactcgaaaccccaacgatcatgctttctcctttgacatcaagcacgacgagtggtcgcaattgattgcagaccgacgagaccttggtctggattactatgctgagaaatgggacaagctcccgcaagccacaggccaggctccgattggcctttacttcctgggcagcgcgtttggaggcaatattgcctcccagctcaatcatatccttttcctcattgatgagtcattcctggcttggcctggtcattgggcacgacagtttggtgaagacacgaagcgggttatgggtcgttttatgaagaaggcgaaccccgatctacttgattgccacgagatgttcaacatcctagaacatcgcgcaacgacctctgtcctaggtgacaagattgttgagtacttcaaccttccggtcccgaaaaatcaacgatgcagagactgggactgtctcaaatggacaaaggagacctcgaaggaggaccaggtttctatcaccaagtatttcggccctgttcttacaggcgttcctggaccgactgtcccccctggtatgaacacgaacccaatgagcaagctccacacgcgtcttgagaccgcaattacctatgttcgggccgcacttggtctccgctggtcaactttccctgccatgagccacgttgcagttgcccgcatcgatgagttcattcatgaggttcgaatcaagcaagctgagctccttgctggcgaccccaaggtatacgacggtattacttcctggctccgagctattgacatgcccgcccggaccgttgaacgggcaatcgtcgaggcttcgaactcccggggagtggctctaatcaacgccccggaagcgatcgttgatcatgccgactacgaggtcattgtccattcacacgaagaacatctagtctctacggacagacaggatgatatgatgaagccaggcgttccccgcagtaccgttcaagttcatcaggaggaagaggatcattgggaggaagactcgaagcacctagcgcctcagattccgactccgatgcctaggtcgcccttgccgatcctatctcagccagaagagggccccaaagccaccgagcctgcctctggaccagatgatgttggccgccagcagttcctcgctatttgcgctcaacataaaatttcggtagacgaggccttggaatgctttcaagagatgattctcaacaagcgtaaggctgagaacagcgtgattgacccggaagcctcccagcccatagtatctacggtcgcggtatcccgtcctccctctgagactcgcgttggacgtgcgcagtacacctacgaagctagtcccaatgtgaaagaggaagagagtctacaggagaaggaaactatggtgtctcaagatccacctagtgtaaaggcgtccgatgcgggagtgcgaacccctcggaagctcccaggtgttccgcctcatctgtggggaaagaccgatgagaatcaggagtcgcaggtgcagaaccaccaggtcacgcccgttctgactcctcagacaaacaatggttctggccaacccggttctggacggcgaacaccgcctcatttgcgtagtcgaggttga

SEQ ID NO: 4356 - protein, 852 aa, Muscodor strobelii
  misc_feature: SGI Peptide ID NO. 561139
  misc_feature (37)..(602): NCBI GI: 116193207 Blast Desc: CHGG_06321 [Chaetomium globosum CBS 148.51] gi|88182234|gb|EAQ89702.1| CHGG_06321 [Chaetomium globosum CBS 148.51]
  misc_feature (40)..(466): NCBI GI: 171684439 Blast Desc: protein product [Podospora anserina] gi|170942180|emb|CAP67832.1| protein product [Podospora anserina]
  misc_feature (38)..(466): NCBI GI: 238841922 Blast Desc: conserved [Microsporum canis CBS 113480]
  misc_feature (368)..(505): NCBI GI: 149209903 Blast Desc: MGCH7_ch7g433 [Magnaporthe grisea 70-15] gi|86196388|gb|EAQ71026.1| MGCH7_ch7g433 [Magnaporthe grisea 70-15]
  misc_feature (40)..(466): NCBI GI: 261355037 Blast Desc: conserved [Verticillium albo-atrum VaMs.102]
  misc_feature (142)..(365): NCBI GI: 256733500 Blast Desc: [Nectria haematococca mpVI 77-13-4]
  misc_feature (39)..(466): NCBI GI: 238842804 Blast Desc: conserved [Microsporum canis CBS 113480]
  misc_feature (37)..(237): NCBI GI: 225556904 Blast Desc: conserved [Ajellomyces capsulatus G186AR]
  misc_feature (39)..(232): NCBI GI: 169775059 Blast Desc: [Aspergillus oryzae RIB40] gi|83769860|dbj|BAE59995.1| protein product [Aspergillus oryzae]
  misc_feature (249)..(575): NCBI GI: 256724433 Blast Desc: [Nectria haematococca mpVI 77-13-4]
MAATDWGGPAKGIARSLTPTANEFIPVPFKSQPQVLDATFVTQTVPDVPNTAGVVAVCAVQDTQASMEEMGWYIADFLAFKSLVCGENHPASQSWLSMCDVEAEVQRHPELGIHGTSNRRVVSEASKPKTFTKNGVEQAREDNVKTYTTVTDLKTKFVEAAKAKIRICKQRGYPVIFIICGLTSLQQDVYLGSLEDKWSFCDIRASLGEGIDSVQAVFITPSLFSAGWQVNPMFGGRPFPLRASRNEFLARQFGGLLAKDLVVNYFGWRCPMLDLGKVDRHVREKLGAKPTPLLVEDEVTHKIGKAELLLHSRLSGRCTRNPNDHAFSFDIKHDEWSQLIADRRDLGLDYYAEKWDKLPQATGQAPIGLYFLGSAFGGNIASQLNHILFLIDESFLAWPGHWARQFGEDTKRVMGRFMKKANPDLLDCHEMFNILEHRATTSVLGDKIVEYFNLPVPKNQRCRDWDCLKWTKETSKEDQVSITKYFGPVLTGVPGPTVPPGMNTNPMSKLHTRLETAITYVRAALGLRWSTFPAMSHVAVARIDEFIHEVRIKQAELLAGDPKVYDGITSWLRAIDMPARTVERAIVEASNSRGVALINAPEAIVDHADYEVIVHSHEEHLVSTDRQDDMMKPGVPRSTVQVHQEEEDHWEEDSKHLAPQIPTPMPRSPLPILSQPEEGPKATEPASGPDDVGRQQFLAICAQHKISVDEALECFQEMILNKRKAENSVIDPEASQPIVSTVAVSRPPSETRVGRAQYTYEASPNVKEEESLQEKETMVSQDPPSVKASDAGVRTPRKLPGVPPHLWGKTDENQESQVQNHQVTPVLTPQTNNGSGQPGSGRRTPPHLRSRG

SEQ ID NO: 4357 - DNA, 1014 bp, Muscodor strobelii
  misc_feature: SGI cDNA ID NO. 561140
  misc_feature: Encodes the peptide sequence at SEQ ID NO 4358
atgtctgctgcagtcgtagacttcgggctgattgtctttgccaccggcatcgacatcgccgacatcgtgcaactcctctggggattctgggcgttttcaattgcacattcaatttaccacctcgtccgaatcctctacgtctatgacgtcttctacgaccatttcaacgtccaccgaaagaccaagcgtatcaaccactacttgacgaccaaagatggcaggcagccttgggcattagtcaccaattccaacgatgttctcggaaggggcttcgctaagaagcttgccgagcttggtttcaacgtaatcttgcatggccgcgaactcgattctatcaatcgagtgcgctctgagcttgaactacaatacccctcccgatgttttgaagggttccttttcgatattgacaccttcggagctcgagacagcgattccaaggtctctgattgggtcgaagcttttctgagagattatccgctcaaggttttcgtcaactacgcggggcaggtagacaaggcacccagccataccatcgctattaacagcttctcagtggatgatctcgcaagcacaattaaccaatctatggtattcccaatggtcatggccgcggggataacccctatcctggcaaaggagagtccaggtctaatgctcaacatcgaaggcatccagaactcgaccgacttctcgccccccatgcacagatcctacgaagagttcttacgcgccattaccctcagcatggcttgggaacagaaaacgctcaagcaggatgtggaagtcatcgggatcagtggcggccagatcgctggtgttggcaatgagaagcgccccaacttgctccgaccaagcgttgaggccttcgtcattgcatcacttcgacgtgttggctgcggtgagacaacgatcatcccatacttctggcacgctgtagtggcttggttggtctcgcccatcccaagatcgtggcgcgccagattagtgaaggctgaaagagttcagatcgagtga

SEQ ID NO: 4358 - protein, 337 aa, Muscodor strobelii
  misc_feature: SGI Peptide ID NO. 561140
  misc_feature (73)..(329): NCBI GI: 121700733 Blast Desc: short chain dehydrogenase/reductase, [Aspergillus clavatus NRRL 1] gi|119396774|gb|EAW07205.1| short chain dehydrogenase/reductase, [Aspergillus clavatus NRRL 1]
  misc_feature (54)..(321): NCBI GI: 119494437 Blast Desc: short chain dehydrogenase/reductase, [Neosartorya fischeri NRRL 181] gi|119412276|gb|EAW22217.1| short chain dehydrogenase/reductase, [Neosartorya fischeri NRRL 181]
  misc_feature (73)..(310): NCBI GI: 70996520 Blast Desc: short chain dehydrogenase/reductase [Aspergillus fumigatus Af293] gi|66850650|gb|EAL90977.1| short chain dehydrogenase/reductase, [Aspergillus fumigatus Af293] short
  misc_feature (29)..(321): NCBI GI: 261196452 Blast Desc: short chain dehydrogenase/reductase [Ajellomyces dermatitidis SLH14081] gi|239595874|gb|EEQ78455.1| short chain dehydrogenase/reductase [Ajellomyces dermatitidis SLH14081]
  misc_feature (77)..(335): NCBI GI: 255957031 Blast Desc: Pc21g23010 [Penicillium chrysogenum Wisconsin 54-1255] gi|211590979|emb|CAP97198.1| Pc21g23010 [Penicillium chrysogenum Wisconsin 54-1255]
  misc_feature (29)..(322): NCBI GI: 239609447 Blast Desc: short chain dehydrogenase/reductase [Ajellomyces dermatitidis ER-3]
  misc_feature (67)..(329): NCBI GI: 226279029 Blast Desc: estradiol 17-beta-dehydrogenase 12-A [Paracoccidioides brasiliensis Pb01]
  misc_feature (74)..(329): NCBI GI: 225677848 Blast Desc: estradiol 17-beta-dehydrogenase [Paracoccidioides brasiliensis Pb03] gi|226287415|gb|EEH42928.1| estradiol 17-beta-dehydrogenase 12-A [Paracoccidioides brasiliensis Pb18]
  misc_feature (60)..(329): NCBI GI: 258566091 Blast Desc: [Uncinocarpus reesii 1704] gi|237907491|gb|EEP81892.1| [Uncinocarpus reesii 1704]
  misc_feature (77)..(312): NCBI GI: 169615483 Blast Desc: SNOG_10899 [Phaeosphaeria nodorum SN15] gi|160702971|gb|EAT81398.2| SNOG_10899 [Phaeosphaeria nodorum SN15]
  misc_feature (73)..(324): SWISSPROT Homolog: EC 1.1.1.62 Estradiol 17-beta-dehydrogenase
MSAAVVDFGLIVFATGIDIADIVQLLWGFWAFSIAHSIYHLVRILYVYDVFYDHFNVHRKTKRINHYLTTKDGRQPWALVTNSNDVLGRGFAKKLAELGFNVILHGRELDSINRVRSELELQYPSRCFEGFLFDIDTFGARDSDSKVSDWVEAFLRDYPLKVFVNYAGQVDKAPSHTIAINSFSVDDLASTINQSMVFPMVMAAGITPILAKESPGLMLNIEGIQNSTDFSPPMHRSYEEFLRAITLSMAWEQKTLKQDVEVIGISGGQIAGVGNEKRPNLLRPSVEAFVIASLRRVGCGETTIIPYFWHAVVAWLVSPIPRSWRARLVKAERVQIE

SEQ ID NO: 4359 - DNA, 2214 bp, Muscodor strobelii
  misc_feature: SGI cDNA ID NO. 561141
  misc_feature: Reduced expression when VOC is produced
  misc_feature: Encodes the peptide sequence at SEQ ID NO 4360
atggttgtctcctctatgcagcaccatccccaccattcgcagggtccggcgcctccccaacacctccagcaacaccaacgaccttcaagcattgttcaccagcagcatcaccaggcacccccggcgcagtcgcagcacccctccgcctactcgtcgcattctatccagccgtatcagacgtctggccacaactccagtgcccagcataaccaagatctgccgtattacgcccatcaaagtccttacagcactcccggcacgaccagcggatacacatccgcagacacatccgacatgatggccgcagctcagatgcctcgaccgtatcccccaatgtcctatcacacgccgcagtcaaactctccagcttcagtcgcgtcgccatcggcgcatgagcaccgcagcatctatggccagccgccctcccaattgcagcatcaacccatgtactatggcgcacaacaaccgcagtactcatccatgccgccgcaggctccctcaccgtaccaacagcatgcgccacagcctcaccagtcaatggcgtcgcagcccagcatgatgatgtctcagaacggcccacaacaacaccagatgccaccccacgccagccagcatggccagagcgggatgacgggaagtccaagacacgccaaattggaacctcaaatgccaccgcaactacagcgccctgcgtctggccacctcggtactcctcaacccaaccagaatggcggacagctcacaacacccaccggatctacaacgccaggcatcaacaacaatgctgcccctggaccaatccctgccacaacgcccctcgtggtgaggcaagacaataacggtgtgcagtggattgcgtttgagtattcgcgtgaccgtgtcaagatggaatacacgatacggtgtgacgtggagtcggtcaataccgatgagctgggcgccgaattcaaaactgagaactgtgtatacccgcgagcatgctgcccgaaagaccagtatcgcggaaatcgcctccagtatgagacggaatgcaacacagtgggctgggctctggcgcagctcaacccgtgcctgcgcggcaagagaggtcttattcaaagagctgttgacagctggaggaacagcaaccaggatcccaggcttcggagccgtcgcgtgcgccgcatggccaagatgaacaaccgaaaggctgtctcggcaccccatccttcgcacatgggccctggggctcctggcatgtctactcctgggtccatgggccccagcggcggcacccccatgggaaaacccggaatgggcggcatgggctcacagatgcaccaccatgctcatgaaggcagcgcaccgggcgcaggagacgaagtcggggatggagagtacatgagtgaatctcaccaccatcatcaagcccccggcggaccgggatccggatcgccagacgatatccgtcccgcccatgtctttaccgggtatcctcaacagtatcccagtcatgcatcttcgggatcatccatgccacccattcacgatggccttggtggtcctcatcacggtgcgatcgctgccaagcgccatagtcaagatgatgatgatgtaacccctgatggcctgtttcctgatctcccagagtccaagaagcgcaaattcattcttgttgaagacaacaagcgtggggggcgattgcgcgtacgcgtgcaactggagggcgtcgacaccaaggagattcccgactccttccgtaagcggtcttccgtcttccctcgcagctactttccccgtgagatgcagagcccgccaccaagtgccactggtagtcgtttcttcgaagacgatcttagtgacggtgagatggaagtggacggtggtagcaccggtcgctcaaggaccaatcgtgccagagactgcgttactgtgaaagtgcccatgtccgacggagttgagggggaagtgtctattccaaggactagaaaaggagaccggacgaaagaggtcaggctgaacgatctgggttatcggatggcttggcttcagggtcgcccgtttgcaggtagaaccattttcctgcagcgtgctctggactgctaccgtaacaagacacgcagtgctgccgagaatgtcatgatggacatcaaggctgctacacctcattttgaaactcgagttggcaagcgacgatggaccgaacgcattggcgccgataaagacgatgcctag

SEQ ID NO: 4360 - protein, 737 aa, Muscodor strobelii
  misc_feature: SGI Peptide ID NO. 561141
  misc_feature (22)..(736): NCBI GI: 256734003 Blast Desc: NECHADRAFT_59021 [Nectria haematococca mpVI 77-13-4]
  misc_feature (20)..(736): NCBI GI: 46128711 Blast Desc: FG08733.1 [Gibberella zeae PH-1]
  misc_feature (19)..(736): NCBI GI: 149209919 Blast Desc: MGCH7_ch7g441 [Magnaporthe grisea 70-15] gi|86196396|gb|EAQ71034.1| MGCH7_ch7g441 [Magnaporthe grisea 70-15]
  misc_feature (1)..(730): NCBI GI: 85111531 Blast Desc: NCU02644 [Neurospora crassa OR74A] gi|28925736|gb|EAA34745.1| conserved [Neurospora crassa OR74A]
  misc_feature (1)..(735): NCBI GI: 116193235 Blast Desc: CHGG_06335 [Chaetomium globosum CBS 148.51] gi|88182248|gb|EAQ89716.1| CHGG_06335 [Chaetomium globosum CBS 148.51]
  misc_feature (3)..(728): NCBI GI: 154296590 Blast Desc: BC1G_12703 [Botryotinia fuckeliana B05.10] gi|150843286|gb|EDN18479.1| BC1G_12703 [Botryotinia fuckeliana B05.10]
  misc_feature (27)..(728): NCBI GI: 156058976 Blast Desc: SS1G_03500 [Sclerotinia sclerotiorum 1980] gi|154701287|gb|EDO01026.1| SS1G_03500 [Sclerotinia sclerotiorum 1980]
  misc_feature (72)..(734): NCBI GI: 189188722 Blast Desc: conserved [Pyrenophora tritici-repentis Pt-1C-BFP] gi|187972306|gb|EDU39805.1| conserved [Pyrenophora tritici-repentis Pt-1C-BFP]
  misc_feature (75)..(737): NCBI GI: 240109679 Blast Desc: CPC735_031840 [Coccidioides posadasii C735 delta SOWgp]
  misc_feature (74)..(729): NCBI GI: 239612072 Blast Desc: conserved [Ajellomyces dermatitidis ER-3]
  misc_feature: Useful for introducing or modulating the production of volatile compounds
MVVSSMQHHPHHSQGPAPPQHLQQHQRPSSIVHQQHHQAPPAQSQHPSAYSSHSIQPYQTSGHNSSAQHNQDLPYYAHQSPYSTPGTTSGYTSADTSDMMAAAQMPRPYPPMSYHTPQSNSPASVASPSAHEHRSIYGQPPSQLQHQPMYYGAQQPQYSSMPPQAPSPYQQHAPQPHQSMASQPSMMMSQNGPQQHQMPPHASQHGQSGMTGSPRHAKLEPQMPPQLQRPASGHLGTPQPNQNGGQLTTPTGSTTPGINNNAAPGPIPATTPLVVRQDNNGVQWIAFEYSRDRVKMEYTIRCDVESVNTDELGAEFKTENCVYPRACCPKDQYRGNRLQYETECNTVGWALAQLNPCLRGKRGLIQRAVDSWRNSNQDPRLRSRRVRRMAKMNNRKAVSAPHPSHMGPGAPGMSTPGSMGPSGGTPMGKPGMGGMGSQMHHHAHEGSAPGAGDEVGDGEYMSESHHHHQAPGGPGSGSPDDIRPAHVFTGYPQQYPSHASSGSSMPPIHDGLGGPHHGAIAAKRHSQDDDDVTPDGLFPDLPESKKRKFILVEDNKRGGRLRVRVQLEGVDTKEIPDSFRKRSSVFPRSYFPREMQSPPPSATGSRFFEDDLSDGEMEVDGGSTGRSRTNRARDCVTVKVPMSDGVEGEVSIPRTRKGDRTKEVRLNDLGYRMAWLQGRPFAGRTIFLQRALDCYRNKTRSAAENVMMDIKAATPHFETRVGKRRWTERIGADKDDA

SEQ ID NO: 4361 - DNA, 3745 bp, Muscodor strobelii
  misc_feature: SGI EST ID NO. CUFF.11819.4
  misc_feature: Variant of the nucleotide sequence at SEQ ID NO 4359
gtcaacgcgcatgattcaaatatatgccgttgcattagttctggtggttaatttcgcgactcgacttatcgatatctgcttctatttatacacttcttgtattgctgttttattagcatcattcccgtcgatctgacacggtcggttgcatggcgactgacctgttaacatagttcttgcttcacgaattagttaggacaccaacaatcactggtaccccgagtcactagacctgaacgtggtttacagatcaaacgaattgtctttggccaagcaccaccacacatccatattcagacagaatcactgcaatgatcatgaaaatggcacaacatcgacaggctcccagcccatatgttaaagaggaacaacacacagacaatcaccatccccaccattcgcagggtccggcgcctccccaacacctccagcaacaccaacgaccttcaagcattgttcaccagcagcatcaccaggcacccccggcgcagtcgcagcacccctccgcctactcgtcgcattctatccagccgtatcagacgtctggccacaactccagtgcccagcataaccaagatctgccgtattacgcccatcaaagtccttacagcactcccggcacgaccagcggatacacatccgcagacacatccgacatgatggccgcagctcagatgcctcgaccgtatcccccaatgtcctatcacacgccgcagtcaaactctccagcttcagtcgcgtcgccatcggcgcatgagcaccgcagcatctatggccagccgccctcccaattgcagcatcaacccatgtactatggcgcacaacaaccgcagtactcatccatgccgccgcaggctccctcaccgtaccaacagcatgcgccacagcctcaccagtcaatggcgtcgcagcccagcatgatgatgtctcagaacggcccacaacaacaccagatgccaccccacgccagccagcatggccagagcgggatgacgggaagtccaagacacgccaaattggaacctcaaatgccaccgcaactacagcgccctgcgtctggccacctcggtactcctcaacccaaccagaatggcggacagctcacaacacccaccggatctacaacgccaggcatcaacaacaatgctgcccctggaccaatccctgccacaacgcccctcgtggtgaggcaagacaataacggtgtgcagtggattgcgtttgagtattcgcgtgaccgtgtcaagatggaatacacgatacggtgtgacgtggagtcggtcaataccgatgagctgggcgccgaattcaaaactgagaactgtgtatacccgcgagcatgctgcccgaaagaccagtatcgcggaaatcgcctccagtatgagacggaatgcaacacagtgggctgggctctggcgcagctcaacccgtgcctgcgcggcaagagaggtcttattcaaagagctgttgacagctggaggaacagcaaccaggatcccaggcttcggagccgtcgcgtgcgccgcatggccaagatgaacaaccgaaaggctgtctcggcaccccatccttcgcacatgggccctggggctcctggcatgtctactcctgggtccatgggccccagcggcggcacccccatgggaaaacccggaatgggcggcatgggctcacagatgcaccaccatgctcatgaaggcagcgcaccgggcgcaggagacgaagtcggggatggagagtacatgagtgaatctcaccaccatcatcaagcccccggcggaccgggatccggatcgccagacgatatccgtcccgcccatgtctttaccgggtatcctcaacagtatcccagtcatgcatcttcgggatcatccatgccacccattcacgatggccttggtggtcctcatcacggtgcgatcgctgccaagcgccatagtcaagatgatgatgatgtaacccctgatggcctgtttcctgatctcccagagtccaagaagcgcaaattcattcttgttgaagacaacaagcgtggggggcgattgcgcgtacgcgtgcaactggagggcgtcgacaccaaggagattcccgactccttccgtaagcggtcttccgtcttccctcgcagctactttccccgtgagatgcagagcccgccaccaagtgccactggtagtcgtttcttcgaagacgatcttagtgacggtgagatggaagtggacggtggtagcaccggtcgctcaaggaccaatcgtgccagagactgcgttactgtgaaagtgcccatgtccgacggagttgagggggaagtgtctattccaaggactagaaaaggagaccggacgaaagaggtcaggctgaacgatctgggttatcggatggcttggcttcagggtcgcccgtttgcaggtagaaccattttcctgcagcgtgctctggactgctaccgtaacaagacacgcagtgctgccgagaatgtcatgatggacatcaaggctgctacacctcattttgaaactcgagttggcaagcgacgatggaccgaacgcattggcgccgataaagacgatgcctagctcatgagcgtcttatgtgtcaacttcactgtccatttcagagtattgtccataacggcgatacttgctgtttgtcagtttgtgtttcgccggctcggctaacatgggcatgctcaacaaaagtattgcgcagagtttgcatttctgcgatttgatattaccattgcatcttcaacacgactgtaacataaccatatatcgcaccaaaaaacttcacgatggaacgacctggatgatctcgcatcactacatacacttgagcattatggcatcgggaacaaaaaggattcaggagaaaccggccccacactcacaatacgcatcgaaaatctccagctgttgctggaagtcgatataccatgatgaccggcgcgccgtcctgcagctgtactttttgcccgttgtcatctatgtcactcaccagtctttctgttcgccacgccatgggccgtatattgtccgagaaggcgttgttacagcttgatttgatttgagacgatcttatccttgttttcacctggcttactgctacgatgatagatatggtcaattttcatttcaaaagtcctttttcgttttctttttcacccgcgatattgcgcggggtgtggatgttgaaaacgctgttgctgtggaagataccattcgtgttctgttgttgttaattttatttatgttagataagtcttgtgggtgatttaacatgataattgggtgcttctatactattaatggccgaggttttcactgatactactgcattctcgtaatgagacttaactgtgctgtacttagacgtatgtgagtcaagaattgaagacggatatagagagcttgtgaggtcgattgtgtaacctgcagggtcttaagaaatgttgcgcaacggcgccagtcacaatagccgaacatgcgtatgggacggggaaatgcgtggctgtagggctgcgccgggtcgcatgggctgcttgtcgggcacgaaaaggaagctcaagtggagttcgggagggggagctctcttgtcacgatgtatgcccaaaaggtgaatgcccaattgctcaatcagatgccgatcctgcaattcaggtcttgggagccgggggaggtggtggaggttcctgggcgcgagccggggttcccaagctcgcgatgcccagtcgttcaacggcggg

SEQ ID NO: 4362 - DNA, 873 bp, Muscodor strobelii
  misc_feature: SGI cDNA ID NO. 561142
  misc_feature: Encodes the peptide sequence at SEQ ID NO 4363
atgctgactcccgagcctctgacaggggatggagagtacatgagtgaatctcaccaccatcatcaagcccccggcggaccgggatccggatcgccagacgatatccgtcccgcccatgtctttaccgggtatcctcaacagtatcccagtcatgcatcttcgggatcatccatgccacccattcacgatggccttggtggtcctcatcacggtgcgatcgctgccaagcgccatagtcaagatgatgatgatgtaacccctgatggcctgtttcctgatctcccagagtccaagaagcgcaaattcattcttgttgaagacaacaagcgtggggggcgattgcgcgtacgcgtgcaactggagggcgtcgacaccaaggagattcccgactccttccgtaagcggtcttccgtcttccctcgcagctactttccccgtgagatgcagagcccgccaccaagtgccactggtagtcgtttcttcgaagacgatcttagtgacggtgagatggaagtggacggtggtagcaccggtcgctcaaggaccaatcgtgccagagactgcgttactgtgaaagtgcccatgtccgacggagttgagggggaagtgtctattccaaggactagaaaaggagaccggacgaaagaggtcaggctgaacgatctgggttatcggatggcttggcttcagggtcgcccgtttgcaggtagaaccattttcctgcagcgtgctctggactgctaccgtaacaagacacgcagtgctgccgagaatgtcatgatggacatcaaggctgctacacctcattttgaaactcgagttggcaagcgacgatggaccgaacgcattggcgccgataaagacgatgcctag

SEQ ID NO: 4363 - protein, 290 aa, Muscodor strobelii
  misc_feature: SGI Peptide ID NO. 561142
  misc_feature (8)..(289): NCBI GI: 46128711 Blast Desc: FG08733.1 [Gibberella zeae PH-1]
  misc_feature (8)..(289): NCBI GI: 256734003 Blast Desc: NECHADRAFT_59021 [Nectria haematococca mpVI 77-13-4]
  misc_feature (8)..(289): NCBI GI: 149209919 Blast Desc: MGCH7_ch7g441 [Magnaporthe grisea 70-15] gi|86196396|gb|EAQ71034.1| MGCH7_ch7g441 [Magnaporthe grisea 70-15]
  misc_feature (26)..(283): NCBI GI: 85111531 Blast Desc: NCU02644 [Neurospora crassa OR74A] gi|28925736|gb|EAA34745.1| conserved [Neurospora crassa OR74A]
  misc_feature (22)..(283): NCBI GI: 261353263 Blast Desc: conserved [Verticillium albo-atrum VaMs.102]
  misc_feature (24)..(289): NCBI GI: 171684407 Blast Desc: protein product [Podospora anserina] gi|170942164|emb|CAP67816.1| protein product [Podospora anserina]
  misc_feature (58)..(290): NCBI GI: 145610111 Blast Desc: MGG_12608 [Magnaporthe grisea 70-15] gi|145017492|gb|EDK01855.1| MGG_12608 [Magnaporthe grisea 70-15]
  misc_feature (8)..(288): NCBI GI: 116193235 Blast Desc: CHGG_06335 [Chaetomium globosum CBS 148.51] gi|88182248|gb|EAQ89716.1| CHGG_06335 [Chaetomium globosum CBS 148.51]
  misc_feature (11)..(287): NCBI GI: 189188722 Blast Desc: conserved [Pyrenophora tritici-repentis Pt-1C-BFP] gi|187972306|gb|EDU39805.1| conserved [Pyrenophora tritici-repentis Pt-1C-BFP]
  misc_feature (5)..(282): NCBI GI: 239612072 Blast Desc: conserved [Ajellomyces dermatitidis ER-3]
MLTPEPLTGDGEYMSESHHHHQAPGGPGSGSPDDIRPAHVFTGYPQQYPSHASSGSSMPPIHDGLGGPHHGAIAAKRHSQDDDDVTPDGLFPDLPESKKRKFILVEDNKRGGRLRVRVQLEGVDTKEIPDSFRKRSSVFPRSYFPREMQSPPPSATGSRFFEDDLSDGEMEVDGGSTGRSRTNRARDCVTVKVPMSDGVEGEVSIPRTRKGDRTKEVRLNDLGYRMAWLQGRPFAGRTIFLQRALDCYRNKTRSAAENVMMDIKAATPHFETRVGKRRWTERIGADKDDA

SEQ ID NO: 4364 - DNA, 3745 bp, Muscodor strobelii; identical to SEQ ID NO: 4361
  misc_feature: SGI EST ID NO. CUFF.11819.4
  misc_feature: Variant of the nucleotide sequence at SEQ ID NO 4362

SEQ ID NO: 4365 - DNA, 1383 bp, Muscodor strobelii
  misc_feature: SGI cDNA ID NO. 561143
  misc_feature: Reduced expression when VOC is produced
  misc_feature: Encodes the peptide sequence at SEQ ID NO 4366
atggttgtctcctctatgcagcaccatccccaccattcgcagggtccggcgcctccccaacacctccagcaacaccaacgaccttcaagcattgttcaccagcagcatcaccaggcacccccggcgcagtcgcagcacccctccgcctactcgtcgcattctatccagccgtatcagacgtctggccacaactccagtgcccagcataaccaagatctgccgtattacgcccatcaaagtccttacagcactcccggcacgaccagcggatacacatccgcagacacatccgacatgatggccgcagctcagatgcctcgaccgtatcccccaatgtcctatcacacgccgcagtcaaactctccagcttcagtcgcgtcgccatcggcgcatgagcaccgcagcatctatggccagccgccctcccaattgcagcatcaacccatgtactatggcgcacaacaaccgcagtactcatccatgccgccgcaggctccctcaccgtaccaacagcatgcgccacagcctcaccagtcaatggcgtcgcagcccagcatgatgatgtctcagaacggcccacaacaacaccagatgccaccccacgccagccagcatggccagagcgggatgacgggaagtccaagacacgccaaattggaacctcaaatgccaccgcaactacagcgccctgcgtctggccacctcggtactcctcaacccaaccagaatggcggacagctcacaacacccaccggatctacaacgccaggcatcaacaacaatgctgcccctggaccaatccctgccacaacgcccctcgtggtgaggcaagacaataacggtgtgcagtggattgcgtttgagtattcgcgtgaccgtgtcaagatggaatacacgatacggtgtgacgtggagtcggtcaataccgatgagctgggcgccgaattcaaaactgagaactgtgtatacccgcgagcatgctgcccgaaagaccagtatcgcggaaatcgcctccagtatgagacggaatgcaacacagtgggctgggctctggcgcagctcaacccgtgcctgcgcggcaagagaggtcttattcaaagagctgttgacagctggaggaacagcaaccaggatcccaggcttcggagccgtcgcgtgcgccgcatggccaagatgaacaaccgaaaggctgtctcggcaccccatccttcgcacatgggccctggggctcctggcatgtctactcctgggtccatgggccccagcggcggcacccccatgggaaaacccggaatgggcggcatgggctcacagatgcaccaccatgctcatgaaggcagcgcaccgggcgcaggagacgaagtcggtatgtaccagatgtga

SEQ ID NO: 4366 - protein, 460 aa, Muscodor strobelii
  misc_feature: SGI Peptide ID NO. 561143
  misc_feature (22)..(456): NCBI GI: 256734003 Blast Desc: NECHADRAFT_59021 [Nectria haematococca mpVI 77-13-4]
  misc_feature (15)..(458): NCBI GI: 171684405 Blast Desc: protein product [Podospora anserina] gi|170942163|emb|CAP67815.1| protein product [Podospora anserina]
  misc_feature (1)..(456): NCBI GI: 116193235 Blast Desc: CHGG_06335 [Chaetomium globosum CBS 148.51] gi|88182248|gb|EAQ89716.1| CHGG_06335 [Chaetomium globosum CBS 148.51]
  misc_feature (20)..(456): NCBI GI: 46128711 Blast Desc: FG08733.1 [Gibberella zeae PH-1]
  misc_feature (1)..(445): NCBI GI: 85111531 Blast Desc: NCU02644 [Neurospora crassa OR74A] gi|28925736|gb|EAA34745.1| conserved [Neurospora crassa OR74A]
  misc_feature (19)..(456): NCBI GI: 149209919 Blast Desc: MGCH7_ch7g441 [Magnaporthe grisea 70-15] gi|86196396|gb|EAQ71034.1| MGCH7_ch7g441 [Magnaporthe grisea 70-15]
  misc_feature (3)..(456): NCBI GI: 154296590 Blast Desc: BC1G_12703 [Botryotinia fuckeliana B05.10] gi|150843286|gb|EDN18479.1| BC1G_12703 [Botryotinia fuckeliana B05.10]
  misc_feature (27)..(456): NCBI GI: 156058976 Blast Desc: SS1G_03500 [Sclerotinia sclerotiorum 1980] gi|154701287|gb|EDO01026.1| SS1G_03500 [Sclerotinia sclerotiorum 1980]
  misc_feature (112)..(458): NCBI GI: 145610113 Blast Desc: MGG_12609 [Magnaporthe grisea 70-15] gi|145017493|gb|EDK01856.1| MGG_12609 [Magnaporthe grisea 70-15]
  misc_feature (75)..(456): NCBI GI: 240109679 Blast Desc: CPC735_031840 [Coccidioides posadasii C735 delta SOWgp]
  misc_feature: Useful for introducing or modulating the production of volatile compounds
MVVSSMQHHPHHSQGPAPPQHLQQHQRPSSIVHQQHHQAPPAQSQHPSAYSSHSIQPYQTSGHNSSAQHNQDLPYYAHQSPYSTPGTTSGYTSADTSDMMAAAQMPRPYPPMSYHTPQSNSPASVASPSAHEHRSIYGQPPSQLQHQPMYYGAQQPQYSSMPPQAPSPYQQHAPQPHQSMASQPSMMMSQNGPQQHQMPPHASQHGQSGMTGSPRHAKLEPQMPPQLQRPASGHLGTPQPNQNGGQLTTPTGSTTPGINNNAAPGPIPATTPLVVRQDNNGVQWIAFEYSRDRVKMEYTIRCDVESVNTDELGAEFKTENCVYPRACCPKDQYRGNRLQYETECNTVGWALAQLNPCLRGKRGLIQRAVDSWRNSNQDPRLRSRRVRRMAKMNNRKAVSAPHPSHMGPGAPGMSTPGSMGPSGGTPMGKPGMGGMGSQMHHHAHEGSAPGAGDEVGMYQM

SEQ ID NO: 4367 - DNA, 3745 bp, Muscodor strobelii; identical to SEQ ID NO: 4361
  misc_feature: SGI EST ID NO. CUFF.11819.4
  misc_feature: Variant of the nucleotide sequence at SEQ ID NO 4365

SEQ ID NO: 4368 - DNA, 1962 bp, Muscodor strobelii
  misc_feature: SGI cDNA ID NO. 561144
  misc_feature: Encodes the peptide sequence at SEQ ID NO 4369
atgtctgttgccgtcgcgccagtagtgatacctcccatgccccagcttggaaaggaggtgtacgatgttaatgccccgactgacgccgtcgcggaattgaagcaaagcaccaacatcgccgtttccgagatcactgttcctgagatcaccaaggtggaggaagacacagtcgacgatggttcaaaaccgccaccaccaaaaactatcccagagcaagcccgcgctacagctgaggtcttgaaccgctatcgaatcgaatacaccaatgactgggatattcccgagtctatcgctcatgctcaagttcaagttgaagaggcccttactcaaggcaaccctgtcaacctcgttcttccggcttttccattcaaatcatccaacaagacaaagaaagtcttaggaccatttccagatgaggccgagcgcctctctctactccacctccaaggattgtgcgacggtatcaaggacgctgctgaagttgacgcagttctgaccattgtgtctgacggagttgtctacaatgacattctcggggtttctgacgaggaagtctggaactacggtcaagcccttcgagagatggcaactagtatcggctgccatagcatccgatttgcgcgtctctgtgatctagtcaaaggggatggcaactccgctatgctcgacaaagccatgtatttggaacaggcaggaagttatcgggactcgattcaggcaaacatcccggagggtttcgacgctgttgatgccattgcgaatgatccgaacatcgccaagacctacactggatacaagaagttcctcgccactgagcgcgaggagcgacaaggacgctcacgctcgcaaacgcaaagggagaatgctagcattgcgaagtccatgatcacccgcggaaagctgcaggctttcgccgaaacggtgaaaagaagctttgcaacgtcagtccgcttatcaatccacccctcgaatgacaaggacaagatctccataaagcttctgcctcaagacaatgagatcgccatgacgccatggcatggcgccgtagttcgaggcgccgatggaagcgtgtctatggctcacgctctttctgtcccggcgttcacccacgatatgatcttcaaagacggtcgccctagctacttccgcgagcgctccgatgtattcaactggcctggcatggacttgacttttgagtatctttacccctgcggtatcatgatcaagccagttaaccctacctcgggctacacgctatccagcgtggatatgcagaaggtgagaactctggccgagacctgctcacccattgttcttcgtggctttgccaatactaaagaccgacggacgtatattgcaaaggcgcatgatcttggcgaaatctttatgtggaagtcgctggtgacggttgtcaaagacgcagccaacaccgactcgcgcagctctgttgccttttctagcgaagctatgccaatggtgaaagacgaggtaacaggcgaggagaagaaggtgtctgatcctccgtccgctgctcaacccggcgatgggtacacgctctttgcatcctcggacctctttgtcaaatatcttcctcaggcctacccagtggaaaagctcgaacagttacgatggacgtgcgacagctacgggcactatcaccaccagttatctgacattccactcgtcctacggcatccaactcgcaataccccctgcatgcgctggcactcgccttggcccaagtacaagacggcgtacgggcatgcggagataagcatcgacaacggctcacaggctgttgtcccgatggtcgacactctgctgtacgatcgccgcgtgtgcctacgcttctcgtgggaggaaggcgatgtacttgtttcggataacgtgtctatgttgcacacgcggactagctttaacaatcagcaacccagggaattgtggcgaattcatacctactaa

SEQ ID NO: 4369 - protein, 653 aa, Muscodor strobelii
  misc_feature: SGI Peptide ID NO. 561144
  misc_feature (103)..(370): Pfam Id: PF05141 Pfam Desc: Pyoverdine/dityrosine biosynthesis protein
  misc_feature (103)..(212): Pfam Id: PF05141 Pfam Desc: Pyoverdine/dityrosine biosynthesis protein
  misc_feature (251)..(354): Pfam Id: PF05141 Pfam Desc: Pyoverdine/dityrosine biosynthesis protein
  misc_feature (615)..(651): Pfam Id: PF02668 Pfam Desc: Taurine catabolism dioxygenase TauD, TfdA family
  misc_feature (73)..(651): NCBI GI: 119499011 Blast Desc: pyoverdine/dityrosine biosynthesis protein, [Neosartorya fischeri NRRL 181] gi|119414427|gb|EAW24366.1| pyoverdine/dityrosine biosynthesis protein, [Neosartorya fischeri
  misc_feature (45)..(651): NCBI GI: 121719017 Blast Desc: pyoverdine/dityrosine biosynthesis protein, [Aspergillus clavatus NRRL 1] gi|119404462|gb|EAW14838.1| pyoverdine/dityrosine biosynthesis protein, [Aspergillus clavatus
  misc_feature (73)..(651): NCBI GI: 146323994 Blast Desc: pyoverdine/dityrosine biosynthesis protein [Aspergillus fumigatus Af293] gi|129556376|gb|EAL86038.2| pyoverdine/dityrosine biosynthesis protein, [Aspergillus Af293]
  misc_feature (24)..(651): NCBI GI: 67524297 Blast Desc: AN2606.2 [Aspergillus nidulans FGSC A4] gi|40745555|gb|EAA64711.1| AN2606.2 [Aspergillus nidulans FGSC A4] gi|259488043|tpe|CBF87187.1| TPA: pyoverdine/dityrosine FGSC
  misc_feature (73)..(651): NCBI GI: 159126002 Blast Desc: pyoverdine/dityrosine biosynthesis protein, [Aspergillus fumigatus A1163]
  misc_feature (3)..(651): NCBI GI: 255955579 Blast Desc: Pc21g15320 [Penicillium chrysogenum Wisconsin 54-1255] gi|211590253|emb|CAP96429.1| Pc21g15320 [Penicillium chrysogenum Wisconsin 54-1255]
  misc_feature (71)..(651): NCBI GI: 240106421 Blast Desc: CPC735_059840 [Coccidioides posadasii C735 delta SOWgp]
  misc_feature (103)..(651): NCBI GI: 258578329 Blast Desc: conserved [Uncinocarpus reesii 1704] gi|237903612|gb|EEP78013.1| conserved [Uncinocarpus reesii 1704]
  misc_feature (114)..(651): NCBI GI: 238505850 Blast Desc: pyoverdine/dityrosine biosynthesis protein, [Aspergillus flavus NRRL3357] gi|220690241|gb|EED46591.1| pyoverdine/dityrosine biosynthesis protein, [Aspergillus flavus
  misc_feature (103)..(626): NCBI GI: 119191566 Blast Desc: CIMG_00160 [Coccidioides immitis RS]
MSVAVAPVVIPPMPQLGKEVYDVNAPTDAVAELKQSTNIAVSEITVPEITKVEEDTVDDGSKPPPPKTIPEQARATAEVLNRYRIEYTNDWDIPESIAHAQVQVEEALTQGNPVNLVLPAFPFKSSNKTKKVLGPFPDEAERLSLLHLQGLCDGIKDAAEVDAVLTIVSDGVVYNDILGVSDEEVWNYGQALREMATSIGCHSIRFARLCDLVKGDGNSAMLDKAMYLEQAGSYRDSIQANIPEGFDAVDAIANDPNIAKTYTGYKKFLATEREERQGRSRSQTQRENASIAKSMITRGKLQAFAETVKRSFATSVRLSIHPSNDKDKISIKLLPQDNEIAMTPWHGAVVRGADGSVSMAHALSVPAFTHDMIFKDGRPSYFRERSDVFNWPGMDLTFEYLYPCGIMIKPVNPTSGYTLSSVDMQKVRTLAETCSPIVLRGFANTKDRRTYIAKAHDLGEIFMWKSLVTVVKDAANTDSRSSVAFSSEAMPMVKDEVTGEEKKVSDPPSAAQPGDGYTLFASSDLFVKYLPQAYPVEKLEQLRWTCDSYGHYHHQLSDIPLVLRHPTRNTPCMRWHSPWPKYKTAYGHAEISIDNGSQAVVPMVDTLLYDRRVCLRFSWEEGDVLVSDNVSMLHTRTSFNNQQPRELWRIHTY

SEQ ID NO: 4370 - DNA, 486 bp, Muscodor strobelii
  misc_feature: SGI cDNA ID NO. 561145
  misc_feature: Elevated expression when VOC is produced
  misc_feature: Encodes the peptide sequence at SEQ ID NO 4371
atggcgtcaaatatattcttcgactcggtcgtagtcatacgcatggtacccgtcatcacatcttgtatggcaatgcgtttctctcatgaccaatggttgttcctgagctgcttcctgggggagaaccgcgagaagaccaacgatatcataccctcgtacttcaagaccttcttctctacaggcctcaaagatattggtttcttatactcgctctcaattgcggccggcatttacaacttttacgtgaaacctaacggcgcgtggaagtggtatgctgctggaaccgcgctggccttctttcatatggcatttgcgccgttcatcatgcatcctatcaaggccttacatgacgatcagccaaaggggcaaggtgctactcagctccgcaagtggttggacgtacacgttatcagatcaaacctagcagatgtgcctgcatgggcttgcttcacaattgcttgcataatgtctttgcagccagtttag

SEQ ID NO: 4371 - protein, 161 aa, Muscodor strobelii
  misc_feature: SGI Peptide ID NO. 561145
  misc_feature (1)..(159): NCBI GI: 212544170 Blast Desc: integral membrane protein, [Penicillium marneffei ATCC 18224] gi|210065208|gb|EEA19302.1| integral membrane protein, [Penicillium marneffei ATCC 18224]
  misc_feature (1)..(153): NCBI GI: 242811669 Blast Desc: integral membrane protein, [Talaromyces stipitatus ATCC 10500] gi|218714136|gb|EED13559.1| integral membrane protein, [Talaromyces stipitatus ATCC 10500]
  misc_feature (1)..(153): NCBI GI: 145228559 Blast Desc: An01g01475 [Aspergillus niger] gi|134054679|emb|CAK43520.1| [Aspergillus niger]
  misc_feature (1)..(158): NCBI GI: 241864948 Blast Desc: [Metarhizium anisopliae]
  misc_feature (1)..(155): NCBI GI: 238841279 Blast Desc: conserved [Microsporum canis CBS 113480]
  misc_feature (1)..(158): NCBI GI: 46123481 Blast Desc: FG06118.1 [Gibberella zeae PH-1]
  misc_feature (7)..(153): NCBI GI: 212534222 Blast Desc: conserved [Penicillium marneffei ATCC 18224] gi|210069666|gb|EEA23756.1| conserved [Penicillium marneffei ATCC 18224]
  misc_feature (1)..(138): NCBI GI: 256730046 Blast Desc: NECHADRAFT_102747 [Nectria haematococca mpVI 77-13-4]
  misc_feature (1)..(155): NCBI GI: 119190353 Blast Desc: CIMG_05224 [Coccidioides immitis RS]
  misc_feature (1)..(158): NCBI GI: 256731043 Blast Desc: NECHADRAFT_102832 [Nectria haematococca mpVI 77-13-4]
  misc_feature: Useful for introducing or modulating the production of volatile compounds
MASNIFFDSVVVIRMVPVITSCMAMRFSHDQWLFLSCFLGENREKTNDIIPSYFKTFFSTGLKDIGFLYSLSIAAGIYNFYVKPNGAWKWYAAGTALAFFHMAFAPFIMHPIKALHDDQPKGQGATQLRKWLDVHVIRSNLADVPAWACFTIACIMSLQPV

SEQ ID NO: 4372 - DNA, 1165 bp, Muscodor strobelii
  misc_feature: SGI EST ID NO. CUFF.11100.0
  misc_feature: Variant of the nucleotide sequence at SEQ ID NO 4370
ttcgattcacattctcacgtttgaatttatcaaaatcgctttgtttgaaataggttctaattattgaaaatggcgtcaaatatattcttcgactcggtcgtagtcatacgcatggtacccgtcatcacatcttgtatggcaatgcgtttctctcatgaccaatggttgttcctgagctgcttcctgggggagaaccgcgagaagaccaacgatatcataccctcgtacttcaagaccttcttctctacaggcctcaaagatattggtttcttatactcgctctcaattgcggccggcatttacaacttttacgtgaaacctaacggcgcgtggaagtggtatgctgctggaaccgcgctggccttctttcatatggcatttgcgccgttcatcatgcatcctatcaaggccttacatgacgatcagccaaaggggcaaggtgctactcagctccgcaagtggttggacgtacacgttatcagatcaaacctagcagatgtgcctgcatgggcttgcttcacaattgcttgcataatgtctttgcagccagtttaggcagttttgcgttccaagctacaagctgcactccaagctgcaggatgtacaatcatgcgtatccatcataatcccgctccttaaggaaaactgcacgatcactcaacgcacgaaggatcatttctcatgtcatcatgtgttattcttacatcttgaaatgcgcgacgataaggacacagcaatttcaaacttgtagctaggtcatttctgtctccttcagcagcttgtttttcgtaatcgcacgcagtataatcgaatacattcctgtatatttggtcatcgagcttcacaggcaagttcagtctaccaattgtctaattcctaaaactttcgacggcttggtcgctatcatcgagggtgttgtaaggtatgcatgcgcatctggcatatcgtgagttatatgtgcttcattattgccaagacaacaaactggagaaaatgatgcagaccgacgcaatcttgaccactgacatgatgacgtgcactgttcgacctgcaaagcgtccactagatttgtaccactacgttccacggcgccaagtattgctccgggttctactattgttggtagctagatggagcctacaaacagcaaaaactcgatctgccg

SEQ ID NO: 4373 - DNA, 615 bp, Muscodor strobelii
  misc_feature: SGI cDNA ID NO. 561146
  misc_feature: Reduced expression when VOC is produced
  misc_feature: Encodes the peptide sequence at SEQ ID NO 4374
atgcagaagctgatcactaccatggcattcgccgcattagccggaagcgctgttgctggaaccaacattaccggtccatttgcactgcatatcactggcaagctgaactcaagcattaatggatacgcaggtgcctgccatgctggctacaccgctggtggtcccgtcgccggcgactattactctttctactacaattacacggaatacgaaggtcgcgaatccaaatactacggaaatatcgtctggaatttcacgtatgatcaagatggtcaaactgtaaccttaccatcagccgcggagattactggcacaaactacgctaccaatgtacaatctatcctcatcccaccgggtggcggatctgcacagggcttggagccattctccgccgatgacgatggatcgttctacatcgatggctatttcgacgactcgagcgccaacgctacgcagccaaccaacaaccctactccacgcttgtacaattttcacctctgctttcagtatactgggacttattggtatcactcggtcgcatgggtgacatcggaaccgcctcacaacccttcatgtgagcccatctatctctcgatggcaccgctagcaacctaa

SEQ ID NO: 4374 - protein, 204 aa, Muscodor strobelii
  misc_feature: SGI Peptide ID NO. 561146
  misc_feature (22)..(197): NCBI GI: 171686266 Blast Desc: protein product [Podospora anserina] gi|170943094|emb|CAP68747.1| protein product [Podospora anserina]
  misc_feature (25)..(192): NCBI GI: 164423958 Blast Desc: NCU07569 [Neurospora crassa OR74A] gi|157070305|gb|EAA29378.2| NCU07569 [Neurospora crassa OR74A]
  misc_feature (2)..(191): NCBI GI: 209570344 Blast Desc: [Glomerella graminicola]
  misc_feature: Useful for introducing or modulating the production of volatile compounds
MQKLITTMAFAALAGSAVAGTNITGPFALHITGKLNSSINGYAGACHAGYTAGGPVAGDYYSFYYNYTEYEGRESKYYGNIVWNFTYDQDGQTVTLPSAAEITGTNYATNVQSILIPPGGGSAQGLEPFSADDDGSFYIDGYFDDSSANATQPTNNPTPRLYNFHLCFQYTGTYWYHSVAWVTSEPPHNPSCEPIYLSMAPLAT

SEQ ID NO: 4375 - DNA, 1127 bp, Muscodor strobelii
  misc_feature: SGI EST ID NO. CUFF.11608.0
  misc_feature: Variant of the nucleotide sequence at SEQ ID NO 4373
aaataactaacctgtacctttctggccaccaggctacaccgctggtggtcccgtcgccggcgactattactctttctactacaattacacggaatacgaaggtcgcgaatccaaatactacggaaatatcgtctggaatttcacgtatgatcaagatggtcaaactgtaaccttaccatcagccgcggagattactggcacaaactacgctaccaatgtacaatctatcctcatcccaccgggtggcggatctgcacagggcttggagccattctccgccgatgacgatggatcgttctacatcgatggctatttcgacgactcgagcgccaacgctacgcagccaaccaacaaccctactccacgcttgtacaattttcacctctgctttcagtatactgggacttattggtatcactcggtcgcatgggtgacatcggaaccgcctcacaacccttcatgtgagcccatctatctctcgatggcaccgctagcaacctaaggtgctcatttcttgcttggaacgtggacatgcgatagagagagttcgacggtaataatgttggaaatgaccagaatttagtactaatcatgaacgaatgcgaagagttcctgaaagtattggcaacatacacatacgaacaacccctacaggtataattatcagactctgatggatcaaaggacaatcaaaattgagctcgagaacccttctcgcagacaatcaatattcgttttcggatgcgtagaatctctaagcggaaaagcagtgctatactcgaatccagtgccttctagcttcgtaaataagtcgtgttcgacttatacgcttctctcctattgcaaaagcgacattgtcatcgggctgtacgcgtgtgattcattgcattgaagatcacatcgtaggacaaaacctcacggaaactaaaccttggccgtccatctagcggcacatgtgtcccgcgacaacgtatccagccgtcgggtccatatctgtcgatccgtggtgttgcagtagcatcttctacccttcacgggtatcaatgaaaaagatggtaaatgcgtgggcgaccagataaaaagctatcgtggttcatttattacttatatcaaaatttagatccgcg

SEQ ID NO: 4376 - DNA, 2805 bp, Muscodor strobelii
  misc_feature: SGI cDNA ID NO. 561147
  misc_feature: Reduced expression when VOC is produced
  misc_feature: Encodes the peptide sequence at SEQ ID NO 4377
atggccgacccccgatcccgactctcgggtcggcggtcccctacttacaaccccgcgcgtgcctctatgcccgtgaacattggacacaatctgcaatcatacactgaaaacatccacgctgttcccgcggcacggtacgagtctctgccgagggggttcgatcccaagagccgaagcggaactatgccagtcccgacaacgatcactacgtacaatgtcaccaaagagcccataccgcgaagtcacagcaaggcgcgcacccgatcgtcgactgtcgatgcgctagcgccgaagcctatcattgtaacgacaaaccacccccgaccccacgcgtcctcgagccacagttcgaaccacagcggcaccaggggcaccagtccaccgcgcgactcgtaccgcaccggcgacaactcgtactacgcccagccagcctcctctatccggtcccgcagccatcaccgccactcccaaagctacaatcaaggcgcaccgctgggcgatgagttttcccggctgcgagagcgtactggcggcgctaccgaggacaggttttgggctcctgcgagagctagcaccgacaacttccgcaacgttcgacctcattcattgtacgctactccagctcatgcggcgactcctgctacgccagcttaccacgccgctccggcctatggcaacagctccgcagtggccgactatgaagatgattactatgagtatactaaacccggcgagctggcgaggtatgatctggatcacgaccgagaccagcgtcggagtaggcgggatagctttgaacggccgtactaccgaccccacgtgaacgttgtgagcaacgacactacccggtatgacgctagaccccgagcgaaacctccagcttcttctggcctggagagatacaaccgggcggcagctgctggtgcctacgatcgcccgacagtcactatgcccgcccctccagcagtgccacctccaccaccactggatacacagcgacggcctgctcttctggaaggcccaagaagcccgtccattgagcgccgagaaacacggccacgccccatctctctctaccaagatgcaccaacacgctcgtctcatcccgatgacctttatcgtactcgagatgatgggttccatcgagaccgtcgtgaccgagatgaaggatatcatgacgataatgtcatgacccgaggattcggcattcgtactgacactttggaccaagctcgttcggccagcccacctcctgctcataattatgaagaccgtcgagctcgacgtgagccagttgagcgagactctaagcgcgggtctgacgagacgcttcaccatgtccggtctcctgaccgcgtaacgaatgatgaacgtcgaccccgtgctgacagccgagatcggaaagagggcatcagccgacgggacagcgtccgtgagaaagtctccgctggactcaaaggggctgctgctgctctcgcccctgctatcggtcttggcatcaagagtgaagacaaagtgtcacctcgtcgacgaggatcagacgaggacaggctcgatgctcgtgctcttgagatggtcccctctaaggaaagagaacctcttgataggaagccttctcccagagatgatcccatcgtcgttgagcaacgccgagagcgcggccgggaccggggtgatcccgtttccgagtcgaaggacagagatgccgatagagaaagggaaagagagcgagaacgccagcgtgagcgagaacgggaatatgagagggagcgcgaacgagatcgagaacgagagcgtgaccgcgagcgtgaccgtgagtatgagaaagagagcgccagagagcgcgatcgtaactatgacagggaccagcgcgaacatgatcggcgcgatgccgaagccaagctcaatggtacacaccatgataggagagatcattcgcctgacgatgctgccagcacttcacgaagacgtcatcgaccatcctcagccgccttcgatcctacagatactaagggcctaatggatctgaagaaggaattggcggcgatggacaaccagaccaacacgaccgagagggcagaaaggtcagatagaccgatcggcaaagaaccagtctcggacaaggctctcatggccgcagaagattctgacagatactccgagcctcgcgatgacgaatctcgtggccgagaaatggtaccggcgggtgagaagacagttcgggtagtctctccgccacgagacaagaacgaccagaagcccatcaaaggtattctcaaggcaccgaaagtcagattcccagaggaggataatcctatacgcgaaggtgtcgcacctcacaaagacgacaagaccaaaaaggacaaggatattcctactggtgcccgttggaccaaaatcagccgaaagagggtaaaccccgaagccctcacaattggcaaggagcgcttcgagattcgcgacgattttgtcattgttctacgagtcctgaataaggaagagattcaggcttacgctacagctacagcacagataagagatcgcaaaagaaaagaacatgagagagaaagacaacatgagcgtctctcagacgaggaacaaactcgatctgacgaagaacgacaaaggcggcaccgacaccgtcaagaggccgaggacgacggctatcgccgaggccatgttgtcgatgaccgtcctcgtagacatgatgaggatcggccgaaaaacagcgattatgtgagcagtagccaccaccgccactacgacgctgtcaccgccaatggctcagagcgggaccgtcggtga

SEQ ID NO: 4377 - protein, 934 aa, Muscodor strobelii
  misc_feature: SGI Peptide ID NO. 561147
  misc_feature (620)..(862): NCBI GI: 85117357 Blast Desc: NCU08334 [Neurospora crassa OR74A] gi|28927043|gb|EAA36001.1| [Neurospora crassa OR74A]
  misc_feature (610)..(845): NCBI GI: 256734004 Blast Desc: NECHADRAFT_91820 [Nectria haematococca mpVI 77-13-4]
  misc_feature (649)..(892): NCBI GI: 116193231 Blast Desc: CHGG_06333 [Chaetomium globosum CBS 148.51] gi|88182246|gb|EAQ89714.1| CHGG_06333 [Chaetomium globosum CBS 148.51]
  misc_feature (725)..(850): NCBI GI: 261353266 Blast Desc: conserved [Verticillium albo-atrum VaMs.102]
  misc_feature (727)..(855): NCBI GI: 149209921 Blast Desc: MGCH7_ch7g442 [Magnaporthe grisea 70-15] gi|86196397|gb|EAQ71035.1| MGCH7_ch7g442 [Magnaporthe grisea 70-15]
  misc_feature (727)..(855): NCBI GI: 39970469 Blast Desc: MGG_02701 [Magnaporthe grisea 70-15] gi|145017491|gb|EDK01854.1| MGG_02701 [Magnaporthe grisea 70-15]
  misc_feature (662)..(857): NCBI GI: 171684411 Blast Desc: protein product [Podospora anserina] gi|170942166|emb|CAP67818.1| protein product [Podospora anserina]
  misc_feature (10)..(404): NCBI GI: 85117357 Blast Desc: NCU08334 [Neurospora crassa OR74A] gi|28927043|gb|EAA36001.1| [Neurospora crassa OR74A]
  misc_feature (9)..(513): NCBI GI: 46128715 Blast Desc: FG08735.1 [Gibberella zeae PH-1]
  misc_feature (637)..(845): NCBI GI: 156059016 Blast Desc: SS1G_03520 [Sclerotinia sclerotiorum 1980] gi|154701307|gb|EDO01046.1| SS1G_03520 [Sclerotinia sclerotiorum 1980]
  misc_feature: Useful for introducing or modulating the production of volatile compounds
MADPRSRLSGRRSPTYNPARASMPVNIGHNLQSYTENIHAVPAARYESLPRGFDPKSRSGTMPVPTTITTYNVTKEPIPRSHSKARTRSSTVDALAPKPIIVTTNHPRPHASSSHSSNHSGTRGTSPPRDSYRTGDNSYYAQPASSIRSRSHHRHSQSYNQGAPLGDEFSRLRERTGGATEDRFWAPARASTDNFRNVRPHSLYATPAHAATPATPAYHAAPAYGNSSAVADYEDDYYEYTKPGELARYDLDHDRDQRRSRRDSFERPYYRPHVNVVSNDTTRYDARPRAKPPASSGLERYNRAAAAGAYDRPTVTMPAPPAVPPPPPLDTQRRPALLEGPRSPSIERRETRPRPISLYQDAPTRSSHPDDLYRTRDDGFHRDRRDRDEGYHDDNVMTRGFGIRTDTLDQARSASPPPAHNYEDRRARREPVERDSKRGSDETLHHVRSPDRVTNDERRPRADSRDRKEGISRRDSVREKVSAGLKGAAAALAPAIGLGIKSEDKVSPRRRGSDEDRLDARALEMVPSKEREPLDRKPSPRDDPIVVEQRRERGRDRGDPVSESKDRDADRERERERERQREREREYERERERDRERERDRERDREYEKESARERDRNYDRDQREHDRRDAEAKLNGTHHDRRDHSPDDAASTSRRRHRPSSAAFDPTDTKGLMDLKKELAAMDNQTNTTERAERSDRPIGKEPVSDKALMAAEDSDRYSEPRDDESRGREMVPAGEKTVRVVSPPRDKNDQKPIKGILKAPKVRFPEEDNPIREGVAPHKDDKTKKDKDIPTGARWTKISRKRVNPEALTIGKERFEIRDDFVIVLRVLNKEEIQAYATATAQIRDRKRKEHERERQHERLSDEEQTRSDEERQRRHRHRQEAEDDGYRRGHVVDDRPRRHDEDRPKNSDYVSSSHHRHYDAVTANGSERDRR

SEQ ID NO: 4378 - DNA, 11331 bp, Muscodor strobelii
  misc_feature: SGI EST ID NO. CUFF.11922.2
  misc_feature: Variant of the nucleotide sequence at SEQ ID NO 4376
ggctgacagacaacagacatggacgatcgtttgatggattcatcatacgagagcgttgcctcgatacggatatcgctctgattttctaccgccaatgattttgcgctccgctcaccagaacggagctgggcccatcggtgctatgtgaaattactggacataggcaaaatgggttcagctaaagtccgcaataagtcctcgtttctatgggttgatgaggacccggcgaacgtagagaaccgcacgcttcttagaaggcatgtcatgaaaaaccggcgaaagcccgacacaaatgatgagacatcctcgaagtcgatgacgttagctgcggcgcgcatcgacttcctacgacaggcagttgctggtagtctaaacccggtggtgggatcaacttttaccttcgctacatttcccgatgtcatcaacagtcaggatgtcgcccaggccctagtatactccgaaactatcgcaagaggcagatatgctctaagcaaatgcttgtctttcaacaaagtgcccagcgcaatgattgaaaagctttcagtggatgctgctttactccaatctatcatactgatcacaaagatgtatttccatgctctaagacgatggatggatcagcgccagcagcagcatcagcaaactcttttggaactgaaaaccatccagctgctccgccacaagctagagagcagtacgacggaagaccagctatcggatctgactttgtttgctattgtgaatctagcaacgtatgcttgtatagtgcaggatcatgcatcctgtcggcgccatctatatggcatatttcgagctatacgtctgcgaggcggacccgtgagcattatagaaccgaaaattgtgatcgaagcgcttagatgcgacatcggcatgaccctacagacaggaatagggcctatatttcctgaacacagagacactgatttggatgcgctcttcccatatccagatatcttcggccgaaactatcccatggaagagctcgactacgatttggacccgtctataatcaaggcatgggaggtactgaaaaaatttggctcattgctagatctggtcaacgaggctcatgctgagataccatggaacctgtttctcaatacgatggctgcactcatgtatcgacttctcgccctccaattcgattttgggtctttgaacgagacgactcgtcttgctcttcttgcgatctgttcacagatctttctgcagtggaaagatatcacaactgcttatgattacctcggcgcgtctttcgcacaatctctactccatcttagtcaacgacaagatgaagcctcatcaacaattcttatctggttatacatgatatatgtgacttttaatcctccttcaatcgaggatagctggtggagattgatgatgagacgacacctttcgcaaattgataacaaatcatgggtcgaggtgcgcaaacatttcgagtcgatcctatgggttagactggttcatgaaggctctggaaaggcactctttgatacttgcatcacggaagagaattttgagtaacagcccgtatcggagccgagcttatgtcgttgtacttacaccaaccaagtacacggcaaatccgcgcgggagtaaacaatcggatcaaagtagtccacgccaataatccagaaaagcgatgatggtgactgccataatacgatgttatttgctactgtccacttgcacatggccttgattagatggtattgcatagcagcttaagcgttgcagctcaatgaagagatggaagctcgatttcctatttgggaaaagacgaaatcctttttgtcgtgacaagggcgcaacaccactaaaccacactaccgagttacgtcactgttgatatctcatataggtagcagaggcgttgaaacatctataaatacgttctatatatggtattgtgttcaaatgccattcaattagagaaagaccaagccattatccatcatctcttcgtacctttcataatcaattgatctagaaaatcaagtccctgaaggcctcctacgtaacaccgacacgaccatgggctctggaaccaaggaagatattgtatctctggaccaaacttttgaattccgcaatgatactcatagctacagcatcaaatggtgttcattaggggatcccaaatcacctcccgtcgtcttcgtccacggaacgccctggtcacatcgtgtttgggtaccttttgctctcgctctatcacggcagttccatgtctaccttttcgataaccctggtttcggagagtctcctatagaaaaggaactacctggcaaattattcagggcatcttcaaaggtagctgagttcgacgccgacctcgctagacaatctgaggcatacgctgcgctgttccagtcatggcaagcagattggggaaatcagaaggcacacgtaatcgcgcatgaccacggggccctacagagcttgcgagcatacttgcttcatggctgtgaatatgctagtctctgcctcatcgatgttgtggcaattggtccgtttggacaagatctgttcaaggtcgtggccgaaaacccgcaacacttcaaacagctcccagatatggcatttgaaggtatcctagagagctatattcggggagctgcatatcaggagctgcccaaggaaaccatgcagatgctgaaagcaccgtggttgagagagggtggaaagcaaggtttcattagacagttgtgtcaagctgattcgagaagcactgatgctgttgaacaacagtatgacaccgtgggtcctagactacctgtgaagattatttggggcacggaagatgaatggataccagtggaatctgcctcgaggctcggagatgcgcttagggcaaaggaggtcgtaacaatcaatgaggcgggtcacctaatcatgtatgaccaacccgcacagttaggagtcgaactcggtcgatggttgaccgcattttctcatgcgggagtatagttgaatatcctcccacgcgggggcgaagtggcaaagatcaggctttgatatgtagtcaaatgcaagagacatcatcgtcgagcatcatgagacaccagacgaagacacgtgtcgtaattgaatcctgataacaagagaatactaggcagccagaaggcaatgtgcattttcatacttgttggcgctgcatcatgctctcattctaacatgataccacccaagaaagcccatattgcgacgtaaattatctgatgcgtttcgacctgtagcctgcagcttcgaagcattgatctcaatgagttgcggagatgaaaaaactccagaccaaaatctcaccgacatcattcatgcaaatgatcgcaagccttccctgctttgagacctcgaattgaccgacggaaaaatgaacccttcctgcatgccgaggtgatatcgttgagtattttctgcagagtcctttcaggatatccgcattcacgtcagcggggtctctatcatggcctcaaaatcattcgactattagatataataggtatggcaccgatactagaagttcaaatcagttattagagacaatgccactctaggggtttgcttgcatgatacagtatcatcgcgtagaaagtgcaaattcccataggctctcactcgcaaggccatcctggccaaatttgccaacgatagcctttccaaagaatttgaacaagggatttcggatgcgcccgtcaggcggtcaatttatgacgtctatcttttacttggttcggccgcccgccgtgatatctcggtggcagtagttcatacccctcgaccccaaaagggcggaatattcttgcgcgcaagcatccccgggccaaggtgtgtgccgcctgacacttgcgcgtcggtgtatggagagccggagagcagattggccacttgggcatctctgtggcgtttttgagaaggtcggcagttcgctctcctgttagagcggcatgtcggcaatgaattctaacaatctatacagatcatgagatgagaacatgccatatcgtccgaacaaagcgacatgacttgaaatgacaatctgtagaaaagttcggcgagaaggctactagtctaactaattaagattcggtgcggcctcaatccgattgaacggtccgagctatgagcgagggttagcttcaggcacgaattgagcctcggcggtaatgagagatcaaatgagtagctgtaggtagcacagtatcagatctcgcgttgcaagcacatgctactctcgcttccatttgtcctaatatctgtggtcgcattttggaaaaaagggggcgtgtcggtttcgacgttgggcatcaacgtcgtttcttggtcgtgttttagcgccgggagcggtgcaggaatgtcctgcgtttcgaacacaccaattttacctgccatatagccatcgacgtcggattgcggtatgcaacccacccgttcgagtggataatacaatggcaggcaggaaggctatccgtaatgagcttgttgataggtagaagacaaatttggctcgtgggctgttgacgaggcagtctgatgactttggatttccaatccttagcgggcgaagtttctagcgcttatggggtgcacggagagcacgggcgacgatgtgaatacgatgaagaggcaaatgcattgatggctacaacccgacttaaacccgagtcgtattcacatagaagattttacgtctgttgtgtccatgcggttggcatacgatcgttggtgtaactagacattctcttggtagttatggcacacgtacaaacgattaataatgagacctccccatgttcaacaaaacaccaaaatgcccaatactagaagcacaagtccaatacgtacaagatgtgaagttacaaaatcacaacatgcgcttccgatagatcacaacgactcgaatatctttggaaatacgccttcgtacccaacatcattgcactgccgctggacagataatcagatccgcttcattgaattgccaacacacaatgactcttaccaggcccatccgaaaacaagtcttgttgttgataaatatggtgtctacagaaattgattcgtctatccaaatagcacatgtgctgagttgtgtgccattgggcacaagctgacgaagttccaaaagcggcagtgagctaccaatggacaaagctctgttttgagtctctgaaacatccaagcgaaaagctgaacgacgacctcaagacccgataggcccgagtgatcattccacaactccatgctgcgcatccatgctgatgaccagaagcgtgcgaccctggctctgcgcaacattgaccattgaccagaaagctgggtttggctggcgagtcgtgagcgagctgggagagtcgacgggagtgtcgtacagtctcaaggcgacgtaagcacgttgggttggtccactcttggccactgacgcaacccagcactcgcacttcgacacagctacgctaccgcacgtcatcgcctcctatcccaccacgacgaggtcgaccattgcccaagtgggctggttgagcgggtgagattacagcagatactctaggggaaatcgggatacgccccgagagttggctgatctcgtgaagcgcaggctttgttctgcagcgtcatgactaaaactattagttgtccttttgatactatgcctgcgcattgattccttcccgttggtcgtgtatagacgatagtaaaacccgagagcatgaaaagaaagtcgctaataataacaacactggaacattgggggatcgctcttgatacggctctccgtacagtgtctgatctactgtacatgacgttggtctgcgaagaagacacaacttgcgacacaccatcaactctgctgctcttctcacttagactgcatactgaatctgtaaagcattttgggattgcatctctcccgtttcgtttagcttttgacatttgccattcttcctcgtgtcttctctccctctctccacttccgccgctcaaccccctgcctgcatgacaagcaagacctgcccactgcagcaagtttccagaatacatgcatgatcgaacccactctctagacattcctctacctcagacttcttgattttccataattagccggcgagaaaactgttgaagcctccagtcccacgagaaggtgttcttttactagtatctgtcattaggatttcgtgacctcttttggaatctcgagtctcgcatttcgggaagcagcaggaggcagaacacggcactagcaacggtctaggtcgagatcgcaggctctgttattgttctctgtctcttcccgagcgcaagtgaccggcgtcccgccaccgaacgctccaagcatcgtccgtgcctacgcacacaacacagcttacaacgccttttgcaactctatagcggcattggagcttgattgagcctgcctgttgtatgcgtgcttattcttggagacgtacgttcgcggcacaagagcgttactcctcatcgctcggtggtagagggggggtgtcggactattagttgcatcaggcattcgccatacatattactaccacttacacccggtcttggacgcagaggaagggtccgtctctctcatttcgccaacccgccttggtcaagacagaatcattggtgagctgcatcgcgggattcgtcaagccaagcagttcctgattaagacaaatcagggtggtccattcgccggagtctcaggaagcacttcggcgacaggttaaggcaactcccctcgtgggcccttaaaccggcagcgtcccaacggccgtccgcctgcagcccaaccatacccttacaggcccaccgacctctactcccacgcacactgcacagtactgtgatctgtacagtacattcagtttccacctggcctttttgtatttcacgccgtgtaccccgcggcagagaccctggtttctgcctgattggtcttgaggggaatcttttttttttcctctttggcattctgcatcttttacacagaaaggccaggtgtgtggactgtcgctgtcgacaccgttgtcgactcgtgacgctgtgctgccctcagctcagctgtgcccgtatctgacctaagacgacgcagctttcccgcatcgctacacgtgtgagacccgatgcgctggatacatatctaggactcgcccgcagaaacacagtacatgggattatttactggtgaatgcgaaaacaatactcttccttctcgcttcctgccgcccccaactggaagattctccgaagaagcaggctgggtgtataatcaacaaccaagctaaagcggacacacatacctacctacctacacatactcatcacatcccgcctttcttcccgtccgcccctcctctcacctttcgtcacatcctaattttcccgctccccgttacatttcctggagtcgttcagcaacacatccaacggccggactactatacagtcgttcttattcttgcttcattatatatgctatatactatacacggctgatcaacaaaccattatcgcacatacggctttcaccaaggctgcctcaccatggccgacccccgatcccgactctcgggtcggcggtcccctacttacaaccccgcgcgtgcctctatgcccgtgaacattggacacaatctgcaatcatacactgaaaacatccacgctgttcccgcggcacggtacgagtctctgccgagggggttcgatcccaagagccgaagcggaactatgccagtcccgacaacgatcactacgtacaatgtcaccaaagagcccataccgcgaagtcacagcaaggcgcgcacccgatcgtcgactgtcgatgcgctagcgccgaagcctatcattgtaacgacaaaccacccccgaccccacgcgtcctcgagccacagttcgaaccacagcggcaccaggggcaccagtccaccgcgcgactcgtaccgcaccggcgacaactcgtactacgcccagccagcctcctctatccggtcccgcagccatcaccgccactcccaaagctacaatcaaggcgcaccgctgggcgatgagttttcccggctgcgagagcgtactggcggcgctaccgaggacaggttttgggctcctgcgagagctagcaccgacaacttccgcaacgttcgacctcattcattgtacgctactccagctcatgcggcgactcctgctacgccagcttaccacgccgctccggcctatggcaacagctccgcagtggccgactatgaagatgattactatgagtatactaaacccggcgagctggcgaggtatgatctggatcacgaccgagaccagcgtcggagtaggcgggatagctttgaacggccgtactaccgaccccacgtgaacgttgtgagcaacgacactacccggtatgacgctagaccccgagcgaaacctccagcttcttctggcctggagagatacaaccgggcggcagctgctggtgcctacgatcgcccgacagtcactatgcccgcccctccagcagtgccacctccaccaccactggatacacagcgacggcctgctcttctggaaggcccaagaagcccgtccattgagcgccgagaaacacggccacgccccatctctctctaccaagatgcaccaacacgctcgtctcatcccgatgacctttatcgtactcgagatgatgggttccatcgagaccgtcgtgaccgagatgaaggatatcatgacgataatgtcatgacccgaggattcggcattcgtactgacactttggaccaagctcgttcggccagcccacctcctgctcataattatgaagaccgtcgagctcgacgtgagccagttgagcgagactctaagcgcgggtctgacgagacgcttcaccatgtccggtctcctgaccgcgtaacgaatgatgaacgtcgaccccgtgctgacagccgagatcggaaagagggcatcagccgacgggacagcgtccgtgagaaagtctccgctggactcaaaggggctgctgctgctctcgcccctgctatcggtcttggcatcaagagtgaagacaaagtgtcacctcgtcgacgaggatcagacgaggacaggctcgatgctcgtgctcttgagatggtcccctctaaggaaagagaacctcttgataggaagccttctcccagagatgatcccatcgtcgttgagcaacgccgagagcgcggccgggaccggggtgatcccgtttccgagtcgaaggacagagatgccgatagagaaagggaaagagagcgagaacgccagcgtgagcgagaacgggaatatgagagggagcgcgaacgagatcgagaacgagagcgtgaccgcgagcgtgaccgtgagtatgagaaagagagcgccagagagcgcgatcgtaactatgacagggaccagcgcgaacatgatcggcgcgatgccgaagccaagctcaatggtacacaccatgataggagagatcattcgcctgacgatgctgccagcacttcacgaagacgtcatcgaccatcctcagccgccttcgatcctacagatactaagggcctaatggatctgaagaaggaattggcggcgatggacaaccagaccaacacgaccgagagggcagaaaggtcagatagaccgatcggcaaagaaccagtctcggacaaggctctcatggccgcagaagattctgacagatactccgagcctcgcgatgacgaatctcgtggccgagaaatggtaccggcgggtgagaagacagttcgggtagtctctccgccacgagacaagaacgaccagaagcccatcaaaggtattctcaaggcaccgaaagtcagattcccagaggaggataatcctatacgcgaaggtgtcgcacctcacaaagacgacaagaccaaaaaggacaaggatattcctactggtgcccgttggaccaaaatcagccgaaagagggtaaaccccgaagccctcacaattggcaaggagcgcttcgagattcgcgacgattttgtcattgttctacgagtcctgaataaggaagagattcaggcttacgctacagctacagcacagataagagatcgcaaaagaaaagaacatgagagagaaagacaacatgagcgtctctcagacgaggaacaaactcgatctgacgaagaacgacaaaggcggcaccgacaccgtcaagaggccgaggacgacggctatcgccgaggccatgttgtcgatgaccgtcctcgtagacatgatgaggatcggccgaaaaacagcgattatgtgagcagtagccaccaccgccactacgacgctgtcaccgccaatggctcagagcgggaccgtcggtgaaaaagaagagcctctcaaataggggtagggttataggtcttgatgatacatgactcttcatttccaatctagcgcaagtcactttttctttgtatgggaaaggatatatacttcatttgatatagagagataccaacaagcatgtatgttgagacgatcattgagcatgtatacattttcaggaagtttctgtgtgtatgaggatctgtgtttgtgagcgagcggggatgagtgtatgtagaactggcactgggacttggggaaaattcaaaaaatcattttgtgtcacttcttttcttcccttcgggtgggcattgtgtaaggtattttgtgattctgtgaagatagtggatctaatagcgtgttttcttgcgagatttgagaatccatccgatgttgagtcttgagtcttgtcccgaggatagtggatagggtagttagtgggtgaggcttaggtcagtgaggcggtgaaatggaaaaatgagttcttacgtctcctcctttttacacgtggcgagttgggctccgagcgttttatatatactccctcctgcttacctcttgttcttctcgagacctaatgtggagtttgaggggtttaggtacggattgcactgcctcggacacggcgttggtggagctaggtgtgaggtgtgagataggtgaggtgtatggtgtgaggtgtgaggtatgagatatttgttttgtttcatgtactgctaggggacgataagttttgggttgtggtgagatgggcatcagcgcttgtgagtgagtcaataggcgagggcacggcgttattgatggcttgtattaggcaattgtttcgtattaaatgggacctagcatatggggcgagaagatgggcatcattgcttacttgctcgttgttttacccacatggctattggtgaataaactacctagctcggagaatttaaattcaag

SEQ ID NO: 4379 - DNA, 936 bp, Muscodor strobelii
  misc_feature: SGI cDNA ID NO. 561148
  misc_feature: Reduced expression when VOC is produced
  misc_feature: Encodes the peptide sequence at SEQ ID NO 4380
atgggctctggaaccaaggaagatattgtatctctggaccaaacttttgaattccgcaatgatactcatagctacagcatcaaatggtgttcattaggggatcccaaatcacctcccgtcgtcttcgtccacggaacgccctggtcacatcgtgtttgggtaccttttgctctcgctctatcacggcagttccatgtctaccttttcgataaccctggtttcggagagtctcctatagaaaaggaactacctggcaaattattcagggcatcttcaaaggtagctgagttcgacgccgacctcgctagacaatctgaggcatacgctgcgctgttccagtcatggcaagcagattggggaaatcagaaggcacacgtaatcgcgcatgaccacggggccctacagagcttgcgagcatacttgcttcatggctgtgaatatgctagtctctgcctcatcgatgttgtggcaattggtccgtttggacaagatctgttcaaggtcgtggccgaaaacccgcaacacttcaaacagctcccagatatggcatttgaaggtatcctagagagctatattcggggagctgcatatcaggagctgcccaaggaaaccatgcagatgctgaaagcaccgtggttgagagagggtggaaagcaaggtttcattagacagttgtgtcaagctgattcgagaagcactgatgctgttgaacaacagtatgacaccgtgggtcctagactacctgtgaagattatttggggcacggaagatgaatggataccagtggaatctgcctcgaggctcggagatgcgcttagggcaaaggaggtcgtaacaatcaatgaggcgggtcacctaatcatgtatgaccaacccgcacagttaggagtcgaactcggtcgatggttgaccgcattttctcatgcgggagtatag

SEQ ID NO: 4380 - protein, 311 aa, Muscodor strobelii
  misc_feature: SGI Peptide ID NO. 561148
  misc_feature (64)..(301): Pfam Id: PF00561 Pfam Desc: alpha/beta hydrolase fold
  misc_feature (64)..(144): Pfam Id: PF00561 Pfam Desc: alpha/beta hydrolase fold
  misc_feature (14)..(303): NCBI GI: 256721293 Blast Desc: NECHADRAFT_52731 [Nectria haematococca mpVI 77-13-4]
  misc_feature (7)..(308): NCBI GI: 46114348 Blast Desc: FG03016.1 [Gibberella zeae PH-1]
  misc_feature (15)..(305): NCBI GI: 169599032 Blast Desc: SNOG_02328 [Phaeosphaeria nodorum SN15] gi|111069420|gb|EAT90540.1| SNOG_02328 [Phaeosphaeria nodorum SN15]
  misc_feature (10)..(309): NCBI GI: 145241498 Blast Desc: An09g00710 [Aspergillus niger] gi|134077933|emb|CAL00331.1| protein product [Aspergillus niger]
  misc_feature (64)..(305): NCBI GI: 238507115 Blast Desc: alpha/beta hydrolase, [Aspergillus flavus NRRL3357] gi|220689472|gb|EED45823.1| alpha/beta hydrolase, [Aspergillus flavus NRRL3357]
  misc_feature (8)..(249): NCBI GI: 169786167 Blast Desc: [Aspergillus oryzae RIB40] gi|83776292|dbj|BAE66411.1| protein product [Aspergillus oryzae]
  misc_feature (10)..(308): NCBI GI: 226359712 Blast Desc: hydrolase [Rhodococcus opacus B4] gi|226238197|dbj|BAH48545.1| hydrolase [Rhodococcus opacus B4]
  misc_feature (10)..(305): NCBI GI: 145593617 Blast Desc: alpha/beta hydrolase fold [Salinispora tropica CNB-440] gi|145302954|gb|ABP53536.1| alpha/beta hydrolase fold [Salinispora tropica CNB-440]
  misc_feature (21)..(303): NCBI GI: 256666921 Blast Desc: alpha/beta hydrolase fold protein [Streptomyces sp. AA4]
  misc_feature (10)..(304): NCBI GI: 284989967 Blast Desc: alpha/beta hydrolase fold protein [Geodermatophilus obscurus DSM 43160] gi|284063212|gb|ADB74150.1| alpha/beta hydrolase fold protein [Geodermatophilus obscurus DSM 43160]
  misc_feature (27)..(299): SWISSPROT Homolog: EC 2.3.1.12 Dihydrolipoyllysine-residue acetyltransferase
  misc_feature: Useful for introducing or modulating the production of volatile compounds
MGSGTKEDIVSLDQTFEFRNDTHSYSIKWCSLGDPKSPPVVFVHGTPWSHRVWVPFALALSRQFHVYLFDNPGFGESPIEKELPGKLFRASSKVAEFDADLARQSEAYAALFQSWQADWGNQKAHVIAHDHGALQSLRAYLLHGCEYASLCLIDVVAIGPFGQDLFKVVAENPQHFKQLPDMAFEGILESYIRGAAYQELPKETMQMLKAPWLREGGKQGFIRQLCQADSRSTDAVEQQYDTVGPRLPVKIIWGTEDEWIPVESASRLGDALRAKEVVTINEAGHLIMYDQPAQLGVELGRWLTAFSHAGV

SEQ ID NO: 4381 - DNA, 11331 bp, Muscodor strobelii; identical to SEQ ID NO: 4378
  misc_feature: SGI EST ID NO. CUFF.11922.2
  misc_feature: Variant of the nucleotide sequence at SEQ ID NO 4379

SEQ ID NO: 4382 - DNA, 1386 bp, Muscodor strobelii
  misc_feature: SGI cDNA ID NO. 561149
  misc_feature: Encodes the peptide sequence at SEQ ID NO 4383
atgggttcagctaaagtccgcacagataagtcctcgtttctatgggttgatgaggacccggcgaacgtagagaaccgcacgcttcttagaaggcatgtcatgaaaaaccggcgaaagcccgacacaaatgatgagacatcctcgaagtcgatgacgttagctgcggcgcgcatcgacttcctacgacaggcagttgctggtagtctaaacccggtggtgggatcaacttttaccttcgctacatttcccgatgtcatcaacagtcaggatgtcgcccaggccctagtatactccgaaactatcgcaagaggcagatatgctctaagcaaatgcttgtctttcaacaaagtgcccagcgcaatgattgaaaagctttcagtggatgctgctttactccaatctatcatactgatcacaaagatgtatttccatgctctaagacgatggatggatcagcgccagcagcagcatcagcaaactcttttggaactgaaaaccatccagctgctccgccacaagctagagagcagtacgacggaagaccagctatcggatctgactttgtttgctattgtgaatctagcaacgtatgcttgtatagtgcaggatcatgcatcctgtcggcgccatctatatggcatatttcgagctatacgtctgcgaggcggacccgtgagcattatagaaccgaaaattgtgatcgaagcgcttagatgcgacatcggcatgaccctacagacaggaatagggcctatatttcctgaacacagagacactgatttggatgcgctcttcccatatccagatatcttcggccgaaactatcccatggaagagctcgactacgatttggacccgtctataatcaaggcatgggaggtactgaaaaaatttggctcattgctagatctggtcaacgaggctcatgctgagataccatggaacctgtttctcaatacgatggctgcactcatgtatcgacttctcgccctccaattcgattttgggtctttgaacgagacgactcgtcttgctcttcttgcgatctgttcacagatctttctgcagtggaaagatatcacaactgcttatgattacctcggcgcgtctttcgcacaatctctactccatcttagtcaacgacaagatgaagcctcatcaacaattcttatctggttatacatgatatatgtgacttttaatcctccttcaatcgaggatagctggtggagattgatgatgagacgacacctttcgcaaattgataacaaatcatgggtcgaggtgcgcaaacatttcgagtcgatcctatgggttagactggttcatgaaggctctggaaaggcactctttgatacttgcatcacggaagagaattttgagtaa

SEQ ID NO: 4383 - protein, 461 aa, Muscodor strobelii
  misc_feature: SGI Peptide ID NO. 561149
  misc_feature (25)..(452): NCBI GI: 145256372 Blast Desc: An19g00360 [Aspergillus niger CBS 513.88] gi|134084771|emb|CAK47359.1| protein product [Aspergillus niger]
  misc_feature (61)..(460): NCBI GI: 212529582 Blast Desc: conserved [Penicillium marneffei ATCC 18224] gi|210074346|gb|EEA28433.1| conserved [Penicillium marneffei ATCC 18224]
  misc_feature (72)..(450): NCBI GI: 145240003 Blast Desc: An08g05310 [Aspergillus niger] gi|134077162|emb|CAK45503.1| protein product [Aspergillus niger]
  misc_feature (1)..(459): NCBI GI: 256727322 Blast Desc: NECHADRAFT_76080 [Nectria haematococca mpVI 77-13-4]
  misc_feature (25)..(452): NCBI GI: 256730301 Blast Desc: NECHADRAFT_45111 [Nectria haematococca mpVI 77-13-4]
  misc_feature (141)..(452): NCBI GI: 256720804 Blast Desc: NECHADRAFT_85486 [Nectria haematococca mpVI 77-13-4]
  misc_feature (19)..(456): NCBI GI: 171688826 Blast Desc: protein product [Podospora anserina] gi|170944375|emb|CAP70485.1| protein product [Podospora anserina]
  misc_feature (295)..(457): NCBI GI: 238505795 Blast Desc: conserved [Aspergillus flavus NRRL3357] gi|220690216|gb|EED46566.1| conserved [Aspergillus flavus NRRL3357]
  misc_feature (295)..(457): NCBI GI: 169780142 Blast Desc: [Aspergillus oryzae RIB40] gi|83773275|dbj|BAE63402.1| protein product [Aspergillus oryzae]
  misc_feature (13)..(456): NCBI GI: 256734956 Blast Desc: NECHADRAFT_75734 [Nectria haematococca mpVI 77-13-4]
MGSAKVRTDKSSFLWVDEDPANVENRTLLRRHVMKNRRKPDTNDETSSKSMTLAAARIDFLRQAVAGSLNPVVGSTFTFATFPDVINSQDVAQALVYSETIARGRYALSKCLSFNKVPSAMIEKLSVDAALLQSIILITKMYFHALRRWMDQRQQQHQQTLLELKTIQLLRHKLESSTTEDQLSDLTLFAIVNLATYACIVQDHASCRRHLYGIFRAIRLRGGPVSIIEPKIVIEALRCDIGMTLQTGIGPIFPEHRDTDLDALFPYPDIFGRNYPMEELDYDLDPSIIKAWEVLKKFGSLLDLVNEAHAEIPWNLFLNTMAALMYRLLALQFDFGSLNETTRLALLAICSQIFLQWKDITTAYDYLGASFAQSLLHLSQRQDEASSTILIWLYMIYVTFNPPSIEDSWWRLMMRRHLSQIDNKSWVEVRKHFESILWVRLVHEGSGKALFDTCITEENFE

SEQ ID NO: 4384 - DNA, 11331 bp, Muscodor strobelii; identical to SEQ ID NO: 4378
  misc_feature: SGI EST ID NO. CUFF.11922.2
  misc_feature: Variant of the nucleotide sequence at SEQ ID NO 4382

SEQ ID NO: 4385 - DNA, 1398 bp, Muscodor strobelii
  misc_feature: SGI cDNA ID NO. 561150
  misc_feature: Encodes the peptide sequence at SEQ ID NO 4386
atgggttcagctaaagtccgcaaaaatttgacagcagataagtcctcgtttctatgggttgatgaggacccggcgaacgtagagaaccgcacgcttcttagaaggcatgtcatgaaaaaccggcgaaagcccgacacaaatgatgagacatcctcgaagtcgatgacgttagctgcggcgcgcatcgacttcctacgacaggcagttgctggtagtctaaacccggtggtgggatcaacttttaccttcgctacatttcccgatgtcatcaacagtcaggatgtcgcccaggccctagtatactccgaaactatcgcaagaggcagatatgctctaagcaaatgcttgtctttcaacaaagtgcccagcgcaatgattgaaaagctttcagtggatgctgctttactccaatctatcatactgatcacaaagatgtatttccatgctctaagacgatggatggatcagcgccagcagcagcatcagcaaactcttttggaactgaaaaccatccagctgctccgccacaagctagagagcagtacgacggaagaccagctatcggatctgactttgtttgctattgtgaatctagcaacgtatgcttgtatagtgcaggatcatgcatcctgtcggcgccatctatatggcatatttcgagctatacgtctgcgaggcggacccgtgagcattatagaaccgaaaattgtgatcgaagcgcttagatgcgacatcggcatgaccctacagacaggaatagggcctatatttcctgaacacagagacactgatttggatgcgctcttcccatatccagatatcttcggccgaaactatcccatggaagagctcgactacgatttggacccgtctataatcaaggcatgggaggtactgaaaaaatttggctcattgctagatctggtcaacgaggctcatgctgagataccatggaacctgtttctcaatacgatggctgcactcatgtatcgacttctcgccctccaattcgattttgggtctttgaacgagacgactcgtcttgctcttcttgcgatctgttcacagatctttctgcagtggaaagatatcacaactgcttatgattacctcggcgcgtctttcgcacaatctctactccatcttagtcaacgacaagatgaagcctcatcaacaattcttatctggttatacatgatatatgtgacttttaatcctccttcaatcgaggatagctggtggagattgatgatgagacgacacctttcgcaaattgataacaaatcatgggtcgaggtgcgcaaacatttcgagtcgatcctatgggttagactggttcatgaaggctctggaaaggcactctttgatacttgcatcacggaagagaattttgagtaa

SEQ ID NO: 4386 - protein, 465 aa, Muscodor strobelii
  misc_feature: SGI Peptide ID NO. 561150
  misc_feature (29)..(456): NCBI GI: 145256372 Blast Desc: An19g00360 [Aspergillus niger CBS 513.88] gi|134084771|emb|CAK47359.1| protein product [Aspergillus niger]
  misc_feature (65)..(464): NCBI GI: 212529582 Blast Desc: conserved [Penicillium marneffei ATCC 18224] gi|210074346|gb|EEA28433.1| conserved [Penicillium marneffei ATCC 18224]
  misc_feature (76)..(454): NCBI GI: 145240003 Blast Desc: An08g05310 [Aspergillus niger] gi|134077162|emb|CAK45503.1| protein product [Aspergillus niger]
  misc_feature (11)..(463): NCBI GI: 256727322 Blast Desc: NECHADRAFT_76080 [Nectria haematococca mpVI 77-13-4]
  misc_feature (29)..(456): NCBI GI: 256730301 Blast Desc: NECHADRAFT_45111 [Nectria haematococca mpVI 77-13-4]
  misc_feature (6)..(460): NCBI GI: 171688826 Blast Desc: protein product [Podospora anserina] gi|170944375|emb|CAP70485.1| protein product [Podospora anserina]
  misc_feature (145)..(456): NCBI GI: 256720804 Blast Desc: NECHADRAFT_85486 [Nectria haematococca mpVI 77-13-4]
  misc_feature (299)..(461): NCBI GI: 238505795 Blast Desc: conserved [Aspergillus flavus NRRL3357] gi|220690216|gb|EED46566.1| conserved [Aspergillus flavus NRRL3357]
  misc_feature (299)..(461): NCBI GI: 169780142 Blast Desc: [Aspergillus oryzae RIB40] gi|83773275|dbj|BAE63402.1| protein product [Aspergillus oryzae]
  misc_feature (6)..(460): NCBI GI: 256734956 Blast Desc: NECHADRAFT_75734 [Nectria haematococca mpVI 77-13-4]
MGSAKVRKNLTADKSSFLWVDEDPANVENRTLLRRHVMKNRRKPDTNDETSSKSMTLAAARIDFLRQAVAGSLNPVVGSTFTFATFPDVINSQDVAQALVYSETIARGRYALSKCLSFNKVPSAMIEKLSVDAALLQSIILITKMYFHALRRWMDQRQQQHQQTLLELKTIQLLRHKLESSTTEDQLSDLTLFAIVNLATYACIVQDHASCRRHLYGIFRAIRLRGGPVSIIEPKIVIEALRCDIGMTLQTGIGPIFPEHRDTDLDALFPYPDIFGRNYPMEELDYDLDPSIIKAWEVLKKFGSLLDLVNEAHAEIPWNLFLNTMAALMYRLLALQFDFGSLNETTRLALLAICSQIFLQWKDITTAYDYLGASFAQSLLHLSQRQDEASSTILIWLYMIYVTFNPPSIEDSWWRLMMRRHLSQIDNKSWVEVRKHFESILWVRLVHEGSGKALFDTCITEENFE

SEQ ID NO: 4387 - DNA, 11331 bp, Muscodor strobelii; identical to SEQ ID NO: 4378
  misc_feature: SGI EST ID NO. CUFF.11922.2
  misc_feature: Variant of the nucleotide sequence at SEQ ID NO 4385

SEQ ID NO: 4388 - DNA, 1032 bp, Muscodor strobelii
  misc_feature: SGI cDNA ID NO. 561151
  misc_feature: Encodes the peptide sequence at SEQ ID NO 4389
atgccctcgaaagatttaccacctttgacatctagcttcttagcaattaccgtcaagtctcagctaaggacaacgattccgcctcctcctaaaggcaccaacctttcaggcaaggtggtcatcatcaccggagcgaatacaggcatcggttttgagtgtgctcgtcaataccttttgctaaatctctcacacctcattatcaccgcccgaagtgaggcaaaaggacaagcagctcgggagcagcttcagaatgagtttccctccgccaaaatcgacatgtggctgctcgatatgtgttcctatgattcgattcaagcttttgttgaccgtgtgagatctgagctatcccgccttgattataccgtcctcaacgccggctgcaaccgactggaatttcataaacttccaaccggtcacgaggaatcgctacaggtgaactacttgtcgacgatagccctcgccactctacttctacccgtcctcaaagctatgtcgtcttcaatgggctccgctccgtatatttctattgtctcatcgggaacaactctacaagccaaattcccgaatcgccaccagacaccgttgttgagttccttcgacgaccctgcgaccgggcctcctcgcggagtcgaatgctattctacgaccaaattgatggggcagatgtggttatataaagctgctgactatatctcgccggaccatgtgattgttaacttggtcgacccaggcgctacatatggcacttcactaggccgtgatatgggttgggttagtgggaaggtcgtagctgggatttcgcgcatggttggacgcagtccaacagaaggagcttttacttacttagatgcaacactagtcaagggcaaagactcacatggatgctttgttatggacgcagagatacgaccatttcccaaaatgctgtacacggacgaaggaaagcaagtgatagagaaactttggaacgagacactagaagagcttcgtttcatcgacatgaaggggataatggaatcgatgaaacgttag

SEQ ID NO: 4389 - protein, 343 aa, Muscodor strobelii
  misc_feature: SGI Peptide ID NO. 561151
  misc_feature (38)..(195): Pfam Id: PF00106 Pfam Desc: short chain dehydrogenase
  misc_feature (38)..(126): Pfam Id: PF00106 Pfam Desc: short chain dehydrogenase
  misc_feature (3)..(343): NCBI GI: 238505799 Blast Desc: short-chain dehydrogenase/reductase family protein, [Aspergillus flavus NRRL3357] gi|220690218|gb|EED46568.1| short-chain dehydrogenase/reductase family protein, [Aspergillus
  misc_feature (3)..(342): NCBI GI: 256730051 Blast Desc: NECHADRAFT_82657 [Nectria haematococca mpVI 77-13-4]
  misc_feature (3)..(304): NCBI GI: 169780140 Blast Desc: [Aspergillus oryzae RIB40] gi|83773274|dbj|BAE63401.1| protein product [Aspergillus oryzae]
  misc_feature (1)..(341): NCBI GI: 212529584 Blast Desc: short-chain dehydrogenase/reductase family protein, [Penicillium marneffei ATCC 18224] gi|210074347|gb|EEA28434.1| short-chain dehydrogenase/reductase family protein, [Penicillium
  misc_feature (1)..(341): NCBI GI: 145233707 Blast Desc: An02g10970 [Aspergillus niger] gi|134057159|emb|CAK48762.1| protein product [Aspergillus niger]
  misc_feature (3)..(343): NCBI GI: 256720619 Blast Desc: NECHADRAFT_50449 [Nectria haematococca mpVI 77-13-4]
  misc_feature (8)..(304): NCBI GI: 256727323 Blast Desc: NECHADRAFT_34006 [Nectria haematococca mpVI 77-13-4]
  misc_feature (28)..(343): NCBI GI: 242773363 Blast Desc: short-chain dehydrogenase/reductase family protein, [Talaromyces stipitatus ATCC 10500] gi|218721844|gb|EED21262.1| short-chain dehydrogenase/reductase family protein, [Talaromyces
  misc_feature (21)..(331): NCBI GI: 46116774 Blast Desc: FG04229.1 [Gibberella zeae PH-1]
  misc_feature (23)..(330): NCBI GI: 39974993 Blast Desc: MGG_00357 [Magnaporthe grisea 70-15] gi|145018753|gb|EDK03032.1| MGG_00357 [Magnaporthe grisea 70-15]
  misc_feature (38)..(302): SWISSPROT Homolog: EC 1.1.1.189 Prostaglandin-E(2) 9-reductase
  misc_feature (38)..(302): SWISSPROT Homolog: EC 1.1.1.197 15-hydroxyprostaglandin dehydrogenase (NADP(+))
  misc_feature (38)..(302): SWISSPROT Homolog: EC 1.1.1.184 Carbonyl reductase (NADPH)
MPSKDLPPLTSSFLAITVKSQLRTTIPPPPKGTNLSGKVVIITGANTGIGFECARQYLLLNLSHLIITARSEAKGQAAREQLQNEFPSAKIDMWLLDMCSYDSIQAFVDRVRSELSRLDYTVLNAGCNRLEFHKLPTGHEESLQVNYLSTIALATLLLPVLKAMSSSMGSAPYISIVSSGTTLQAKFPNRHQTPLLSSFDDPATGPPRGVECYSTTKLMGQMWLYKAADYISPDHVIVNLVDPGATYGTSLGRDMGWVSGKVVAGISRMVGRSPTEGAFTYLDATLVKGKDSHGCFVMDAEIRPFPKMLYTDEGKQVIEKLWNETLEELRFIDMKGIMESMKR

SEQ ID NO: 4390 - DNA, 1615 bp, Muscodor strobelii
  misc_feature: SGI EST ID NO. CUFF.11115.0
  misc_feature: Variant of the nucleotide sequence at SEQ ID NO 4388
cccgaaacaacactcaagaccgtaggacatgggaatcacctggtcgggtaccgggaaacccgtattgtccgaagagccatccagctcttcattcatgatggatggcgcgacggaggtatcggtgggacatatgaggttttgagcgttcattaccgcaagctgttaatgtataaagctatgctgttacctaccaattaccgtcaagtctcagctaaggacaacgattccgcctcctcctaaaggcaccaacctttcaggcaaggtggtcatcatcaccggagcgaatacaggcatcggttttgagtgtgctcgtcaataccttttgctaaatctctcacacctcattatcaccgcccgaagtgaggcaaaaggacaagcagctcgggagcagcttcagaatgagtttccctccgccaaaatcgacatgtggctgctcgatatgtgttcctatgattcgattcaagcttttgttgaccgtgtgagatctgagctatcccgccttgattataccgtcctcaacgccggctgcaaccgactggaatttcataaacttccaaccggtcacgaggaatcgctacaggtgaactacttgtcgacgatagccctcgccactctacttctacccgtcctcaaagctatgtcgtcttcaatgggctccgctccgtatatttctattgtctcatcgggaacaactctacaagccaaattcccgaatcgccaccagacaccgttgttgagttccttcgacgaccctgcgaccgggcctcctcgcggagtcgaatgctattctacgaccaaattgatggggcagatgtggttatataaagctgctgactatatctcgccggaccatgtgattgttaacttggtcgacccaggcgctacatatggcacttcactaggccgtgatatgggttgggttagtgggaaggtcgtagctgggatttcgcgcatggttggacgcagtccaacagaaggagcttttacttacttagatgcaacactagtcaagggcaaagactcacatggatgctttgttatggacgcagagatacgaccatttcccaaaatgctgtacacggacgaaggaaagcaagtgatagagaaactttggaacgagacactagaagagcttcgtttcatcgacatgaaggggataatggaatcgatgaaacgttagcaacgatgcccattacattgctttcccgagagacagatctagtcagagtatatagacctcgaatctgtatattatctgatttgtcaagcactagtctttagctggactggaaatgcttccgtctctgtacattgcgtctcttggcccgaggttggaaggcatcacgtgttcctgttctttcatatcctcgtatgctctattccaacgtctctgctctttaatttgccagtgacaggatattatcacagagtcctacacatctagcctccctgcttgtttagtgcgctttccaagatttgagctcagctttaggccaacattttgtgtgttcaagcaacgaactatgaagtgcgtgacggaccatcttgctcaatacggccctctcattcatatccaggactcgtactcctgacccaataacatcatggcaagcaa

SEQ ID NO: 4391 - DNA, 4587 bp, Muscodor strobelii
  misc_feature: SGI cDNA ID NO. 561152
  misc_feature: Encodes the peptide sequence at SEQ ID NO 4392
atggcgaccaaagaacgtacgacggtggtgaaccccactattgaaaagttatggaaagaagcgagcagaagatttctcgagcaaactggaaggtctttggaagcggcgccgtctaagaccctagacgactgcctcgcccagtttcgcaaagtgcaaaacgctccagaggttcgcacaaaagccgacaaagccaaggatgttggactcaatatactcaaatgcatcaagcttgttggaggagttgcggcggaaggagcaagcatggcattcccacctgcaggcctatgttttagcgcagtatctatcctgcttgatattccagaaaagctccggtccttcaatgaatcgatcgaggggctgttcgaaaaaattgagccaagtctcagtaacttcgagatttacggaaggatagagcaatatgacaacgtagagccggagcttcaagatgctgttcacaacctcatgatcgcgtttgttgatatatgcgccttttcggtcaagtacagagagtcgagtcgatggcgcaaattcagcatcaagatgaaagtagcgcttttggaagacgaccaagtagaagcacagcttgccaagtttgagtcactcgccaaggcccatgagtctgtgcagagcacgcaaacgctgaagacagtcctcgagtcaaacaattctcttcgcgttttactagaaagtgcaagcgagaccgggcagaagatcactcagattgctgcggacgtttcttctcttcgagaatctaacgatcagcgcaaatctgaagagatccacaagaaacacctagaaaacatcaaggtaaaattacgtttgaaggcaaaagacaagtcaacatccgagctttcgaatgaactctccgagaggcttcggcgtgaagcctcggatgggacagcagattggctgaaaggtcctaatggcaattctgatttccagaaatgggcggaaagagacgatccggatgcccctaccgtgttgctcctaactggagacacgaaaaccggcaaatctgttttattgtcaacaattcagcaacatttacgagataagtacgcatctgcggagagacaagcaaacaagacgtatactgcgagctatttcttccccagtgttggcgccggcaaagagagagacgactctatagagatggatcgattgaaaactgctctgaaaagtattgcgttacagcttgcagatcagaatccggcgtatgcgaaacatacgtcgcttctatgtgattccaaagaattcaacgccgccgccgactaccagcagctatggaacatgcttgatcttggtagtccaagaggaacatccgtgcattatttccttctcgatgatattccagaaagcgtccatcgcaaacaagactataaagatttggtcagcttgttatcgactctgacgccaaatcgatcgactgtccggcttttgatagcaatgacccccaattctttcgagatggagggctcaatgccgtggccgaatattaatgttgaacagcataactcaaccgacattgagaactacattcgccgcaatctcaaaaacaaaggtgtctttcaggaagtagatgcaaattccagacgtattcacaagaagattgtggaaacgctgcccaaggccgtgaacggcaactatttcaaggtcaccaacgccctggaaagcattgccagtattgaagccgcagatggatccgaagaagagatcgatgctgtattggcagattcgcatcaggatgtcgatgaaatctcacgaatggtcatcagcgatcttcgaaagaagctgagcgcggaagaaattcgcgagctcaacgagttgcttagatgggttgtatatggacaaggccagtttgacaccaatcagctcaaggccgcattgtttctcggactaggagtgcaatcaaagacactcccgctgaaaaagaaattagagggaaagtacagcaaggtctttacaatctcagacggtacggttcgcgtcgacgaggttctgaaaaccctgctcgaacaacctcgacatctaactgacgacatccttgaggagccgaaattcgaagttaccatttctatcaaacgagctgataaatctatggtacagtctttcctctgggacttgttgcagaaatccgggcagaccgattttgggtttaaagtcaatgataatcaagtagcgaaagagctgattcaggtcaatcaagtagacgcatccaaacaagtacttaggagcatgttccagcttctcaacgacgaaccagacgagaaaacaaaggatattgcaccatatgctttctcgtttttagtcgatcatctcgactctctcaatgaagtaacgggttccggggccctcagcgatcgggaaagactcgagattgggcagaagctctttagcgtgttctccactggagacgtgatcgaaaggcactgggacagttccacctgggttgactggtactggagacaagtcgagatcacgactttccgcgattggctccggaatcctgttgtcaagttgggattaaccagatttgaacaagcatgggtggacgaagtggaaagagacacctgtcctgatttcaagtttcttgagaaagtcatgctgtcggtggctcgaaactggttaacggatgagaaatgggacgtgactcggtgcttcagatggctacaaggcgcactacaaatgagggtgcaggccaagagtcctgctgttgaaggtgacgaagcggaaaagagtgttagtgatcctcctgctagcgatcctgtcacgatcaacgacgctgtcgaatggtgtaaagaggtgcttcaactaggaaagccaaatgctctctgggagaagagagttggctggacctattattacgaggaccaaaatgctgaagcggttgacgcattcgaacgagccatctctctcggtccagagtcgggaaccacccatgcggaatgcctcagaggaattgctatggccttggctgaccaagacaaaaatatcgaagcgaagatcaagatggacgaagctctagagatcttgaaacagcaggaacagacagacttgaatgcgattatgggcgattatgtgaagtttgccgactggtatcggcatcataagcatcatgaccgggccttcgaatgcacgaagatttccatttctctcgatccagataaccacgttgctcttttcaatcatctcaaaatctgcatcaagatagaccgccaggatgatgccagaaagctactggagagcatgcgagtaaagtcagctggtcaagatcaaactcctctgtactcgcaggttatggacgaggtcaggaacgatgatgactctctcaacgaggtgtttttcggggtactcaagctgtcatcctctaatccagaagcttttgcacatttactcaaagacctcgacaacgccattgccagagcagaagttgatgcacgcctcgccgaaaagctcagcttggtatacttccacaagggtactgcactgtactatttccaagaaatcagtcctacttcctacgatattacactgaaatgctgggaggaatgcgttggagctgaagtctggcattttgccaagtggagcggagtgttgtttcagtgcgcacaccactttgagcgagctcgtgctgtgcccgagctcgctgactatcacatcggtcgtcttcgactgatgatgaacaacaaaaacaacgacatcaacaaggacgcaatcagttcgtacctagcaacatacgctgcgttggatggaagactagaagaggccagaacatatatgcgaccaaatattgagacggttttcgacatgctctcgaatcaagaagaagaggatgactggtacgcgtatggagatattggctacaaattgaagcattgtggcaatgacgttagcaccctgacggcaatgtctcttgcggttccgccaattgacaaaaagacggttgcctggttgataggctttgatgaaagcaaggccggagctatttcccaagagcgccttgcagaactaaacaagcctggatcggccaaagagctcatctccagaatcgcgagtctcacgacagaattgaaaggacagatagagtcggccgatgctgctgcagatggatccgataaccagaaggaacaagaggattcagctccggagtataacaagcagcttttggaggccctcgaaccgtggtcgaaggtacgaccgtatgtaccttgggaaatatcttgcaattgttgcagccgccagtggaacttcgatcacgcgatcaacatgtgcagatactgcttctcacaggatttctgcgacgaatgttttggaaagctaaagaatggcactctggatcaaggactggataggcgattcatctcggcattaatctgcagacaagatcacgattggatacatcttccagcctgggatagacagaaattccttgatgctttcagcggccaggtcgtcgtaggcggtaacatcgtgaatggtgagcgtgtgggcggagaatcgatttcgatagacgaatggctagctggtcttgtgaaagaatggggacttcctgagtctcttctcgcaaagaacacaagcactgagtag

SEQ ID NO: 4392 - protein, 1528 aa, Muscodor strobelii
  misc_feature: SGI Peptide ID NO. 561152
  misc_feature (13)..(1519): NCBI GI: 119483526 Blast Desc: NFIA_093890 [Neosartorya fischeri NRRL 181] gi|119409822|gb|EAW19769.1| conserved [Neosartorya fischeri NRRL 181]
  misc_feature (13)..(1519): NCBI GI: 67525769 Blast Desc: AN3342.2 [Aspergillus nidulans FGSC A4] gi|40744130|gb|EAA63310.1| AN3342.2 [Aspergillus nidulans FGSC A4] gi|259485680|tpe|CBF82907.1| TPA: conserved [Aspergillus FGSC
  misc_feature (14)..(1516): NCBI GI: 171686048 Blast Desc: protein product [Podospora anserina] gi|170942985|emb|CAP68638.1| protein product [Podospora anserina]
  misc_feature (437)..(1519): NCBI GI: 146324633 Blast Desc: conserved [Aspergillus fumigatus Af293] gi|129555495|gb|EBA27220.1| conserved [Aspergillus fumigatus Af293]
  misc_feature (437)..(1519): NCBI GI: 159124055 Blast Desc: conserved [Aspergillus fumigatus A1163]
  misc_feature (14)..(1516): NCBI GI: 258569000 Blast Desc: [Uncinocarpus reesii 1704] gi|237906690|gb|EEP81091.1| [Uncinocarpus reesii 1704]
  misc_feature (14)..(1516): NCBI GI: 154287794 Blast Desc: conserved [Ajellomyces capsulatus NAm1] gi|150408333|gb|EDN03874.1| conserved [Ajellomyces capsulatus NAm1]
  misc_feature (18)..(1340): NCBI GI: 255937537 Blast Desc: Pc13g13860 [Penicillium chrysogenum Wisconsin 54-1255] gi|211584415|emb|CAP92455.1| Pc13g13860 [Penicillium chrysogenum Wisconsin 54-1255]
  misc_feature (14)..(1516): NCBI GI: 240276123 Blast Desc: neutral amino acid permease [Ajellomyces capsulatus H143]
  misc_feature (14)..(1308): NCBI GI: 115388974 Blast Desc: [Aspergillus terreus NIH2624] gi|114194388|gb|EAU36088.1| [Aspergillus terreus NIH2624]
MATKERTTVVNPTIEKLWKEASRRFLEQTGRSLEAAPSKTLDDCLAQFRKVQNAPEVRTKADKAKDVGLNILKCIKLVGGVAAEGASMAFPPAGLCFSAVSILLDIPEKLRSFNESIEGLFEKIEPSLSNFEIYGRIEQYDNVEPELQDAVHNLMIAFVDICAFSVKYRESSRWRKFSIKMKVALLEDDQVEAQLAKFESLAKAHESVQSTQTLKTVLESNNSLRVLLESASETGQKITQIAADVSSLRESNDQRKSEEIHKKHLENIKVKLRLKAKDKSTSELSNELSERLRREASDGTADWLKGPNGNSDFQKWAERDDPDAPTVLLLTGDTKTGKSVLLSTIQQHLRDKYASAERQANKTYTASYFFPSVGAGKERDDSIEMDRLKTALKSIALQLADQNPAYAKHTSLLCDSKEFNAAADYQQLWNMLDLGSPRGTSVHYFLLDDIPESVHRKQDYKDLVSLLSTLTPNRSTVRLLIAMTPNSFEMEGSMPWPNINVEQHNSTDIENYIRRNLKNKGVFQEVDANSRRIHKKIVETLPKAVNGNYFKVTNALESIASIEAADGSEEEIDAVLADSHQDVDEISRMVISDLRKKLSAEEIRELNELLRWVVYGQGQFDTNQLKAALFLGLGVQSKTLPLKKKLEGKYSKVFTISDGTVRVDEVLKTLLEQPRHLTDDILEEPKFEVTISIKRADKSMVQSFLWDLLQKSGQTDFGFKVNDNQVAKELIQVNQVDASKQVLRSMFQLLNDEPDEKTKDIAPYAFSFLVDHLDSLNEVTGSGALSDRERLEIGQKLFSVFSTGDVIERHWDSSTWVDWYWRQVEITTFRDWLRNPVVKLGLTRFEQAWVDEVERDTCPDFKFLEKVMLSVARNWLTDEKWDVTRCFRWLQGALQMRVQAKSPAVEGDEAEKSVSDPPASDPVTINDAVEWCKEVLQLGKPNALWEKRVGWTYYYEDQNAEAVDAFERAISLGPESGTTHAECLRGIAMALADQDKNIEAKIKMDEALEILKQQEQTDLNAIMGDYVKFADWYRHHKHHDRAFECTKISISLDPDNHVALFNHLKICIKIDRQDDARKLLESMRVKSAGQDQTPLYSQVMDEVRNDDDSLNEVFFGVLKLSSSNPEAFAHLLKDLDNAIARAEVDARLAEKLSLVYFHKGTALYYFQEISPTSYDITLKCWEECVGAEVWHFAKWSGVLFQCAHHFERARAVPELADYHIGRLRLMMNNKNNDINKDAISSYLATYAALDGRLEEARTYMRPNIETVFDMLSNQEEEDDWYAYGDIGYKLKHCGNDVSTLTAMSLAVPPIDKKTVAWLIGFDESKAGAISQERLAELNKPGSAKELISRIASLTTELKGQIESADAAADGSDNQKEQEDSAPEYNKQLLEALEPWSKVRPYVPWEISCNCCSRQWNFDHAINMCRYCFSQDFCDECFGKLKNGTLDQGLDRRFISALICRQDHDWIHLPAWDRQKFLDAFSGQVVVGGNIVNGERVGGESISIDEWLAGLVKEWGLPESLLAKNTSTE

SEQ ID NO: 4393 - DNA, 4887 bp, Muscodor strobelii
  misc_feature: SGI EST ID NO. CUFF.11145.0
  misc_feature: Variant of the nucleotide sequence at SEQ ID NO 4391
ccgaaattcgaagttaccatttctatcaaacgagctgataaatctatggtacagtctttcctctgggacttgttgcagaaatccgggcagaccgattttgggtttaaagtcaatgataatcaagtagcgaaagagctgattcaggtcaatcaagtagacgcatccaaacaagtacttaggagcatgttccagcttctcaacgacgaaccagacgagaaaacaaaggatattgcaccatatgctttctcgtttttagtcgatcatctcgactctctcaatgaagtaacgggttccggggccctcagcgatcgggaaagactcgagattgggcagaagctctttagcgtgttctccactggagacgtgatcgaaaggcactgggacagttccacctgggttgactggtactggagacaagtcgagatcacgactttccgcgattggctccggaatcctgttgtcaagttgggattaaccagatttgaacaagcatgggtggacgaagtggaaagagacacctgtcctgatttcaagtttcttgagaaagtcatgctgtcggtggctcgaaactggttaacggatgagaaatgggacgtgactcggtgcttcagatggctacaaggcgcactacaaatgagggtgcaggccaagagtcctgctgttgaaggtgacgaagcggaaaagagtgttagtgatcctcctgctagcgatcctgtcacgatcaacgacgctgtcgaatggtgtaaagaggtgcttcaactaggaaagccaaatgctctctgggagaagagagttggctggacctattattacgaggaccaaaatgctgaagcggttgacgcattcgaacgagccatctctctcggtccagagtcgggaaccacccatgcggaatgcctcagaggaattgctatggccttggctgaccaagacaaaaatatcgaagcgaagatcaagatggacgaagctctagagatcttgaaacagcaggaacagacagacttgaatgcgattatgggcgattatgtgaagtttgccgactggtatcggcatcataagcatcatgaccgggccttcgaatgcacgaagatttccatttctctcgatccagataaccacgttgctcttttcaatcatctcaaaatctgcatcaagatagaccgccaggatgatgccagaaagctactggagagcatgcgagtaaagtcagctggtcaagatcaaactcctctgtactcgcaggttatggacgaggtcaggaacgatgatgactctctcaacgaggtgtttttcggggtactcaagctgtcatcctctaatccagaagcttttgcacatttactcaaagacctcgacaacgccattgccagagcagaagttgatgcacgcctcgccgaaaagctcagcttggtatacttccacaagggtactgcactgtactatttccaagaaatcagtcctacttcctacgatattacactgaaatgctgggaggaatgcgttggagctgaagtctggcattttgccaagtggagcggagtgttgtttcagtgcgcacaccactttgagcgagctcgtgctgtgcccgagctcgctgactatcacatcggtcgtcttcgactgatgatgaacaacaaaaacaacgacatcaacaaggacgcaatcagttcgtacctagcaacatacgctgcgttggatggaagactagaagaggccagaacatatatgcgaccaaatattgagacggttttcgacatgctctcgaatcaagaagaagaggatgactggtacgcgtatggagatattggctacaaattgaagcattgtggcaatgacgttagcaccctgacggcaatgtctcttgcggttccgccaattgacaaaaagacggttgcctggttgataggctttgatgaaagcaaggccggagctatttcccaagagcgccttgcagaactaaacaagcctggatcggccaaagagctcatctccagaatcgcgagtctcacgacagaattgaaaggacagatagagtcggccgatgctgctgcagatggatccgataaccagaaggaacaagaggattcagctccggagtataacaagcagcttttggaggccctcgaaccgtggtcgaaggtacgaccgtatgtaccttgggaaatatcttgcaattgttgcagccgccagtggaacttcgatcacgcgatcaacatgtgcagatactgcttctcacaggatttctgcgacgaatgttttggaaagctaaagaatggcactctggatcaaggactggataggcgattcatctcggcattaatctgcagacaagatcacgattggatacatcttccagcctgggatagacagaaattccttgatgctttcagcggccaggtcgtcgtaggcggtaacatcgtgaatggtgagcgtgtgggcggagaatcgatttcgatagacgaatggctagctggtcttgtgaaagaatggggacttcctgagtctcttctcgcaaagaacacaagcactgagtagataccaaggagtctctcgaattgagaagtatacactcagggctgtctgacacatgtcattttttgttttgctgtatcgatgatctttataccggatgtcccaatgagagagatgaggtagagaacaagctgagtcctaaagtagtctcgatgcctgctactatcttgcgcgttgatcatggcattcaaggcgcggtttctagctctatggaattggctgtcgggacggaagcctcaatccggccggtggaaatccgttagcgagcacgtcacggccgctaccgccgccaccggcgcgcttgtatgctgcaaccacactgcttcgcaacccctcctttatgtcatgtgacgcagatagggaacaacacctaccttcttgagctgagtacccgtttggtcatcttcaggtcctcgtgccagactgattcgtctcttatctttcatctgtatctcacccatatatactgtatatactcaatcaattgatgtcctggtccgcctcatcatccatcattcctcaacatccttcgtgaaacttacagtgtatcaaatcatcatcagtatccttcatttgtagaaacacatttgtaatcatgggtgccaacaactcaaaggagccaacgctcccgactcaacacgagagagccgttcttgaacgtctgcgcaatctgcagttcgatgccggcgatgactttgttcacctggaagaaaaggctgactacgatggccgtctagaccgaacgcccgcgggtcttgctattgagctaacacagagctggcagtcaagattactagacgatccgaaaaatagactcgctcttacggcattaagtgcagcgaatccaaagacagtgttggcttcacgatctatcaagattgccgaccagcatgtgttcaatgtcagaattccatttgagggtgcaccgatcaccaatcagcgcgcatctggacgttgctggcttttcgctgctacgaacgtgttccgcgttgcgattatgcagaaatacaacatcggctcgtttgaactgtcgcaggcctatctattcttctgggacaagctcgagaaatcgaattacttccttgaaaacatcattgacacagctaacgaagaccttgacggccgccttgtccagcgtctcctcgctgaaccagtaagtgatggcggacaatgggatatggtgtacaacctggttgacaagtacggtcttgtgccgcaaactctttatccggatagctttaatgctatgtcgagcagcactatcaactatattgttgtagggaaactgcgcgaatatgcactcatcctgcgcaagatgcttcgaagcaaagcaacaactacagccactctccaggctacgaagcagaagatgatgcgagagatccacaccgtccttactctgacccttggaccaccgccgggcaacaatcagagcttctcatgggagtatacagacaacgacggcaaggctaaaactgttcgcaagacaccactagaatttgctaaggacatttcctctaccataccgagcggctaccgcatcaccaacgaagccattgagtctatggtatcgctcgtccacgaccctcgacatgagcctctatctttgatgacggtcgaccgactgggcaatattattggtggtcgcggtattacatacataaacgtggagatgaacgttttgaaacaagcttgtgttgccatgctcaaagctggtctcccagtattcttcggctctgatgtgggaaaattcagcgatagggaagctggcatcatggacctgggacttgtcgactacgccctcgggttcaatgtcgatatgtatagcgccagtgccatgaacaaagctggccgtctgcgcgttggcgaatcagccatgacgcatgctatggtacttacggccgttcactgcgatgagaagagcggggcttgtgtccgctggcgcgtgcagaattcttggggtgtagagtcgggagtcaatggatggtttgtgatgagcgacgactggatggaccagtttgtgtaccaggctgttatcgatccgaggtttttgagcaaggaagtcaaagacgtgctcaagaagcagcctattcttctgcccctctgggatcctatgggttccttggcttgatcgaccctatcgttacgagagagtattatggtgagcagaagcctacagattgtatgaccatgagttatgtctagtataccatacacggagtttatgattaatgaagcattgccttatcattacgacttttgaatttttctttttcttttcaaaatgcaataataatgtgactacttcacagggtgtcattcctgaaatcgaaacgctggcgaaatgcatgcgca

SEQ ID NO: 4394 - DNA, 1536 bp, Muscodor strobelii
  misc_feature: SGI cDNA ID NO. 561153
  misc_feature: Elevated expression when VOC is produced
  misc_feature: Encodes the peptide sequence at SEQ ID NO 4395
atgggtgccaacaactcaaaggagccaacgctcccgactcaacacgagagagccgttcttgaacgtctgcgcaatctgcagttcgatgccggcgatgactttgttcacctggaagaaaaggctgactacgatggccgtctagaccgaacgcccgcgggtcttgctattgagctaacacagagctggcagtcaagattactagacgatccgaaaaatagactcgctcttacggcattaagtgcagcgaatccaaagacagtgttggcttcacgatctatcaagattgccgaccagcatgtgttcaatgtcagaattccatttgagggtgcaccgatcaccaatcagcgcgcatctggacgttgctggcttttcgctgctacgaacgtgttccgcgttgcgattatgcagaaatacaacatcggctcgtttgaactgtcgcaggcctatctattcttctgggacaagctcgagaaatcgaattacttccttgaaaacatcattgacacagctaacgaagaccttgacggccgccttgtccagcgtctcctcgctgaaccagtaagtgatggcggacaatgggatatggtgtacaacctggttgacaagtacggtcttgtgccgcaaactctttatccggatagctttaatgctatgtcgagcagcactatcaactatattgttgtagggaaactgcgcgaatatgcactcatcctgcgcaagatgcttcgaagcaaagcaacaactacagccactctccaggctacgaagcagaagatgatgcgagagatccacaccgtccttactctgacccttggaccaccgccgggcaacaatcagagcttctcatgggagtatacagacaacgacggcaaggctaaaactgttcgcaagacaccactagaatttgctaaggacatttcctctaccataccgagcggctaccgcatcaccaacgaagccattgagtctatggtatcgctcgtccacgaccctcgacatgagcctctatctttgatgacggtcgaccgactgggcaatattattggtggtcgcggtattacatacataaacgtggagatgaacgttttgaaacaagcttgtgttgccatgctcaaagctggtctcccagtattcttcggctctgatgtgggaaaattcagcgatagggaagctggcatcatggacctgggacttgtcgactacgccctcgggttcaatgtcgatatgtatagcgccagtgccatgaacaaagctggccgtctgcgcgttggcgaatcagccatgacgcatgctatggtacttacggccgttcactgcgatgagaagagcggggcttgtgtccgctggcgcgtgcagaattcttggggtgtagagtcgggagtcaatggatggtttgtgatgagcgacgactggatggaccagtttgtgtaccaggctgttatcgatccgaggtttttgagcaaggaagtcaaagacgtgctcaagaagcagcctattcttctgcccctctgggatcctatgggttccttggcttga

SEQ ID NO: 4395 - protein, 511 aa, Muscodor strobelii
  misc_feature: SGI Peptide ID NO. 561153
  misc_feature (53)..(508): Pfam Id: PF03051 Pfam Desc: Peptidase C1-like family
  misc_feature (53)..(305): Pfam Id: PF03051 Pfam Desc: Peptidase C1-like family
  misc_feature (325)..(508): Pfam Id: PF03051 Pfam Desc: Peptidase C1-like family
  misc_feature (1)..(511): NCBI GI: 164424867 Blast Desc: NCU08333 [Neurospora crassa OR74A] gi|157070698|gb|EAA36000.2| conserved [Neurospora crassa OR74A]
  misc_feature (1)..(511): NCBI GI: 39970457 Blast Desc: MGG_02695 [Magnaporthe grisea 70-15] gi|149209905|ref|XP_001522327.1| MGCH7_ch7g434 [Magnaporthe grisea 70-15] gi|86196389|gb|EAQ71027.1| MGCH7_ch7g434 grisea
  misc_feature (1)..(511): NCBI GI: 256734005 Blast Desc: [Nectria haematococca mpVI 77-13-4]
  misc_feature (1)..(511): NCBI GI: 46128717 Blast Desc: FG08736.1 [Gibberella zeae PH-1]
  misc_feature (1)..(511): NCBI GI: 154296638 Blast Desc: BC1G_12727 [Botryotinia fuckeliana B05.10] gi|150843310|gb|EDN18503.1| BC1G_12727 [Botryotinia fuckeliana B05.10]
  misc_feature (5)..(511): NCBI GI: 156059028 Blast Desc: SS1G_03526 [Sclerotinia sclerotiorum 1980] gi|154701313|gb|EDO01052.1| SS1G_03526 [Sclerotinia sclerotiorum 1980]
  misc_feature (54)..(511): NCBI GI: 240280902 Blast Desc: aminopeptidase [Ajellomyces capsulatus H143]
  misc_feature (54)..(511): NCBI GI: 225555564 Blast Desc: aminopeptidase [Ajellomyces capsulatus G186AR]
  misc_feature (1)..(511): NCBI GI: 261353267 Blast Desc: cysteine proteinase [Verticillium albo-atrum VaMs.102]
  misc_feature (1)..(511): NCBI GI: 226285612 Blast Desc: bleomycin hydrolase [Paracoccidioides brasiliensis Pb01]
  misc_feature (47)..(511): SWISSPROT Homolog: EC 3.4.22.40 Bleomycin hydrolase
  misc_feature: Useful for introducing or modulating the production of volatile compounds
MGANNSKEPTLPTQHERAVLERLRNLQFDAGDDFVHLEEKADYDGRLDRTPAGLAIELTQSWQSRLLDDPKNRLALTALSAANPKTVLASRSIKIADQHVFNVRIPFEGAPITNQRASGRCWLFAATNVFRVAIMQKYNIGSFELSQAYLFFWDKLEKSNYFLENIIDTANEDLDGRLVQRLLAEPVSDGGQWDMVYNLVDKYGLVPQTLYPDSFNAMSSSTINYIVVGKLREYALILRKMLRSKATTTATLQATKQKMMREIHTVLTLTLGPPPGNNQSFSWEYTDNDGKAKTVRKTPLEFAKDISSTIPSGYRITNEAIESMVSLVHDPRHEPLSLMTVDRLGNIIGGRGITYINVEMNVLKQACVAMLKAGLPVFFGSDVGKFSDREAGIMDLGLVDYALGFNVDMYSASAMNKAGRLRVGESAMTHAMVLTAVHCDEKSGACVRWRVQNSWGVESGVNGWFVMSDDWMDQFVYQAVIDPRFLSKEVKDVLKKQPILLPLWDPMGSLA

SEQ ID NO: 4396 - DNA, 4887 bp, Muscodor strobelii; identical to SEQ ID NO: 4393
  misc_feature: SGI EST ID NO. CUFF.11145.0
  misc_feature: Variant of the nucleotide sequence at SEQ ID NO 4394

SEQ ID NO: 4397 - DNA, 1374 bp, Muscodor strobelii
  misc_feature: SGI cDNA ID NO. 561154
  misc_feature: Encodes the peptide sequence at SEQ ID NO 4398
atggcagcaccactcaacccctgcagagcgacggccacgccatctcgttgtcgggaagaggattcttgcgccgtaaaggtcgtcaacctggactttgaagcccgcgttcccgtccccttcagcatcttccctcggacctacaaggactccgaggccaccgccgaaaccaccacaaccaagactcacgaagaggttgagatcaacctacccggaaaagcccagaaagccggacgggaaggtcaatactcttctgtcaacgcctctgctcagctgccaccgcgccgagagcaccgttacagcgaggaagaggtccgtattacacgtgaagaagaacgttaccgccgtcccggtgtccagcgcgaatactacgaggaacacagacctacaaacatcaacgtcttccaagaaactcaatacaagggacctcaacatcagttctctcgcccccaatacgctcaatccacttactccgagtcttccgtcgaggtagaccgtcaccacaagccccactactctcccattgaccgcatcgaacgcgagtaccgcgctcgtgtccagccttcagtcttccgtgacgacatccgtgtcactgagactaccgttgacgcccctgtccaccgccctcacttcgagaaggtccaggttaccgaggagaccgtcgacgctccctccaagcccatctcattctcaaaagagaccaaggtcgtcgaggaaaccgtagagtatcctcgccaaaaccactcttccgctttccaaaagtctagaatgggttattacgacgaagacggacactaccactctttccgccacggacttcacaaaatggccgaccgtgtcttccaccctcacgacagtgagcgcgttgaggtgatccgtgagagccactccgctcctgcccctcgctcttctggtggctcatccggtgctatccccaacaccgtcaccatcccttgccaccatgtccgcatgggtgatatcctgatgctccagggccgcccctgccaggttatccgcatctccacctcctctgccactggccagcaccgttacctcggtgttgacttgttcagcaagcagctccacgaggagtcctctttcgtctccaaccccgcccccagcgtcgttgtccagaccatgctcggacctgtctttaagcaataccgtgtccttgacatcaacgatggcaccgtcactgccatgaccgagactggtgatgtcaagaccggcctccaggtcattgaccagtccggtctttggtctcgtctgtcctctgccttcaactctggctctggcagcgtccgtgtcctcgtcatctccgaccacggcaacgagctcgttgttgacgtcaagactgttcacggctctcgtctgtaa

SEQ ID NO: 4398 - protein, 457 aa, Muscodor strobelii
  misc_feature: SGI Peptide ID NO. 561154
  misc_feature (26)..(457): NCBI GI: 149209907 Blast Desc: MGCH7_ch7g435 [Magnaporthe grisea 70-15] gi|86196390|gb|EAQ71028.1| MGCH7_ch7g435 [Magnaporthe grisea 70-15]
  misc_feature (24)..(457): NCBI GI: 240109671 Blast Desc: CPC735_031760 [Coccidioides posadasii C735 delta SOWgp]
  misc_feature (24)..(457): NCBI GI: 242790138 Blast Desc: Woronin body protein HexA, [Talaromyces stipitatus ATCC 10500] gi|218718092|gb|EED17512.1| Woronin body protein HexA, [Talaromyces stipitatus ATCC 10500]
  misc_feature (24)..(457): NCBI GI: 115400341 Blast Desc: woronin body major protein [Aspergillus terreus NIH2624] gi|114191425|gb|EAU33125.1| woronin body major protein [Aspergillus terreus NIH2624]
  misc_feature (24)..(457): NCBI GI: 212534430 Blast Desc: Woronin body protein HexA, [Penicillium marneffei ATCC 18224] gi|210069770|gb|EEA23860.1| Woronin body protein HexA, [Penicillium marneffei ATCC 18224]
  misc_feature (25)..(457): NCBI GI: 239612082 Blast Desc: woronin body major protein [Ajellomyces dermatitidis ER-3]
  misc_feature (256)..(457): NCBI GI: 256734006 Blast Desc: NECHADRAFT_91822 [Nectria haematococca mpVI 77-13-4]
  misc_feature (25)..(457): NCBI GI: 261202120 Blast Desc: woronin body major protein [Ajellomyces dermatitidis SLH14081] gi|239590371|gb|EEQ72952.1| woronin body major protein [Ajellomyces dermatitidis SLH14081]
  misc_feature (8)..(457): NCBI GI: 119479551 Blast Desc: Woronin body protein HexA, [Neosartorya fischeri NRRL 181] gi|119407958|gb|EAW17907.1| Woronin body protein HexA, [Neosartorya fischeri NRRL 181]
  misc_feature (24)..(457): NCBI GI: 225554508 Blast Desc: woronin body major protein [Ajellomyces capsulatus G186AR]
MAAPLNPCRATATPSRCREEDSCAVKVVNLDFEARVPVPFSIFPRTYKDSEATAETTTTKTHEEVEINLPGKAQKAGREGQYSSVNASAQLPPRREHRYSEEEVRITREEERYRRPGVQREYYEEHRPTNINVFQETQYKGPQHQFSRPQYAQSTYSESSVEVDRHHKPHYSPIDRIEREYRARVQPSVFRDDIRVTETTVDAPVHRPHFEKVQVTEETVDAPSKPISFSKETKVVEETVEYPRQNHSSAFQKSRMGYYDEDGHYHSFRHGLHKMADRVFHPHDSERVEVIRESHSAPAPRSSGGSSGAIPNTVTIPCHHVRMGDILMLQGRPCQVIRISTSSATGQHRYLGVDLFSKQLHEESSFVSNPAPSVVVQTMLGPVFKQYRVLDINDGTVTAMTETGDVKTGLQVIDQSGLWSRLSSAFNSGSGSVRVLVISDHGNELVVDVKTVHGSRL

SEQ ID NO: 4399 - DNA, 1742 bp, Muscodor strobelii
  misc_feature: SGI EST ID NO. CUFF.11259.0
  misc_feature: Variant of the nucleotide sequence at SEQ ID NO 4397
agcacctctgccagctcaccttcttccctcctatttgatctttcaaaccacagcccaacctctctcagacccaaccgtctccgctcttctcagtcatctgccagcaagaatagagtcacttaagaaggccaccacgtcttcttatactccattcttctcagattcttcaaaagaagagtaagaggaatcttcttggtcatccttgcgtactccgtaaggttgtcgggaagaggattcttgcgccgtaaaggtcgtcaacctggactttgaagcccgcgttcccgtccccttcagcatcttccctcggacctacaaggactccgaggccaccgccgaaaccaccacaaccaagactcacgaagaggttgagatcaacctacccggaaaagcccagaaagccggacgggaaggtcaatactcttctgtcaacgcctctgctcagctgccaccgcgccgagagcaccgttacagcgaggaagaggtccgtattacacgtgaagaagaacgttaccgccgtcccggtgtccagcgcgaatactacgaggaacacagacctacaaacatcaacgtcttccaagaaactcaatacaagggacctcaacatcagttctctcgcccccaatacgctcaatccacttactccgagtcttccgtcgaggtagaccgtcaccacaagccccactactctcccattgaccgcatcgaacgcgagtaccgcgctcgtgtccagccttcagtcttccgtgacgacatccgtgtcactgagactaccgttgacgcccctgtccaccgccctcacttcgagaaggtccaggttaccgaggagaccgtcgacgctccctccaagcccatctcattctcaaaagagaccaaggtcgtcgaggaaaccgtagagtatcctcgccaaaaccactcttccgctttccaaaagtctagaatgggttattacgacgaagacggacactaccactctttccgccacggacttcacaaaatggccgaccgtgtcttccaccctcacgacagtgagcgcgttgaggtgatccgtgagagccactccgctcctgcccctcgctcttctggtggctcatccggtgctatccccaacaccgtcaccatcccttgccaccatgtccgcatgggtgatatcctgatgctccagggccgcccctgccaggttatccgcatctccacctcctctgccactggccagcaccgttacctcggtgttgacttgttcagcaagcagctccacgaggagtcctctttcgtctccaaccccgcccccagcgtcgttgtccagaccatgctcggacctgtctttaagcaataccgtgtccttgacatcaacgatggcaccgtcactgccatgaccgagactggtgatgtcaagaccggcctccaggtcattgaccagtccggtctttggtctcgtctgtcctctgccttcaactctggctctggcagcgtccgtgtcctcgtcatctccgaccacggcaacgagctcgttgttgacgtcaagactgttcacggctctcgtctgtaaacatttgcactataactccttttgttttctgcgatgtatgacatgacttgggatatttcgaatttggtcatcagacgtgtcttcgatagttaaaagattttgtaaaaggggatggtctcatagtcgcatatcaagtaaatagtcttgtatatcgtcggataatacgaacttggtgtaactgaatattgcgtcgacc

SEQ ID NO: 4400 - DNA, 795 bp, Muscodor strobelii
  misc_feature: SGI cDNA ID NO. 561155
  misc_feature: Reduced expression when VOC is produced
  misc_feature: Encodes the peptide sequence at SEQ ID NO 4401
atgggagcaaaggcatcaattccaactgggccctcgcgacagcttgaagtcatcgacgcaggtttctcacggacgggaactctctcattctccgcagcactcgagaagcttctcgacggcccagtccatcatggcgggacacagatattcaatcgagacgacgcgtactgcaagaagataagcgacctctataaatatcgtgaagaaggcgatcgagcaaaactgctcaagactctccgagagtgtatcgcaggcttcgtggcttgtgctgatgcgcccatgatacacttcttaccagagctattggagctctacccagacgtcaaggtggtgctggtgacacgtgatgctcataaatggtggaagagcttcgcagtctttggcgataactcagataatagtagtgttgggctcttgggctggatcttgttcccggtgcctggtgttcgctggttttctttgactgcgaagggtttccaaaaggacccaatacacacacacggtcgtccagcatcaggaccagatttccttgaaactcataacaactgggtccgtagtcttgtgccgaaggagagactacttgagatggaccttgctggcggatgggaacccctatgtgaattcttgggcaagcctattcccaatgagccatttcctcggctcaatgacagtgaggcgagagacaagttcatgagacgagtgctgtaccaggccggtgccatgtggattggtatctttgcaacagttggcgtagcaggtttcggggcctggcgagcatggcagcagatgagatga

SEQ ID NO: 4401 - protein, 264 aa, Muscodor strobelii
  misc_feature: SGI Peptide ID NO. 561155
  misc_feature (1)..(242): NCBI GI: 145601239 Blast Desc: MGG_08722 [Magnaporthe grisea 70-15] gi|145009265|gb|EDJ93976.1| MGG_08722 [Magnaporthe grisea 70-15]
  misc_feature (1)..(257): NCBI GI: 238497233 Blast Desc: NAD dependent epimerase/dehydratase, [Aspergillus flavus NRRL3357] gi|220694732|gb|EED51076.1| NAD dependent epimerase/dehydratase, [Aspergillus flavus NRRL3357]
  misc_feature (1)..(257): NCBI GI: 169774259 Blast Desc: [Aspergillus oryzae RIB40] gi|83769460|dbj|BAE59595.1| protein product [Aspergillus oryzae]
  misc_feature (1)..(252): NCBI GI: 145234771 Blast Desc: An03g01320 [Aspergillus niger] gi|134057707|emb|CAK38105.1| protein product [Aspergillus niger]
  misc_feature (1)..(249): NCBI GI: 145246676 Blast Desc: An12g05170 [Aspergillus niger] gi|134080308|emb|CAK46230.1| protein product [Aspergillus niger]
  misc_feature (1)..(257): NCBI GI: 256728385 Blast Desc: NECHADRAFT_54291 [Nectria haematococca mpVI 77-13-4]
  misc_feature (1)..(261): NCBI GI: 255941500 Blast Desc: Pc16g12200 [Penicillium chrysogenum Wisconsin 54-1255] gi|211586142|emb|CAP93890.1| Pc16g12200 [Penicillium chrysogenum Wisconsin 54-1255]
  misc_feature (1)..(233): NCBI GI: 145247056 Blast Desc: An12g07240 [Aspergillus niger] gi|134080504|emb|CAK46352.1| protein product [Aspergillus niger]
  misc_feature (1)..(260): NCBI GI: 169772381 Blast Desc: [Aspergillus oryzae RIB40] gi|83768520|dbj|BAE58657.1| protein product [Aspergillus oryzae]
  misc_feature (1)..(260): NCBI GI: 238490282 Blast Desc: NAD dependent epimerase/dehydratase, [Aspergillus flavus NRRL3357] gi|220696791|gb|EED53132.1| NAD dependent epimerase/dehydratase, [Aspergillus flavus NRRL3357]
  misc_feature: Useful for introducing or modulating the production of volatile compounds
MGAKASIPTGPSRQLEVIDAGFSRTGTLSFSAALEKLLDGPVHHGGTQIFNRDDAYCKKISDLYKYREEGDRAKLLKTLRECIAGFVACADAPMIHFLPELLELYPDVKVVLVTRDAHKWWKSFAVFGDNSDNSSVGLLGWILFPVPGVRWFSLTAKGFQKDPIHTHGRPASGPDFLETHNNWVRSLVPKERLLEMDLAGGWEPLCEFLGKPIPNEPFPRLNDSEARDKFMRRVLYQAGAMWIGIFATVGVAGFGAWRAWQQMR

SEQ ID NO: 4402 - DNA, 1796 bp, Muscodor strobelii
  misc_feature: SGI EST ID NO. CUFF.11169.0
  misc_feature: Variant of the nucleotide sequence at SEQ ID NO 4400
attttctcatctcgttcgaaacgtcaaaaagctatcgagtgccagtgacaccttcggaaagcttcgtgctgcgcacagtgtttaatacagtatctctctctagaatcgtgcggtaacacagtgcgggtgtgtagtttaacgcgttcacccactccgccaaaatccgaattcatttcccgtaagttgaagtatgatctgatctgctaagctctaagtacagacaacaactcgttatttcacggctgctattcaactactcataattgagtaaacagtcaacaggttgtatgctgcggctattgaaatattgcaagcaactcgggaaaaaacgggctgtttgctgctgcgaaaggattcggaccagggtcaaatgagtcaagacagtagcatcatgcatcaagtgacctgatgaacggaaacaccagaatgaaacttgatcactatgaatgagcgatataagaactattcgcaaattcactgctataatgtacgggtttgagctgataaatgaggtttcatcgccagtttgaggaattctagttgcatttatcgaccctttctgataagaccgattttttataataccctcctcgtagttcgaatcatatacacaatgggagcaaaggcatcaattccaactgggccctcgcgacagcttgaagtcatcgacgcaggtttctcacggacgggaactctctcattctccgcagcactcgagaagcttctcgacggcccagtccatcatggcgggacacagatattcaatcgagacgacgcgtactgcaagaagataagcgacctctataaatatcgtgaagaaggcgatcgagcaaaactgctcaagactctccgagagtgtatcgcaggcttcgtggcttgtgctgatgcgcccatgatacacttcttaccagagctattggagctctacccagacgtcaaggtggtgctggtgacacgtgatgctcataaatggtggaagagcttcgcagtctttggcgataactcagataatagtagtgttgggctcttgggctggatcttgttcccggtgcctggtgttcgctggttttctttgactgcgaagggtttccaaaaggacccaatacacacacacggtcgtccagcatcaggaccagatttccttgaaactcataacaactgggtccgtagtcttgtgccgaaggagagactacttgagatggaccttgctggcggatgggaacccctatgtgaattcttgggcaagcctattcccaatgagccatttcctcggctcaatgacagtgaggcgagagacaagttcatgagacgagtgctgtaccaggccggtgccatgtggattggtatctttgcaacagttggcgtagcaggtttcggggcctggcgagcatggcagcagatgagatgaatcagttaggtatcattcgattcttgtttgttggagccatctcctctctggtaaataaatctacaaagtctagcaatctaagttcttcaaaacatgggtttggtgtttgtctctgacctcggacccattaagcattcatttctataatctggctttaagagttcaataggatctcaaattgatcggaagattatgacggatcataagttcggttgcgatagctaaattggaatctcggcgtatcaaatattataagttcaaaatagctgttaaaagcacgaattctacacctttgcggttgaacacaacagtgacttcgcagggcaactaggtaggtccaaggctatcttatttaatccagaatcatgcctttactggcttatatgag

SEQ ID NO: 4403 - DNA, 3252 bp, Muscodor strobelii
  misc_feature: SGI cDNA ID NO. 561156
  misc_feature: Reduced expression when VOC is produced
  misc_feature: Encodes the peptide sequence at SEQ ID NO 4404
atgaagcaacgattctcttccctcgatgtcaaggttatagcgcatgagctttccgcaagccttgtgtcgctcagagtatctcaaatttacgacctgtcctctaaaatcctattgttcaagttcgcgaaacccgaaaataagaagcagctgcttatagactccggcttccgatgccacctaaccgaattcgcgcggactaccgctgcctcaccctccattttcgtacagaagctacgtaaagtgctcaagacacgacgatgcacatccgtctcgcaaatcggaaccgatcgcataatagagttccagtttagcgatggcttgtatagactatatctcgagttctttgcgggtggcaatgtcatcttgacagatgctgacctcaaaatcttgaccctcatgcgatttgtccctgagggtgagggtcaagagccgcagcgcccaggcctgcagtattcgcttgacaaccgacagaactatggcggtgtacccgatttgaccaaagaacggctacaaggagctctgaagaccatcatggagaagaattccactgctgccgccggcgcgaagaagatcaagaaaaagccgggagatgagctaaggaaaggtctagcaattacgataaatgagctacccccgatattattggatcacgcaatgaaaactgccgacttcgactcaacgctattgccagctactatcttggagaacgatggactattagatcatttattacgctcgcttgtacaggctaggagattagtggaagacatcttaagctcggatacatgcaaaggatacatattcgcgaaaactcgacctggtgccgagaaggcttcggcagagactgaagaagatggacagcaacaaaggaagggcctactctacgaagacttccatcctttccttccccggcagtttgaggaggacccacaatacactgtcgtgacttttgatagtttcggtcaaacagttgacgacttcttctcttctattgagggtcaaaagctggagtcgcgtttgacggaacgcgaggctgctgctaaacggaagctggatgctgctaggtccgaccagcaaaagcgtatcgatgggttgaaagaagtacagacattgaatgagcggaaagccggtgcgattgaggccaatgtcgaaagagtccaggaggctcttgatgcagtcaatggattgattcagcagggtatggactgggagaatatcggaaaactgatcgaaagggagcgtcgatacaacaatccggtggccgctattatccaacttcccctcaagcttcacgagaatactattacagtcctgcttggcgagctggaagaggacgaggaagaggaagatgaggctgatgaaacagacagctctgatgacgatagcattcttcgtgacagtggctttggcggaagcgttggttcgaaacaaaagggtcaggaaaggagattggcgattgatcttaatcttgcgctatctccatacagcaatgcccgagaatactacggcgagaggaagacggcagccgccaaggaggaaaagaccaaacaacaatcagaaatcgctctcaagaatgcggagcagaaaattaccgctgagctcagaaaagggcttaagcaggaaaagcctgttctgcagcccattcgtcgacagatgtggtttgagaaattcctgtggttcttgtcgactgatggttacttggtcctcggaggtaaggatgctcaacagaatgagcagctctacaggcgatatctgaaaaagggagatgtctatctgcacgcagacctccatggcgcgccgagtgtcattataaagaatagcccgaatactcctgatgccccaattccgccttcgacattagcacaagctggatctctcgcggtttgcggctcatcggcatgggaacaaaaagcgtccatgtcagcttggtgggttacggccgatcaagtatcgaaatctgccccagcgggagagtttttaccaacgggatctttcatggtgcgcgggaagaagaatttcttgcctgcttctcaactaatcatgggatttgctttgatgttcaaagtcagcgaggaaagcaaagcgaaacatatcaagcatcgcctctacgatactccggtgaaaaccgacactccgtcggaacctatacctgatgcgccggaagatgcacctgctcagtcaatgaccggtcaagcaagcgagcaggatgccgaagacgaaggctatgatagcgaatttgaggacgacgaagattcaacgcctagatcgaatccacttcagaattttggcggcaatgataggaatcttcaagaattggacccaatagatgaagagccgccgtcggaacaaatgggcgacctagctatctcgaaggaagcgcctcttgctaataacccgggtgaagaagataacctagcgcaaaatgaggaggccgaagaagaggacgacgacgcagatgtggccacagaagcagacaccgtccagaccaatgacagccagcaaactcaaactccatctacacgaggaaaggcaaatcaacccaaaccgagagagcagcagccgaagcgaggacagcgtgggaaagccaagaaggcggcgcagaagtacaaggaccaggatgaggaagacaaagctgctatcgaagcacttatcggcgcatcagctggaaagcaacgcgcagaagcggaagcaaaagctaaggcggaacgtgaagcggccctacaagccctgcgcgagcgtcgccgtgcccagcatcagagacaacagaaggaaactgccgaacacgaagagatacgcaaactcatgcttgatgagggtattgagactttagacccggatgaagtgcagaatctttcgcctcttgatgctctagttggaagaccactgcctggcgatgagatcctggaggtagttgtagtatgcgcaccgtacgctgcagttggaaattgtaagtacaaagtcaagctacagccaggagcccagaagaagggtaaagctgtgaaagagattctggagtcttggaaggcgatctcgagcaagaagggtgtgcttgatgagaagagtctggataaggagcgcatgtggccgagggaagttgagctgctcaagggcattaaggctgaggatgtcatcaactccgtgccgatgaagagtctgaaggtcatgacttctggcggtgcaggtggaagtggcggaggtggaggtggacaaggaaagggaaagggtggtggtaggggtggcaaaaagaagtga

SEQ ID NO: 4404 - protein, 1083 aa, Muscodor strobelii
  misc_feature: SGI Peptide ID NO. 561156
  misc_feature (559)..(662): Pfam Id: PF05670 Pfam Desc: Domain of function (DUF814)
  misc_feature (1)..(1055): NCBI GI: 256733501 Blast Desc: NECHADRAFT_77690 [Nectria haematococca mpVI 77-13-4]
  misc_feature (1)..(1049): NCBI GI: 171684415 Blast Desc: protein product [Podospora anserina] gi|170942168|emb|CAP67820.1| protein product [Podospora anserina]
  misc_feature (1)..(1055): NCBI GI: 46128721 Blast Desc: FG08738.1 [Gibberella zeae PH-1]
  misc_feature (12)..(1055): NCBI GI: 156059014 Blast Desc: SS1G_03519 [Sclerotinia sclerotiorum 1980] gi|154701306|gb|EDO01045.1| SS1G_03519 [Sclerotinia sclerotiorum 1980]
  misc_feature (1)..(1055): NCBI GI: 85091915 Blast Desc: NCU09191 [Neurospora crassa OR74A] gi|28920536|gb|EAA29899.1| conserved [Neurospora crassa OR74A] gi|29150083|emb|CAD79644.1| conserved [Neurospora crassa]
  misc_feature (11)..(1057): NCBI GI: 149209909 Blast Desc: MGCH7_ch7g436 [Magnaporthe grisea 70-15] gi|86196391|gb|EAQ71029.1| MGCH7_ch7g436 [Magnaporthe grisea 70-15]
  misc_feature (1)..(1057): NCBI GI: 145610119 Blast Desc: MGG_02697 [Magnaporthe grisea 70-15] gi|145017496|gb|EDK01859.1| MGG_02697 [Magnaporthe grisea 70-15]
  misc_feature (9)..(1055): NCBI GI: 116193227 Blast Desc: CHGG_06331 [Chaetomium globosum CBS 148.51] gi|88182244|gb|EAQ89712.1| CHGG_06331 [Chaetomium globosum CBS 148.51]
  misc_feature (1)..(1083): NCBI GI: 169612956 Blast Desc: SNOG_09606 [Phaeosphaeria nodorum SN15] gi|111061751|gb|EAT82871.1| SNOG_09606 [Phaeosphaeria nodorum SN15]
  misc_feature (1)..(1083): NCBI GI: 189211034 Blast Desc: serologically defined colon cancer antigen 1 [Pyrenophora tritici-repentis Pt-1C-BFP] gi|187977941|gb|EDU44567.1| serologically defined colon cancer 1
  misc_feature: Useful for introducing or modulating the production of volatile compounds
MKQRFSSLDVKVIAHELSASLVSLRVSQIYDLSSKILLFKFAKPENKKQLLIDSGFRCHLTEFARTTAASPSIFVQKLRKVLKTRRCTSVSQIGTDRIIEFQFSDGLYRLYLEFFAGGNVILTDADLKILTLMRFVPEGEGQEPQRPGLQYSLDNRQNYGGVPDLTKERLQGALKTIMEKNSTAAAGAKKIKKKPGDELRKGLAITINELPPILLDHAMKTADFDSTLLPATILENDGLLDHLLRSLVQARRLVEDILSSDTCKGYIFAKTRPGAEKASAETEEDGQQQRKGLLYEDFHPFLPRQFEEDPQYTVVTFDSFGQTVDDFFSSIEGQKLESRLTEREAAAKRKLDAARSDQQKRIDGLKEVQTLNERKAGAIEANVERVQEALDAVNGLIQQGMDWENIGKLIERERRYNNPVAAIIQLPLKLHENTITVLLGELEEDEEEEDEADETDSSDDDSILRDSGFGGSVGSKQKGQERRLAIDLNLALSPYSNAREYYGERKTAAAKEEKTKQQSEIALKNAEQKITAELRKGLKQEKPVLQPIRRQMWFEKFLWFLSTDGYLVLGGKDAQQNEQLYRRYLKKGDVYLHADLHGAPSVIIKNSPNTPDAPIPPSTLAQAGSLAVCGSSAWEQKASMSAWWVTADQVSKSAPAGEFLPTGSFMVRGKKNFLPASQLIMGFALMFKVSEESKAKHIKHRLYDTPVKTDTPSEPIPDAPEDAPAQSMTGQASEQDAEDEGYDSEFEDDEDSTPRSNPLQNFGGNDRNLQELDPIDEEPPSEQMGDLAISKEAPLANNPGEEDNLAQNEEAEEEDDDADVATEADTVQTNDSQQTQTPSTRGKANQPKPREQQPKRGQRGKAKKAAQKYKDQDEEDKAAIEALIGASAGKQRAEAEAKAKAEREAALQALRERRRAQHQRQQKETAEHEEIRKLMLDEGIETLDPDEVQNLSPLDALVGRPLPGDEILEVVVVCAPYAAVGNCKYKVKLQPGAQKKGKAVKEILESWKAISSKKGVLDEKSLDKERMWPREVELLKGIKAEDVINSVPMKSLKVMTSGGAGGSGGGGGGQGKGKGGGRGGKKK

SEQ ID NO: 4405 - DNA, 3708 bp, Muscodor strobelii
  misc_feature: SGI EST ID NO. CUFF.11246.0
  misc_feature: Variant of the nucleotide sequence at SEQ ID NO 4403
tacattccgcagaccacgagttgttgagattcctggccagcaggtaggtggaaataggtgtaacttacgagagacacttcgtcgcagaacataatgaagcaacgattctcttccctcgatgtcaaggttatagcgcatgagctttccgcaagccttgtgtcgctcagagtatctcaaatttacgacctgtcctctaaaatcctattgttcaagttcgcgaaacccgaaaataagaagcagctgcttatagactccggcttccgatgccacctaaccgaattcgcgcggactaccgctgcctcaccctccattttcgtacagaagctacgtaaagtgctcaagacacgacgatgcacatccgtctcgcaaatcggaaccgatcgcataatagagttccagtttagcgatggcttgtatagactatatctcgagttctttgcgggtggcaatgtcatcttgacagatgctgacctcaaaatcttgaccctcatgcgatttgtccctgagggtgagggtcaagagccgcagcgcccaggcctgcagtattcgcttgacaaccgacagaactatggcggtgtacccgatttgaccaaagaacggctacaaggagctctgaagaccatcatggagaagaattccactgctgccgccggcgcgaagaagatcaagaaaaagccgggagatgagctaaggaaaggtctagcaattacgataaatgagctacccccgatattattggatcacgcaatgaaaactgccgacttcgactcaacgctattgccagctactatcttggagaacgatggactattagatcatttattacgctcgcttgtacaggctaggagattagtggaagacatcttaagctcggatacatgcaaaggatacatattcgcgaaaactcgacctggtgccgagaaggcttcggcagagactgaagaagatggacagcaacaaaggaagggcctactctacgaagacttccatcctttccttccccggcagtttgaggaggacccacaatacactgtcgtgacttttgatagtttcggtcaaacagttgacgacttcttctcttctattgagggtcaaaagctggagtcgcgtttgacggaacgcgaggctgctgctaaacggaagctggatgctgctaggtccgaccagcaaaagcgtatcgatgggttgaaagaagtacagacattgaatgagcggaaagccggtgcgattgaggccaatgtcgaaagagtccaggaggctcttgatgcagtcaatggattgattcagcagggtatggactgggagaatatcggaaaactgatcgaaagggagcgtcgatacaacaatccggtggccgctattatccaacttcccctcaagcttcacgagaatactattacagtcctgcttggcgagctggaagaggacgaggaagaggaagatgaggctgatgaaacagacagctctgatgacgatagcattcttcgtgacagtggctttggcggaagcgttggttcgaaacaaaagggtcaggaaaggagattggcgattgatcttaatcttgcgctatctccatacagcaatgcccgagaatactacggcgagaggaagacggcagccgccaaggaggaaaagaccaaacaacaatcagaaatcgctctcaagaatgcggagcagaaaattaccgctgagctcagaaaagggcttaagcaggaaaagcctgttctgcagcccattcgtcgacagatgtggtttgagaaattcctgtggttcttgtcgactgatggttacttggtcctcggaggtaaggatgctcaacagaatgagcagctctacaggcgatatctgaaaaagggagatgtctatctgcacgcagacctccatggcgcgccgagtgtcattataaagaatagcccgaatactcctgatgccccaattccgccttcgacattagcacaagctggatctctcgcggtttgcggctcatcggcatgggaacaaaaagcgtccatgtcagcttggtgggttacggccgatcaagtatcgaaatctgccccagcgggagagtttttaccaacgggatctttcatggtgcgcgggaagaagaatttcttgcctgcttctcaactaatcatgggatttgctttgatgttcaaagtcagcgaggaaagcaaagcgaaacatatcaagcatcgcctctacgatactccggtgaaaaccgacactccgtcggaacctatacctgatgcgccggaagatgcacctgctcagtcaatgaccggtcaagcaagcgagcaggatgccgaagacgaaggctatgatagcgaatttgaggacgacgaagattcaacgcctagatcgaatccacttcagaattttggcggcaatgataggaatcttcaagaattggacccaatagatgaagagccgccgtcggaacaaatgggcgacctagctatctcgaaggaagcgcctcttgctaataacccgggtgaagaagataacctagcgcaaaatgaggaggccgaagaagaggacgacgacgcagatgtggccacagaagcagacaccgtccagaccaatgacagccagcaaactcaaactccatctacacgaggaaaggcaaatcaacccaaaccgagagagcagcagccgaagcgaggacagcgtgggaaagccaagaaggcggcgcagaagtacaaggaccaggatgaggaagacaaagctgctatcgaagcacttatcggcgcatcagctggaaagcaacgcgcagaagcggaagcaaaagctaaggcggaacgtgaagcggccctacaagccctgcgcgagcgtcgccgtgcccagcatcagagacaacagaaggaaactgccgaacacgaagagatacgcaaactcatgcttgatgagggtattgagactttagacccggatgaagtgcagaatctttcgcctcttgatgctctagttggaagaccactgcctggcgatgagatcctggaggtagttgtagtatgcgcaccgtacgctgcagttggaaattgtaagtacaaagtcaagctacagccaggagcccagaagaagggtaaagctgtgaaagagattctggagtcttggaaggcgatctcgagcaagaagggtgtgcttgatgagaagagtctggataaggagcgcatgtggccgagggaagttgagctgctcaagggcattaaggctgaggatgtcatcaactccgtgccgatgaagagtctgaaggtcatgacttctggcggtgcaggtggaagtggcggaggtggaggtggacaaggaaagggaaagggtggtggtaggggtggcaaaaagaagtgatgatcttgaagagagccacttgatggtcacattgtggccttgagatagggaacttaacaacaagtcactagctagcaatgcaactgttatcctgcatatcttcaacacttctgtttcccgcattctatacgagtgtgatgagcctaagcattttgattgtttctagctctttgagtctattggtctatcggggcgaaacaactgggcatgggtctatcaaccatagaacgaagtagtatcaaccccaagaaccctcccaggctcctcatacataatggtcccattgctcgtcgccatacccccagcggtcataacaaacaccgtcttccaatcctgtgcaaacacgcaactcgtggggatagg

SEQ ID NO: 4406 - DNA, 1056 bp, Muscodor strobelii
  misc_feature: SGI cDNA ID NO. 561157
  misc_feature: Encodes the peptide sequence at SEQ ID NO 4407
atgctatctcacgcctccctcttcctcggcgctacactatgcctagcccacgcctcaacatgtacatccaccaaaaacgcaacaagcgatatatttcttcccgccgtctccctcgcagacttaaccgcgaatggaacatggctagagaacgtcgcaatgcgtcccaatggcgatattttgacgacgttgctcaatcctaccgccacactctacactctcaaatctggaagtcatgagttggaggctgtccacgagtttgagggcgcgaatggattgattggaatcacgaaagttggcctagactcatatctacttactgctcagaagttccatacattcatagacccttatccaaacaccacagcactctgggaagtttcatacaccgatggctcatccccatcaatccgaaaggtcacagatgcgccagaagcgcttctctacaacggcatggcagccgtaaacccaagtggtgtaggcgagggcgccggaatagttttaatcgcggattcattcgcgggacaggttgtccggttgaatcttacaactggagagcgagaggttatcctcgacatccccgaactcaagcccccagcagacgtctcaagcgcaggcataaacggagtaaaaatccgagactcgtatctctacttctccaacgcatttctcgtctccttctaccgcatcccaatcaacatccagggttatccctccggccccctcgaaaccctgatcaccatctccggcttagagctcatcgacgacttctgtttcgacaaagagggcaatatctggggtatggcagcactacaaaacagaatcttcgtagtgccccgtgacgacaaaggtggttatgtcaaagaaggcgggctccgattcgtcgctggaagggaagacacgttggaagtacctatccccacgagttgcgtgtttgcacaggattggaagacggtgtttgttatgaccgctgggggtatggcgacgagcaatgggaccattatgtatgaggagcctgggagggttcttggggttgatactacttcgttctatggttga

SEQ ID NO: 4407 - protein, 351 aa, Muscodor strobelii
  misc_feature: SGI Peptide ID NO. 561157
  misc_feature (33)..(346): NCBI GI: 256722873 Blast Desc: NECHADRAFT_52990 [Nectria haematococca mpVI 77-13-4]
  misc_feature (33)..(326): NCBI GI: 46110901 Blast Desc: FG02332.1 [Gibberella zeae PH-1]
  misc_feature (33)..(346): NCBI GI: 256729493 Blast Desc: NECHADRAFT_47685 [Nectria haematococca mpVI 77-13-4]
  misc_feature (44)..(349): NCBI GI: 171683788 Blast Desc: protein product [Podospora anserina] gi|170941854|emb|CAP67507.1| protein product [Podospora anserina]
  misc_feature (6)..(344): NCBI GI: 67901802 Blast Desc: AN7888.2 [Aspergillus nidulans FGSC A4] gi|40740352|gb|EAA59542.1| AN7888.2 [Aspergillus nidulans FGSC A4]
  misc_feature (9)..(350): NCBI GI: 156049683 Blast Desc: SS1G_08548 [Sclerotinia sclerotiorum 1980] gi|154692947|gb|EDN92685.1| SS1G_08548 [Sclerotinia sclerotiorum 1980]
  misc_feature (14)..(344): NCBI GI: 259480636 Blast Desc: TPA: conserved [Aspergillus nidulans FGSC A4]
  misc_feature (22)..(326): NCBI GI: 119482818 Blast Desc: NFIA_026140 [Neosartorya fischeri NRRL 181] gi|119409592|gb|EAW19540.1| conserved [Neosartorya fischeri NRRL 181]
  misc_feature (135)..(349): NCBI GI: 85095914 Blast Desc: NCU05626 [Neurospora crassa OR74A] gi|28921649|gb|EAA30934.1| [Neurospora crassa OR74A]
  misc_feature (46)..(349): NCBI GI: 154303709 Blast Desc: BC1G_08739 [Botryotinia fuckeliana B05.10] gi|150854533|gb|EDN29725.1| BC1G_08739 [Botryotinia fuckeliana B05.10]
MLSHASLFLGATLCLAHASTCTSTKNATSDIFLPAVSLADLTANGTWLENVAMRPNGDILTTLLNPTATLYTLKSGSHELEAVHEFEGANGLIGITKVGLDSYLLTAQKFHTFIDPYPNTTALWEVSYTDGSSPSIRKVTDAPEALLYNGMAAVNPSGVGEGAGIVLIADSFAGQVVRLNLTTGEREVILDIPELKPPADVSSAGINGVKIRDSYLYFSNAFLVSFYRIPINIQGYPSGPLETLITISGLELIDDFCFDKEGNIWGMAALQNRIFVVPRDDKGGYVKEGGLRFVAGREDTLEVPIPTSCVFAQDWKTVFVMTAGGMATSNGTIMYEEPGRVLGVDTTSFYG

SEQ ID NO: 4408 - DNA, 1614 bp, Muscodor strobelii
  misc_feature: SGI cDNA ID NO. 561158
  misc_feature: Encodes the peptide sequence at SEQ ID NO 4409
atgaccgctgttacatttaccagctccgagaagcttgttttgggctctgtcttccaagatatcatcgaccccaagactgtggctcttgatttccttatacatcccaagtcggatccatattaccatgacccagtagagccaaagactcacccatatcaagtcgagcagccgatgcaattcccacccacagactctatatttttgaggggcagctcaatgatccgcaggagcagtgtagagagtattgatctcgctgagaaggggctagcaaaagcccgcaggggcagcctcgagagtatagatctggctgcggagggtgcattgccagatgactaccatacaccatcgccgccaccagcaggtccaagctttcgggaacgagcgatggagaagaactttccgatgcctgattcgtttgtcgttgcgaactccgatgacgaagaatacgacagtgagaatgacggcagtgacacagagattggcaaagatcaagttgaatacgatagtgtccttgatagcgtcttgaacagtgagtacctctctccttcaccgtcacccattaataacagtcttcctaggggccgccccgtgattgaagcacccttatacgttagcggagacatcgagcaagggcacgtcgttccgggtctcgagcatttggttagaagtctcagtcctaagagtcagaagaagcggaataaggatcttaagaaagtacatgaggtgcctgcttctgacaaaatagttggtccacaaccgaggggaccagaactattgagcgagaccccgcctttccctactagagtgagacgctggagtgaggtcgaggatcccgaaccgcttatccagaaactgtgggacgtcgccgagactcttgatcttcaagaaatcgagcctcctacgccgaccggaagcatcaagttgagatggcggggtcggagcctaatccataattgggctgccgagcaccccagcagaccagacaccccaattctcgccatcgatcaagaacaaagtggcccaagcgtgaaaaccaagcgaccagatactccaaccgtcaccgtcgaccaagaagagagtggtcccagcgtgatatccaagaggccagtcaccccaactttgaacatagacgaggaagacacaaacaacatcttgacatccaaagcaacaattttcgaatcgcctaccaccagcctcgtcctgccatatccagactctccctctccaactatcgcctcgcgacgcagcaaaggtaaaggcaaggagaaagctgtagctccacttcgtatacacatgcctcctcctcaagcttacaaaggcgtatacacgcccacaccgaatgtatgtccccatgaacacgaggtcaccaaagacgtcaagggggttcgcaacgattgtaagcgatgcgcgccaaaattcttccgcgaacacggtgtaaagcctgcgagtgtgccaaactcaccatttgtcatgatggctccgcagagccgcaatagacgactaagtcactcgaccgagtcgtgtacttgtacagacgttggcccgtctgcacgatgtcagaattgtagaaagaaggaaatcgtcgctgcggcgtttcatcaaaattggttttaa

SEQ ID NO: 4409 - protein, 537 aa, Muscodor strobelii
  misc_feature: SGI Peptide ID NO. 561158
MTAVTFTSSEKLVLGSVFQDIIDPKTVALDFLIHPKSDPYYHDPVEPKTHPYQVEQPMQFPPTDSIFLRGSSMIRRSSVESIDLAEKGLAKARRGSLESIDLAAEGALPDDYHTPSPPPAGPSFRERAMEKNFPMPDSFVVANSDDEEYDSENDGSDTEIGKDQVEYDSVLDSVLNSEYLSPSPSPINNSLPRGRPVIEAPLYVSGDIEQGHVVPGLEHLVRSLSPKSQKKRNKDLKKVHEVPASDKIVGPQPRGPELLSETPPFPTRVRRWSEVEDPEPLIQKLWDVAETLDLQEIEPPTPTGSIKLRWRGRSLIHNWAAEHPSRPDTPILAIDQEQSGPSVKTKRPDTPTVTVDQEESGPSVISKRPVTPTLNIDEEDTNNILTSKATIFESPTTSLVLPYPDSPSPTIASRRSKGKGKEKAVAPLRIHMPPPQAYKGVYTPTPNVCPHEHEVTKDVKGVRNDCKRCAPKFFREHGVKPASVPNSPFVMMAPQSRNRRLSHSTESCTCTDVGPSARCQNCRKKEIVAAAFHQNWF

SEQ ID NO: 4410 - DNA, 2109 bp, Muscodor strobelii
  misc_feature: SGI cDNA ID NO. 561159
  misc_feature: Encodes the peptide sequence at SEQ ID NO 4411
atggctgttgaaccatcaaaccctctatcagactctggatccctgcggctactgcagatcgatcgggatgccacgggtgccgctgatggcctcatcgcctgtcagctgtcagtgcatggcgtggcagaatgtcctccatatattgcactatcatacgcctggaacgagccgcaagcatatttagagcctatatcagaaagcaagatcacattagatggtcagcttatagctgtcacgccgaacctcctatatgctctccgtcatctggcaaaccaggagcacaatgggggctatagttacttctggatcgacgctctttgcatcaatcaacaatccgacttggagcgtactcatcaagtctcgattatgcatcaaatctaccgtaacgctggtgcagtacttgttttcctcggtccggatctcgaggatgaagcatataccgttcgtgagttccttagggctctaatgcagaaatattatcacgagaatgattgtcgcggggacgtctctgcggttaaatacgccaatgactttcttcattccgacaattcgcatgctctgaaggatgctggattacctctactggacgcggatatatggaaacaagttaccaggttttgggaacgggcctggttcagtagagtgtgggtacaacaagaagtcgcacttgcgcgagaagtatcgtattggtgtggctctgtagagttctcgcaagaagatctcgtccagggctcacggttcaatgtagtcagcgggctgggagagacgctgatgatcgtccgcatgcagatattagacgactacaacgaaccaaacatcatccaggggcgtaaagttggatgcagcgccattcgtattactaacttgcagtcctgggtgaaccaagaaggcctattcgaagcagaagatagcaaacaggcttctgaccgtatgagcggtcctgccgtcctatgccctcatggcaacttcgcggcgcctttactgagactctttgccaatgagctattccttactttccgtgacgactgcagtgacccaagagaccgcatcttcgcactcttggtgctaatgcggcagacagcggaagcaaagaagttcgcgcccttgccactgcaaactgactatacgcgaagcgtggcagaagtcttcactgagaccactgcctatgtcatccagcagacgggttggctaggtgtgctatctttgatatatcctagaagaaaactagacgcacctcgcgacacgccttcttgggtgccggatttctgcacaccgccaccctcgccgctattaatctttgaagaggaaacgacgacacggattgcgtcacactttgagatgttgtgtgatggcctcaggccgtctgttatcgacactacattgtctgtgagctgcaaacgcatcggtgtagtacgtgaaaccggaaacagctacagggcaatggtagacgaaggcgacttcgaagccacgttcaaactcctgctcaatatgcctgctggaatttggccgaattacccaatggtagattactggatcgacgtaatgaactgcaaattgtggccgacgctagatccagaggagcagaagaagactagagcaagacaacgacactggctcgaataccacattctcgccacatggcgtcgagaatggatggcaggtcgcatatcacgcggcagggaatatctcgcgacaatacctagtctcgaacttgttgcgcaagccgacgtgactaagaccttgccgacattgcaggactggatcaacgattactccacagctgagcagcagaccaaacttctaaatgaaagacccgtctcttcatccaagggccaatggagccggagactgtttcgtcttgaggaattgggctttccgcactgtccagctgccaccgtgatggggatcgggcctgaggatgtgaggcctggggatgaagtatttcaggtcattggttctgtcatgccgctcgtgctgaggccagttaccgacgcgggaagtgaagctacgccgagagcacatgtgcttggcgaggcttacatgactggctttgaggaattcgtcaggcgcatggatcatatagagtgtgagcgatggcatatcatctaa

SEQ ID NO: 4411 - protein, 702 aa, Muscodor strobelii
  misc_feature: SGI Peptide ID NO. 561159
  misc_feature (47)..(220): Pfam Id: PF06985 Pfam Desc: Heterokaryon incompatibility protein (HET)
  misc_feature (100)..(139): Pfam Id: PF06985 Pfam Desc: Heterokaryon incompatibility protein (HET)
  misc_feature (15)..(684): NCBI GI: 154313282 Blast Desc: BC1G_05338 [Botryotinia fuckeliana B05.10] gi|150849407|gb|EDN24600.1| BC1G_05338 [Botryotinia fuckeliana B05.10]
  misc_feature (15)..(683): NCBI GI: 256733829 Blast Desc: NECHADRAFT_77370 [Nectria haematococca mpVI 77-13-4]
  misc_feature (7)..(684): NCBI GI: 256721874 Blast Desc: NECHADRAFT_88090 [Nectria haematococca mpVI 77-13-4]
  misc_feature (9)..(444): NCBI GI: 189197041 Blast Desc: conserved [Pyrenophora tritici-repentis Pt-1C-BFP] gi|187980806|gb|EDU47432.1| conserved [Pyrenophora tritici-repentis Pt-1C-BFP]
  misc_feature (15)..(511): NCBI GI: 256731097 Blast Desc: NECHADRAFT_84995 [Nectria haematococca mpVI 77-13-4]
  misc_feature (9)..(434): NCBI GI: 256721799 Blast Desc: NECHADRAFT_53281 [Nectria haematococca mpVI 77-13-4]
  misc_feature (7)..(425): NCBI GI: 171678233 Blast Desc: protein product [Podospora anserina] gi|170937186|emb|CAP61843.1| protein product [Podospora anserina]
  misc_feature (6)..(684): NCBI GI: 30315956 Blast Desc: HET6_NEUCR RecName: Full=Heterokaryon incompatibility protein 6, OR allele; Short=Het-6(OR) gi|6578941|gb|AAF18141.1| heterokaryon incompatibility protein [Neurospora crassa] protein
  misc_feature (12)..(440): NCBI GI: 169622599 Blast Desc: SNOG_14524 [Phaeosphaeria nodorum SN15] gi|111056944|gb|EAT78064.1| SNOG_14524 [Phaeosphaeria nodorum SN15]
  misc_feature (15)..(422): NCBI GI: 256724643 Blast Desc: NECHADRAFT_84407 [Nectria haematococca mpVI 77-13-4]
MAVEPSNPLSDSGSLRLLQIDRDATGAADGLIACQLSVHGVAECPPYIALSYAWNEPQAYLEPISESKITLDGQLIAVTPNLLYALRHLANQEHNGGYSYFWIDALCINQQSDLERTHQVSIMHQIYRNAGAVLVFLGPDLEDEAYTVREFLRALMQKYYHENDCRGDVSAVKYANDFLHSDNSHALKDAGLPLLDADIWKQVTRFWERAWFSRVWVQQEVALAREVSYWCGSVEFSQEDLVQGSRFNVVSGLGETLMIVRMQILDDYNEPNIIQGRKVGCSAIRITNLQSWVNQEGLFEAEDSKQASDRMSGPAVLCPHGNFAAPLLRLFANELFLTFRDDCSDPRDRIFALLVLMRQTAEAKKFAPLPLQTDYTRSVAEVFTETTAYVIQQTGWLGVLSLIYPRRKLDAPRDTPSWVPDFCTPPPSPLLIFEEETTTRIASHFEMLCDGLRPSVIDTTLSVSCKRIGVVRETGNSYRAMVDEGDFEATFKLLLNMPAGIWPNYPMVDYWIDVMNCKLWPTLDPEEQKKTRARQRHWLEYHILATWRREWMAGRISRGREYLATIPSLELVAQADVTKTLPTLQDWINDYSTAEQQTKLLNERPVSSSKGQWSRRLFRLEELGFPHCPAATVMGIGPEDVRPGDEVFQVIGSVMPLVLRPVTDAGSEATPRAHVLGEAYMTGFEEFVRRMDHIECERWHII

SEQ ID NO: 4412 - DNA, 2193 bp, Muscodor strobelii
  misc_feature: SGI EST ID NO. CUFF.11195.0
  misc_feature: Variant of the nucleotide sequence at SEQ ID NO 4410
tgatcgggtgcattttgagtgccgtatccacgaaccaccaccacgttcaaatttccgcttttcatctatggctgttgaaccatcaaaccctctatcagactctggatccctgcggctactgcagatcgatcgggatgccacgggtgccgctgatggcctcatcgcctgtcagctgtcagtgcatggcgtggcagaatgtcctccatatattgcactatcatacgcctggaacgagccgcaagcatatttagagcctatatcagaaagcaagatcacattagatggtcagcttatagctgtcacgccgaacctcctatatgctctccgtcatctggcaaaccaggagcacaatgggggctatagttacttctggatcgacgctctttgcatcaatcaacaatccgacttggagcgtactcatcaagtctcgattatgcatcaaatctaccgtaacgctggtgcagtacttgttttcctcggtccggatctcgaggatgaagcatataccgttcgtgagttccttagggctctaatgcagaaatattatcacgagaatgattgtcgcggggacgtctctgcggttaaatacgccaatgactttcttcattccgacaattcgcatgctctgaaggatgctggattacctctactggacgcggatatatggaaacaagttaccaggttttgggaacgggcctggttcagtagagtgtgggtacaacaagaagtcgcacttgcgcgagaagtatcgtattggtgtggctctgtagagttctcgcaagaagatctcgtccagggctcacggttcaatgtagtcagcgggctgggagagacgctgatgatcgtccgcatgcagatattagacgactacaacgaaccaaacatcatccaggggcgtaaagttggatgcagcgccattcgtattactaacttgcagtcctgggtgaaccaagaaggcctattcgaagcagaagatagcaaacaggcttctgaccgtatgagcggtcctgccgtcctatgccctcatggcaacttcgcggcgcctttactgagactctttgccaatgagctattccttactttccgtgacgactgcagtgacccaagagaccgcatcttcgcactcttggtgctaatgcggcagacagcggaagcaaagaagttcgcgcccttgccactgcaaactgactatacgcgaagcgtggcagaagtcttcactgagaccactgcctatgtcatccagcagacgggttggctaggtgtgctatctttgatatatcctagaagaaaactagacgcacctcgcgacacgccttcttgggtgccggatttctgcacaccgccaccctcgccgctattaatctttgaagaggaaacgacgacacggattgcgtcacactttgagatgttgtgtgatggcctcaggccgtctgttatcgacactacattgtctgtgagctgcaaacgcatcggtgtagtacgtgaaaccggaaacagctacagggcaatggtagacgaaggcgacttcgaagccacgttcaaactcctgctcaatatgcctgctggaatttggccgaattacccaatggtagattactggatcgacgtaatgaactgcaaattgtggccgacgctagatccagaggagcagaagaagactagagcaagacaacgacactggctcgaataccacattctcgccacatggcgtcgagaatggatggcaggtcgcatatcacgcggcagggaatatctcgcgacaatacctagtctcgaacttgttgcgcaagccgacgtgactaagaccttgccgacattgcaggactggatcaacgattactccacagctgagcagcagaccaaacttctaaatgaaagacccgtctcttcatccaagggccaatggagccggagactgtttcgtcttgaggaattgggctttccgcactgtccagctgccaccgtgatggggatcgggcctgaggatgtgaggcctggggatgaagtatttcaggtcattggttctgtcatgccgctcgtgctgaggccagttaccgacgcgggaagtgaagctacgccgagagcacatgtgcttggcgaggcttacatgactggctttgaggaattcgtcaggcgcatggatcatatagagtgtgagcgatggcatatcatctaatcaatagacctattgaa

SEQ ID NO: 4413 - DNA, 1965 bp, Muscodor strobelii
  misc_feature: SGI cDNA ID NO. 561160
  misc_feature: Encodes the peptide sequence at SEQ ID NO 4414
atggagaagaaaacagaggatcttttgaaacggccgctctatttctacgatttaccccacgaacttctctcaagcctcacgctcaaggaaggcgccgaatcgcaggaaatcgacgcagtccgtgacctgtcaacatcgaaatcggacacatcgccaaccgcttcgaccgaggatacagtaggatcgcaggcctgctctctgtgttccttgtctttcccgacggtgcacgagcaacgcggccaccagaagtccgactggcaccattacagcctaaagcaaaagctgcgtggcgcaaagcctgtgtctgaaggggaattcgaagctttgatcggcagtctagatgagagtttatcaggctccgattcctctgagtcagaggatgatgagacagataacggcaaggatagcacattgacagctctgctgaagaaacaagctaccttggcagaaaagaacgcgcgcgcaagcaatagcaatgcagacgaggatgacggcgatgcctccaataggagacctagagggagtgggaagccgcctctgctgtggttcagctcgcctttattgccaacaaacaactattttggtatttaccgcgccatcttcacagcggatgagacgagagacggagcagatgtcactaagttgatagcgaagaaacagttggaacccatagcgattccaaagccaagcccagatgggaaaccaccagctgcatacaaaggtccccacgtcttcttatgtatgatcggcggtggtcactttgctgccatggtcgtgtctctcgctccacgacagaccaaacatggttctgtcgggcccatgaacaaggaggccactgtactcgcacacaagactttccaccgctacacaacgagaaggaaacagggtggctcgcaatcagcgaatgacaacgcgaaaggcaatgcgcactccgccggttcaagtattcgtcggtacaacgaacaggcactaatagacgatattcgagcactattacaagactggaaaggcctcctagatacctccgagctgctgttcattcgggcaacaggcgccacgaaccggaggacgctgtttggtccatatgaaggtcaagtattacgggcaaatgaccccagaatacggggttttcctttcagcacccggcgagccactcaaaatgagctgatgcgctccttcatcgaactcactcggctaaaggtcagggaaattgaccccgcagcaatagtaaagccgacacaggaagcaaagccagcaacgccgaagcctagcaagcccgctacaccaaaattgtccgaggaggaagagactgcacaattacacacatcacaattacaagcatttatacggcgctcaaaactacctgctttactatcctacctaaagaataacaacttgccgtctgatttccgattccagccaagcgactcacagcaaaatcatcacgcaccaacgccactacactttgcagcaagccagaactcagctgcactcgtctctggactattagccaaaggtggtgctgacccaacactccaaaacgatgaaggcaaaacagcattcgacctcgctggagatcgcgcaacacgtgacgcattccgcgttgcacgtgacgagctgggagagaaagcctgggactgggaagcatcccacgtccctgcagctctaaagcgcgccgacgcagaacggcgcgaggaacgtgaacgtgtcgagagcgagcggaaggaagctgagcgccgcgctgctgaggaggttagattaaagcgcgaaggaccaaaagtagacgggaagacagcgaagggtaaaagtatactcgatgcgggtgttgccagatctgcacaagagaaacgtgaggaagaagcgaggggtttgacgcctgagcagagaatgaaattagaccgtgagcgcagggcacgtgcggctgaggaaaggtttaggagaatgcagcagggtggtggcggttag

SEQ ID NO: 4414 - protein, 654 aa, Muscodor strobelii
  misc_feature: SGI Peptide ID NO. 561160
  misc_feature (485)..(515): Pfam Id: PF00023 Pfam Desc: Ankyrin repeat
  misc_feature (1)..(651): NCBI GI: 149210771 Blast Desc: MGCH7_ch7g858 [Magnaporthe grisea 70-15] gi|86196813|gb|EAQ71451.1| MGCH7_ch7g858 [Magnaporthe grisea 70-15]
  misc_feature (1)..(651): NCBI GI: 145609684 Blast Desc: MGG_03061 [Magnaporthe grisea 70-15] gi|145017089|gb|EDK01452.1| MGG_03061 [Magnaporthe grisea 70-15]
  misc_feature (1)..(653): NCBI GI: 116193347 Blast Desc: CHGG_06391 [Chaetomium globosum CBS 148.51] gi|88182304|gb|EAQ89772.1| CHGG_06391 [Chaetomium globosum CBS 148.51]
  misc_feature (1)..(633): NCBI GI: 171684511 Blast Desc: protein product [Podospora anserina] gi|170942216|emb|CAP67868.1| protein product [Podospora anserina]
  misc_feature (1)..(626): NCBI GI: 256734191 Blast Desc: [Nectria haematococca mpVI 77-13-4]
  misc_feature (1)..(652): NCBI GI: 46129320 Blast Desc: FG08845.1 [Gibberella zeae PH-1]
  misc_feature (1)..(630): NCBI GI: 164429732 Blast Desc: NCU02147 [Neurospora crassa OR74A] gi|157073596|gb|EAA35270.2| conserved [Neurospora crassa OR74A]
  misc_feature (1)..(632): NCBI GI: 154308289 Blast Desc: BC1G_07890 [Botryotinia fuckeliana B05.10] gi|150852975|gb|EDN28167.1| BC1G_07890 [Botryotinia fuckeliana B05.10]
  misc_feature (1)..(632): NCBI GI: 156058884 Blast Desc: SS1G_03454 [Sclerotinia sclerotiorum 1980] gi|154701241|gb|EDO00980.1| SS1G_03454 [Sclerotinia sclerotiorum 1980]
  misc_feature (6)..(626): NCBI GI: 115433628 Blast Desc: conserved [Aspergillus terreus NIH2624] gi|114189803|gb|EAU31503.1| conserved [Aspergillus terreus NIH2624]
MEKKTEDLLKRPLYFYDLPHELLSSLTLKEGAESQEIDAVRDLSTSKSDTSPTASTEDTVGSQACSLCSLSFPTVHEQRGHQKSDWHHYSLKQKLRGAKPVSEGEFEALIGSLDESLSGSDSSESEDDETDNGKDSTLTALLKKQATLAEKNARASNSNADEDDGDASNRRPRGSGKPPLLWFSSPLLPTNNYFGIYRAIFTADETRDGADVTKLIAKKQLEPIAIPKPSPDGKPPAAYKGPHVFLCMIGGGHFAAMVVSLAPRQTKHGSVGPMNKEATVLAHKTFHRYTTRRKQGGSQSANDNAKGNAHSAGSSIRRYNEQALIDDIRALLQDWKGLLDTSELLFIRATGATNRRTLFGPYEGQVLRANDPRIRGFPFSTRRATQNELMRSFIELTRLKVREIDPAAIVKPTQEAKPATPKPSKPATPKLSEEEETAQLHTSQLQAFIRRSKLPALLSYLKNNNLPSDFRFQPSDSQQNHHAPTPLHFAASQNSAALVSGLLAKGGADPTLQNDEGKTAFDLAGDRATRDAFRVARDELGEKAWDWEASHVPAALKRADAERREERERVESERKEAERRAAEEVRLKREGPKVDGKTAKGKSILDAGVARSAQEKREEEARGLTPEQRMKLDRERRARAAEERFRRMQQGGGG

SEQ ID NO: 4415 - DNA, 4366 bp, Muscodor strobelii
  misc_feature: SGI EST ID NO. CUFF.11461.1
  misc_feature: Variant of the nucleotide sequence at SEQ ID NO 4413
cctgtttgcgccaaccggactaattcttttgagctgagcacccaagacaaaaagtaaagaccgaatctggccgaccatggagaagaaaacagaggatcttttgaaacggccgctctatttctacgatttaccccacgaacttctctcaagcctcacgctcaaggaaggcgccgaatcgcaggaaatcgacgcagtccgtgacctgtcaacatcgaaatcggacacatcgccaaccgcttcgaccgaggatacagtaggatcgcaggcctgctctctgtgttccttgtctttcccgacggtgcacgagcaacgcggccaccagaagtccgactggcaccattacagcctaaagcaaaagctgcgtggcgcaaagcctgtgtctgaaggggaattcgaagctttgatcggcagtctagatgagagtttatcaggctccgattcctctgagtcagaggatgatgagacagataacggcaaggatagcacattgacagctctgctgaagaaacaagctaccttggcagaaaagaacgcgcgcgcaagcaatagcaatgcagacgaggatgacggcgatgcctccaataggagacctagagggagtgggaagccgcctctgctgtggttcagctcgcctttattgccaacaaacaactattttggtatttaccgcgccatcttcacagcggatgagacgagagacggagcagatgtcactaagttgatagcgaagaaacagttggaacccatagcgattccaaagccaagcccagatgggaaaccaccagctgcatacaaaggtccccacgtcttcttatgtatgatcggcggtggtcactttgctgccatggtcgtgtctctcgctccacgacagaccaaacatggttctgtcgggcccatgaacaaggaggccactgtactcgcacacaagactttccaccgctacacaacgagaaggaaacagggtggctcgcaatcagcgaatgacaacgcgaaaggcaatgcgcactccgccggttcaagtattcgtcggtacaacgaacaggcactaatagacgatattcgagcactattacaagactggaaaggcctcctagatacctccgagctgctgttcattcgggcaacaggcgccacgaaccggaggacgctgtttggtccatatgaaggtcaagtattacgggcaaatgaccccagaatacggggttttcctttcagcacccggcgagccactcaaaatgagctgatgcgctccttcatcgaactcactcggctaaaggtcagggaaattgaccccgcagcaatagtaaagccgacacaggaagcaaagccagcaacgccgaagcctagcaagcccgctacaccaaaattgtccgaggaggaagagactgcacaattacacacatcacaattacaagcatttatacggcgctcaaaactacctgctttactatcctacctaaagaataacaacttgccgtctgatttccgattccagccaagcgactcacagcaaaatcatcacgcaccaacgccactacactttgcagcaagccagaactcagctgcactcgtctctggactattagccaaaggtggtgctgacccaacactccaaaacgatgaaggcaaaacagcattcgacctcgctggagatcgcgcaacacgtgacgcattccgcgttgcacgtgacgagctgggagagaaagcctgggactgggaagcatcccacgtccctgcagctctaaagcgcgccgacgcagaacggcgcgaggaacgtgaacgtgtcgagagcgagcggaaggaagctgagcgccgcgctgctgaggaggttagattaaagcgcgaaggaccaaaagtagacgggaagacagcgaagggtaaaagtatactcgatgcgggtgttgccagatctgcacaagagaaacgtgaggaagaagcgaggggtttgacgcctgagcagagaatgaaattagaccgtgagcgcagggcacgtgcggctgaggaaaggtttaggagaatgcagcagggtggtggcggttagctgattgggcgcttagattagttgtgaagatatcccatggctaggaatagaatcgagatagtgcatggagatgatcttcattttgcttgccgccctgcaccgcgcctaggttagatggggatgatgatggccagcaagatttcaatatggcgctaaaagtttgaatagatgtctggtcttcagcgtatcatattctctacgagggatgagcgcctcctggctatctagattaacagtgcattcaaatgtactaacgagttgctggatagaaggggtctatgccaacggaccgaatgagtattataactccgcatgctacgaaaggctggcgtacgtgatgagtaacacgccactgtaacgatctaaatccgccgcgttcatggagtcgtatctaacaagattgattaacggtcgccctgtcgaaaaccaattccattgctgttggccaacaaggtgcatatagataagacggcattgattgatatccgatactgctatttaggtaatggttgattgcgatatgggtacaaagttgcgatggagataagagccgcaccgacaactattgtcgaagccgcgatctcccgccgccaggacttccatacgatatttaatgtcccgcgtgtttctatcgtagtggcgatcaagatgtttactacaaacgattcaataaaatcgtattgtcgcgttgcattgagttgttgtccctcaacactgatgatctctctggatttcctgggtagatagggtatcgacatctgttcgaactgtgtatggtattttgttgagtgccaggtgtatccgtcaacaaagtctctattttttagtttgaaatggatggtgcgagaacttaacaatctcacaactgtaaatagcaaaaatattcggagttcgtgagtcgctgatgttagcatccacagcctatttatatcaatctagtctgctgcaattcgattccatgatgttgaagataagatcgcaaggaatctggtggtatagtcaaattgagaccagtgtcaccttgccggcgatgtaattgtagattgaggtctagcttaaggttctcttgccgtgggtcgtgtggtactgcgatgccagtgctgatattctcaaatgtataactaccatgtttccagttatatcgcggtcgtatggtgtccggtaatggccccaacactgcttcgccaaactctcgtccgggtacgtaacacgggcctacaaccatgtggctaatattgtcgattggtcgtaagagcattagaaaccggcaacccaacaagctccaaatctgatcgccaactctggcttgatcaggtgcaagaccgatgagccctgatataagttactaatacataactgaaaaacattgccacgtcaaaaccaaaagccgaaactccaagtacaatcatgcagaacagtggaaggtgatgtaatgttaagctacttaccacccgataagtgtaccacagagcgaccgtgacaagatctcgatgaccgactgaaagtcttattgatttcatcacgaacatttcccacaagttccggaagcttactcgaaacgaaagcttctaaagtagcttccagatcgcgctcatatgggttttctagcctcgcttttgacagatactcgaagacgaggtttgcggcatccttccgagggtaaccagcttgcttgaactgttcgtcgaagaaaagatcattgcacaaggtctgcgtataaatctgcaggattgtcccgcccgttggatactcgcttttgaaagaacgttgctcgtgaatgagaatattacgtatggcgtgtcctgtgtcgtcaatgttattgagatcgaaagtagctgcaatagccttcttcactgttgccgtacgtaccccccaaacttgcaaattaccctctatgacagaacttgatcctgagttgatcatcccggaggccatttgccacctcatctcagcaattacgggaggcctatgtgaccagtcaggaacccagcttggccctttccagccttgatggtaacagcattcagcaaggatatctaagttattatcgacagcgaaatatgctgatgctgcttccgtatagacattttccactgatttggaatagtccggtgtgattttctcttgcagagttgggtcaagaaaggcccgaattgcatacacccgatctcttggatcctcgcattgtccaaatgcaaaatcatctcgaagagaatgcaactgtgtgctaggtcgctgggtgataaaaccccaaaatcttccagcctaccccacagtgggtatcgcgttgtccatcgtttggaatgtagcaaataccatccgcga

SEQ ID NO: 4416 - DNA, 2037 bp, Muscodor strobelii
  misc_feature: SGI cDNA ID NO. 561161
  misc_feature: Reduced expression when VOC is produced
  misc_feature: Encodes the peptide sequence at SEQ ID NO 4417
atggagaagaaaacagaggatcttttgaaacggccgctctattgtatgtatcccactatctgcgatcgcattctgagccaggcgcgttcttggctaaccccaccatcgctcgcagtctacgatttaccccacgaacttctctcaagcctcacgctcaaggaaggcgccgaatcgcaggaaatcgacgcagtccgtgacctgtcaacatcgaaatcggacacatcgccaaccgcttcgaccgaggatacagtaggatcgcaggcctgctctctgtgttccttgtctttcccgacggtgcacgagcaacgcggccaccagaagtccgactggcaccattacagcctaaagcaaaagctgcgtggcgcaaagcctgtgtctgaaggggaattcgaagctttgatcggcagtctagatgagagtttatcaggctccgattcctctgagtcagaggatgatgagacagataacggcaaggatagcacattgacagctctgctgaagaaacaagctaccttggcagaaaagaacgcgcgcgcaagcaatagcaatgcagacgaggatgacggcgatgcctccaataggagacctagagggagtgggaagccgcctctgctgtggttcagctcgcctttattgccaacaaacaactattttggtatttaccgcgccatcttcacagcggatgagacgagagacggagcagatgtcactaagttgatagcgaagaaacagttggaacccatagcgattccaaagccaagcccagatgggaaaccaccagctgcatacaaaggtccccacgtcttcttatgtatgatcggcggtggtcactttgctgccatggtcgtgtctctcgctccacgacagaccaaacatggttctgtcgggcccatgaacaaggaggccactgtactcgcacacaagactttccaccgctacacaacgagaaggaaacagggtggctcgcaatcagcgaatgacaacgcgaaaggcaatgcgcactccgccggttcaagtattcgtcggtacaacgaacaggcactaatagacgatattcgagcactattacaagactggaaaggcctcctagatacctccgagctgctgttcattcgggcaacaggcgccacgaaccggaggacgctgtttggtccatatgaaggtcaagtattacgggcaaatgaccccagaatacggggttttcctttcagcacccggcgagccactcaaaatgagctgatgcgctccttcatcgaactcactcggctaaaggtcagggaaattgaccccgcagcaatagtaaagccgacacaggaagcaaagccagcaacgccgaagcctagcaagcccgctacaccaaaattgtccgaggaggaagagactgcacaattacacacatcacaattacaagcatttatacggcgctcaaaactacctgctttactatcctacctaaagaataacaacttgccgtctgatttccgattccagccaagcgactcacagcaaaatcatcacgcaccaacgccactacactttgcagcaagccagaactcagctgcactcgtctctggactattagccaaaggtggtgctgacccaacactccaaaacgatgaaggcaaaacagcattcgacctcgctggagatcgcgcaacacgtgacgcattccgcgttgcacgtgacgagctgggagagaaagcctgggactgggaagcatcccacgtccctgcagctctaaagcgcgccgacgcagaacggcgcgaggaacgtgaacgtgtcgagagcgagcggaaggaagctgagcgccgcgctgctgaggaggttagattaaagcgcgaaggaccaaaagtagacgggaagacagcgaagggtaaaagtatactcgatgcgggtgttgccagatctgcacaagagaaacgtgaggaagaagcgaggggtttgacgcctgagcagagaatgaaattagaccgtgagcgcagggcacgtgcggctgaggaaaggtttaggagaatgcagcagggtggtggcggttag

SEQ ID NO: 4417 - protein, 678 aa, Muscodor strobelii
  misc_feature: SGI Peptide ID NO. 561161
  misc_feature (509)..(539): Pfam Id: PF00023 Pfam Desc: Ankyrin repeat
  misc_feature (37)..(675): NCBI GI: 149210771 Blast Desc: MGCH7_ch7g858 [Magnaporthe grisea 70-15] gi|86196813|gb|EAQ71451.1| MGCH7_ch7g858 [Magnaporthe grisea 70-15]
  misc_feature (37)..(675): NCBI GI: 145609684 Blast Desc: MGG_03061 [Magnaporthe grisea 70-15] gi|145017089|gb|EDK01452.1| MGG_03061 [Magnaporthe grisea 70-15]
  misc_feature (1)..(677): NCBI GI: 116193347 Blast Desc: CHGG_06391 [Chaetomium globosum CBS 148.51] gi|88182304|gb|EAQ89772.1| CHGG_06391 [Chaetomium globosum CBS 148.51]
  misc_feature (1)..(657): NCBI GI: 171684511 Blast Desc: protein product [Podospora anserina] gi|170942216|emb|CAP67868.1| protein product [Podospora anserina]
  misc_feature (1)..(650): NCBI GI: 256734191 Blast Desc: [Nectria haematococca mpVI 77-13-4]
  misc_feature (1)..(676): NCBI GI: 46129320 Blast Desc: FG08845.1 [Gibberella zeae PH-1]
  misc_feature (1)..(654): NCBI GI: 164429732 Blast Desc: NCU02147 [Neurospora crassa OR74A] gi|157073596|gb|EAA35270.2| conserved [Neurospora crassa OR74A]
  misc_feature (1)..(656): NCBI GI: 154308289 Blast Desc: BC1G_07890 [Botryotinia fuckeliana B05.10] gi|150852975|gb|EDN28167.1| BC1G_07890 [Botryotinia fuckeliana B05.10]
  misc_feature (1)..(656): NCBI GI: 156058884 Blast Desc: SS1G_03454 [Sclerotinia sclerotiorum 1980] gi|154701241|gb|EDO00980.1| SS1G_03454 [Sclerotinia sclerotiorum 1980]
  misc_feature (6)..(650): NCBI GI: 115433628 Blast Desc: conserved [Aspergillus terreus NIH2624] gi|114189803|gb|EAU31503.1| conserved [Aspergillus terreus NIH2624]
  misc_feature: Useful for introducing or modulating the production of volatile compounds
MEKKTEDLLKRPLYCMYPTICDRILSQARSWLTPPSLAVYDLPHELLSSLTLKEGAESQEIDAVRDLSTSKSDTSPTASTEDTVGSQACSLCSLSFPTVHEQRGHQKSDWHHYSLKQKLRGAKPVSEGEFEALIGSLDESLSGSDSSESEDDETDNGKDSTLTALLKKQATLAEKNARASNSNADEDDGDASNRRPRGSGKPPLLWFSSPLLPTNNYFGIYRAIFTADETRDGADVTKLIAKKQLEPIAIPKPSPDGKPPAAYKGPHVFLCMIGGGHFAAMVVSLAPRQTKHGSVGPMNKEATVLAHKTFHRYTTRRKQGGSQSANDNAKGNAHSAGSSIRRYNEQALIDDIRALLQDWKGLLDTSELLFIRATGATNRRTLFGPYEGQVLRANDPRIRGFPFSTRRATQNELMRSFIELTRLKVREIDPAAIVKPTQEAKPATPKPSKPATPKLSEEEETAQLHTSQLQAFIRRSKLPALLSYLKNNNLPSDFRFQPSDSQQNHHAPTPLHFAASQNSAALVSGLLAKGGADPTLQNDEGKTAFDLAGDRATRDAFRVARDELGEKAWDWEASHVPAALKRADAERREERERVESERKEAERRAAEEVRLKREGPKVDGKTAKGKSILDAGVARSAQEKREEEARGLTPEQRMKLDRERRARAAEERFRRMQQGGGG

SEQ ID NO: 4418 - DNA, 4366 bp, Muscodor strobelii; identical to SEQ ID NO: 4415
  misc_feature: SGI EST ID NO. CUFF.11461.1
  misc_feature: Variant of the nucleotide sequence at SEQ ID NO 4416

SEQ ID NO: 4419 - DNA, 2223 bp, Muscodor strobelii
  misc_feature: SGI cDNA ID NO. 561162
  misc_feature: Encodes the peptide sequence at SEQ ID NO 4420
atgtcgcgatctatgtccagaagtatcggcgggccacagattaatgtggttcatggaccagattcgcgagcctgggatcgacctgtgcaactcccacgtgaggacaaaagcacgcacctctgcgcgcgccatcgtgtaatgaacttgagccaagctagcttctcggcgcgacctcgcaacgagccacttcccccagattgggaatgcgggcttatgaaaggggtcatcgtgagaagcgagtattgtgtcttctgtcgactcattattgatgtatccaaacaccatgctttaagagtagacggggacataatcgcagaccccgcagatcctctaatctttagcaatgatgcccaaaccatcgcatgttggatcccagacgtggtctttactggaagaggatctgatctcgaaatggtcactctacgcttgaggatctattcgttcctgtctgatggcgagaaggctgtgcctccttttgatattgtccctttggcccgggacaccgatcacgggttgttagtgggaaaaaaagttgatccgaaagctatcgaccttagcttagtcaagaattggcttgacacatgcgataaagaacatttagacgtgtgcaagggcagtgtacagacattgagacaacccgatgcaatcgatccttttattcgattacttgatctcagagacaattgcctgatcgaaacctcgaatcctgatacatatgtcgctttgagctatgtttggggtaagatagatgttttcaagacgcttcgggccaatctccagactctgatgagcgtgggttcacttattcaacatttcggatcttttcctttgacaatccaggatgccatcacgcttactcggctcttgggttaccgatacttgtggatcgattcactttgccttgtgcaagacgatgagtctgatatggcgacgcagttgcagctcatggacgtaatatatacgagagcaagctttaccatagtttccgccaatggagcagacgccaacgccagactatcagggctcacgccaggctcaaggaattttacgcagcgagtagcaggatattctgaagatctatcactagttgcactctcccttgatttcgacgacgctgcgcaggatagtgtttggaatggccgaggctggacgtatcaagaacgcatactttcgcggagcttactcgtattcgtgcaagactcagtctatttcgaatgcggtcaagctacttggagtgaagacttcaatattatggacccaacagtgataacgagcgccacacaacagactgtggagcatctatacgatgcagagccgccagttctaagacctagaccaggccggcagttaaagacaaatcttgaatcgtacctccgtgctgtaatagattatacttcgaggcagatgacgtatccgacagaccgagtgcgtggtctagagggtattctacaggttttcaggggcgcacatggcgcagaaaacttcaaatggggtatgtgggtgcaagatgcgctccatcattcgctcatatggctacccagagagaacctagagaggatcacgtacgacgtaaagactgggatgccgttatatcctagctggtcgtgggcaggatggactactgcggtcaagtacgaagagcccccggactggaatggcctgccggagcttgaggatccaagtcaaaaaacgcattcatcccgttattgcgactacatccgacttaacacacttgagaacggcatcagtcccccgcaagattcggcatactatttacacgtgcgaagcagacatggccgtttccagctcagtgaaacgacgcgaagtacgctgtggaagccagaagcctatccagaagttcggggcaaaagtctatgccagttcgggcttcagcagcctgaagagaccggcgcagacccggacggcgagtggttgggaacaataacactaccgaagacctacagaaggagaatcaggagaggactttcggtagtgtatgatttcatcgttctctcggatgcatactgcttttctaatgaagagcttggagagcgggatgcgatgagactgggtccttatgctgccgttaatgtcatgatgatagaatttcaaaatgtcagcattgctggcagagaagtggccactcgtgttggggttggcaagatgatcaagaaagcttgggatacagggcctgagatttggtgtgaaattctgattgcttga

SEQ ID NO: 4420 - protein, 740 aa, Muscodor strobelii
  misc_feature: SGI Peptide ID NO. 561162
  misc_feature (239)..(387): Pfam Id: PF06985 Pfam Desc: Heterokaryon incompatibility protein (HET)
  misc_feature (239)..(328): Pfam Id: PF06985 Pfam Desc: Heterokaryon incompatibility protein (HET)
  misc_feature (14)..(734): NCBI GI: 164424013 Blast Desc: NCU10392 [Neurospora crassa OR74A] gi|28881265|emb|CAD70524.1| related to tol protein [Neurospora crassa] gi|157070332|gb|EDO65027.1| [Neurospora crassa OR74A]
  misc_feature (172)..(705): NCBI GI: 168042178 Blast Desc: [Physcomitrella patens subsp. patens] gi|162675105|gb|EDQ61604.1| [Physcomitrella patens subsp. patens]
  misc_feature (40)..(545): NCBI GI: 156031301 Blast Desc: SS1G_14072 [Sclerotinia sclerotiorum 1980] gi|154699474|gb|EDN99212.1| SS1G_14072 [Sclerotinia sclerotiorum 1980]
  misc_feature (72)..(728): NCBI GI: 39946810 Blast Desc: MGG_08495 [Magnaporthe grisea 70-15] gi|145012335|gb|EDJ96991.1| MGG_08495 [Magnaporthe grisea 70-15]
  misc_feature (173)..(545): NCBI GI: 168043854 Blast Desc: [Physcomitrella patens subsp. patens] gi|162674250|gb|EDQ60761.1| [Physcomitrella patens subsp. patens]
  misc_feature (183)..(557): NCBI GI: 256720404 Blast Desc: NECHADRAFT_89098 [Nectria haematococca mpVI 77-13-4]
  misc_feature (157)..(546): NCBI GI: 189188748 Blast Desc: conserved [Pyrenophora tritici-repentis Pt-1C-BFP] gi|187972319|gb|EDU39818.1| conserved [Pyrenophora tritici-repentis Pt-1C-BFP]
  misc_feature (75)..(541): NCBI GI: 169768534 Blast Desc: [Aspergillus oryzae RIB40] gi|83766595|dbj|BAE56735.1| protein product [Aspergillus oryzae]
  misc_feature (183)..(548): NCBI GI: 256724998 Blast Desc: NECHADRAFT_77046 [Nectria haematococca mpVI 77-13-4]
  misc_feature (65)..(545): NCBI GI: 115402181 Blast Desc: [Aspergillus terreus NIH2624] gi|114189013|gb|EAU30713.1| [Aspergillus terreus NIH2624]
MSRSMSRSIGGPQINVVHGPDSRAWDRPVQLPREDKSTHLCARHRVMNLSQASFSARPRNEPLPPDWECGLMKGVIVRSEYCVFCRLIIDVSKHHALRVDGDIIADPADPLIFSNDAQTIACWIPDVVFTGRGSDLEMVTLRLRIYSFLSDGEKAVPPFDIVPLARDTDHGLLVGKKVDPKAIDLSLVKNWLDTCDKEHLDVCKGSVQTLRQPDAIDPFIRLLDLRDNCLIETSNPDTYVALSYVWGKIDVFKTLRANLQTLMSVGSLIQHFGSFPLTIQDAITLTRLLGYRYLWIDSLCLVQDDESDMATQLQLMDVIYTRASFTIVSANGADANARLSGLTPGSRNFTQRVAGYSEDLSLVALSLDFDDAAQDSVWNGRGWTYQERILSRSLLVFVQDSVYFECGQATWSEDFNIMDPTVITSATQQTVEHLYDAEPPVLRPRPGRQLKTNLESYLRAVIDYTSRQMTYPTDRVRGLEGILQVFRGAHGAENFKWGMWVQDALHHSLIWLPRENLERITYDVKTGMPLYPSWSWAGWTTAVKYEEPPDWNGLPELEDPSQKTHSSRYCDYIRLNTLENGISPPQDSAYYLHVRSRHGRFQLSETTRSTLWKPEAYPEVRGKSLCQFGLQQPEETGADPDGEWLGTITLPKTYRRRIRRGLSVVYDFIVLSDAYCFSNEELGERDAMRLGPYAAVNVMMIEFQNVSIAGREVATRVGVGKMIKKAWDTGPEIWCEILIA

SEQ ID NO: 4421 - DNA, 1102 bp, Muscodor strobelii
  misc_feature: SGI EST ID NO. CUFF.11219.0
  misc_feature: Variant of the nucleotide sequence at SEQ ID NO 4419
tgatcgaaacctcgaatcctgatacatatgtcgctttgagctatgtttggggtaagatagatgttttcaagacgcttcgggccaatctccagactctgatgagcgtgggttcacttattcaacatttcggatcttttcctttgacaatccaggatgccatcacgcttactcggctcttgggttaccgatacttgtggatcgattcactttgccttgtgcaagacgatgagtctgatatggcgacgcagttgcagctcatggacgtaatatatacgagagcaagctttaccatagtttccgccaatggagcagacgccaacgccagactatcagggctcacgccaggctcaaggaattttacgcagcgagtagcaggatattctgaagatctatcactagttgcactctcccttgatttcgacgacgctgcgcaggatagtgtttggaatggccgaggctggacgtatcaagaacgcatactttcgcggagcttactcgtattcgtgcaagactcagtctatttcgaatgcggtcaagctacttggagtgaagacttcaatattatggacccaacagtgataacgagcgccacacaacagactgtggagcatctatacgatgcagagccgccagttctaagacctagaccaggccggcagttaaagacaaatcttgaatcgtacctccgtgctgtaatagattatacttcgaggcagatgacgtatccgacagaccgagtgcgtggtctagagggtattctacaggttttcaggggcgcacatggcgcagaaaacttcaaatggggtatgtgggtgcaagatgcgctccatcattcgctcatatggctacccagagagaacctagagaggatcacgtacgacgtaaagactgggatgccgttatatcctagctggtcgtgggcaggatggactactgcggtcaagtacgaagagcccccggactggaatggcctgccggagcttgaggatccaagtcaaaaaacgcattcatcccgttattgcgactacatccgacttaacacacttgagaacggcatcagtcccccgcaagattcggcatactatttacacgtgcgaagcag

SEQ ID NO: 4422 - DNA, 1038 bp, Muscodor strobelii
  misc_feature: SGI cDNA ID NO. 561163
  misc_feature: Encodes the peptide sequence at SEQ ID NO 4423
atgcaacctaagaagtctttcacacagtcatttcacccactgtcccataatgtgtctcgaggtcttccccagagtctcgcaaggctgggagacgaacattgccggccacccgtcgatgaccatatttcggagtctggcagtctgcaactcatcacgaggaactggaacatcgttccccaaagactgttcacggtcgaatgggagggacacataggttctgtatccgttaacctgctaggtagtgaaactgaaggcgggccctggcaaatagaacagcagctgagcgaacgcaacgccgatggcgcgttcgtgtggcggatacctacgtatctacagaaaccccattataagatcgaggtagtcgactccagaggccagcgacagcactcgccgcgatggaagttcaaacgtcaagcaggtagcactactggtgatagcgataccgtgcctttctcccagttctccgagtttacgccatcctcggaattcacaactacttccacgaccacgaatcctccaccgcccactacgacaagtctagattcttcaacgactacatttccctcaacaactacctttccttcctcgacgacgtctccttcgacgacaaagtttccttcatcaacgacatctactcctacaagcacaagcacaagcccttcgatgatcacttcccctgcaactaccacatcctccgaggacataggccctactagcgatgctagtagcgggtcctccggtcttagtgctggcgcgtacgcgggcatcggcgtcggtgcggccctaggcggcgtgctgctcatcgcgttgtgctactgggcaatccgtcgggcctatcgcaaggggaaagaggacgccgccgccgcaaccgccacagctcagacatatgaccccagcaagggagccaacccgaacgagctgcatggtcaatcttccagttttcccgaactcgcgactcctcatcactggcagtggcaggcttcaccgaatgaggttcatgggcggagtatggctgcggagctagggccagcatattga

SEQ ID NO: 4423 - protein, 345 aa, Muscodor strobelii
  misc_feature: SGI Peptide ID NO. 561163
  misc_feature (247)..(342): NCBI GI: 116198575 Blast Desc: CHGG_07443 [Chaetomium globosum CBS 148.51] gi|88178722|gb|EAQ86190.1| CHGG_07443 [Chaetomium globosum CBS 148.51]
MQPKKSFTQSFHPLSHNVSRGLPQSLARLGDEHCRPPVDDHISESGSLQLITRNWNIVPQRLFTVEWEGHIGSVSVNLLGSETEGGPWQIEQQLSERNADGAFVWRIPTYLQKPHYKIEVVDSRGQRQHSPRWKFKRQAGSTTGDSDTVPFSQFSEFTPSSEFTTTSTTTNPPPPTTTSLDSSTTTFPSTTTFPSSTTSPSTTKFPSSTTSTPTSTSTSPSMITSPATTTSSEDIGPTSDASSGSSGLSAGAYAGIGVGAALGGVLLIALCYWAIRRAYRKGKEDAAAATATAQTYDPSKGANPNELHGQSSSFPELATPHHWQWQASPNEVHGRSMAAELGPAY

SEQ ID NO: 4424 - DNA, 1971 bp, Muscodor strobelii
  misc_feature: SGI cDNA ID NO. 561164
  misc_feature: Encodes the peptide sequence at SEQ ID NO 4425
atgaggaacaacttagctttgcttgcgctggccgctggccttagccaagtcaccgccactggcttccgaaatgcaaacaaatatagctgccccgacaacaccgacaaccagtgtactcagggcatgtctcatggttttgactggtccagccttggctttggtgacttttccgattacgaggatttccaattctcgggtttcaaatgccagcagaaattcggcaagcgagacatcttgactggacgaagctttcagtcgaagtgcattaccggcaaagccacgggtgacaagggcaacagtcccaacatccagtgtggcaagaacatcggctcaacctcgatctcagaattccaagtcacgcccgaccatgactgtgatttggagttccactacagcatgcccgatggatcgacttgcaagcaccgcaactcttgcaagtcgtccggtaccgttgtttctaacactcagtgcggtggcgccaccggcgttatcattgtctacccccaccagcctaacaccggcaaagacagctgcgatgttggtattcatcacatgggcttccattgtggtggcgcctcgacgaccaagcatcactcttaccctgctacttcgtacgtggctagctcgagctcgtatgttgttggctcttcatcctcttacgttgtcagctcttacgtaccaagctctagctcacccgccagcagctcctacgttgccagctcgtatgttgtcagctcctacgagagcagctcaagctcggtccctgcgaccagctacagctctgttccagccactagctacagttcagtccctgccagcagcagctcatacgttgcaagcacgccggttgagtcttcaagctctgttgccacctccacagcacctgcatcgagcagctacgttgctagctcatatgtcgtaagctcctatgagtctagcactcccattgcgtcgtctagcacagaggctgtttcaacacccggtagctctagctctgtcccagcctcatcgacccctggcagctcagtccccggcagcagctcttacgtcgtgagctcgtatgttccctcgacttctgcttcgtctagcgttgcggccacgtcctcggtctccattcctgctggttcataccctgttggcggacagtctagcaccggcgacatctctacgactatcgtaacatcgacgactctgtcttctgttgttgtcacatactctgcctcgtctatctcgtcggttgcctcttactctgccactcctcttccaggaaccacgaccacgagctcttccagcccacaggagactctcccttgccctggcgtcgtgccctcatgtttgaacacctggatgttctccgtcggctgcaaggacaacactgaagcttcatgctattgccctgactcgagctacgtgcagaatgtttacgaatgtctgtacgcccacggcgagactgatgatgtcatctctgaggctatcagctacttccagggcatttgcgctccctatgtcgagactaaccctggaatcgctactggcgccgctaccattacgcaagttctcactgtcactgctagcactaccgttgctagtgccacaacaattcaggtcacggctaccgccgttgttccctgcacgaactcggttggcgagacaattgcaagctctagcagcactgttaccatctcaactgctatgactgtacctcaagttatcttcaccaccttgactgctactggcaccgctcctggtgcaagctcctctggtgttgttggtattatcccaggcggttactccgtcgctcctgttacaccctatcctactggaaatccctccacgttcactacatctgcatctgctggcttcactgccaccacatcgtcaggaggcttgatccccactgccgccgccgcacatgtcggtagtggtctgggtttgatgggtatgctggccgttgccgccgccgccttgtaa

SEQ ID NO: 4425 - protein, 656 aa, Muscodor strobelii
  misc_feature: SGI Peptide ID NO. 561164
  misc_feature (1)..(594): NCBI GI: 171684513 Blast Desc: protein product [Podospora anserina] gi|170942217|emb|CAP67869.1| protein product [Podospora anserina]
  misc_feature (5)..(594): NCBI GI: 145609680 Blast Desc: MGG_12523 [Magnaporthe grisea 70-15] gi|145017087|gb|EDK01450.1| MGG_12523 [Magnaporthe grisea 70-15]
  misc_feature (6)..(595): NCBI GI: 240108415 Blast Desc: extracellular serine-threonine rich protein, [Coccidioides posadasii C735 delta SOWgp]
  misc_feature (6)..(595): NCBI GI: 119186849 Blast Desc: CIMG_03472 [Coccidioides immitis RS]
  misc_feature (9)..(651): NCBI GI: 212526814 Blast Desc: extracellular serine-threonine rich protein [Penicillium marneffei ATCC 18224] gi|210072962|gb|EEA27049.1| extracellular serine-threonine rich protein [Penicillium ATCC
  misc_feature (4)..(523): NCBI GI: 159127328 Blast Desc: extracellular serine-threonine rich protein [Aspergillus fumigatus A1163]
  misc_feature (7)..(219): NCBI GI: 156058512 Blast Desc: SS1G_03268 [Sclerotinia sclerotiorum 1980] gi|154701055|gb|EDO00794.1| SS1G_03268 [Sclerotinia sclerotiorum 1980]
  misc_feature (429)..(576): NCBI GI: 164429728 Blast Desc: NCU10687 [Neurospora crassa OR74A] gi|157073594|gb|EDO65476.1| [Neurospora crassa OR74A]
  misc_feature (28)..(536): NCBI GI: 238842329 Blast Desc: extracellular serine-threonine rich protein [Microsporum canis CBS 113480]
  misc_feature (6)..(197): NCBI GI: 154310682 Blast Desc: BC1G_06815 [Botryotinia fuckeliana B05.10] gi|150851355|gb|EDN26548.1| BC1G_06815 [Botryotinia fuckeliana B05.10]
MRNNLALLALAAGLSQVTATGFRNANKYSCPDNTDNQCTQGMSHGFDWSSLGFGDFSDYEDFQFSGFKCQQKFGKRDILTGRSFQSKCITGKATGDKGNSPNIQCGKNIGSTSISEFQVTPDHDCDLEFHYSMPDGSTCKHRNSCKSSGTVVSNTQCGGATGVIIVYPHQPNTGKDSCDVGIHHMGFHCGGASTTKHHSYPATSYVASSSSYVVGSSSSYVVSSYVPSSSSPASSSYVASSYVVSSYESSSSSVPATSYSSVPATSYSSVPASSSSYVASTPVESSSSVATSTAPASSSYVASSYVVSSYESSTPIASSSTEAVSTPGSSSSVPASSTPGSSVPGSSSYVVSSYVPSTSASSSVAATSSVSIPAGSYPVGGQSSTGDISTTIVTSTTLSSVVVTYSASSISSVASYSATPLPGTTTTSSSSPQETLPCPGVVPSCLNTWMFSVGCKDNTEASCYCPDSSYVQNVYECLYAHGETDDVISEAISYFQGICAPYVETNPGIATGAATITQVLTVTASTTVASATTIQVTATAVVPCTNSVGETIASSSSTVTISTAMTVPQVIFTTLTATGTAPGASSSGVVGIIPGGYSVAPVTPYPTGNPSTFTTSASAGFTATTSSGGLIPTAAAAHVGSGLGLMGMLAVAAAAL

SEQ ID NO: 4426 - DNA, 3000 bp, Muscodor strobelii
  misc_feature: SGI EST ID NO. CUFF.11623.0
  misc_feature: Variant of the nucleotide sequence at SEQ ID NO 4424
tacaacctcacctttttgggccgtagacaactccacagacttcgagagagccgcgcgctctgcgagcgatgacttagctccttcagcctcctgttgcttttctacctatggacaatacaaggggggccacttgccgctgcacccagagtcccttgacgcccatgaagccagtgtccacttctcccctccgaggttagtgcactgttgccaagatgaataccgcaacctaccaaagcttgctacgctgcccacgtacagtatgacatgcgtcttttagacaacaccatccaagcaatggatcaagggacaacgctcaaggggacgatgacatgggtatcatgaagaaacagcggcgttcgaccccggtctgcaagttcagggtctgtgtccgtctgacctgctgtctctcctccaccagtcgaccatcatgagatctatatatgcttcgcttcccatgctgtaattgtgactggccttctctatctttaagagtcagttctctcatcgacactctcgttccctagaggatataatcaaccgttgtttttcctttgcttctggaagtcaaggtcattcgctatacttgtttccatttccgttactctcttatacagacaatcgttcttgcatagaagaaacacactatcgcttacagcacaatatctcaaaaagggaatttccatctccaatatttctatttttgaagtctagaagttggttcagatttacaactacaaaatgaggaacaacttagctttgcttgcgctggccgctggccttagccaagtcaccgccactggcttccgaaatgcaaacaaatatagctgccccgacaacaccgacaaccagtgtactcagggcatgtctcatggttttgactggtccagccttggctttggtgacttttccgattacgaggatttccaattctcgggtttcaaatgccagcagaaattcggcaagcgagacatcttgactggacgaagctttcagtcgaagtgcattaccggcaaagccacgggtgacaagggcaacagtcccaacatccagtgtggcaagaacatcggctcaacctcgatctcagaattccaagtcacgcccgaccatgactgtgatttggagttccactacagcatgcccgatggatcgacttgcaagcaccgcaactcttgcaagtcgtccggtaccgttgtttctaacactcagtgcggtggcgccaccggcgttatcattgtctacccccaccagcctaacaccggcaaagacagctgcgatgttggtattcatcacatgggcttccattgtggtggcgcctcgacgaccaagcatcactcttaccctgctacttcgtacgtggctagctcgagctcgtatgttgttggctcttcatcctcttacgttgtcagctcttacgtaccaagctctagctcacccgccagcagctcctacgttgccagctcgtatgttgtcagctcctacgagagcagctcaagctcggtccctgcgaccagctacagctctgttccagccactagctacagttcagtccctgccagcagcagctcatacgttgcaagcacgccggttgagtcttcaagctctgttgccacctccacagcacctgcatcgagcagctacgttgctagctcatatgtcgtaagctcctatgagtctagcactcccattgcgtcgtctagcacagaggctgtttcaacacccggtagctctagctctgtcccagcctcatcgacccctggcagctcagtccccggcagcagctcttacgtcgtgagctcgtatgttccctcgacttctgcttcgtctagcgttgcggccacgtcctcggtctccattcctgctggttcataccctgttggcggacagtctagcaccggcgacatctctacgactatcgtaacatcgacgactctgtcttctgttgttgtcacatactctgcctcgtctatctcgtcggttgcctcttactctgccactcctcttccaggaaccacgaccacgagctcttccagcccacaggagactctcccttgccctggcgtcgtgccctcatgtttgaacacctggatgttctccgtcggctgcaaggacaacactgaagcttcatgctattgccctgactcgagctacgtgcagaatgtttacgaatgtctgtacgcccacggcgagactgatgatgtcatctctgaggctatcagctacttccagggcatttgcgctccctatgtcgagactaaccctggaatcgctactggcgccgctaccattacgcaagttctcactgtcactgctagcactaccgttgctagtgccacaacaattcaggtcacggctaccgccgttgttccctgcacgaactcggttggcgagacaattgcaagctctagcagcactgttaccatctcaactgctatgactgtacctcaagttatcttcaccaccttgactgctactggcaccgctcctggtgcaagctcctctggtgttgttggtattatcccaggcggttactccgtcgctcctgttacaccctatcctactggaaatccctccacgttcactacatctgcatctgctggcttcactgccaccacatcgtcaggaggcttgatccccactgccgccgccgcacatgtcggtagtggtctgggtttgatgggtatgctggccgttgccgccgccgccttgtaaagcacgatgccatgctgccaatggcagcgcacttttcattcttgtataagatacaccccgagcccaggatgggccagcgtcggcacaaagagcattgctcaaaatcatctcgttcttacgatccttatgaagcatcattattcatgcatatttttatggcgtcttgtgggaagaaaaacaggaatctcctcgttataatacaagcggagaaagaattgtagtaatagttaatacccttgagctgagaaataaatagtgaacttgatgttcattcattccataaacgttcgg

SEQ ID NO: 4427 - DNA, 1149 bp, Muscodor strobelii
  misc_feature: SGI cDNA ID NO. 561165
  misc_feature: Reduced expression when VOC is produced
  misc_feature: Encodes the peptide sequence at SEQ ID NO 4428
atggagcagaccaaggctctgaaggctctcgagccgttcgtagccatggctcagacttcgacttctaacagctatgcggccaacgtcatcaagctggccacgagcaaccccaacacctacttcttcgcagagctcctcgacgtacccaacatccagaagctggccgactcccccgaccacgccccctttctcgagctgctcaagatcttctcctaccgctcctaccgcgactacacccaacacccctctctccccaagctggatgacgcccagaccgccaagctccgccgcctctctctcctctcgctggccaagaaccccaagaacctcacatacgccgccctcaagcaagccctcgacctgcccgacaactccgccctcgagcgcctagtcgtcgacgccgtctacgccggtctcctcgacgccaggctcgaccagcacagcggcctcgtcaatgtctcctccgtcgcccccctgcgcgatccagaccccaagtccatccccgacatggccgccagcctgaggggcttcgaggctcgctgccagtccgcctacgacgacatccaggctcagatcgaggccatcaaggacgccgccgccaagcgccatgcggagaagaaggcccgcgaccagcaccaggccaagctcatggacgacgagaagaactccgacgcctcgggccagcgcaagtccaagacggccatcctcaggtcgcaagcccagcccaagtttggcggcaagcggcccgtcagcaacctcgacagcaacatggacgaagacgaaggcatggagctcgaagacgacgatctcgaggatggcgagacagccggcaacggctccggaggcggcggcgctcccctcggcggtcccgtgcagaagcaggaggaagtcgacgacgacgacgacgacgacaatcaggatgaccagagtgaaaagcataaaaaggatcagaaggacgagaaagacgataaggacaaggaagatggtggagacgacaacgggagcaaagccaacgaagataataaaagcggccaaggaaagaagagcaacgacaagggtagcaagggatgttgcccggagaaggagtcgaaaggcttcacaggaatgaagaaattcctggctagcctcaaatatgagctgaagaaatag

SEQ ID NO: 4428 - protein, 382 aa, Muscodor strobelii
  misc_feature: SGI Peptide ID NO. 561165
  misc_feature (61)..(155): Pfam Id: PF01399 Pfam Desc: PCI domain
  misc_feature (1)..(230): NCBI GI: 46109240 Blast Desc: FG01502.1 [Gibberella zeae PH-1]
  misc_feature (1)..(223): NCBI GI: 39943290 Blast Desc: MGG_03725 [Magnaporthe grisea 70-15] gi|145009677|gb|EDJ94333.1| MGG_03725 [Magnaporthe grisea 70-15]
  misc_feature (1)..(271): NCBI GI: 256730589 Blast Desc: NECHADRAFT_57013 [Nectria haematococca mpVI 77-13-4]
  misc_feature (1)..(284): NCBI GI: 154320584 Blast Desc: BC1G_01764 [Botryotinia fuckeliana B05.10] gi|150853453|gb|EDN28645.1| BC1G_01764 [Botryotinia fuckeliana B05.10]
  misc_feature (11)..(284): NCBI GI: 156040317 Blast Desc: SS1G_12175 [Sclerotinia sclerotiorum 1980] gi|154696231|gb|EDN95969.1| SS1G_12175 [Sclerotinia sclerotiorum 1980]
  misc_feature (1)..(289): NCBI GI: 169616466 Blast Desc: SNOG_11405 [Phaeosphaeria nodorum SN15] gi|111059993|gb|EAT81113.1| SNOG_11405 [Phaeosphaeria nodorum SN15]
  misc_feature (1)..(192): NCBI GI: 116182298 Blast Desc: CHGG_01777 [Chaetomium globosum CBS 148.51] gi|88186074|gb|EAQ93542.1| CHGG_01777 [Chaetomium globosum CBS 148.51]
  misc_feature (1)..(221): NCBI GI: 85117388 Blast Desc: NCU08342 [Neurospora crassa OR74A] gi|74618751|sp|Q7SGS1.1|CSN7A_NEUCR RecName: Full=COP9 signalosome complex subunit 7a; Short=CSN complex subunit 7a
  misc_feature (1)..(222): NCBI GI: 189197543 Blast Desc: COP9 signalosome subunit 7 (CsnG) [Pyrenophora tritici-repentis Pt-1C-BFP] gi|187981057|gb|EDU47683.1| COP9 signalosome subunit 7 (CsnG) [Pyrenophora tritici-repentis
  misc_feature (3)..(209): NCBI GI: 261205734 Blast Desc: COP9 signalosome complex subunit 7a [Ajellomyces dermatitidis SLH14081] gi|239592663|gb|EEQ75244.1| COP9 signalosome complex subunit 7a [Ajellomyces dermatitidis
  misc_feature: Useful for introducing or modulating the production of volatile compounds
MEQTKALKALEPFVAMAQTSTSNSYAANVIKLATSNPNTYFFAELLDVPNIQKLADSPDHAPFLELLKIFSYRSYRDYTQHPSLPKLDDAQTAKLRRLSLLSLAKNPKNLTYAALKQALDLPDNSALERLVVDAVYAGLLDARLDQHSGLVNVSSVAPLRDPDPKSIPDMAASLRGFEARCQSAYDDIQAQIEAIKDAAAKRHAEKKARDQHQAKLMDDEKNSDASGQRKSKTAILRSQAQPKFGGKRPVSNLDSNMDEDEGMELEDDDLEDGETAGNGSGGGGAPLGGPVQKQEEVDDDDDDDNQDDQSEKHKKDQKDEKDDKDKEDGGDDNGSKANEDNKSGQGKKSNDKGSKGCCPEKESKGFTGMKKFLASLKYELKK

SEQ ID NO: 4429 - DNA, 2139 bp, Muscodor strobelii
  misc_feature: SGI EST ID NO. CUFF.11834.0
  misc_feature: Variant of the nucleotide sequence at SEQ ID NO 4427
gagcaccgctagcccggatggggcacaaccccacgttttcaagcagcgacccaaaacgctgatgatacggaaagcacgagctccaggtttcaacgttggagaggctgcagccagtgacagaggtaatagctcggagaccctgtcgccgcctaccttacctagtcttcaactccagacttttgtttccgattctgaatccattttgtagtttcaccactgcaccatcgcgccaagtgatttgattcgatcacagacctagcttaggtacctacagtacctgcattatccacaatcttggataccactggacagcagcagctcacccccgtcgtcattccatccgcccacccaccccgcgctgtttcgtttccaccccgcgaggctgctgctgatcccgcttctgcaacatcccaccactacaagccgcagcggcctcagccttgcgtggtcaagtcaacacggacggactcacttcaggtcttgcattacatcatcgctacacaccactgtagcggtcacagacgccatcgtcatggagcagaccaaggctctgaaggctctcgagccgttcgtagccatggctcagacttcgacttctaacagctatgcggccaacgtcatcaagctggccacgagcaaccccaacacctacttcttcgcagagctcctcgacgtacccaacatccagaagctggccgactcccccgaccacgccccctttctcgagctgctcaagatcttctcctaccgctcctaccgcgactacacccaacacccctctctccccaagctggatgacgcccagaccgccaagctccgccgcctctctctcctctcgctggccaagaaccccaagaacctcacatacgccgccctcaagcaagccctcgacctgcccgacaactccgccctcgagcgcctagtcgtcgacgccgtctacgccggtctcctcgacgccaggctcgaccagcacagcggcctcgtcaatgtctcctccgtcgcccccctgcgcgatccagaccccaagtccatccccgacatggccgccagcctgaggggcttcgaggctcgctgccagtccgcctacgacgacatccaggctcagatcgaggccatcaaggacgccgccgccaagcgccatgcggagaagaaggcccgcgaccagcaccaggccaagctcatggacgacgagaagaactccgacgcctcgggccagcgcaagtccaagacggccatcctcaggtcgcaagcccagcccaagtttggcggcaagcggcccgtcagcaacctcgacagcaacatggacgaagacgaaggcatggagctcgaagacgacgatctcgaggatggcgagacagccggcaacggctccggaggcggcggcgctcccctcggcggtcccggtaagaagcggctgagccgccggaagaactaggaagacggccccgaaggtgagcctgcagtgcagaagcaggaggaagtcgacgacgacgacgacgacgacaatcaggatgaccagagtgaaaagcataaaaaggatcagaaggacgagaaagacgataaggacaaggaagatggtggagacgacaacgggagcaaagccaacgaagataataaaagcggccaaggaaagaagagcaacgacaagggtagcaagggatgttgcccggagaaggagtcgaaaggcttcacaggaatgaagaaattcctggctagcctcaaatatgagctgaagaaatagaagcctcgacggtagagagctgatgataggagccaggccggagcatcgtggcataacagacgccgtgggtgcagaggtcaacggcatcgtagcatcaccagcatcgttacagctaggagtcactacaaagtcggcgacagctagatgagcagatgttagaaagggggcaccatagcatcactacaggcttacgcatctagaccgaatagctcatcctggactgaatcaagttacagtgggcatatgtagtccactacgcgaatacaaacagtaactcgagcctgactgcgtttgcccagttcacagtgggatattacaaaatgctgtagctgacttggctgcgataggggctatttccgttcaactaccatggatggtgatgaattctttacatctaa

SEQ ID NO: 4430 - DNA, 1122 bp, Muscodor strobelii
  misc_feature: SGI cDNA ID NO. 561166
  misc_feature: Reduced expression when VOC is produced
  misc_feature: Encodes the peptide sequence at SEQ ID NO 4431
atggcgcatcgagatgcaggtctcccgcgcgacagccaggtcggctcgcccgtgccttgggttgcccgcaaccgactgcccacccttttcgaggtcctgagccgcaacactcgcccccccgtcgacctcttctccttctacatctacatgcgcgaccagcaacgctctgttgactacctcgacttttggctcgatgttgctcagcatatgagtctgtgccgtcactatgttcgagaactgcgacgatccgttcttgtcggcacccccgacatggagaaggaggagtccaagagatcctcgcgagctctcgaggccatgggcgacatcccctccggacccgccactgggactgagaaggagcgagagcagaacgcccagatgtcggccttcctgcgtgaccagcccgtccccggcgccaacctccacgactcgcctcagagcagccaggagcgtcgagctagagcctcgacccaactcagctccatgagcacaccgctgggcctcacctcggattcaaactcgcccaacaacgcggtgtccagagaggatatccgagcctccgccgagagaatcctgtacacctacctccttcccggcgccgagcgagagattacgcttcccggctcgatcactgccgacatcaccaccgccatcgagcatgatggtcgtgacgacccggaagtgttcgacctcgccaaggactatgtcttccaagctatggagcgggatgcattccccggatttcttcgagctagagcctttggcaatctgatcccgccgaccatcattgcacgactaatccttggcctcattgccctgtttggcgggttctggaccgctttcgtcctaatcttcctcaactatccacgtgccgcccgcagctgggtgattctaccgttcaccgtgggcgtgtatctgctggcctcataccagtacaatctggatcctgtcatggcccttgttggatttacggaatacacaccatttcagtaccagaagattgccgagccctacgtccgcaagttactcatcaagcgcgccctcaccgttctggcccttacccttctcgtcgatgccgctatttccgtcctcttcatcttcgtacctggcaaacgactttga

SEQ ID NO: 4431 - protein, 373 aa, Muscodor strobelii
  misc_feature: SGI Peptide ID NO. 561166
  misc_feature (28)..(257): Pfam Id: PF00615 Pfam Desc: Regulator of G protein signaling domain
  misc_feature (180)..(257): Pfam Id: PF00615 Pfam Desc: Regulator of G protein signaling domain
  misc_feature (16)..(373): NCBI GI: 171695352 Blast Desc: protein product [Podospora anserina] gi|170947918|emb|CAP60082.1| protein product [Podospora anserina]
  misc_feature (16)..(373): NCBI GI: 261355208 Blast Desc: regulator of G-protein signaling domain-containing protein [Verticillium albo-atrum VaMs.102]
  misc_feature (11)..(373): NCBI GI: 145615890 Blast Desc: MGG_03726 [Magnaporthe grisea 70-15] gi|145009676|gb|EDJ94332.1| MGG_03726 [Magnaporthe grisea 70-15]
  misc_feature (16)..(373): NCBI GI: 256730814 Blast Desc: [Nectria haematococca mpVI 77-13-4]
  misc_feature (16)..(373): NCBI GI: 46109242 Blast Desc: FG01503.1 [Gibberella zeae PH-1]
  misc_feature (12)..(373): NCBI GI: 154320586 Blast Desc: BC1G_01765 [Botryotinia fuckeliana B05.10] gi|150853454|gb|EDN28646.1| BC1G_01765 [Botryotinia fuckeliana B05.10]
  misc_feature (16)..(373): NCBI GI: 85117392 Blast Desc: NCU08343 [Neurospora crassa OR74A] gi|28927052|gb|EAA36010.1| conserved [Neurospora crassa OR74A]
  misc_feature (23)..(373): NCBI GI: 121708395 Blast Desc: RGS domain protein (Rax1), [Aspergillus clavatus NRRL 1] gi|119400265|gb|EAW10691.1| RGS domain protein (Rax1), [Aspergillus clavatus NRRL 1]
  misc_feature (16)..(373): NCBI GI: 116182300 Blast Desc: CHGG_01778 [Chaetomium globosum CBS 148.51] gi|88186075|gb|EAQ93543.1| CHGG_01778 [Chaetomium globosum CBS 148.51]
  misc_feature (23)..(373): NCBI GI: 115389642 Blast Desc: conserved [Aspergillus terreus NIH2624] gi|114194722|gb|EAU36422.1| conserved [Aspergillus terreus NIH2624]
  misc_feature: Useful for introducing or modulating the production of volatile compounds
MAHRDAGLPRDSQVGSPVPWVARNRLPTLFEVLSRNTRPPVDLFSFYIYMRDQQRSVDYLDFWLDVAQHMSLCRHYVRELRRSVLVGTPDMEKEESKRSSRALEAMGDIPSGPATGTEKEREQNAQMSAFLRDQPVPGANLHDSPQSSQERRARASTQLSSMSTPLGLTSDSNSPNNAVSREDIRASAERILYTYLLPGAEREITLPGSITADITTAIEHDGRDDPEVFDLAKDYVFQAMERDAFPGFLRARAFGNLIPPTIIARLILGLIALFGGFWTAFVLIFLNYPRAARSWVILPFTVGVYLLASYQYNLDPVMALVGFTEYTPFQYQKIAEPYVRKLLIKRALTVLALTLLVDAAISVLFIFVPGKRL

SEQ ID NO: 4432 - DNA, 4243 bp, Muscodor strobelii
  misc_feature: SGI EST ID NO. CUFF.11835.1
  misc_feature: Variant of the nucleotide sequence at SEQ ID NO 4430
cgaatgccgatggctgactgtcttgaacacggaacagtgatcaattaatggtcgttgcgtgttgcacggtgacgttgattggaccaccacgtcacgctcccaatctctttagcccaaaacagaggtaattcagaggtaatttcaacgccgcccggggtgcagccaactcgccaagcaaggccaacatcatgatcggcctcgttcaggtttgacagtcgtcgctctggtcgctcctgcaacccatcgtgacgcctgacaatctcacactggcagtctctcattccctctcttcccttccgtctccgtctctctttcatgtctgacctcaacaacccacctgtgtatcgcgcaattccactcgctccacggccgtcgcggccgaccgcactagttaattgaactcaattgattgccaggtgcttctccttccatcccccgacgagagagaaacacacctgcctcgccgccatcacgaacccctgtctgcgggtggtttcctgcatttctttgcctcactacatcacccacacctacgtactttgtcagcaacacatctgcgcagtcgccgcccactactgccggtaattgtgttgcaacctaaacctctttctacatctagctgtacctcctcaccgcgagtctctcatccacatttctgccacgctggtcagcaaccgcgactctccgacgatggcgcatcgagatgcaggtctcccgcgcgacagccaggtcggctcgcccgtgccttgggttgcccgcaaccgactgcccacccttttcgaggtcctgagccgcaacactcgcccccccgtcgacctcttctccttctacatctacatgcgcgaccagcaacgctctgttgactacctcgacttttggctcgatgttgctcagcatatgagtctgtgccgtcactatgttcgagaactgcgacgatccgttcttgtcggcacccccgacatggagaaggaggagtccaagagatcctcgcgagctctcgaggccatgggcgacatcccctccggacccgccactgggactgagaaggagcgagagcagaacgcccagatgtcggccttcctgcgtgaccagcccgtccccggcgccaacctccacgactcgcctcagagcagccaggagcgtcgagctagagcctcgacccaactcagctccatgagcacaccgctgggcctcacctcggattcaaactcgcccaacaacgcggtgtccagagaggatatccgagcctccgccgagagaatcctgtacacctacctccttcccggcgccgagcgagagattacgcttcccggctcgatcactgccgacatcaccaccgccatcgagcatgatggtcgtgacgacccggaagtgttcgacctcgccaaggactatgtcttccaagctatggagcgggatgcattccccggatttcttcgagctagagcctttggcaatctgatcccgccgaccatcattgcacgactaatccttggcctcattgccctgtttggcgggttctggaccgctttcgtcctaatcttcctcaactatccacgtgccgcccgcagctgggtgattctaccgttcaccgtgggcgtgtatctgctggcctcataccagtacaatctggatcctgtcatggcccttgttggatttacggaatacacaccatttcagtaccagaagattgccgagccctacgtccgcaagttactcatcaagcgcgccctcaccgttctggcccttacccttctcgtcgatgccgctatttccgtcctcttcatcttcgtacctggcaaacgactttgagcggctgtgaggaacggagtaactgagaggagaagggagtagcaaagctggaaaccatggggaaatggagacccggcacattttaacgacgttacgactaattgcttttcacctgctgctggctggttgattcacccgctctgattattcgacttcgagacgccagatgcgtcataatgagcccggcatggcctgcattgcattgcattttgatttgaagaggaaataataccaagcacagtccacgtggtgcaccacgccttgtttgtcgaggagattgagagggagtggaggaaatgagtttacgggccgagcagaagacgaaagagagacagattcatctagttgcttgttgcaagcatcggaaacgcattgcaaaatggagaattgagcttggtggagtaatatggctgcaaaatctggcccactgagaaagggaagataaatctgagtgatgtgtgcccgagaggaaacattgtacaaaagttcggtgcgttgacgtttttcccggcctcggacctggcgtgtgaggcgtaatggtaaggcagaggatatgtccgatgcaaaggattagggatggtgccgtcgataggactcatcgattttatgagtttactccatacttttacttcgatgcctccctcccgtgcatgatagtgagcttgtgcttagctttatgcgccgtgatatttagatacacaaagcgaagcgcatgcaattgtcatggtcccagtcgacatatactgatgtagcctgacaaaacatttgcaacttagttcgatgggatgctcgggttgatatatcgatcgttgtctataggttgtcatgggggtaaagcagattgcagatatgattagatgtaaagaattcatcaccatccatggtagttgaacggaaatagcccctatcgcagccaagtcagctacagcattttgtaatatcccactgtgaactgggcaaacgcagtcaggctcgagttactgtttgtattcgcgtagtggactacatatgcccactgtaacttgattcagtccaggatgagctattcggtctagatgcgtaagcctgtagtgatgctatggtgccccctttctaacatctgctcatctagctgtcgccgactttgtagtgactcctagctgtaacgatgctggtgatgctacgatgccgttgacctctgcacccacggcgtctgttatgccacgatgctccggcctggctcctatcatcagctctctaccgtcgaggcttctatttcttcagctcatatttgaggctagccaggaatttcttcattcctgtgaagcctttcgactccttctccgggcaacatcccttgctacccttgtcgttgctcttctttccttggccgcttttattatcttcgttggctttgctcccgttgtcgtctccaccatcttccttgtccttatcgtctttctcgtccttctgatcctttttatgcttttcactctggtcatcctgattgtcgtcgtcgtcgtcgtcgtcgacttcctcctgcttctgcactgcaggctcaccttcggggccgtcttcctagttcttccggcggctcagccgcttcttaccgggaccgccgaggggagcgccgccgcctccggagccgttgccggctgtctcgccatcctcgagatcgtcgtcttcgagctccatgccttcgtcttcgtccatgttgctgtcgaggttgctgacgggccgcttgccgccaaacttgggctgggcttgcgacctgaggatggccgtcttggacttgcgctggcccgaggcgtcggagttcttctcgtcgtccatgagcttggcctggtgctggtcgcgggccttcttctccgcatggcgcttggcggcggcgtccttgatggcctcgatctgagcctggatgtcgtcgtaggcggactggcagcgagcctcgaagcccctcaggctggcggccatgtcggggatggacttggggtctggatcgcgcaggggggcgacggaggagacattgacgaggccgctgtgctggtcgagcctggcgtcgaggagaccggcgtagacggcgtcgacgactaggcgctcgagggcggagttgtcgggcaggtcgagggcttgcttgagggcggcgtatgtgaggttcttggggttcttggccagcgagaggagagagaggcggcggagcttggcggtctgggcgtcatccagcttggggagagaggggtgttgggtgtagtcgcggtaggagcggtaggagaagatcttgagcagctcgagaaagggggcgtggtcgggggagtcggccagcttctggatgttgggtacgtcgaggagctctgcgaagaagtaggtgttggggttgctcgtggccagcttgatgacgttggccgcatagctgttagaagtcgaagtctgagccatggctacgaacggctga

SEQ ID NO: 4433 - DNA, 363 bp, Muscodor strobelii
  misc_feature: SGI cDNA ID NO. 561167
  misc_feature: Reduced expression when VOC is produced
  misc_feature: Encodes the peptide sequence at SEQ ID NO 4434
atgtcgtccaagggaaagaagcccgccaagtccgccattgagcaggtcgttgctcgcgagtacaccatccacatgcacaagagactccatggtgtcaccttcaagaagcgagctccccgtgccatcaaggagatcaaggctttcgccgagaaggctatgggtacctccgacgtccgtctcgacccccagttgaataagaaggtctgggagcaggggatcaagggtgttccgtacagactccgcatccgcatcagccgccgccgcaacgacgaggaggacgccaaggagaagctctacagctacgtccaggccgtcaacgtcaagaatcccaagggtctcgtcaccgtcgtggtcgaggaataa

SEQ ID NO: 4434 - protein, 120 aa, Muscodor strobelii
  misc_feature: SGI Peptide ID NO. 561167
  misc_feature (12)..(106): Pfam Id: PF01198 Pfam Desc: Ribosomal protein L31e
  misc_feature (2)..(120): NCBI GI: 212534208 Blast Desc: 60S ribosomal protein L31e [Penicillium marneffei ATCC 18224] gi|210069659|gb|EEA23749.1| 60S ribosomal protein L31e [Penicillium marneffei ATCC 18224]
  misc_feature (7)..(120): NCBI GI: 171695350 Blast Desc: protein product [Podospora anserina] gi|170947917|emb|CAP60081.1| protein product [Podospora anserina]
  misc_feature (1)..(120): NCBI GI: 238840703 Blast Desc: ribosomal protein L31e [Microsporum canis CBS 113480]
  misc_feature (1)..(120): NCBI GI: 240105260 Blast Desc: 60S ribosomal protein L31, [Coccidioides posadasii C735 delta SOWgp]
  misc_feature (1)..(120): NCBI GI: 261200112 Blast Desc: ribosomal protein L31e [Ajellomyces dermatitidis SLH14081] gi|239594665|gb|EEQ77246.1| ribosomal protein L31e [Ajellomyces dermatitidis SLH14081] gi|239608053|gb|EEQ85040.1|
  misc_feature (5)..(120): NCBI GI: 119194561 Blast Desc: conserved [Coccidioides immitis RS]
  misc_feature (1)..(120): NCBI GI: 226278350 Blast Desc: 60S ribosomal protein L31 [Paracoccidioides brasiliensis Pb01]
  misc_feature (10)..(120): NCBI GI: 156040321 Blast Desc: conserved [Sclerotinia sclerotiorum 1980] gi|154696233|gb|EDN95971.1| conserved [Sclerotinia sclerotiorum 1980]
  misc_feature (7)..(120): NCBI GI: 169604644 Blast Desc: SNOG_05336 [Phaeosphaeria nodorum SN15] gi|111066607|gb|EAT87727.1| SNOG_05336 [Phaeosphaeria nodorum SN15]
  misc_feature (10)..(120): NCBI GI: 154320588 Blast Desc: 60S ribosomal protein L31 [Botryotinia fuckeliana B05.10] gi|150853455|gb|EDN28647.1| 60S ribosomal protein L31 [Botryotinia fuckeliana B05.10]
  misc_feature: Useful for introducing or modulating the production of volatile compounds
MSSKGKKPAKSAIEQVVAREYTIHMHKRLHGVTFKKRAPRAIKEIKAFAEKAMGTSDVRLDPQLNKKVWEQGIKGVPYRLRIRISRRRNDEEDAKEKLYSYVQAVNVKNPKGLVTVVVEE

SEQ ID NO: 4435 - DNA, 3429 bp, Muscodor strobelii
  misc_feature: SGI EST ID NO. CUFF.12424.1
  misc_feature: Variant of the nucleotide sequence at SEQ ID NO 4433
cgataagccccccaccgattggctcgttaaccgaagtttctcctgccctcacaaaggctctcccacacttggctgggttttttcctcgatttcgcaacgcccgagaaagtcagcgagagtccgcgaccaccactcaacccacctccgacacttttctcgacaaccacccagacacccaccgccgtaagcacgtccctacagccaatccaacacatcacacatagccccgacaaagaccacacccgctcacctatttcatcatcgcagaacatgtcgtccaagggaaagaagcccgccaagtccgccattgagcaggtcgttgctcgcgagtacaccatccacatgcacaagagactccatggtgtcaccttcaagaagcgagctccccgtgccatcaaggagatcaaggctttcgccgagaaggctatgggtacctccgacgtccgtctcgacccccagttgaataagaaggtctgggagcaggggatcaagggtgttccgtacagactccgcatccgcatcagccgccgccgcaacgacgaggaggacgccaaggagaagctctacagctacgtccaggccgtcaacgtcaagaatcccaagggtctcgtcaccgtcgtggtcgaggaataagcgggggcccgctgcttggggaagaaataaaggcacaaatactcaatcaatcaacgcgacggcgaattttacgaacgatacaaaaaccatgaaagctgtgttttctgctttttgtgcgacgcctctctgttctcgatctcgttcgttcggagcaccggcatgacggacggactgatgataggcaagggaaactaaagagagagataccggatgggcacttctgtagggcatggtttcggagtttctcctggcttcatggattttagcctcactggtcgatgaatcaagacaaaacgtgagcacccacatcccgaccgtcacaggtgttcgtattccgcctgatcgatggcaatgtgttgcaattgtgaaattgtgaggcttgaaaagctgcgtgtggtgccgctgtcctgtgctataggtgactagtcgttggagtcggctggcctgagagcgttccatgctattctagcagcaatggagcatggagagtcggatacctcagacacactgccgactgcttgctctttgcgcgcttcattacatctcgccagtaacttatcgcttgttccgttctcatggctaagttcatgctacgagagcattctcgcctcctgctctgataagtagccaagaaacacacaatccagttccctcacataatagcctccccatcgtgagtcgtaacgaagtcggcaacacccgtcactactcggccactgaacttctcacaagaccatgtgccaaaggggcaacttcagaatcaggatcgtaacacgtcatttgactagacagggtagacaatagttcatctcccatctcatccgaagcagtatgtaaatcattacaaccgcaatacctatcgacagaccaccaaccagcccaacgaaaaacacagacccgaaccaaagcccatatcaacaagacaatgcattctcccgcctcgccggacgagcgaaccaatggctatgcaaggcccaactcacaaatgagggaccattttgacgcccgttctccgatgctactgctccatgacaatgtttcgtgtcctcctactcgacagaatggcaaagcaggcaaaaacaacttcccgatccccatggagccaaaacagactcccgagaacccaaagaaataatcccggatgcacggtcatcccagactaacgctgttccccaaggcttccaaatctatatgcagagaggccggtaagtacaagcttgttcctctccatctttctaacatccattatgtctccagatgtgctcgtttagtcgtcatcgatgtcgcggtgacgcgcgaggaccttccgcttgaactcctcggcgtctttgtcccagagctcggcggcctcgccgttgagcggcgaggaactgcgggggataacggtcagcatagatgtacacgagaccaagaaaacaacggcggcaatcaacgcacttgttgggctcgcccaagagactctgcaagctcagcaggacggtctggacgttgtaggcggcggtccacttgtccttgaggatgtcgaggcagatgcggcctgagaagtcgacgttggggtggtagatgggcgtcttgaagagcacggtgggcggggcgtaggggtagttggaggggaaggcgaaggagagcttgaaggtcaggttggcgtagggggtgtcgtcggggccctcgatggtggcggcccaggacatgaggttgccgtcggccgaggggaaggcggagacgccgggggccggcgaggtcatgagctgcatgagctcagtctggaggctgggttggagggccaggtgtcagtgtctccgtcatctttcatatgtccgtctgtctgaagtggcccgagggagagagatgttgcataccgcttggtgacgctctgggcatccgggcctttctttgcaccgccgagcttagcggcgtccaagctgcccggagccgagttctgcgagttctctgcgtagtccattctgtagcagtctgtgaatatggctatttgttctggttctcaagcgtcaagaggagtcaagtctctgctgttgggccagcttttgtgatcgaaaaaggaccggatgcgcagctgagtcgagcgaccagctgaggctgctgcaaagagcgattggcaatgccggctcgcggacggctgccagacaaaaaaatgcgattctgcaaaaagaaagtctacctggaatgccggtggctgttagtcgagtcggtatcaaaggcacttttgttcaggttcagaacgaattgggttggagagagagacaaagcaagggcaattgtattcgacatcgatgggggtcactttgtcttgctcagtcgtgccgccaacggaacaattgcttgcaatcccgccccaacaagacatattgttctctgtcctcgtctctctgtgtgtaatggtgatacgatactcatccacacgcacatccagactcagacatacacacaggagaaacagaacacaagacaggaccatagtcatcgtgagagggcagcgtatgtgtgtggccggggtggtacgaacctggctggggtatagagaggttgtgttattgtcgtgaacctcaatggcgagctacaaacgcagcgctgcggagatggaagagatgttatatcaggaagagactataggatgtgggagtcgaggagcgagaagttgcagtgaaagcattctacaacacacaactcgaccgtctgggttcgtcgtgcttgaaagtctccagccgagtaaacaacagcccctgcgtgttagtgcaccactgggcccccgcaagatgcgacttctatggcaaccag

SEQ ID NO: 4436 - DNA, 540 bp, Muscodor strobelii
  misc_feature: SGI cDNA ID NO. 561168
  misc_feature: Encodes the peptide sequence at SEQ ID NO 4437
atggactacgcagagaactcgcagaactcggctccgggcagcttggacgccgctaagctcggcggtgcaaagaaaggcccggatgcccagagcgtcaccaagcgcctccagactgagctcatgcagctcatgacctcgccggcccccggcgtctccgccttcccctcggccgacggcaacctcatgtcctgggccgccaccatcgagggccccgacgacaccccctacgccaacctgaccttcaagctctccttcgccttcccctccaactacccctacgccccgcccaccgtgctcttcaagacgcccatctaccaccccaacgtcgacttctcaggccgcatctgcctcgacatcctcaaggacaagtggaccgccgcctacaacgtccagaccgtcctgctgagcttgcagagtctcttgggcgagcccaacaattcctcgccgctcaacggcgaggccgccgagctctgggacaaagacgccgaggagttcaagcggaaggtcctcgcgcgtcaccgcgacatcgatgacgactaa

SEQ ID NO: 4437 - protein, 179 aa, Muscodor strobelii
  misc_feature: SGI Peptide ID NO. 561168
  misc_feature (35)..(173): Pfam Id: PF00179 Pfam Desc: Ubiquitin-conjugating enzyme
  misc_feature (5)..(179): NCBI GI: 39943296 Blast Desc: conserved [Magnaporthe grisea 70-15] gi|145009674|gb|EDJ94330.1| conserved [Magnaporthe grisea 70-15]
  misc_feature (1)..(179): NCBI GI: 261355206 Blast Desc: ubiquitin-conjugating enzyme [Verticillium albo-atrum VaMs.102]
  misc_feature (1)..(179): NCBI GI: 116182304 Blast Desc: conserved [Chaetomium globosum CBS 148.51] gi|88186077|gb|EAQ93545.1| conserved [Chaetomium globosum CBS 148.51]
  misc_feature (1)..(179): NCBI GI: 156040323 Blast Desc: conserved [Sclerotinia sclerotiorum 1980] gi|154696234|gb|EDN95972.1| conserved [Sclerotinia sclerotiorum 1980]
  misc_feature (1)..(179): NCBI GI: 154320590 Blast Desc: BC1G_01767 [Botryotinia fuckeliana B05.10] gi|150853456|gb|EDN28648.1| BC1G_01767 [Botryotinia fuckeliana B05.10]
  misc_feature (1)..(179): NCBI GI: 242789611 Blast Desc: ubiquitin conjugating enzyme (UbcK), [Talaromyces stipitatus ATCC 10500] gi|218717986|gb|EED17406.1| ubiquitin conjugating enzyme (UbcK), [Talaromyces stipitatus ATCC 10500]
  misc_feature (1)..(179): NCBI GI: 46109246 Blast Desc: FG01505.1 [Gibberella zeae PH-1]
  misc_feature (1)..(179): NCBI GI: 212534244 Blast Desc: ubiquitin conjugating enzyme (UbcK), [Penicillium marneffei ATCC 18224] gi|210069677|gb|EEA23767.1| ubiquitin conjugating enzyme (UbcK), [Penicillium marneffei ATCC 18224]
  misc_feature (1)..(178): NCBI GI: 67538650 Blast Desc: AN5495.2 [Aspergillus nidulans FGSC A4] gi|40743465|gb|EAA62655.1| AN5495.2 [Aspergillus nidulans FGSC A4] gi|259485055|tpe|CBF81800.1| TPA: ubiquitin conjugating FGSC
  misc_feature (1)..(179): NCBI GI: 171695348 Blast Desc: protein product [Podospora anserina] gi|170947916|emb|CAP60080.1| protein product [Podospora anserina]
  misc_feature (1)..(178): SWISSPROT Homolog: EC 6.3.2.19 Ubiquitin--protein ligase
MDYAENSQNSAPGSLDAAKLGGAKKGPDAQSVTKRLQTELMQLMTSPAPGVSAFPSADGNLMSWAATIEGPDDTPYANLTFKLSFAFPSNYPYAPPTVLFKTPIYHPNVDFSGRICLDILKDKWTAAYNVQTVLLSLQSLLGEPNNSSPLNGEAAELWDKDAEEFKRKVLARHRDIDDD

SEQ ID NO: 4438 - DNA, 3212 bp, Muscodor strobelii
  misc_feature: SGI EST ID NO. CUFF.12425.2
  misc_feature: Variant of the nucleotide sequence at SEQ ID NO 4436
ctggttgccatagaagtcgcatcttgcgggggcccagtggtgcactaacacgcaggggctgttgtttactcggctggagactttcaagcacgacgaacccagacggtcgagttgtgtgttgtagaatgctttcactgcaacttctcgctcctcgactcccacatcctatagtctcttcctgatataacatctcttccatctccgcagcgctgcgtttgtagctcgccattgaggttcacgacaataacacaacctctctataccccagccaggtagactttctttttgcagaatcgcatttttttgtctggcagccgtccgcgagccggcattgccaatcgctctttgcagcagcctcagctggtcgctcgactcagctgcgcatccggtcctttttcgatcacaaaagctggcccaacagcagagacttgactcctcttgacgcttgagaaccagaacaaatagccatattcacagactgctacagaatggactacgcagagaactcgcagaactcggctccgggcagcttggacgccgctaagctcggcggtgcaaagaaaggcccggatgcccagagcgtcaccaagcgcctccagactgagctcatgcagctcatgacctcgccggcccccggcgtctccgccttcccctcggccgacggcaacctcatgtcctgggccgccaccatcgagggccccgacgacaccccctacgccaacctgaccttcaagctctccttcgccttcccctccaactacccctacgccccgcccaccgtgctcttcaagacgcccatctaccaccccaacgtcgacttctcaggccgcatctgcctcgacatcctcaaggacaagtggaccgccgcctacaacgtccagaccgtcctgctgagcttgcagagtctcttgggcgagcccaacaattcctcgccgctcaacggcgaggccgccgagctctgggacaaagacgccgaggagttcaagcggaaggtcctcgcgcgtcaccgcgacatcgatgacgactaaacgagcacatctggagacataatggatgttagaaagatggagaggaacaagcttgtacttaccggcctctctgcatatagatttggaagccttggggaacagcgttagtctgggatgaccgtgcatccgggattatttctttgggttctcgggagtctgttttggctccatggggatcgggaagttgtttttgcctgctttgccattctgtcgagtaggaggacacgaaacattgtcatggagcagtagcatcggagaacgggcgtcaaaatggtccctcatttgtgagttgggccttgcatagccattggttcgctcgtccggcgaggcgggagaatgcattgtcttgttgatatgggctttggttcgggtctgtgtttttcgttgggctggttggtggtctgtcgataggtattgcggttgtaatgatttacatactgcttcggatgagatgggagatgaactattgtctaccctgtctagtcaaatgacgtgttacgatcctgattctgaagttgcccctttggcacatggtcttgtgagaagttcagtggccgagtagtgacgggtgttgccgacttcgttacgactcacgatggggaggctattatgtgagggaactggattgtgtgtttcttggctacttatcagagcaggaggcgagaatgctctcgtagcatgaacttagccatgagaacggaacaagcgataagttactggcgagatgtaatgaagcgcgcaaagagcaagcagtcggcagtgtgtctgaggtatccgactctccatgctccattgctgctagaatagcatggaacgctctcaggccagccgactccaacgactagtcacctatagcacaggacagcggcaccacacgcagcttttcaagcctcacaatttcacaattgcaacacattgccatcgatcaggcggaatacgaacacctgtgacggtcgggatgtgggtgctcacgttttgtcttgattcatcgaccagtgaggctaaaatccatgaagccaggagaaactccgaaaccatgccctacagaagtgcccatccggtatctctctctttagtttcccttgcctatcatcagtccgtccgtcatgccggtgctccgaacgaacgagatcgagaacagagaggcgtcgcacaaaaagcagaaaacacagctttcatggtttttgtatcgttcgtaaaattcgccgtcgcgttgattgattgagtatttgtgcctttatttcttccccaagcagcgggcccccgcttattcctcgaccacgacggtgacgagacccttgggattcttgacgttgacggcctggacgtagctgtagagcttctccttggcgtcctcctcgtcgttgcggcggcggctgatgcggatgcggagtctgtacggaacacccttgatcccctgctcccagaccttcttattcaactgggggtcgagacggacgtcggaggtaccctgagtgtcgccatgttagctctcgcaattcttccatatgttcgtcattggctgtggcaggatgtagggatcaagtcgtggtaggattgggcggtcgtgcacgttgatgatgtacaatgcggaggagggtgaaataatcgtaccatagccttctcggcgaaagccttgatctccttgatggcacggggagctcgcttcttgaaggtgacaccatggagcttttggagatatgttagccaaaccaatgcctttagtgcctctactttcttctctcctgatctcctctttcattttcctcgaagtctcgttgtcggggcgttgaggatcgggcggagcggtggatgtggtggtggacgtactctcttgtgcatgtggatggtgtactcgcgagcaacgacctgctcaatggcggacttggcgggcttctttcccttggacgacatgttctgcgatgatgaaataggtgagcgggtgtggtctttgtcggggctatgtgtgatgtgttggattggctgtagggacgtgcttacggcggtgggtgtctgggtggttgtcgagaaaagtgtcggaggtgggttgagtggtggtcgcggactctcgctgactttctcgggcgttgcgaaatcgaggaaaaaacccagccaagtgtgggagagcctttgtgagggcaggagaaacttcggttaacgagccaatcggtggggggcttatcg

SEQ ID NO: 4439 - DNA, 1635 bp, Muscodor strobelii
  misc_feature: SGI cDNA ID NO. 561169
  misc_feature: Encodes the peptide sequence at SEQ ID NO 4440
atgcaacagtctcaactagatcctctacctaatgatcttcccttcagaatagtctcaaaaaccataggaagaggagcatatgcttctatcaaaaaagctgttcctctagatgctcctcagccagtctttgccgtcaaacttatacacaaaggctatgccgtcaaaaagggccgtatatctgccaagcagattgtcatggaggtctctctccattctctcattggccaacaccctaatgtcatagaatggttcgcaactggcgaggatcacgtctggagatggatagccatggaatatgccgagggaggtgatcttttcgacaagatcgaggccgatgtgggtgttactgaggacattgcacatctttacttcctccaactcatcagtggcgtcagtttcatgcattccaaaggtgtcgcacatcgcgatctaaagcccgagaatatcctcatgtccgagaccggcaacctgaaacttgcagactttggtatggctaccatgtttgaatacaaaggccagaagaaattgagcacaaccatgtgcgggagccccccctatatagcccctgaggtcctggcttgcggcagagcagacaaaaagtctgatgctgccaggtacgccgctgagcttgtggatatttggtcctgcggtgtcatcctcttcgtccttctcgttggcaacacaccgtgggatgagccaacatcaaacagttgggagtatcgagagtacagaaagtcgaatggtcgtagttcggacagcctatgggagaggctgcctccgactacgctctccttgctcagaggaatgatgaatatcgacacaaagaaacgcttctcattcgctcaaataaggcagcatccctggtacactcgccataacaggttcctagcagcagatggtcaaattaccgatcctataacagtagctaccaaaatgctggaaaatcttcacattaacttcaagggacctatatcacatctcccacaaacaactcaagatgccatggacgtcgatagcgcgcctccagcccatgcaaagtcatcgagtcaacctgacgtgcccattgacgatgccctcttcgacatggagagaccaacattgcgctcactcggtatgcatgctgtctcatcaacgcaacctgtctcgagagaggagttttctctgcagcccattgccacccagtctgccaacttcttcgaagcgcttgccgaagagccatcgatgagtcaattctcacaaacccccagcgttcctctcaccttgacacaacgcgcgaggcgatttagagatatcatacccgcgcactctttcacccgtttcttctcccatatgcctccgcaactccttgtgcagatgctcagcgacgcactacacaatctcaatgtaccgctcccttcaatacccccctatatcagcctgggtgaccacgtcgcttcgctcaaggttcgtactgtagatgagcgcaaacagggcctccatggcgagattttattggataagtattatctcccggaatctcaagagctgctagaagtgcgcttcgtcaagatcaagggagacccgctcgaatggagacgcttcttcaagaaagttgtcttattgtgtaaggatggtgtatacaagcccgaagcttag

SEQ ID NO: 4440 - protein, 544 aa, Muscodor strobelii
  misc_feature: SGI Peptide ID NO. 561169
  misc_feature (16)..(289): Pfam Id: PF00069 Pfam Desc: Protein kinase domain
  misc_feature (15)..(165): Pfam Id: PF07714 Pfam Desc: Protein tyrosine kinase
  misc_feature (1)..(544): NCBI GI: 261355205 Blast Desc: serine/threonine-protein kinase chk1 [Verticillium albo-atrum VaMs.102]
  misc_feature (4)..(540): NCBI GI: 171695346 Blast Desc: protein product [Podospora anserina] gi|170947915|emb|CAP60079.1| protein product [Podospora anserina]
  misc_feature (1)..(544): NCBI GI: 145615888 Blast Desc: MGG_03729 [Magnaporthe grisea 70-15] gi|145009673|gb|EDJ94329.1| MGG_03729 [Magnaporthe grisea 70-15]
  misc_feature (1)..(544): NCBI GI: 256730591 Blast Desc: [Nectria haematococca mpVI 77-13-4]
  misc_feature (4)..(541): NCBI GI: 164424879 Blast Desc: NCU08346 [Neurospora crassa OR74A] gi|157070702|gb|EAA36013.2| conserved [Neurospora crassa OR74A]
  misc_feature (32)..(540): NCBI GI: 116182306 Blast Desc: CHGG_01781 [Chaetomium globosum CBS 148.51] gi|88186078|gb|EAQ93546.1| CHGG_01781 [Chaetomium globosum CBS 148.51]
  misc_feature (29)..(544): NCBI GI: 46109248 Blast Desc: FG01506.1 [Gibberella zeae PH-1]
  misc_feature (6)..(542): NCBI GI: 156040325 Blast Desc: SS1G_12179 [Sclerotinia sclerotiorum 1980] gi|154696235|gb|EDN95973.1| SS1G_12179 [Sclerotinia sclerotiorum 1980]
  misc_feature (6)..(543): NCBI GI: 154320592 Blast Desc: BC1G_01768 [Botryotinia fuckeliana B05.10] gi|150853457|gb|EDN28649.1| BC1G_01768 [Botryotinia fuckeliana B05.10]
  misc_feature (1)..(543): NCBI GI: 115390046 Blast Desc: ATEG_03350 [Aspergillus terreus NIH2624] gi|114194924|gb|EAU36624.1| ATEG_03350 [Aspergillus terreus NIH2624]
  misc_feature (11)..(532): SWISSPROT Homolog: EC 2.7.11.1 Non-specific serine/threonine protein kinase
MQQSQLDPLPNDLPFRIVSKTIGRGAYASIKKAVPLDAPQPVFAVKLIHKGYAVKKGRISAKQIVMEVSLHSLIGQHPNVIEWFATGEDHVWRWIAMEYAEGGDLFDKIEADVGVTEDIAHLYFLQLISGVSFMHSKGVAHRDLKPENILMSETGNLKLADFGMATMFEYKGQKKLSTTMCGSPPYIAPEVLACGRADKKSDAARYAAELVDIWSCGVILFVLLVGNTPWDEPTSNSWEYREYRKSNGRSSDSLWERLPPTTLSLLRGMMNIDTKKRFSFAQIRQHPWYTRHNRFLAADGQITDPITVATKMLENLHINFKGPISHLPQTTQDAMDVDSAPPAHAKSSSQPDVPIDDALFDMERPTLRSLGMHAVSSTQPVSREEFSLQPIATQSANFFEALAEEPSMSQFSQTPSVPLTLTQRARRFRDIIPAHSFTRFFSHMPPQLLVQMLSDALHNLNVPLPSIPPYISLGDHVASLKVRTVDERKQGLHGEILLDKYYLPESQELLEVRFVKIKGDPLEWRRFFKKVVLLCKDGVYKPEA

SEQ ID NO: 4441 - DNA, 2329 bp, Muscodor strobelii
  misc_feature: SGI EST ID NO. CUFF.11264.0
  misc_feature: Variant of the nucleotide sequence at SEQ ID NO 4439
ttccccatcgcgtcccatacaaacatggtgcgagtcactagaactcttcaccagagccaaccacttttctctgtccaggtctggtgtaaacaacttacatagacattgattccccaagaccagactcgaccgaccttaggtcgatcttgcatatatcttagttcaattgcgtccgggcgcttgcgcaatccccgtccacggcactggataacattgcaaaataccattaaaagacgccgctcttctggcgcgttagtacgcgtcaatatgtctcaactagatcctctacctaatgatcttcccttcagaatagtctcaaaaaccataggaagaggagcatatgcttctatcaaaaaagctgttcctctagatgctcctcagccagtctttgccgtcaaacttatacacaaaggctatgccgtcaaaaagggccgtatatctgccaagcagattgtcatggaggtctctctccattctctcattggccaacaccctaatgtcatagaatggttcgcaactggcgaggatcacgtctggagatggatagccatggaatatgccgagggaggtgatcttttcgacaagatcgaggccgatgtgggtgttactgaggacattgcacatctttacttcctccaactcatcagtggcgtcagtttcatgcattccaaaggtgtcgcacatcgcgatctaaagcccgagaatatcctcatgtccgagaccggcaacctgaaacttgcagactttggtatggctaccatgtttgaatacaaaggccagaagaaattgagcacaaccatgtgcgggagccccccctatatagcccctgaggtcctggcttgcggcagagcagacaaaaagtctgatgctgccaggtacgccgctgagcttgtggatatttggtcctgcggtgtcatcctcttcgtccttctcgttggcaacacaccgtgggatgagccaacatcaaacagttgggagtatcgagagtacagaaagtcgaatggtcgtagttcggacagcctatgggagaggctgcctccgactacgctctccttgctcagaggaatgatgaatatcgacacaaagaaacgcttctcattcgctcaaataaggcagcatccctggtacactcgccataacaggttcctagcagcagatggtcaaattaccgatcctataacagtagctaccaaaatgctggaaaatcttcacattaacttcaagggacctatatcacatctcccacaaacaactcaagatgccatggacgtcgatagcgcgcctccagcccatgcaaagtcatcgagtcaacctgacgtgcccattgacgatgccctcttcgacatggagagaccaacattgcgctcactcggtatgcatgctgtctcatcaacgcaacctgtctcgagagaggagttttctctgcagcccattgccacccagtctgccaacttcttcgaagcgcttgccgaagagccatcgatgagtcaattctcacaaacccccagcgttcctctcaccttgacacaacgcgcgaggcgatttagagatatcatacccgcgcactctttcacccgtttcttctcccatatgcctccgcaactccttgtgcagatgctcagcgacgcactacacaatctcaatgtaccgctcccttcaatacccccctatatcagcctgggtgaccacgtcgcttcgctcaaggttcgtactgtagatgagcgcaaacagggcctccatggcgagattttattggataagtattatctcccggaatctcaagagctgctagaagtgcgcttcgtcaagatcaagggagacccgctcgaatggagacgcttcttcaagaaagttgtcttattgtgtaaggatggtgtatacaagcccgaagcttagaaagcagaacatttggctgctaacaagacgaacatttaatcgccttcagctgccacatgtggggtgttgcaattcacggtccgagatgaggatcagtcgatgattgattggcggtgctccaagacaaaggtaatatctggaatctgcatatagaagcccacatgacagctatcacataatatgccgctctagaagctctacgagttctgtacatatgtgtccacccgaaagatgtgctgctactagatttatattcacatcacgtgcgggtactgcgatgggttataggcagttgacacctttgttgcgcacgtttcaacttcgcttcgtaatgcacacaacctgataagtaaatgcgtcaaaattccaggttttcggagcaattcatctgtctattcagaagctacattctaaacttacatgtaggcatctg

SEQ ID NO: 4442 - DNA, 687 bp, Muscodor strobelii
  misc_feature: SGI cDNA ID NO. 561170
  misc_feature: Elevated expression when VOC is produced
  misc_feature: Encodes the peptide sequence at SEQ ID NO 4443
atgtcttcgtcggctagaacacgagttgcgttgctccgtgacgaagatacggcgacatgttttgaggtcctctccaaaagtttcgggcatgacgcacccttcgtagacatctactttccaggacatgatacccctcaaggccattcacaaggctcgcagcgacttacagcatggaagaatagcgctccaaactctacatttctaaagggggtcgtagacttaggtgatgtcaattcagcgacagacgaaacgattggtggtttcgccgtctggacgcacatgagagatgtcccaccccagacaattgaagaagccgagaatgttgaagaggtttggccggatgagcgggatcgcgagttcatggcacgtctttggatagattatgtgaaaccgaggacaaatgctgtgagaacctctgatggcaagggggtctatgttctcgaacttttagctgtacgtccagagtatcagcgcctaggaatcggggcgagtctcgtcaattggggccttcataaggctgctgagatgggcgtgaaagctgtggttgagagtacgccgatcgggagacgggtgtatgagaagtgtggtatgcgggccgaaatcgaggagatgcaatttgatgtgggagaagagttcaggggacggaggaagccgcggcttgtcttcatgtcgaaggaggtcaggtaa

SEQ ID NO: 4443 - protein, 228 aa, Muscodor strobelii
  misc_feature: SGI Peptide ID NO. 561170
  misc_feature (112)..(198): Pfam Id: PF00583 Pfam Desc: Acetyltransferase (GNAT) family
  misc_feature (21)..(223): NCBI GI: 238489847 Blast Desc: conserved [Aspergillus flavus NRRL3357] gi|220698549|gb|EED54889.1| conserved [Aspergillus flavus NRRL3357]
  misc_feature (21)..(223): NCBI GI: 169763870 Blast Desc: [Aspergillus oryzae RIB40] gi|83770863|dbj|BAE60996.1| protein product [Aspergillus oryzae]
  misc_feature (8)..(228): NCBI GI: 156056440 Blast Desc: SS1G_05574 [Sclerotinia sclerotiorum 1980] gi|154703356|gb|EDO03095.1| SS1G_05574 [Sclerotinia sclerotiorum 1980]
  misc_feature (15)..(223): NCBI GI: 212531821 Blast Desc: conserved [Penicillium marneffei ATCC 18224] gi|210071431|gb|EEA25520.1| conserved [Penicillium marneffei ATCC 18224]
  misc_feature (16)..(223): NCBI GI: 67902036 Blast Desc: AN8005.2 [Aspergillus nidulans FGSC A4] gi|40739618|gb|EAA58808.1| AN8005.2 [Aspergillus nidulans FGSC A4] gi|259480756|tpe|CBF73690.1| TPA: conserved [Aspergillus FGSC
  misc_feature (15)..(226): NCBI GI: 255955349 Blast Desc: Pc21g14110 [Penicillium chrysogenum Wisconsin 54-1255] gi|211590138|emb|CAP96308.1| Pc21g14110 [Penicillium chrysogenum Wisconsin 54-1255]
  misc_feature (8)..(228): NCBI GI: 154302672 Blast Desc: BC1G_09451 [Botryotinia fuckeliana B05.10] gi|150855198|gb|EDN30390.1| BC1G_09451 [Botryotinia fuckeliana B05.10]
  misc_feature (15)..(223): NCBI GI: 242782613 Blast Desc: conserved [Talaromyces stipitatus ATCC 10500] gi|218720182|gb|EED19601.1| conserved [Talaromyces stipitatus ATCC 10500]
  misc_feature (15)..(223): NCBI GI: 256733440 Blast Desc: NECHADRAFT_36686 [Nectria haematococca mpVI 77-13-4]
  misc_feature (15)..(223): NCBI GI: 119485895 Blast Desc: GNAT family acetyltransferase, [Neosartorya fischeri NRRL 181] gi|119410446|gb|EAW20393.1| GNAT family acetyltransferase, [Neosartorya fischeri NRRL 181]
  misc_feature: Useful for introducing or modulating the production of volatile compounds
MSSSARTRVALLRDEDTATCFEVLSKSFGHDAPFVDIYFPGHDTPQGHSQGSQRLTAWKNSAPNSTFLKGVVDLGDVNSATDETIGGFAVWTHMRDVPPQTIEEAENVEEVWPDERDREFMARLWIDYVKPRTNAVRTSDGKGVYVLELLAVRPEYQRLGIGASLVNWGLHKAAEMGVKAVVESTPIGRRVYEKCGMRAEIEEMQFDVGEEFRGRRKPRLVFMSKEVR

SEQ ID NO: 4444 - DNA, 1530 bp, Muscodor strobelii
  misc_feature: SGI EST ID NO. CUFF.11270.0
  misc_feature: Variant of the nucleotide sequence at SEQ ID NO 4442
cgcaagagcaacttttgatctgcgcgtctcattaccattttccactatttgtctttacaatcttggtcgtatgtacataccatgatgtcttcgtcggctagaacacgagttgcgttgctccgtgacgaagatacggcgacatgttttgaggtcctctccaaaagtttcgggcatgacgcacccttcgtagacatctactttccaggacatgatacccctcaaggccattcacaaggctcgcagcgacttacagcatggaagaatagcgctccaaactctacatttctaaagggggtcgtagacttaggtgatgtcaattcagcgacagacgaaacgattggtggtttcgccgtctggacgcacatgagagatgtcccaccccagacaattgaagaagccgagaatgttgaagaggtttggccggatgagcgggatcgcgagttcatggcacgtctttggatagattatgtgaaaccgaggacaaatgctgtgagaacctctgatggcaagggggtctatgttctcgaacttttagctgtacgtccagagtatcagcgcctaggaatcggggcgagtctcgtcaattggggccttcataaggctgctgagatgggcgtgaaagctgtggttgagagtacgccgatcgggagacgggtgtatgagaagtgtggtatgcgggccgaaatcgaggagatgcaatttgatgtgggagaagagttcaggggacggaggaagccgcggcttgtcttcatgtcgaaggaggtcaggtaaatggtctactgagtagtgcctttgccatgtgcgacacggtgaccaggtcgctcgttccgaaggtcagctcagtagtaccatttttgcggtgctcgtgtgactgattctgaagtgcaaatgcctattaggaattctgcacacctatctcccagcctgctgggtttttctctacataaaccccgtgttcccctaataaagcttggcagattatttggtgaccgaagcagcttccaaccattttgatctctgggttctggtgatacatgtcttgtagataactagcaagtcggtgaatccaatccgcatcatcgtaggcacttgcagcagagcctgttacaagaatcatgtcgaactcggatatatcctgggaatattcaccaagaacgacgttgaagccttttgactcgacttggagatgtggtgcgactcgatttgcagcagcggcgattagagaatggaagatcgctccatatgatcccatttttgcgaagacattaggaacgggcgtgtcggtgtttagcatcgctatgcgacctattgtacggtctgacatgatcgtcattgtgatataagaatgccggggagcgagtttgcggaaggttgaagggtatggcaggagacatagagtgatcgaagtgaagcaatcggtgatgataagacacgccccaactccagtcgattcgtagttgcgcactttgcttgtaactaccttcaatcttttcaagtaagggttacgtagtctgagtaactcgaaaactg

SEQ ID NO: 4445 - DNA, 843 bp, Muscodor strobelii
  misc_feature: SGI cDNA ID NO. 561171
  misc_feature: Encodes the peptide sequence at SEQ ID NO 4446
atgttcactacatcatcgccccctattatatgtcacaccaagcctagggaccaacaccctgacgatgagcccgctaccaagggctttacatcacacgatcaaaagcacaccactacaaccatccctcccggagcccctacgcatcccaagtacccgcctgctctgcacgtcttctacagcggtcgcaaagaacgcaagagtggccttccccggtactatctcgcccagaccaaaggcagcccactctacgcaatgtctagcccttaccagggcaaatttcatgtgtatgatggacccaattattcatctcacattctggcaagagaagacaagattcgggtggggaggcggaaaaggaaatgtctgctcatggaacggagaaacggcgccggcctgcagcgtatcaaatgggaaaagcaccattccgccataaaattttctttcccctttggtaccaccagcgacaatggctcagaatggttcgagtggcgccggagtcgcggccatgaggttcgcgctatcacgagacacaaggcatacaagctcgtgcgagtttccaacaccgtcggagagggcggcaaacggaaggagcgagcgatgggcaacaccagtgacggccatgaagtcgttgcagtgttctctgctcgacctttgaagcagaccgggggaatcgccagtttcgccttcatggggagcggtttatctagcccgttgaacggcgaatgggctacagcggctttgatgtctgcaatgagactgtggcaagtttgtcaacagaacaattcatcatcggcggctttcttggcaggtggtgcctcttgttgcgctgctggggctgcttga

SEQ ID NO: 4446 - protein, 280 aa, Muscodor strobelii
  misc_feature: SGI Peptide ID NO. 561171
  misc_feature (17)..(267): NCBI GI: 240105211 Blast Desc: CPC735_047740 [Coccidioides posadasii C735 delta SOWgp]
  misc_feature (17)..(267): NCBI GI: 119194669 Blast Desc: CIMG_01709 [Coccidioides immitis RS]
  misc_feature (74)..(266): NCBI GI: 256723118 Blast Desc: NECHADRAFT_28588 [Nectria haematococca mpVI 77-13-4]
  misc_feature (50)..(259): NCBI GI: 255951174 Blast Desc: Pc22g24660 [Penicillium chrysogenum Wisconsin 54-1255] gi|211593371|emb|CAP99754.1| Pc22g24660 [Penicillium chrysogenum Wisconsin 54-1255]
  misc_feature (70)..(261): NCBI GI: 46126013 Blast Desc: FG07384.1 [Gibberella zeae PH-1]
  misc_feature (74)..(265): NCBI GI: 256730926 Blast Desc: NECHADRAFT_96110 [Nectria haematococca mpVI 77-13-4]
  misc_feature (146)..(256): NCBI GI: 169777689 Blast Desc: [Aspergillus oryzae RIB40] gi|83772047|dbj|BAE62177.1| protein product [Aspergillus oryzae]
  misc_feature (146)..(256): NCBI GI: 238494878 Blast Desc: conserved [Aspergillus flavus NRRL3357] gi|220695325|gb|EED51668.1| conserved [Aspergillus flavus NRRL3357]
  misc_feature (45)..(246): NCBI GI: 261352745 Blast Desc: conserved [Verticillium albo-atrum VaMs.102]
  misc_feature (45)..(254): NCBI GI: 46134219 Blast Desc: FG09249.1 [Gibberella zeae PH-1]
MFTTSSPPIICHTKPRDQHPDDEPATKGFTSHDQKHTTTTIPPGAPTHPKYPPALHVFYSGRKERKSGLPRYYLAQTKGSPLYAMSSPYQGKFHVYDGPNYSSHILAREDKIRVGRRKRKCLLMERRNGAGLQRIKWEKHHSAIKFSFPFGTTSDNGSEWFEWRRSRGHEVRAITRHKAYKLVRVSNTVGEGGKRKERAMGNTSDGHEVVAVFSARPLKQTGGIASFAFMGSGLSSPLNGEWATAALMSAMRLWQVCQQNNSSSAAFLAGGASCCAAGAA

SEQ ID NO: 4447 - DNA, 2019 bp, Muscodor strobelii
  misc_feature: SGI EST ID NO. CUFF.11273.0
  misc_feature: Variant of the nucleotide sequence at SEQ ID NO 4445
ctcgtttcatgaggccacttcaccaaatacgagcggtggggcatgattgaatgataggggtggtccgacagccatcttgggacattgttgttcgcaatccaacctagtgttctagtttgcacgagatggttctaggagagtattggatcttcggtacggagaacggcctagcccgtctttttgacgtcgccggaggatagaagtcctttgtcggactgagtccccgttaagatctacctgccaaggccgatatagccgatagttagtatatcccactcagctggttgtaggttttggtaactcgggattacttgcgtgtcataacatttgcgacgaggcgctggcagtgaggacgatggaaggatgcccgttgctgccgagcgcagatctgtgagccagtaccgaaatagagcacttcagcttagatgcctgggcagggagagacgaatgtagtgtgtagactaaatcaagagacgagatgcgtctcttaggcatcgcacatgcatgcatgattcaaagctgctaattgcgatgaaagcgcctgcaggcatacttcaggtgcagtgccagggagccgcacaaccgatacatacctgcctgcactcgacctcccacctgcctggtcgcagcctcgacggtggcactttcatgatagctgccattcatttatgctggctcctgtctgctgctggcaacttctacgtgagcttgaagttggaaggacagaagctgctcctcgttcctcgacaggctgtcatgccaatgctggtctatttagatatcttcttctcctgagagacgacacgagcctcaatgatattcgctaccatcaatatccatctattcgccgcatccatctagacactatattgataaccactcgctttgatacgtgtggcttgcactcaagcccatcatgttcactacatcatcgccccctattatatgtcacaccaagcctagggaccaacaccctgacgatgagcccgctaccaagggctttacatcacacgatcaaaagcacaccactacaaccatccctcccggagcccctacgcatcccaagtacccgcctgctctgcacgtcttctacagcggtcgcaaagaacgcaagagtggccttccccggtactatctcgcccagaccaaaggcagcccactctacgcaatgtctagcccttaccagggcaaatttcatgtgtatgatggacccaattattcatctcacattctggcaagagaagacaagattcgggtggggaggcggaaaaggaaatgtctgctcatggaacggagaaacggcgccggcctgcagcgtatcaaatgggaaaagcaccattccgccataaaattttctttcccctttggtaccaccagcgacaatggctcagaatggttcgagtggcgccggagtcgcggccatgaggttcgcgctatcacgagacacaaggcatacaagctcgtgcgagtttccaacaccgtcggagagggcggcaaacggaaggagcgagcgatgggcaacaccagtgacggccatgaagtcgttgcagtgttctctgctcgacctttgaagcagaccgggggaatcgccagtttcgccttcatggggagcggtttatctagcccgttgaacggcgaatgggctacagcggctttgatgtctgcaatgagactgtggcaagtttgtcaacagaacaattcatcatcggcggctttcttggcaggtggtgcctcttgttgcgctgctggggctgcttgaagtattgataaaatcaccggagtaggacctctcacttaccctgatgtatcatacgttaaattacaagattggattcaaaataggaaattgaacatacctactcaatgttgccttcaaaatcgcagacaacctcttgtgatcatttagactcgtttgtgtctccgcggacaagacagtgcgttgctctgaacagtaggtttttcccataatgttacaagcactaagcctacattgatagatagatgtctcagcagctaacg

SEQ ID NO: 4448 - DNA, 969 bp, Muscodor strobelii
  misc_feature: SGI cDNA ID NO. 561172
  misc_feature: Encodes the peptide sequence at SEQ ID NO 4449
atggaactgctgccgcttcagaccgacgcaggccagaccgtcgacaataacatcctgacgacgaccactgtgccatctgccgtctcaacttcaatgcaattccctctctcccgcctacccatcgagctgcgaatcataatatggcagctcgcagttctacttcacaatcgagacaggattgtacctatccatgttcccaagatctacagccccagccctatccacgctcccaggatcgagagcataagctctgagatgcgaatcatctgcgtgccgagtctgacatgctcgccagtctttgcggcatgtacagagagccgaaagtatgcaattgaaatgtatccaatcaagctgtcggtgaataaggtccttagcaggctcgtccgtccccgcggtctcccccaagaggacgatgacaagtacttccacgataaaccttatccaggatatgtctacattaatccgatgtatgacattttctcgtttcaccgatactccgactggcgattaatgagaaatattccgtcacaccgccaaatggcatgcacccgcaccttcgggtccgaagtcatcagcgccgatattctccagagcttcaaacgagcaatgcttctcgactctcacgatgatcaagcctattcgagaggcaggtgccgccgcccggagcaagcctgtatttccaggcagggagttctcggccgagacattatcggattactgtctcccagcgtggaatccctgttttgtgtcttcaagcgggatgtggacttgatacccaacacgatccatccccatcggcatgacccagacgctcgcgcgatccttcagtacctagctgattcgggccagatggtgtgcttcactcaggctgagttggttgtgctcaaggacgagctagcaagacgcactatgtggtcaattggctgtacctgtcacttgcaggagagtcgggtatactatggagagtaa

SEQ ID NO: 4449 - protein, 322 aa, Muscodor strobelii
  misc_feature: SGI Peptide ID NO. 561172
MELLPLQTDAGQTVDNNILTTTTVPSAVSTSMQFPLSRLPIELRIIIWQLAVLLHNRDRIVPIHVPKIYSPSPIHAPRIESISSEMRIICVPSLTCSPVFAACTESRKYAIEMYPIKLSVNKVLSRLVRPRGLPQEDDDKYFHDKPYPGYVYINPMYDIFSFHRYSDWRLMRNIPSHRQMACTRTFGSEVISADILQSFKRAMLLDSHDDQAYSRGRCRRPEQACISRQGVLGRDIIGLLSPSVESLFCVFKRDVDLIPNTIHPHRHDPDARAILQYLADSGQMVCFTQAELVVLKDELARRTMWSIGCTCHLQESRVYYGE

SEQ ID NO: 4450 - DNA, 2799 bp, Muscodor strobelii
  misc_feature: SGI cDNA ID NO. 561173
  misc_feature: Encodes the peptide sequence at SEQ ID NO 4451
atggattccgattacgacattggtatgttgaaggcggagctagagcaagcaatcgacgcaatcgacaccactggtgattttgcgacgagtacgcagtacccagagtatgctaatccgggcttacaaattggcaactccttaatctctcttccattaaatccagctcaggtgcctatcattcgtgatgcatcaaggcaagcaccattcggccgtggcatccacacactggtcgatacttcggtgagaaacacatgggagcttgacgcaacccattttcgtatcaccaacccagcctgggacaccttcatcaacgccgccctggaagaagtatcggaaggtcttggactcacaaacgttaccattgaactctacaagctcctgttgtacgaagctggctcattcttcaaacggcataaagactcagagaaggcacccggcatggttggcacattaagcatagcgttgccatcaaaattcaaaggcggtgagatccatctatcgcacaatggctatagccaagtcattcgtacaagccaaagtccattcgacttattcgccctcgcgtggtatgccgatgttacgcacgagatcaaaccggttctcgagggccaccgacttgtcttgatatacaacgttattcacaaaaacggcagcagcgatgccattgctggtgagctatctgtggagcgagacgggacactagaggctgccctagctcgggttcaacatgatagctctctaaagcgcttgctttactttctagatcataagtattctcaagccaatctctgtatggaccatctcaagggtcgcgatcgtgccataggccggagattgcaaaaaacttgtgctaaccagagctgttacttgttcttctgcaatactacaagacggcgagatcagtgggataccgactactacgacgatgatgatgacaatgaagtctattatttgaatcaccggctatgctctggtgctgataatcgcaatgggctcaagctctctatggacaacatcgccacatgcgatggccaggtttttgcttccaacatcgcgttgaaacgcgcagatatactgggccggaatcttttcagtcaatctagccgtgaccctgatagtgagtctgagggcgaagacactggaaatgatggcgccccagttgagtatagataccatgactcggctgttgttattgtccccaaacacaaattggatcagttcctcgagtttgatgctcacttagacatcctctgtagcattgtggccactgatctcgacgatggtcctgttggccatatcacccagcaaagagtctctagcttcctagcaaaagtagtcgacaaagacgcagactttgcgccgttggctatcggaaaagcttggagaatggatgaccagatcttattttctaccgccatccgtgcgggtttccgagatgggttgccgtgcagaggcctagccgccgctttggtgaacgtagtccacgctacaatatcagggcctattgactgggataagagcttcggagagttcgtctcgagtcacggaactcttactgcgctatggaaatctctggatgatgtcagagacatgcttcgttctggagatttacaaacatcgtttcagcaatggcggatgggtatcgaactattagccttcgagagtgaagggcttctagaaatcgaggatcacgacgcagttcttgatcttgtgtctatgcggtggcaagatgctaaatgggttgaagaaagtctcctccctaagctccgaaaccattgcgacaagtatttcatgtctaaattcgtctgctcgcttctacagaaggatcgagatggtctgctcagcaatgccaaggaactctgcacgattctactcagttctgattgtattaagcagctacgactcgcaaaagtcgaactcactaatatgaataacgatgctgtagatcggacagaggcagagcgctttgtccaactactcaacaactgtttgctgtcagacatgcagcaagcggccgacgatctattaagtcttagccttcccactgtcgagaatacacacttccaggatggttcgcccttggagaccgagacagtgatctcagaggatctaaacgagacgactaggataggtgtgcccgaaagacacattgcaaatatagcagaggagatacttttttctctatgcgaatgtttcgaggcgaatagtatgtcacccattgattccgccactgagttcatcgtctctattctacgcaatttcactctcagagacctacctcgttgcccgaaaatgtcggagtacagcgcacctcacgaacgaagccatgtaacatgcgagcaatgtgacgaagtcgataacttcttaatgtcatcaacggaacaagaaagggaattcaggaccgggccgatggttattcagcatattcaggatcaactccctctcggtgttttccaatgcatcagaaaggatatgactactggactgagcaacccccagcacgtgctgcgagtgctcaagcttgataccgagtacgagaaagacatgtgcagttacaagcaggaattgcgcagggtgttcaccaaagttggaccccttcgcaccaactatatgaagcaactacttggcgacgatctttatggcgatcttatcatgctaaataaactcccgcatgtaaacgaaattgctctgaatggcaggagcaatccatcgaaactccttccggcccgcgagaagcgtccagctgaggatgaacttatatccatcgatgccaagaaatcgaggcaagtctcgggttga

SEQ ID NO: 4451 - protein, 932 aa, Muscodor strobelii
  misc_feature: SGI Peptide ID NO. 561173
  misc_feature (11)..(888): NCBI GI: 46135867 Blast Desc: FG09449.1 [Gibberella zeae PH-1]
  misc_feature (6)..(422): NCBI GI: 242801803 Blast Desc: conserved [Talaromyces stipitatus ATCC 10500] gi|218717189|gb|EED16610.1| conserved [Talaromyces stipitatus ATCC 10500]
  misc_feature (10)..(395): NCBI GI: 238837471 Blast Desc: conserved [Microsporum canis CBS 113480]
  misc_feature (10)..(399): NCBI GI: 238487718 Blast Desc: conserved [Aspergillus flavus NRRL3357] gi|220699976|gb|EED56315.1| conserved [Aspergillus flavus NRRL3357]
  misc_feature (10)..(399): NCBI GI: 169769949 Blast Desc: [Aspergillus oryzae RIB40] gi|83767303|dbj|BAE57442.1| protein product [Aspergillus oryzae]
  misc_feature (10)..(462): NCBI GI: 255935387 Blast Desc: Pc13g02810 [Penicillium chrysogenum Wisconsin 54-1255] gi|211583340|emb|CAP91350.1| Pc13g02810 [Penicillium chrysogenum Wisconsin 54-1255]
  misc_feature (25)..(275): NCBI GI: 242218954 Blast Desc: [Postia placenta Mad-698-R] gi|220725540|gb|EED79522.1| [Postia placenta Mad-698-R]
  misc_feature (10)..(391): NCBI GI: 145254402 Blast Desc: An18g01550 [Aspergillus niger] gi|134084195|emb|CAK47228.1| protein product [Aspergillus niger]
  misc_feature (4)..(293): NCBI GI: 85091137 Blast Desc: NCU09412 [Neurospora crassa OR74A] gi|28920138|gb|EAA29519.1| [Neurospora crassa OR74A]
  misc_feature (14)..(288): NCBI GI: 168699004 Blast Desc: GobsU_05758 [Gemmata obscuriglobus UQM 2246]
MDSDYDIGMLKAELEQAIDAIDTTGDFATSTQYPEYANPGLQIGNSLISLPLNPAQVPIIRDASRQAPFGRGIHTLVDTSVRNTWELDATHFRITNPAWDTFINAALEEVSEGLGLTNVTIELYKLLLYEAGSFFKRHKDSEKAPGMVGTLSIALPSKFKGGEIHLSHNGYSQVIRTSQSPFDLFALAWYADVTHEIKPVLEGHRLVLIYNVIHKNGSSDAIAGELSVERDGTLEAALARVQHDSSLKRLLYFLDHKYSQANLCMDHLKGRDRAIGRRLQKTCANQSCYLFFCNTTRRRDQWDTDYYDDDDDNEVYYLNHRLCSGADNRNGLKLSMDNIATCDGQVFASNIALKRADILGRNLFSQSSRDPDSESEGEDTGNDGAPVEYRYHDSAVVIVPKHKLDQFLEFDAHLDILCSIVATDLDDGPVGHITQQRVSSFLAKVVDKDADFAPLAIGKAWRMDDQILFSTAIRAGFRDGLPCRGLAAALVNVVHATISGPIDWDKSFGEFVSSHGTLTALWKSLDDVRDMLRSGDLQTSFQQWRMGIELLAFESEGLLEIEDHDAVLDLVSMRWQDAKWVEESLLPKLRNHCDKYFMSKFVCSLLQKDRDGLLSNAKELCTILLSSDCIKQLRLAKVELTNMNNDAVDRTEAERFVQLLNNCLLSDMQQAADDLLSLSLPTVENTHFQDGSPLETETVISEDLNETTRIGVPERHIANIAEEILFSLCECFEANSMSPIDSATEFIVSILRNFTLRDLPRCPKMSEYSAPHERSHVTCEQCDEVDNFLMSSTEQEREFRTGPMVIQHIQDQLPLGVFQCIRKDMTTGLSNPQHVLRVLKLDTEYEKDMCSYKQELRRVFTKVGPLRTNYMKQLLGDDLYGDLIMLNKLPHVNEIALNGRSNPSKLLPAREKRPAEDELISIDAKKSRQVSG

SEQ ID NO: 4452 - DNA, 1308 bp, Muscodor strobelii
  misc_feature: SGI cDNA ID NO. 561174
  misc_feature: Reduced expression when VOC is produced
  misc_feature: Encodes the peptide sequence at SEQ ID NO 4453
atgacgtcctcgaatcaattccgagctattatcataggcggagggccagtcgggctagtcattgccaatgctctacaaaaggctggactggattttttggtcgtcgaaaagtatcgatccgtactaacagattcgggtgccggtatcatgttatggcctcacacgacaagaatatttgatcagctgggcctgcatgaactctgtcagggacgatttgtacacctccataggcgggcgataataaaggaacataatggggcagtgatcagatcggcccccatattcgaaaagctcattgataatcacggttatgaatgcatgaactttcctcgatcgcaacttatccagactctttttgacggcataaaagacagtgaaatgagagtacgcacaggtgctggtatcgaaaatatcgaagagactaagactggtgtacgggtgcacctgtctgacggaactatcgaagaaggctccattgtcatcggcgccgacggcgcacactcgaaaacacgagacatcatgtggaatttggcaaaggccacaggtacacaagacatgagtaaagaagaaggcccggtggtatcaaactaccagatcctatttggtagagccgcgtatatcccagggcttgagaagggtactttcttcgagtcgcacggcaatggaaggtgtacacagataacggctggggacgactcaatgcactttgggatatacagaaagttgccagcttcaacgacagccagaaaggaatacacaaaggcagaggtcgaagagttcatggcatcgttcgccgatgtctacgtcatgccgggtttgacatttaaggagttggccaagcattttcaatggacaagactagtcaatcaacatgaggctttgatggagaactggtattccggccgcatcgtcttggcaggcgattcgagcgcggtaatgacagccgctgtgggtatgggtgtcaacaatgggatccaatcgggtatcacattggtgaataagattaacgatattctaactcgaagcccaaacccggatacggcggccttcgtacatgctttcgaagagtatcagtcaatacgtcgtgaggaagcccgggccatgtgtgcaatatccgaccgcgtaattaaaggcgcaacgcagaacagctggcttatctggctttttacggatatactcgttccactactattttcggacgaaagcatgattaaccagttgtcaaagaatcttatcagtaaaatgcacaaggcggattacatacagaaagatctcaaatctgggaagataccttgggtttcgagttga

SEQ ID NO: 4453 - protein, 435 aa, Muscodor strobelii
  misc_feature: SGI Peptide ID NO. 561174
  misc_feature (8)..(317): Pfam Id: PF01266 Pfam Desc: FAD dependent oxidoreductase
  misc_feature (6)..(372): Pfam Id: PF01494 Pfam Desc: FAD binding domain
  misc_feature (8)..(37): Pfam Id: PF01266 Pfam Desc: FAD dependent oxidoreductase
  misc_feature (6)..(40): Pfam Id: PF01494 Pfam Desc: FAD binding domain
  misc_feature (8)..(36): Pfam Id: PF00070 Pfam Desc: Pyridine nucleotide-disulphide oxidoreductase
  misc_feature (7)..(432): NCBI GI: 85119265 Blast Desc: NCU02925 [Neurospora crassa OR74A] gi|28927418|gb|EAA36371.1| [Neurospora crassa OR74A]
  misc_feature (1)..(395): NCBI GI: 145602534 Blast Desc: MGG_10908 [Magnaporthe grisea 70-15] gi|145010942|gb|EDJ95598.1| MGG_10908 [Magnaporthe grisea 70-15]
  misc_feature (7)..(432): NCBI GI: 226885243 Blast Desc: dehydrogenase / monooxygenase [Sordaria macrospora]
  misc_feature (1)..(433): NCBI GI: 145234591 Blast Desc: An03g00370 [Aspergillus niger] gi|134057615|emb|CAK38015.1| protein product [Aspergillus niger]
  misc_feature (4)..(432): NCBI GI: 256734858 Blast Desc: NECHADRAFT_75548 [Nectria haematococca mpVI 77-13-4]
  misc_feature (4)..(435): NCBI GI: 189197565 Blast Desc: FAD binding domain containing protein [Pyrenophora tritici-repentis Pt-1C-BFP] gi|187981068|gb|EDU47694.1| FAD binding domain containing protein [Pyrenophora tritici-repentis
  misc_feature (8)..(435): NCBI GI: 145606496 Blast Desc: MGG_02292 [Magnaporthe grisea 70-15] gi|145014141|gb|EDJ98782.1| MGG_02292 [Magnaporthe grisea 70-15]
  misc_feature (3)..(432): NCBI GI: 256722361 Blast Desc: NECHADRAFT_82202 [Nectria haematococca mpVI 77-13-4]
  misc_feature (7)..(435): NCBI GI: 46115866 Blast Desc: FG03775.1 [Gibberella zeae PH-1]
  misc_feature (7)..(432): NCBI GI: 255953399 Blast Desc: Pc21g04040 [Penicillium chrysogenum Wisconsin 54-1255] gi|211589163|emb|CAP95301.1| Pc21g04040 [Penicillium chrysogenum Wisconsin 54-1255]
  misc_feature (22)..(389): SWISSPROT Homolog: EC 1.14.13.24 3-hydroxybenzoate 6-monooxygenase
  misc_feature: Useful for introducing or modulating the production of volatile compounds
MTSSNQFRAIIIGGGPVGLVIANALQKAGLDFLVVEKYRSVLTDSGAGIMLWPHTTRIFDQLGLHELCQGRFVHLHRRAIIKEHNGAVIRSAPIFEKLIDNHGYECMNFPRSQLIQTLFDGIKDSEMRVRTGAGIENIEETKTGVRVHLSDGTIEEGSIVIGADGAHSKTRDIMWNLAKATGTQDMSKEEGPVVSNYQILFGRAAYIPGLEKGTFFESHGNGRCTQITAGDDSMHFGIYRKLPASTTARKEYTKAEVEEFMASFADVYVMPGLTFKELAKHFQWTRLVNQHEALMENWYSGRIVLAGDSSAVMTAAVGMGVNNGIQSGITLVNKINDILTRSPNPDTAAFVHAFEEYQSIRREEARAMCAISDRVIKGATQNSWLIWLFTDILVPLLFSDESMINQLSKNLISKMHKADYIQKDLKSGKIPWVSS

SEQ ID NO: 4454 - DNA, 1347 bp, Muscodor strobelii
  misc_feature: SGI EST ID NO. CUFF.11306.0
  misc_feature: Variant of the nucleotide sequence at SEQ ID NO 4452
attccgagctattatcataggcggagggccagtcgggctagtcattgccaatgctctacaaaaggctggactggattttttggtcgtcgaaaagtatcgatccgtactaacagattcgggtgccggtatcatgttatggcctcacacgacaagaatatttgatcagctgggcctgcatgaactctgtcagggacgatttgtacacctccataggcgggcgataataaaggaacataatggggcagtgatcagatcggcccccatattcgaaaagctcattgataatcacggttatgaatgcatgaactttcctcgatcgcaacttatccagactctttttgacggcataaaagacagtgaaatgagagtacgcacaggtgctggtatcgaaaatatcgaagagactaagactggtgtacgggtgcacctgtctgacggaactatcgaagaaggctccattgtcatcggcgccgacggcgcacactcgaaaacacgagacatcatgtggaatttggcaaaggccacaggtacacaagacatgagtaaagaagaaggcccggtggtatcaaactaccagatcctatttggtagagccgcgtatatcccagggcttgagaagggtactttcttcgagtcgcacggcaatggaaggtgtacacagataacggctggggacgactcaatgcactttgggatatacagaaagttgccagcttcaacgacagccagaaaggaatacacaaaggcagaggtcgaagagttcatggcatcgttcgccgatgtctacgtcatgccgggtttgacatttaaggagttggccaagcattttcaatggacaagactagtcaatcaacatgaggctttgatggagaactggtattccggccgcatcgtcttggcaggcgattcgagcgcggtaatgacagccgctgtgggtatgggtgtcaacaatgggatccaatcgggtatcacattggtgaataagattaacgatattctaactcgaagcccaaacccggatacggcggccttcgtacatgctttcgaagagtatcagtcaatacgtcgtgaggaagcccgggccatgtgtgcaatatccgaccgcgtaattaaaggcgcaacgcagaacagctggcttatctggctttttacggatatactcgttccactactattttcggacgaaagcatgattaaccagttgtcaaagaatcttatcagtaaaatgcacaaggcggattacatacagaaagatctcaaatctgggaagataccttgggtttcgagttgagccgtgcatcccgcccacacacagctgaactagcgcaaatgtacaatagtccacca

SEQ ID NO: 4455 - DNA, 1512 bp, Muscodor strobelii
  misc_feature: SGI cDNA ID NO. 561175
  misc_feature: Encodes the peptide sequence at SEQ ID NO 4456
atggcttgcaataaacgaaatcgcagcccggagttggtagctaacccattcatcaagaagaggaacttgggatggtgcattgatatcagtccatcttcctctggtgatgtaatcgcctcgggcgcacaagaacaagcgccgtcgcaacaaatcgtaaccgagccaacagccccatcggcgtcggcatcagcaatagaagctggcaccgttacggtggacgaccatttggcatatttcagtgatcttctaagtcgcacaactctagcgccctttccttcgggcgcccctcgtctatctgtgccagcctatcgacgcttgtatgagtccaactacggtagtcttcaaggtgcacacttcatcatccatcagcatgaccatcccatcgccggcactcattatgaccttcgcatacagataaatgagacaagtagcgcgtcatgggcaatcatgtacggcctgcctggtgacccaaatagcgagcgtctcaatagaaatgctacggagactcgcattcattgcttatggaatcacctaatcgagaccgcttctcacgcaacaggctctctcttgatatgggacacgggaacgtacaccatcctgcccaccagacgggaagcagcgcgatcaagttcgcgaacttcgtcttcttcttgttcttcagacgaagagccagactccgcaacggaacaagagaagctccaccgcgcttttgcagctcgaaagattcgtttgaaactgaatggctcgcggctcccatctccatacgtcttgtatctacgacttacccgagatgaagacgccgcaggtcgagttcggagtacacgagttcccaaaacgcggcggccacgcggcgcaccgatctctcatacgcgtggacgatctgtagtcggaggtaaaaagcagacccggtatacatctagctccgcttctgagtctgaccgagactgctccactgctcctttgcgtaggaagaatgccggtcaacaatttgccttgggcgagccacctagcgaggatgtcgttgatgatgatcatgacgagagggatattgtttacacagggtatgagaagttggatagtggccaaacctccatttcagctacggagcgtgaacttcgtgagattgaagacgatgaagttcgccgaaccaatgcctatcccggtgcacaaaattccattggcagtgtccatcagcgacgatggtacctgtctcttgacagggagagcagcgggtttgtgaaacgtagaaaatcaggcaaagtcgtgtgggaactgaaaggtgaatcgcatgatgccttattggcagcctccgatcggacgagcggaaaacagagtgagggacagatggctacaccggttcgcgatagcgagcatctgtcttatccgttctatgtgcatggcgtagaaaatgagcgcagcgttgttaccggtagactcggtagtgatgtgttaaaggatgagggtgtgattaagtacataggacgaaaaggttggcagcctattttaaattaa

SEQ ID NO: 4456 - protein, 503 aa, Muscodor strobelii
  misc_feature: SGI Peptide ID NO. 561175
  misc_feature (3)..(477): NCBI GI: 261355259 Blast Desc: conserved [Verticillium albo-atrum VaMs.102]
  misc_feature (59)..(503): NCBI GI: 242796781 Blast Desc: conserved [Talaromyces stipitatus ATCC 10500] gi|218719460|gb|EED18880.1| conserved [Talaromyces stipitatus ATCC 10500]
  misc_feature (61)..(503): NCBI GI: 212536762 Blast Desc: conserved [Penicillium marneffei ATCC 18224] gi|210070936|gb|EEA25026.1| conserved [Penicillium marneffei ATCC 18224]
  misc_feature (49)..(502): NCBI GI: 121707055 Blast Desc: conserved [Aspergillus clavatus NRRL 1] gi|119399866|gb|EAW10292.1| conserved [Aspergillus clavatus NRRL 1]
  misc_feature (46)..(502): NCBI GI: 146323755 Blast Desc: conserved [Aspergillus fumigatus Af293] gi|129557552|gb|EAL89962.2| conserved [Aspergillus fumigatus Af293]
  misc_feature (46)..(502): NCBI GI: 159125087 Blast Desc: conserved [Aspergillus fumigatus A1163]
  misc_feature (61)..(502): NCBI GI: 67526835 Blast Desc: AN3875.2 [Aspergillus nidulans FGSC A4] gi|40739950|gb|EAA59140.1| AN3875.2 [Aspergillus nidulans FGSC A4] gi|259481559|tpe|CBF75191.1| TPA: [Aspergillus nidulans FGSC
  misc_feature (6)..(503): NCBI GI: 258578071 Blast Desc: [Uncinocarpus reesii 1704] gi|237903483|gb|EEP77884.1| [Uncinocarpus reesii 1704]
  misc_feature (38)..(501): NCBI GI: 169596316 Blast Desc: SNOG_00915 [Phaeosphaeria nodorum SN15] gi|111071290|gb|EAT92410.1| SNOG_00915 [Phaeosphaeria nodorum SN15]
  misc_feature (61)..(268): NCBI GI: 119500878 Blast Desc: NFIA_107910 [Neosartorya fischeri NRRL 181] gi|119415361|gb|EAW25299.1| conserved [Neosartorya fischeri NRRL 181]
MACNKRNRSPELVANPFIKKRNLGWCIDISPSSSGDVIASGAQEQAPSQQIVTEPTAPSASASAIEAGTVTVDDHLAYFSDLLSRTTLAPFPSGAPRLSVPAYRRLYESNYGSLQGAHFIIHQHDHPIAGTHYDLRIQINETSSASWAIMYGLPGDPNSERLNRNATETRIHCLWNHLIETASHATGSLLIWDTGTYTILPTRREAARSSSRTSSSSCSSDEEPDSATEQEKLHRAFAARKIRLKLNGSRLPSPYVLYLRLTRDEDAAGRVRSTRVPKTRRPRGAPISHTRGRSVVGGKKQTRYTSSSASESDRDCSTAPLRRKNAGQQFALGEPPSEDVVDDDHDERDIVYTGYEKLDSGQTSISATERELREIEDDEVRRTNAYPGAQNSIGSVHQRRWYLSLDRESSGFVKRRKSGKVVWELKGESHDALLAASDRTSGKQSEGQMATPVRDSEHLSYPFYVHGVENERSVVTGRLGSDVLKDEGVIKYIGRKGWQPILN

SEQ ID NO: 4457 - DNA, 1007 bp, Muscodor strobelii
  misc_feature: SGI EST ID NO. CUFF.11315.1
  misc_feature: Variant of the nucleotide sequence at SEQ ID NO 4455
tctcgcagtggagcaatccgcgtggtcacgttctttttcccatcacgtctggttctccaattcaatgcgtcatcaccttccccttacatgcgaatatcatgaccaatgtaaacttttgcaatgacatgcgcagaaacagtctacaccccacgtgttagacagcatctcacaatgtccatgtggtccacatatttttgacgctgaggcaaacccgtcaatatggcttgcaataaacgaaatcgcagcccggagttggtagctaacccattcatcaagaagaggaacttgggatggtgcattgatatcagtccatcttcctctggtgatgtaatcgcctcgggcgcacaagaacaagcgccgtcgcaacaaatcgtaaccgagccaacagccccatcggcgtcggcatcagcaatagaagctggcaccgttacggtggacgaccatttggcatatttcagtgatcttctaagtcgcacaactctagcgccctttccttcgggcgcccctcgtctatctgtgccagcctatcgacgcttgtatgagtccaactacggtagtcttcaaggtgcacacttcatcatccatcagcatgaccatcccatcgccggcactcattatgaccttcgcatacagataaatgagacaagtagcgcgtcatgggcaatcatgtacggcctgcctggtgacccaaatagcgagcgtctcaatagaaatgctacggagactcgcattcattgcttatggaatcacctaatcgagaccgcttctcacgcaacaggctctctcttgatatgggacacgggaacgtacaccatcctgcccaccagacgggaagcagcgcgatcaagttcgcgaacttcgtcttcttcttgttcttcagacgaagagccagactccgcaacggaacaagagaagctccaccgcgcttttgcagctcgaaagattcgtttgaaactgaatggctcgcggctcccatctccatacgtcttgtatctacgacttacccg

SEQ ID NO: 4458 - DNA, 1025 bp, Muscodor strobelii
  misc_feature: SGI cDNA ID NO. 561176
  misc_feature: Elevated expression when VOC is produced
  misc_feature: Encodes the peptide sequence at SEQ ID NO 4459
atgacagattccaagaagagaggcgtcaggcagttgactaagcatgagttactacgagaggcattcgatgcgctcttacacatcccggggctctggccaggcatgatcctgacgaccgtcaaccagatgatcagtgcgaaatgcgacgaggaattccagagttatttaaaccacatacaatgtttttggactggcctcgtaggtggggatgtttccgcgatgcagaagattgatgccgagaccgtccaggctgtggagttaacatgccccttatactcaggcgttgataggcaaaatctcgacgcactattttcgaagcatttgatctttcggagcttcgatcgccaagaggtggagtccattcgtgccatcttaatgtctactaaacacctcgtgccttcgctccacacacttttcaaggatctcaagtacctacaggcatgtgcgaacactatacgctatgtattaggcacggcagaagtcagagagaggactacagtagacggctgtctacaagcttgctttcggacacagccaggagatcaatatgtcgtggagaaccaggactgcaccttttccgccagggaagcgtctgctcaggaccagagtgagcttggacggcggcagatgtggctaaaagcaatgcgggagtacagcaacataggtcaaccgaatcacagccgacgagcccgacttgctaaatcgggcatccaagagcctgacgagacagtcgtccggaaatatgccgccgtggcggatcgcctggggttctgcaacagtcatatagaacagcttaaacgccccctcaccagccgaggtgagttaggagagggaacagagtctgaaggcttgagtgtacctacgacggaggaaacgatgcttaatcggcaagacaaagtagaaactaagaggcgctgtggatatcctgctaaggaggagcacgaacacgacaagaaatttttattcctggatactatcgaggccgatcgtccttttcgaggtgtcacgtcgttctttgttcgcag

SEQ ID NO: 4459 - protein, 341 aa, Muscodor strobelii
  misc_feature: SGI Peptide ID NO. 561176
  misc_feature (1)..(341): NCBI GI: 156050907 Blast Desc: SS1G_08041 [Sclerotinia sclerotiorum 1980] gi|154692441|gb|EDN92179.1| SS1G_08041 [Sclerotinia sclerotiorum 1980]
  misc_feature (1)..(341): NCBI GI: 159124735 Blast Desc: conserved [Aspergillus fumigatus A1163]
  misc_feature (1)..(329): NCBI GI: 242804815 Blast Desc: conserved [Talaromyces stipitatus ATCC 10500] gi|218717797|gb|EED17218.1| conserved [Talaromyces stipitatus ATCC 10500]
  misc_feature (1)..(341): NCBI GI: 212534404 Blast Desc: conserved [Penicillium marneffei ATCC 18224] gi|210069757|gb|EEA23847.1| conserved [Penicillium marneffei ATCC 18224]
  misc_feature (1)..(341): NCBI GI: 70983794 Blast Desc: conserved [Aspergillus fumigatus Af293] gi|66845049|gb|EAL85385.1| conserved [Aspergillus fumigatus Af293]
  misc_feature (1)..(341): NCBI GI: 242771706 Blast Desc: conserved [Talaromyces stipitatus ATCC 10500] gi|218721515|gb|EED20933.1| conserved [Talaromyces stipitatus ATCC 10500]
  misc_feature (1)..(329): NCBI GI: 242760187 Blast Desc: conserved [Talaromyces stipitatus ATCC 10500] gi|218723134|gb|EED22551.1| conserved [Talaromyces stipitatus ATCC 10500]
  misc_feature (1)..(341): NCBI GI: 242771717 Blast Desc: conserved [Talaromyces stipitatus ATCC 10500] gi|218721518|gb|EED20936.1| conserved [Talaromyces stipitatus ATCC 10500]
  misc_feature (1)..(341): NCBI GI: 67904068 Blast Desc: AN9021.2 [Aspergillus nidulans FGSC A4] gi|40745197|gb|EAA64353.1| AN9021.2 [Aspergillus nidulans FGSC A4] gi|259486527|tpe|CBF84445.1| TPA: conserved [Aspergillus FGSC
  misc_feature (1)..(329): NCBI GI: 70986629 Blast Desc: AFUA_7G07060 [Aspergillus fumigatus Af293] gi|66846435|gb|EAL86767.1| AFUA_7G07060 [Aspergillus fumigatus Af293]
  misc_feature: Useful for introducing or modulating the production of volatile compounds
MTDSKKRGVRQLTKHELLREAFDALLHIPGLWPGMILTTVNQMISAKCDEEFQSYLNHIQCFWTGLVGGDVSAMQKIDAETVQAVELTCPLYSGVDRQNLDALFSKHLIFRSFDRQEVESIRAILMSTKHLVPSLHTLFKDLKYLQACANTIRYVLGTAEVRERTTVDGCLQACFRTQPGDQYVVENQDCTFSAREASAQDQSELGRRQMWLKAMREYSNIGQPNHSRRARLAKSGIQEPDETVVRKYAAVADRLGFCNSHIEQLKRPLTSRGELGEGTESEGLSVPTTEETMLNRQDKVETKRRCGYPAKEEHEHDKKFLFLDTIEADRPFRGVTSFFVR

SEQ ID NO: 4460 - DNA, 1068 bp, Muscodor strobelii
  misc_feature: SGI EST ID NO. CUFF.11324.0
  misc_feature: Variant of the nucleotide sequence at SEQ ID NO 4458
gcggtagaaccgatctggctgaccagtgcatttccctaatgacagattccaagaagagaggcgtcaggcagttgactaagcatgagttactacgagaggcattcgatgcgctcttacacatcccggggctctggccaggcatgatcctgacgaccgtcaaccagatgatcagtgcgaaatgcgacgaggaattccagagttatttaaaccacatacaatgtttttggactggcctcgtaggtggggatgtttccgcgatgcagaagattgatgccgagaccgtccaggctgtggagttaacatgccccttatactcaggcgttgataggcaaaatctcgacgcactattttcgaagcatttgatctttcggagcttcgatcgccaagaggtggagtccattcgtgccatcttaatgtctactaaacacctcgtgccttcgctccacacacttttcaaggatctcaagtacctacaggcatgtgcgaacactatacgctatgtattaggcacggcagaagtcagagagaggactacagtagacggctgtctacaagcttgctttcggacacagccaggagatcaatatgtcgtggagaaccaggactgcaccttttccgccagggaagcgtctgctcaggaccagagtgagcttggacggcggcagatgtggctaaaagcaatgcgggagtacagcaacataggtcaaccgaatcacagccgacgagcccgacttgctaaatcgggcatccaagagcctgacgagacagtcgtccggaaatatgccgccgtggcggatcgcctggggttctgcaacagtcatatagaacagcttaaacgccccctcaccagccgaggtgagttaggagagggaacagagtctgaaggcttgagtgtacctacgacggaggaaacgatgcttaatcggcaagacaaagtagaaactaagaggcgctgtggatatcctgctaaggaggagcacgaacacgacaagaaatttttattcctggatactatcgaggccgatcgtccttttcgaggtgtcacgtcgttctttgttcgcaggtgcg

SEQ ID NO: 4461 - DNA, 834 bp, Muscodor strobelii
  misc_feature: SGI cDNA ID NO. 561177
  misc_feature: Reduced expression when VOC is produced
  misc_feature: Encodes the peptide sequence at SEQ ID NO 4462
atggcccctacagccgcggccgtagccctcccgcaccgttccaaggccaaccacaccttcaccctgtcctcggcctccagctccgcctcggactcggattcggacacgcctctgcccttccccgccgccctgccacgttcagacttcctcgcgtcctccttcaatgcagccacctacctgtcctccctgcccgagcgccaccaaaccctcgaggacctccgctccgacctgcgagaacgcagtgccgccataagctccgagctgttggagctcgtcaacgccaactacgcctcgtttctcgggctgggcgacgagctgaaaggcggcgaggacagggtcgaggactgtagagtggggctgctgggcttcagaaggggcgtggaggagattaggcacaaggcaagggagaggagagacgaggtggcacggctgaatcacgagctgaggggcgtgaggagcgagatcgaagtgggaaggaagatgatggagctggatgagagggtgtcgagccttgaagatgggctggccgtggggagcgtgggggaagatagtgaagaagaggaagatgaggacggggagaagctggagaggttggtcaaggagtttggagttatcgaggatcttgcagaccagatcggaagggacacggcgttcgtgaggaggatggaggagagggtgatgaggtgtcgcaatacgctactactagacttgaatgcagctctcaaagaggcgaggaaaggaaaaggcgcgagactgaaggtactgaggctgatggggctatatgctgagatgggcgcgcaagccgaggctgtcaaggcgctgaagagtgtatga

SEQ ID NO: 4462 - protein, 277 aa, Muscodor strobelii
  misc_feature: SGI Peptide ID NO. 561177
  misc_feature (31)..(275): NCBI GI: 171693021 Blast Desc: protein product [Podospora anserina] gi|170946459|emb|CAP73260.1| protein product [Podospora anserina]
  misc_feature (37)..(275): NCBI GI: 256731154 Blast Desc: [Nectria haematococca mpVI 77-13-4]
  misc_feature (20)..(275): NCBI GI: 46123107 Blast Desc: FG05931.1 [Gibberella zeae PH-1]
  misc_feature (38)..(275): NCBI GI: 85091291 Blast Desc: NCU08892 [Neurospora crassa OR74A] gi|28920217|gb|EAA29594.1| [Neurospora crassa OR74A] gi|28950390|emb|CAD71232.1| [Neurospora crassa]
  misc_feature (33)..(275): NCBI GI: 261357948 Blast Desc: conserved [Verticillium albo-atrum VaMs.102]
  misc_feature (24)..(277): NCBI GI: 169624537 Blast Desc: SNOG_15529 [Phaeosphaeria nodorum SN15] gi|160705194|gb|EAT77194.2| SNOG_15529 [Phaeosphaeria nodorum SN15]
  misc_feature (11)..(180): NCBI GI: 145603560 Blast Desc: MGG_05958 [Magnaporthe grisea 70-15] gi|145011772|gb|EDJ96428.1| MGG_05958 [Magnaporthe grisea 70-15]
  misc_feature (4)..(277): NCBI GI: 115433078 Blast Desc: conserved [Aspergillus terreus NIH2624] gi|114189528|gb|EAU31228.1| conserved [Aspergillus terreus NIH2624]
  misc_feature (24)..(277): NCBI GI: 189209996 Blast Desc: conserved [Pyrenophora tritici-repentis Pt-1C-BFP] gi|187977423|gb|EDU44049.1| conserved [Pyrenophora tritici-repentis Pt-1C-BFP]
  misc_feature (37)..(179): NCBI GI: 116198905 Blast Desc: CHGG_07608 [Chaetomium globosum CBS 148.51] gi|88178887|gb|EAQ86355.1| CHGG_07608 [Chaetomium globosum CBS 148.51]
  misc_feature: Useful for introducing or modulating the production of volatile compounds
MAPTAAAVALPHRSKANHTFTLSSASSSASDSDSDTPLPFPAALPRSDFLASSFNAATYLSSLPERHQTLEDLRSDLRERSAAISSELLELVNANYASFLGLGDELKGGEDRVEDCRVGLLGFRRGVEEIRHKARERRDEVARLNHELRGVRSEIEVGRKMMELDERVSSLEDGLAVGSVGEDSEEEEDEDGEKLERLVKEFGVIEDLADQIGRDTAFVRRMEERVMRCRNTLLLDLNAALKEARKGKGARLKVLRLMGLYAEMGAQAEAVKALKSV

SEQ ID NO: 4463 - DNA, 951 bp, Muscodor strobelii
  misc_feature: SGI cDNA ID NO. 561178
  misc_feature: Reduced expression when VOC is produced
  misc_feature: Encodes the peptide sequence at SEQ ID NO 4464
atggcctcctcatcgacagcgcaatgcatcgcctcgctggccagattacacatgtccatgtcgtcggcagcgaggccgtcggtcgcgacgacgacgataccccgatttgcagcaccctcggccgcccaggccagatggaagagcgcgggcaccatggccatgcgggcccgcgagagggagaaggagaagctcaagaggaagaggaagcagcagcggcacagggagtacaagtacgccgcgcccagtagggaggagcagtttgcgctgatggacgccatgcggtacctccgcgcgtcagaggtcggccagccgcccgcctcggccacctacgaactcgccctcaagatccgcaccatcaagaacggccccgtcgtccgcggccgcatccgcctgccctaccccgtcaagaacgacgcccgcatcgccgtcatctgcaaggaggacagccccgccatgcaggaagcccgcgcccagggcgccgtcgccttcggggaggactcgctgttcgacctcatccgcgccaccaagggcccgctgcccttcaaccgcctcatctgccactcggacagcgagcccgccctcaagaaggccaacctcggccgcatcctcggccccaggggcctcatgccctccatcaagaccaacaccatcacccgcagcatccccgccatgatgcacgacatggtcggcgccgagaactaccgcgagcgcatcggcgccgtccgcatgcccatcggcaacatccagttcacccccaagcagctcgccgacaacatcaaggccctcatcgcccacgtcaagggcaacatcaccgtcctcgaggaccgctgccgcaaggatctcgtcgaggtcgtgctgtcttcgtcgagggggcccggcttcagtctgaacggtgctttcgcgtccgtcgacgacaagctcacgccggcccatctgagcatggccatgtag

SEQ ID NO: 4464 - protein, 316 aa, Muscodor strobelii
  misc_feature: SGI Peptide ID NO. 561178
  misc_feature (82)..(293): Pfam Id: PF00687 Pfam Desc: Ribosomal protein L1p/L10e family
  misc_feature (199)..(267): Pfam Id: PF00687 Pfam Desc: Ribosomal protein L1p/L10e family
  misc_feature (4)..(316): NCBI GI: 171693023 Blast Desc: protein product [Podospora anserina] gi|170946460|emb|CAP73261.1| protein product [Podospora anserina]
  misc_feature (4)..(316): NCBI GI: 39976233 Blast Desc: MGG_05957 [Magnaporthe grisea 70-15] gi|145011773|gb|EDJ96429.1| MGG_05957 [Magnaporthe grisea 70-15]
  misc_feature (4)..(316): NCBI GI: 85091293 Blast Desc: 60S ribosomal protein L1, mitochondrial precursor [Neurospora crassa OR74A] gi|28920218|gb|EAA29595.1| 60S ribosomal protein L1, mitochondrial precursor [Neurospora crassa
  misc_feature (1)..(316): NCBI GI: 261357949 Blast Desc: 50S ribosomal protein L1 [Verticillium albo-atrum VaMs.102]
  misc_feature (76)..(315): NCBI GI: 154292812 Blast Desc: 50S ribosomal protein L1 [Botryotinia fuckeliana B05.10] gi|150845794|gb|EDN20987.1| 50S ribosomal protein L1 [Botryotinia fuckeliana B05.10]
  misc_feature (76)..(315): NCBI GI: 156059572 Blast Desc: SS1G_03798 [Sclerotinia sclerotiorum 1980] gi|154701585|gb|EDO01324.1| SS1G_03798 [Sclerotinia sclerotiorum 1980]
  misc_feature (8)..(316): NCBI GI: 46123109 Blast Desc: FG05932.1 [Gibberella zeae PH-1]
  misc_feature (8)..(316): NCBI GI: 256731555 Blast Desc: [Nectria haematococca mpVI 77-13-4]
  misc_feature (74)..(313): NCBI GI: 169776503 Blast Desc: [Aspergillus oryzae RIB40] gi|238503209|ref|XP_002382838.1| mitochondrial large ribosomal subunit protein L1, [Aspergillus flavus NRRL3357] protein product
  misc_feature (19)..(313): NCBI GI: 67902476 Blast Desc: AN8225.2 [Aspergillus nidulans FGSC A4] gi|40739691|gb|EAA58881.1| AN8225.2 [Aspergillus nidulans FGSC A4] gi|259481006|tpe|CBF74149.1| TPA: mitochondrial large subunit
  misc_feature: Useful for introducing or modulating the production of volatile compounds
MASSSTAQCIASLARLHMSMSSAARPSVATTTIPRFAAPSAAQARWKSAGTMAMRAREREKEKLKRKRKQQRHREYKYAAPSREEQFALMDAMRYLRASEVGQPPASATYELALKIRTIKNGPVVRGRIRLPYPVKNDARIAVICKEDSPAMQEARAQGAVAFGEDSLFDLIRATKGPLPFNRLICHSDSEPALKKANLGRILGPRGLMPSIKTNTITRSIPAMMHDMVGAENYRERIGAVRMPIGNIQFTPKQLADNIKALIAHVKGNITVLEDRCRKDLVEVVLSSSRGPGFSLNGAFASVDDKLTPAHLSMAM

SEQ ID NO: 4465 - DNA, 2798 bp, Muscodor strobelii
  misc_feature: SGI EST ID NO. CUFF.11328.0
  misc_feature: Variant of the nucleotide sequence at SEQ ID NO 4463
gcttgatgccaaaaatgcaaggcatcaacaattttctgaaattcgagacaatcccggcagctagcatcgcatcgaacttgatacttgacatcaattgcatgttagaagcagcagcttagacagcagcaatcgacgctgcacgatggcctcctcatcgacagcgcaatgcatcgcctcgctggccagattacacatgtccatgtcgtcggcagcgaggccgtcggtcgcgacgacgacgataccccgatttgcagcaccctcggccgcccaggccagatggaagagcgcgggcaccatggccatgcgggcccgcgagagggagaaggagaagctcaagaggaagaggaagcagcagcggcacagggagtacaagtacgccgcgcccagtagggaggagcagtttgcgctgatggacgccatgcggtacctccgcgcgtcagaggtcggccagccgcccgcctcggccacctacgaactcgccctcaagatccgcaccatcaagaacggccccgtcgtccgcggccgcatccgcctgccctaccccgtcaagaacgacgcccgcatcgccgtcatctgcaaggaggacagccccgccatgcaggaagcccgcgcccagggcgccgtcgccttcggggaggactcgctgttcgacctcatccgcgccaccaagggcccgctgcccttcaaccgcctcatctgccactcggacagcgagcccgccctcaagaaggccaacctcggccgcatcctcggccccaggggcctcatgccctccatcaagaccaacaccatcacccgcagcatccccgccatgatgcacgacatggtcggcgccgagaactaccgcgagcgcatcggcgccgtccgcatgcccatcggcaacatccagttcacccccaagcagctcgccgacaacatcaaggccctcatcgcccacgtcaagggcaacatcaccgtcctcgaggaccgctgccgcaaggatctcgtcgaggtcgtgctgtcttcgtcgagggggcccggcttcagtctgaacggtgctttcgcgtccgtcgacgacaagctcacgccggcccatctgagcatggccatgtagatgcatattgaacatagaagtggaattaaaactcatgattatctatctgtatcatatatcacatacaaggagttggacagagaggggccctgtatcaagaatgtaacatatttgaagccgttgatccatcgatccacatctattctttgacctttgtgcacctaaagtcggggtattttgatgaggaattcttcctcatcttcaaacatataactctcatacactcttcagcgccttgacagcctcggcttgcgcgcccatctcagcatatagccccatcagcctcagtaccttcagtctcgcgccttttcctttcctcgcctctttgagagctgcattcaagtctagtagtagcgtattgcgacacctcatcaccctctcctccatcctcctcacgaacgccgtgtcccttccgatctggtctgcaagatcctcgataactccaaactccttgaccaacctctccagcttctccccgtcctcatcttcctcttcttcactatcttcccccacgctccccacggccagcccatcttcaaggctcgacaccctctcatccagctccatcatcttccttcccacttcgatctcgctcctcacgcccctcagctcgtgattcagccgtgccacctcgtctctcctctcccttgccttgtgcctaatctcctccacgccccttctgaagcccagcagccccactctacagtcctcgaccctgtcctcgccgcctttcagctcgtcgcccagcccgagaaacgaggcgtagttggcgttgacgagctccaacagctcggagcttatggcggcactgcgttctcgcaggtcggagcggaggtcctcgagggtttggtggcgctcgggcagggaggacaggtaggtggctgcattgaaggaggacgcgaggaagtctgaacgtggcagggcggcggggaagggcagaggcgtgtccgaatccgagtccgaggcggagctggaggccgaggacagggtgaaggtgtggttggccttggaacggtgcgggagggctacggccgcggctgtaggggccatgatgtcgagctggatgaggccagacagcgcgtggcggtccaaggttatcagtctatgtggtgtgcgtgtgtgtaccaagttgttgagaaagataccagatagcctagctcaggtatgcgacagtgttgttcgagaatcagaggtcgaggcagttgtacttggtgtgagcccagagttggatagtcgagtgctcaatgctgctgttgttgctctttcatgtatatgatatcagccgcggcgatgaattgcaggtgccaatgtcattgtcaatattgactgacatggatgctttccatgtttgacagctcaacacctgctaaagtggcatgagcggtactttggtacaccgagcttcaagagactgcagcctggcagttggacgtgggctggacgtgggttgggtgtgacggagggcgaactattctcctttctcactagcgtatctgtagacgactgatgccggtatcggcaaagcatctgactgtggttttcgaggccgattattgctgctgggccggcatgggatagacaaaaagatggcataacgccgccctgaaatcaagcaacgacgcatcaaagacgatggctgtaaccggtctataaatatcgtacgaatacgatttttgccgaaattcagccatatctatagttcggc

SEQ ID NO: 4466 - DNA, 303 bp, Muscodor strobelii
  misc_feature: SGI cDNA ID NO. 561179
  misc_feature: Encodes the peptide sequence at SEQ ID NO 4467
gtgctgcccgaggacgagagggacgccgtggtagaagagctggataagagtgacaggcgtgacaagagtgacgagggtctccccacgagggcaagacgggcggtgctgtccgaggcggtgaggcttgccatggagatatgtgagggcggccccatcgccgtgagagcgggcttgcaggcggtggcctgggcgcgggaggacgtcgagaacagccagtaccagcgcgtcgtggcgagcgaggatcggaacgaggcgctggatgctttcaaggagaagcggaagcccgtcttcaaggggaggtag

SEQ ID NO: 4467 - protein, 100 aa, Muscodor strobelii
  misc_feature: SGI Peptide ID NO. 561179
  misc_feature (8)..(100): NCBI GI: 46123413 Blast Desc: FG06084.1 [Gibberella zeae PH-1]
  misc_feature (31)..(100): NCBI GI: 261354567 Blast Desc: mitochondrial methylglutaconyl-CoA hydratase [Verticillium albo-atrum VaMs.102]
  misc_feature (13)..(100): NCBI GI: 256732583 Blast Desc: [Nectria haematococca mpVI 77-13-4]
  misc_feature (30)..(100): NCBI GI: 154301308 Blast Desc: BC1G_10324 [Botryotinia fuckeliana B05.10] gi|150856225|gb|EDN31417.1| BC1G_10324 [Botryotinia fuckeliana B05.10]
  misc_feature (1)..(100): NCBI GI: 39942510 Blast Desc: MGG_03335 [Magnaporthe grisea 70-15] gi|145015652|gb|EDK00142.1| MGG_03335 [Magnaporthe grisea 70-15]
  misc_feature (30)..(100): NCBI GI: 156039573 Blast Desc: SS1G_11923 [Sclerotinia sclerotiorum 1980] gi|154697660|gb|EDN97398.1| SS1G_11923 [Sclerotinia sclerotiorum 1980]
  misc_feature (1)..(100): NCBI GI: 85090740 Blast Desc: NCU09058 [Neurospora crassa OR74A] gi|28919934|gb|EAA29326.1| NCU09058 [Neurospora crassa OR74A]
  misc_feature (31)..(100): NCBI GI: 116204101 Blast Desc: CHGG_09934 [Chaetomium globosum CBS 148.51] gi|88176062|gb|EAQ83530.1| CHGG_09934 [Chaetomium globosum CBS 148.51]
  misc_feature (31)..(100): NCBI GI: 171679010 Blast Desc: protein product [Podospora anserina] gi|170937576|emb|CAP62233.1| protein product [Podospora anserina]
  misc_feature (3)..(99): NCBI GI: 189200451 Blast Desc: enoyl-CoA hydratase, mitochondrial precursor [Pyrenophora tritici-repentis Pt-1C-BFP] gi|187983661|gb|EDU49149.1| enoyl-CoA hydratase, mitochondrial
  misc_feature (36)..(99): SWISSPROT Homolog: EC 4.2.1.18 Methylglutaconyl-CoA hydratase
VLPEDERDAVVEELDKSDRRDKSDEGLPTRARRAVLSEAVRLAMEICEGGPIAVRAGLQAVAWAREDVENSQYQRVVASEDRNEALDAFKEKRKPVFKGR

SEQ ID NO: 4468 - DNA, 527 bp, Muscodor strobelii
  misc_feature: SGI EST ID NO. CUFF.11330.0
  misc_feature: Variant of the nucleotide sequence at SEQ ID NO 4466
aggtgctgcccgaggacgagagggacgccgtggtagaagagctggataagagtgacaggcgtgacaagagtgacgagggtctccccacgagggcaagacgggcggtgctgtccgaggcggtgaggcttgccatggagatatgtgagggcggccccatcgccgtgagagcgggcttgcaggcggtggcctgggcgcgggaggacgtcgagaacagccagtaccagcgcgtcgtggcgagcgaggatcggaacgaggcgctggatgctttcaaggagaagcggaagcccgtcttcaaggggaggtagacgggcgcacaaggctacggctgagatacctagacataatcataaattgcacatgacaccaatgtcctcttcgctcctgctgcgcatatcgtgcatcttgaggactgtggtctacaatctgacacggacgcatgctcgtgtccccaagatgaaattattcatccgcccaaagcacagcgcagatgcatcgttgcattgcccagccactcgatgatcacctcg

SEQ ID NO: 4469 - DNA, 699 bp, Muscodor strobelii
  misc_feature: SGI cDNA ID NO. 561180
  misc_feature: Encodes the peptide sequence at SEQ ID NO 4470
atgaccaacgaacccgaaaaaggcgacaaagtctcctggaattggggtggcggcgcgccgggcggaaaagttgccgagaccaagtcacaaggcgaaatcgcgattaagtcgaagcgcggtaacacaatcaagaagaacgcctcgccagacaacccagcagtacacgtctcgcgctccggcaacgacgtcgtgaaacgagcctccgagctcaacgtcgaacagaaggccgggggcaacaagggcgatagcaaggacaagggaaaggacgatgggaagaagcgcaaggcaaagacacaagctgacgaagccgaagatgacgatgaggaaagcgacgcgaaagagagcggcagtgattcttcaggtccccacacggaaaatgcacagggcaaagaggtgaagaagggagggaaacaggccaataagaagcagaagaagagcaaagatgaagacgtcaaaggtgacagcgacagtggtagcgctagccctactgatgaagatgaagaggaggaggagaagaagaagaagcctaagcaagtgaatggcaattcgaagacgagtggcaagaaggggaagaacaacgagcacacagagtcgaagccaaaagggaaggagactaaaactaagaaaaaggatccggccccgaggaaagacggagatatggtgagcacgcggacgaggagtcaaggcaaggcgaaatga

SEQ ID NO: 4470 - protein, 232 aa, Muscodor strobelii
  misc_feature: SGI Peptide ID NO. 561180
  misc_feature (1)..(81): NCBI GI: 189205112 Blast Desc: PTRG_08559 [Pyrenophora tritici-repentis Pt-1C-BFP] gi|187985990|gb|EDU51478.1| PTRG_08559 [Pyrenophora tritici-repentis Pt-1C-BFP]
  misc_feature (3)..(73): NCBI GI: 154314803 Blast Desc: [Botryotinia fuckeliana B05.10] gi|150848281|gb|EDN23474.1| [Botryotinia fuckeliana B05.10]
  misc_feature (6)..(75): NCBI GI: 156052607 Blast Desc: [Sclerotinia sclerotiorum 1980] gi|154704249|gb|EDO03988.1| [Sclerotinia sclerotiorum 1980]
  misc_feature (8)..(70): NCBI GI: 169866249 Blast Desc: [Coprinopsis cinerea okayama7#130] gi|116499215|gb|EAU82110.1| [Coprinopsis cinerea okayama7#130]
  misc_feature (11)..(71): NCBI GI: 261358019 Blast Desc: conserved [Verticillium albo-atrum VaMs.102]
MTNEPEKGDKVSWNWGGGAPGGKVAETKSQGEIAIKSKRGNTIKKNASPDNPAVHVSRSGNDVVKRASELNVEQKAGGNKGDSKDKGKDDGKKRKAKTQADEAEDDDEESDAKESGSDSSGPHTENAQGKEVKKGGKQANKKQKKSKDEDVKGDSDSGSASPTDEDEEEEEKKKKPKQVNGNSKTSGKKGKNNEHTESKPKGKETKTKKKDPAPRKDGDMVSTRTRSQGKAK

SEQ ID NO: 4471 - DNA, 1059 bp, Muscodor strobelii
  misc_feature: SGI EST ID NO. CUFF.11349.0
  misc_feature: Variant of the nucleotide sequence at SEQ ID NO 4469
cctagatgtttttaagtgaattgacgtactaagtctgcgagcgttgcgattctacaacaccgaagcgacttgtttcctagacgcgacattatcatcgggctcacctaattactattacatcgagatcggaatactaaccatatttgtcaacatgaccaacgaacccgaaaaaggcgacaaagtctcctggaattggggtggcggcgcgccgggcggaaaagttgccgagaccaagtcacaaggcgaaatcgcgattaagtcgaagcgcggtaacacaatcaagaagaacgcctcgccagacaacccagcagtacacgtctcgcgctccggcaacgacgtcgtgaaacgagcctccgagctcaacgtcgaacagaaggccgggggcaacaagggcgatagcaaggacaagggaaaggacgatgggaagaagcgcaaggcaaagacacaagctgacgaagccgaagatgacgatgaggaaagcgacgcgaaagagagcggcagtgattcttcaggtccccacacggaaaatgcacagggcaaagaggtgaagaagggagggaaacaggccaataagaagcagaagaagagcaaagatgaagacgtcaaaggtgacagcgacagtggtagcgctagccctactgatgaagatgaagaggaggaggagaagaagaagaagcctaagcaagtgaatggcaattcgaagacgagtggcaagaaggggaagaacaacgagcacacagagtcgaagccaaaagggaaggagactaaaactaagaaaaaggatccggccccgaggaaagacggagatatggtgagcacgcggacgaggagtcaaggcaaggcgaaatgaagtgggagtagaccatcctgctgttggtgtatcaaatggcgtaattttcttcgaagtcacttgtggtcagctgtaataatatgtaatataaggcggtgtgaatgtttgatgtcattttgttaatgatgttaatcctatccgtgatagtctcaatcaacactcgacgctcgaggcagtttactatttcgaagatacattgtactattggg

SEQ ID NO: 4472 - DNA, 1146 bp, Muscodor strobelii
  misc_feature: SGI cDNA ID NO. 561181
  misc_feature: Reduced expression when VOC is produced
  misc_feature: Encodes the peptide sequence at SEQ ID NO 4473
atggcggtatctctggcgggggagtcgtcgatatggtttagtatcacactgatcctaatcattgtgcgggtattctcgcggaagatcttgtcgggctccttcttgaagctcaaagtggatgacttcttgatgttcgctgcttttataaccgatactgtctttttcgtcgccctcaacctcctcgcgcatacaaataccaatctcattgatcccgcccaccctctcacactaaccactaaagatatcgaggagagaacattcgggtccaagctggtgatagttgtggagcatatgcaaatcttgactatatggcttaccaaagcttgcattttgttcatgtacaatcgcttggcaacttcacaacgaaaaaagatcgctgttagatgcgtagccggctacgtcgcttttggtttcgtcgttatggagattctttggttcactgcttggtgtcggcccctgaatcagtactgggcagtccccacaaacaacatacaatgctcgacacagcttcaccatctcaccgtcaatgccgttttcaacatatcctcggatgccatgatattcgccattccgatgcctatcctatttcatgccaatctacctttgaggaaaaagtttgtacttggggtcgtatttgcactaggcatcttcacaatactcgcagccattgtgaataaattttatagctttactcatccttacagcagttcgtgggagtactggtacgtccgggaatcttcaacggcgttagtagtcgccaaccttccctttacttggacaatagtccagtttgccttcaacctacgctcgttccagccgcaacaatcttccgacgccgaagagaatgtgattgacattcccagagtcctgggtgccgagtatggccacaactcgaggggtatttcacataatgtcaccatctctcgtggttctcggctggtagaaagtttgcattctttctcagagagccaggaaaacatcaacggaagcaatcacatgactatacctttgaaaatctacaaacagcaggagataagcatcacattggagagggacgatgacccagatacggaatcaacgcgatctcgtacttcgtattcaacgaagccaagccgagaacaccaccgaacttttcatgttgattga

SEQ ID NO: 4473 - protein, 381 aa, Muscodor strobelii
  misc_feature: SGI Peptide ID NO. 561181
  misc_feature (5)..(370): NCBI GI: 46138937 Blast Desc: FG10983.1 [Gibberella zeae PH-1]
  misc_feature (12)..(359): NCBI GI: 256726298 Blast Desc: NECHADRAFT_70557 [Nectria haematococca mpVI 77-13-4]
  misc_feature (5)..(356): NCBI GI: 46111041 Blast Desc: FG02402.1 [Gibberella zeae PH-1]
  misc_feature (25)..(348): NCBI GI: 261360010 Blast Desc: conserved [Verticillium albo-atrum VaMs.102]
  misc_feature (12)..(348): NCBI GI: 256729000 Blast Desc: NECHADRAFT_39937 [Nectria haematococca mpVI 77-13-4]
  misc_feature (8)..(372): NCBI GI: 238504814 Blast Desc: conserved [Aspergillus flavus NRRL3357] gi|220689750|gb|EED46100.1| conserved [Aspergillus flavus NRRL3357]
  misc_feature (5)..(263): NCBI GI: 256730300 Blast Desc: NECHADRAFT_25930 [Nectria haematococca mpVI 77-13-4]
  misc_feature (5)..(300): NCBI GI: 189204193 Blast Desc: conserved [Pyrenophora tritici-repentis Pt-1C-BFP] gi|187985531|gb|EDU51019.1| conserved [Pyrenophora tritici-repentis Pt-1C-BFP]
  misc_feature (1)..(354): NCBI GI: 169604977 Blast Desc: SNOG_05504 [Phaeosphaeria nodorum SN15] gi|160706678|gb|EAT86568.2| SNOG_05504 [Phaeosphaeria nodorum SN15]
  misc_feature (8)..(272): NCBI GI: 189193025 Blast Desc: conserved [Pyrenophora tritici-repentis Pt-1C-BFP] gi|187978415|gb|EDU45041.1| conserved [Pyrenophora tritici-repentis Pt-1C-BFP]
  misc_feature: Useful for introducing or modulating the production of volatile compounds
MAVSLAGESSIWFSITLILIIVRVFSRKILSGSFLKLKVDDFLMFAAFITDTVFFVALNLLAHTNTNLIDPAHPLTLTTKDIEERTFGSKLVIVVEHMQILTIWLTKACILFMYNRLATSQRKKIAVRCVAGYVAFGFVVMEILWFTAWCRPLNQYWAVPTNNIQCSTQLHHLTVNAVFNISSDAMIFAIPMPILFHANLPLRKKFVLGVVFALGIFTILAAIVNKFYSFTHPYSSSWEYWYVRESSTALVVANLPFTWTIVQFAFNLRSFQPQQSSDAEENVIDIPRVLGAEYGHNSRGISHNVTISRGSRLVESLHSFSESQENINGSNHMTIPLKIYKQQEISITLERDDDPDTESTRSRTSYSTKPSREHHRTFHVD

SEQ ID NO: 4474 - DNA, 2939 bp, Muscodor strobelii
  misc_feature: SGI EST ID NO. CUFF.11372.0
  misc_feature: Variant of the nucleotide sequence at SEQ ID NO 4472
cagaaggtgccattgcctatatttgtgctagacaagaggcgagggaatttttccctgtcgcagctagggagggcctggatggctccaacattgaatgactagcgcctgtctcttgaggtcgacgcactaacgattcaattcccacttattagcatctattacgagtacacgagtaatgttccaaccggttggaatgccgaaccaagtcttaccggctgtctggtttctgtcttttctcatgttcatataccgaggtgtagctaattttgtttccttgtcgtttatttgttcttggtacttcgaaaacgttaacagcgaaacttgacgataccgatgtttttcgcagaagtgagctctaggaagaggacttgtaagtcctgatggatcattcagccagacgcatttccgagtaaatcgaaacaccgtcggatgagaaggaagcgcgacactttctgacggataagaatcaatcttgcagcataacatgccggctcatcaatcacaccgacaacgaacagatttcctattttatggcaacgttggataaacatcaggcaccattggcaaagtttcggccatttctggagttacgttatagggcgcgacaaccttgcttataccaaaatggcggtatctctggcgggggagtcgtcgatatggtttagtatcacactgatcctaatcattgtgcgggtattctcgcggaagatcttgtcgggctccttcttgaagctcaaagtggatgacttcttgatgttcgctgcttttataaccgatactgtctttttcgtcgccctcaacctcctcgcgcatacaaataccaatctcattgatcccgcccaccctctcacactaaccactaaagatatcgaggagagaacattcgggtccaagctggtgatagttgtggagcatatgcaaatcttgactatatggcttaccaaagcttgcattttgttcatgtacaatcgcttggcaacttcacaacgaaaaaagatcgctgttagatgcgtagccggctacgtcgcttttggtttcgtcgttatggagattctttggttcactgcttggtgtcggcccctgaatcagtactgggcagtccccacaaacaacatacaatgctcgacacagcttcaccatctcaccgtcaatgccgttttcaacatatcctcggatgccatgatattcgccattccgatgcctatcctatttcatgccaatctacctttgaggaaaaagtttgtacttggggtcgtatttgcactaggcatcttcacagtgagttctggccgcctcttcctataatctggaaattgcgtatagccatttaaatcgcataggtgacacccctgtcatctgagaccgctgacatataacaattatcagatactcgcagccattgtgaataaattttatagctttactcatccttacagcagttcgtgggagtactggtacgtccgggaatcttcaacggcgttagtagtcgccaaccttccctttacttggacaatagtccagtttgccttcaacctacgctcgttccagccgcaacaatcttccgacgccgaagagaatgtgattgacattcccagagtcctgggtgccgagtatggccacaactcgaggggtatttcacataatgtcaccatctctcgtggttctcggctggtagaaagtttgcattctttctcagagagccaggaaaacatcaacggaagcaatcacatgactatacctttgaaaatctacaaacagcaggagataagcatcacattggagagggacgatgacccagatacggaatcaacgcgatctcgtacttcgtattcaacgaagccaagccgagaacaccaccgaacttttcatgttgattgaaaatgagactggcgtgatcacaatggtcaaatttcctgcgttgccatactgtgggcatgtcgatatacaaaatacagccatctagagtatacactcatcacctggtcgggacatcgtccccttaccgcaaacacgccaattcccttttccattcaggcttgcggaatctcgcctgactatgcatataatacgcaatgtattatctttatcatcggcttatcaacagctgaatgatagcaggagagtatttctttcctgcgctaaagctccttcttcattggtgcatcggtcagatcgcatccgtgttggactgttctcaatcgaaggacagagagggagacgaggacaagaagtgcagcagagcacaaaatcgcaactccactcgatgacacgataggcggccactccatctcttcgtctatgcttctagcagacgcgtgttcctctttcccaaattcatgctcgtcttggattctagcggcgttcgctacgacaccaggtccagccgataagaggaaggtggaagtcgctagcgagagatgaggcttcctgcctggaccaccgagccaacagaaagcaacgattgctattagacactgtgaggcgcatactagagctccagccagtagcggagtgcgtacttgccctgtcttcggctgcacaaagagcgccggtgcaagacgcgggttgatcatgagaggtagccttcggggcatcgtgcgtggtgtatgctggcagtagtcagcaaatgtgacacgagatgtgtctgttgaagagggtcaagtaacccacggttcaggatcggtgctcaagaaacagcagtcccttgatgatgcgcttgtttgcgtgccttctgggaggtgtgaaagaatgagaggcaaaagcaaagcagagaagctgcttcggctaggtcttgtagagatccggaccgacgagtatattgcttgagtaatgagcacaacggtcacacattgtatattcatcactatgtacataagaaactgagataccccgcctgcaacctgaacctccctacaatgctatgactacggcgcatgaat

SEQ ID NO: 4475 - DNA, 1662 bp, Muscodor strobelii
  misc_feature: SGI cDNA ID NO. 561182
  misc_feature: Encodes the peptide sequence at SEQ ID NO 4476
atgttctcacgcgctttaatcttggcctgcgtggcagccttgacggcgatacgtgctgatgccgcagcaccatactgcctcgctggagaatcgtgttttcctggcgtggatacgttgagtcagtttaacaagactgttggtggtgccttgatcaaggtcacgccgtacggagcggcttgttataaggcaacatatgatgccgatgagtgcactagccttgccagtatcaagggcgacaatgattatagacaatcccttcccgctggtgtcatgtacaccaatctcgagcagatctcggagattggctgtccaatccctgatgcgaacgaagatggatcaacggtagctgctgttgatgcagagtgcacgcttggtaacatgccctcgtatgttgtcaatgccacttcgacggagcagatcgtcgccgccgtcaagttcgcatccaagtataacctacgcttgcgtatcaagaacagcggtcatgactacactggacgatcttccggagcaggctccttgtccatctggactcgacacttgaccagcaccgagactgttgctggctttgtcccccaaggctgcaatgataaacgccgaagctttcacgggatgcacagcaaacatggaaagccccatcaacatgatactcgcgctgaaggacatgacgttgtaatcgctggctccggcgttaatgtcgaagagctgtatgcgtggggcgctgaagccggacaggtgaccattggcggctatacgacaactgttggtgctgctggcggctacatcttgggtggagggcttggacctcttgtgccaatttttggacttggagtcgacaatctgctacaacttgaggtcgttaccgctaatggcgacgtcgtcctcgctaatgaatgccagaatgaagacttgttttgggctctgcgcggcggcggcggcacgtttggcgtgaccactcgcatttggctcaaatcttatcctgctctgcctgctatcaacacagttgctggccaagtaggctgtaaagacttcgagtcctacagccggctcattagcaacgtggttgataatcagattgaactgcgcaatcttgggcattatggtatctgggagtcgactgctgctgctcttgctttgcagtttgcaaccatcatcccttaccaggatgcggcaaaggtcgaaaccgccaaccagtcactagcagaggtgcatgcagtaatggccgttgatggatgcactcctctcatgcaggcggcgcagttcactggctctgcgtcttggaacgatgcctaccaacaggctgtctggccaatcgtacagcctggtagtcttgttgatgttggcaatatcactacaactgttgctggtgatgctactgccgtacatcctgattggcgcaaagccttcgccttcattgacgtcccaatctttggaccttgggacggaacgacaactgctcagaatgcaacaactgccgagaacgaccgtaacctcaccgcgacttacggcaccactgcttactacaatgagcagtatgacgacgagaaatggcaggagaatttcttcggctccaactatgatagacttttgaagatcaagaacgaggtcgaccctaagagagtcttcagttgcccgttgtgcgtcggtagcgagcatgggtattga

SEQ ID NO: 4476 - protein, 553 aa, Muscodor strobelii
  misc_feature: SGI Peptide ID NO. 561182
  misc_feature (505)..(548): Pfam Id: PF08031 Pfam Desc: Berberine and berberine like
  misc_feature (128)..(296): Pfam Id: PF01565 Pfam Desc: FAD binding domain
  misc_feature (25)..(551): NCBI GI: 67524381 Blast Desc: AN2648.2 [Aspergillus nidulans FGSC A4] gi|40743866|gb|EAA63050.1| AN2648.2 [Aspergillus nidulans FGSC A4] gi|259486442|tpe|CBF84282.1| TPA: isoamyl alcohol oxidase,
  misc_feature (1)..(550): NCBI GI: 146322692 Blast Desc: FAD/FMN-containing protein [Aspergillus fumigatus Af293] gi|129557794|gb|EAL91091.2| FAD/FMN-containing protein [Aspergillus fumigatus Af293] gi|159131865|gb|EDP56978.1| protein
  misc_feature (15)..(551): NCBI GI: 119488562 Blast Desc: FAD binding domain protein [Neosartorya fischeri NRRL 181] gi|119410889|gb|EAW20834.1| FAD binding domain protein [Neosartorya fischeri NRRL 181]
  misc_feature (4)..(551): NCBI GI: 46139359 Blast Desc: FG11194.1 [Gibberella zeae PH-1]
  misc_feature (7)..(550): NCBI GI: 119494191 Blast Desc: FAD binding domain protein [Neosartorya fischeri NRRL 181] gi|119412157|gb|EAW22098.1| FAD binding domain protein [Neosartorya fischeri NRRL 181]
  misc_feature (26)..(550): NCBI GI: 256724559 Blast Desc: NECHADRAFT_98044 [Nectria haematococca mpVI 77-13-4]
  misc_feature (30)..(551): NCBI GI: 159122921 Blast Desc: isoamyl alcohol oxidase, [Aspergillus fumigatus A1163]
  misc_feature (30)..(551): NCBI GI: 70982616 Blast Desc: isoamyl alcohol oxidase [Aspergillus fumigatus Af293] gi|66844460|gb|EAL84798.1| isoamyl alcohol oxidase, [Aspergillus fumigatus Af293]
  misc_feature (24)..(550): NCBI GI: 238845796 Blast Desc: FAD binding domain-containing protein [Microsporum canis CBS 113480]
  misc_feature (11)..(550): NCBI GI: 121703467 Blast Desc: FAD binding domain protein [Aspergillus clavatus NRRL 1] gi|119398141|gb|EAW08572.1| FAD binding domain protein [Aspergillus clavatus NRRL 1]
MFSRALILACVAALTAIRADAAAPYCLAGESCFPGVDTLSQFNKTVGGALIKVTPYGAACYKATYDADECTSLASIKGDNDYRQSLPAGVMYTNLEQISEIGCPIPDANEDGSTVAAVDAECTLGNMPSYVVNATSTEQIVAAVKFASKYNLRLRIKNSGHDYTGRSSGAGSLSIWTRHLTSTETVAGFVPQGCNDKRRSFHGMHSKHGKPHQHDTRAEGHDVVIAGSGVNVEELYAWGAEAGQVTIGGYTTTVGAAGGYILGGGLGPLVPIFGLGVDNLLQLEVVTANGDVVLANECQNEDLFWALRGGGGTFGVTTRIWLKSYPALPAINTVAGQVGCKDFESYSRLISNVVDNQIELRNLGHYGIWESTAAALALQFATIIPYQDAAKVETANQSLAEVHAVMAVDGCTPLMQAAQFTGSASWNDAYQQAVWPIVQPGSLVDVGNITTTVAGDATAVHPDWRKAFAFIDVPIFGPWDGTTTAQNATTAENDRNLTATYGTTAYYNEQYDDEKWQENFFGSNYDRLLKIKNEVDPKRVFSCPLCVGSEHGY

SEQ ID NO: 4477 - DNA, 1303 bp, Muscodor strobelii
  misc_feature: SGI EST ID NO. CUFF.11382.0
  misc_feature: Variant of the nucleotide sequence at SEQ ID NO 4475
cgcaaaccgtgcgctgctagattatagtgcgtagttgagtcatgaaatcatatcattgctttcaatgcgcaagttgaacagtcagcaagaatcaactgaaattcgaggattccaaggctacggtagagatagggccaaccagggtaccctaggcacggctattgcctccgtaactgccgacgacgaacgatgggtctaaatacctatctcaaaacccgaactaccaagaaatctaggtattcttaattaccagatctatgagatctgaagggatctggaagatgataacaagttctcaaattaccccggcaagggctgtgagcattgacagcatggagttggaacgcttgccaagttgaatgagttgtcatcaaatcttctttagtgcgacgccagtgccgcggcttcaccgttagatcgcgatccttcaacaagggagcttcacggttatcggagtctcaaaggaccgactggatgggccattggcaaaggtataatgaggaagatggtatataagccagtgacgatgctacgaagcattggacctggctgatagaacgagtggagtatttcgtggtagacgctggctcattaggtgcaccatcatgttctcacgcgctttaatcttggcctgcgtggcagccttgacggcgatacgtgctgatgccgcagcaccatactgcctcgctggagaatcgtgttttcctggcgtggatacgttgagtcagtttaacaagactgttggtggtgccttgatcaaggtcacgccgtacggagcggcttgttataaggcaacatatgatgccgatgagtgcactagccttgccagtatcaagggcgacaatgattatagacaatcccttcccgctggtgtcatgtacaccaatctcgagcagatctcggagattggctgtccaatccctgatgcgaacgaagatggatcaacggtagctgctgttgatgcagagtgcacgcttggtaacatgccctcgtatgttgtcaatgccacttcgacggagcagatcgtcgccgccgtcaagttcgcatccaagtataacctacgcttgcgtatcaagaacagcggtcatgactacactggacgatcttccggagcaggctccttgtccatctggactcgacacttgaccagcaccgagactgttgctggctttgtcccccaaggctgcaatgataaacgccgaagctttcacgggatgcacagcaaacatggaaagccccatcaacatgatactcgcgctgaaggacatgacgttgtaatcgctggctccggcgttaatgtcga

SEQ ID NO: 4478 - DNA, 453 bp, Muscodor strobelii
  misc_feature: SGI cDNA ID NO. 561183
  misc_feature: Encodes the peptide sequence at SEQ ID NO 4479
atggtgccgtcgaaaacgccagcgatcctgctcgtgccaggtgcatttggcactccttgttgttacgaccaattactaccttttctacacgacgcaggtttttcagttcatccgggaccattgccaagctctgatccagttgacccaacggccacgacttgtgaaagtgatattctcacgctacgaaataagatcatttttcccctcttggagaagcatgaagatgtcgtcgtcgtcgcgcattcatacggcggtgtggttacaggaggcgctgcaaaagacctggataaacatactcgcagtgcccttggtaaagagactggaattgtcggtttaatatacatcgctggcaacataactcttgagggcgaatcactttctcgtgctatcggggaaacatatccagactttatcaagcaagacaatgtattgcccgattctaccactccgtag

SEQ ID NO: 4479 - protein, 150 aa, Muscodor strobelii
  misc_feature: SGI Peptide ID NO. 561183
  misc_feature (1)..(142): NCBI GI: 145236932 Blast Desc: An07g00200 [Aspergillus niger] gi|134075578|emb|CAK39244.1| protein product [Aspergillus niger]
  misc_feature (1)..(142): NCBI GI: 238498698 Blast Desc: conserved [Aspergillus flavus NRRL3357] gi|220693858|gb|EED50203.1| conserved [Aspergillus flavus NRRL3357]
  misc_feature (1)..(104): NCBI GI: 169781876 Blast Desc: [Aspergillus oryzae RIB40] gi|83774143|dbj|BAE64268.1| protein product [Aspergillus oryzae]
  misc_feature (7)..(139): NCBI GI: 154301242 Blast Desc: [Botryotinia fuckeliana B05.10] gi|150856192|gb|EDN31384.1| [Botryotinia fuckeliana B05.10]
  misc_feature (7)..(142): NCBI GI: 169774273 Blast Desc: [Aspergillus oryzae RIB40] gi|83769467|dbj|BAE59602.1| protein product [Aspergillus oryzae]
  misc_feature (7)..(142): NCBI GI: 238840275 Blast Desc: conserved [Microsporum canis CBS 113480]
  misc_feature (7)..(142): NCBI GI: 238497217 Blast Desc: conserved [Aspergillus flavus NRRL3357] gi|220694724|gb|EED51068.1| conserved [Aspergillus flavus NRRL3357]
  misc_feature (7)..(126): NCBI GI: 169626162 Blast Desc: SNOG_16360 [Phaeosphaeria nodorum SN15] gi|111055226|gb|EAT76346.1| SNOG_16360 [Phaeosphaeria nodorum SN15]
  misc_feature (7)..(150): NCBI GI: 121712240 Blast Desc: conserved [Aspergillus clavatus NRRL 1] gi|119401887|gb|EAW12309.1| conserved [Aspergillus clavatus NRRL 1]
  misc_feature (1)..(127): NCBI GI: 240107276 Blast Desc: CPC735_065610 [Coccidioides posadasii C735 delta SOWgp]
MVPSKTPAILLVPGAFGTPCCYDQLLPFLHDAGFSVHPGPLPSSDPVDPTATTCESDILTLRNKIIFPLLEKHEDVVVVAHSYGGVVTGGAAKDLDKHTRSALGKETGIVGLIYIAGNITLEGESLSRAIGETYPDFIKQDNVLPDSTTP

SEQ ID NO: 4480 - DNA, 244 bp, Muscodor strobelii
  misc_feature: SGI EST ID NO. CUFF.11390.0
  misc_feature: Variant of the nucleotide sequence at SEQ ID NO 4478
tcttgagggcgaatcactttctcgtgctatcggggaaacatatccagactttatcaagcaagacaatgtattgcccgattctaccactccgtagtcgccctcgatggacattctgtacaatgactgtgatccgacacgagaactagatctaatcaagaacaccattccacatgccctctaagcgttcgctacgccagcgagtgcaccggcttgggcggatgaattttatgatgacagaagggcg

SEQ ID NO: 4481 - DNA, 1473 bp, Muscodor strobelii
  misc_feature: SGI cDNA ID NO. 561184
  misc_feature: Reduced expression when VOC is produced
  misc_feature: Encodes the peptide sequence at SEQ ID NO 4482
atgtcaggctcttacaccgggtcctcgacgacactggaggacgggagtaagccgcaacgcgacatctcagcagaggagaaagccgagctgtcaagagatgttctaacgccatcaaagaacatgggggaacgggcaatacctgtcgaagaagagaagagcatacgcaacacaaaaaaggaagacgatgcatcctcggccatctcaaaaacgctatccaacgtcgttccaccaccaccatcctcaggcttcccaccaggtttccacccagacgacttcccagacggcgggctcaccgcctggctcgtcgtcttggggggcgcgatgtgcctcttctgctccttcggcctggtgaactgcgcaggtgtgttcgtagagtactactacaacggtcctctatcggaatacagcagttcgaccatcacgtggatcacgtctcttcagacgttcgtgatcacgggtaccaacgtcatcactgggcgacttttcgactcttatggtcctcgcttgatgttgccgattggcacgttgctactaacgctgggattgatgttcatctcgctgtcgaaggaatactaccagttcatcctctcgcagggcattttggccgggataggcgccgcttgcgtctataactgcgccgcgaattcgacgctgacgtggttctatcgcaagcgcgcaacagctttgggcatagtcgttgctggctcatcattgggcggtacagtcctcccgatcttcctcagcaaactgatagtccgcattggattcccctggaccgtccgcgcactcggatttatcgttttgactctctgcggcaccgcgtgtttcctcgtcaaatcacgcattaatcccacgccgaagccgttcgacctttgggcctatattacgccgttcaaagaggcgcgcttcacgatcgttgtcgcggctagtttttttgtgttttggggcatgtatcttcccttcaactacatcaatatccaggcccagcagctgggtgtcgatgcaaacttgatcccgtatctgttgtcgattattagcgctgtcagcatcgtcggccgcattgtgcccggcatagtcggcgactacctcggcaaattcaacacgatcatcatcatcgcactattatcaggcaccatctcactcgctatctggatccccgccacatccacaggtcccctcatcgcttacctcgccatctacggtttcacgtccggtggctacatctcgctcatccctgcggtcatggcacaaatcagcgacctgcgcgaaatcggcacacgaagtggtgtcagtttgcttgtcggttctcttggtgctctcacgggtgcgccgataggaggcgcgatcttgagtgcgcagggtggaaagtacacggggttgcagctgttcacaggtatttcgatattggttggtggcgcacttttgattctcgcgagggttgtgcaggttgggttgaagcctgttaagatctga

SEQ ID NO: 4482 - protein, 490 aa, Muscodor strobelii
  misc_feature: SGI Peptide ID NO. 561184
  misc_feature (106)..(443): Pfam Id: PF07690 Pfam Desc: Major Facilitator Superfamily
  misc_feature (91)..(490): NCBI GI: 46123917 Blast Desc: FG06336.1 [Gibberella zeae PH-1]
  misc_feature (89)..(490): NCBI GI: 256732913 Blast Desc: [Nectria haematococca mpVI 77-13-4]
  misc_feature (87)..(486): NCBI GI: 39942662 Blast Desc: MGG_03411 [Magnaporthe grisea 70-15] gi|145023142|gb|EDK06695.1| MGG_03411 [Magnaporthe grisea 70-15]
  misc_feature (2)..(490): NCBI GI: 261354693 Blast Desc: riboflavin transporter MCH5 [Verticillium albo-atrum VaMs.102]
  misc_feature (90)..(490): NCBI GI: 238505382 Blast Desc: monocarboxylate transporter, [Aspergillus flavus NRRL3357] gi|220690034|gb|EED46384.1| monocarboxylate transporter, [Aspergillus flavus NRRL3357]
  misc_feature (90)..(490): NCBI GI: 169780462 Blast Desc: [Aspergillus oryzae RIB40] gi|83773435|dbj|BAE63562.1| protein product [Aspergillus oryzae]
  misc_feature (56)..(490): NCBI GI: 255946908 Blast Desc: Pc22g01770 [Penicillium chrysogenum Wisconsin 54-1255] gi|211591238|emb|CAP97465.1| Pc22g01770 [Penicillium chrysogenum Wisconsin 54-1255]
  misc_feature (62)..(490): NCBI GI: 261361029 Blast Desc: riboflavin transporter MCH5 [Verticillium albo-atrum VaMs.102]
  misc_feature (48)..(467): NCBI GI: 238839620 Blast Desc: monocarboxylate permease-like protein [Microsporum canis CBS 113480]
  misc_feature (49)..(490): NCBI GI: 46138275 Blast Desc: FG10652.1 [Gibberella zeae PH-1]
  misc_feature: Useful for introducing or modulating the production of volatile compounds
MSGSYTGSSTTLEDGSKPQRDISAEEKAELSRDVLTPSKNMGERAIPVEEEKSIRNTKKEDDASSAISKTLSNVVPPPPSSGFPPGFHPDDFPDGGLTAWLVVLGGAMCLFCSFGLVNCAGVFVEYYYNGPLSEYSSSTITWITSLQTFVITGTNVITGRLFDSYGPRLMLPIGTLLLTLGLMFISLSKEYYQFILSQGILAGIGAACVYNCAANSTLTWFYRKRATALGIVVAGSSLGGTVLPIFLSKLIVRIGFPWTVRALGFIVLTLCGTACFLVKSRINPTPKPFDLWAYITPFKEARFTIVVAASFFVFWGMYLPFNYINIQAQQLGVDANLIPYLLSIISAVSIVGRIVPGIVGDYLGKFNTIIIIALLSGTISLAIWIPATSTGPLIAYLAIYGFTSGGYISLIPAVMAQISDLREIGTRSGVSLLVGSLGALTGAPIGGAILSAQGGKYTGLQLFTGISILVGGALLILARVVQVGLKPVKI

SEQ ID NO: 4483 - DNA, 2125 bp, Muscodor strobelii
  misc_feature: SGI EST ID NO. CUFF.11399.0
  misc_feature: Variant of the nucleotide sequence at SEQ ID NO 4481
aaacatatgctctacatgtttcatcttaaaaaaatcattgtgactgagcctcaaaacctttgaataatattcatcataatccagtatcgtgactgctttcagccatccttcgtcccatcaaagtagccatcgcgctagagaaccgatctttgcgtctacgacagcgacgaatcgctttaaacagtttgaggcgtcattgaagtaacgtttcttagcatcatcgcctcgtaggcaacaaacagcgaacattcaaaatcaaattttatctcactcatagaaagagaaaaaagactacaagtcgcatgagaatgtcaggctcttacaccgggtcctcgacgacactggaggacgggagtaagccgcaacgcgacatctcagcagaggagaaagccgagctgtcaagagatgttctaacgccatcaaagaacatgggggaacgggcaatacctgtcgaagaagagaagagcatacgcaacacaaaaaaggaagacgatgcatcctcggccatctcaaaaacgctatccaacgtcgttccaccaccaccatcctcaggcttcccaccaggtttccacccagacgacttcccagacggcgggctcaccgcctggctcgtcgtcttggggggcgcgatgtgcctcttctgctccttcggcctggtgaactgcgcaggtgtgttcgtagagtactactacaacggtcctctatcggaatacagcagttcgaccatcacgtggatcacgtctcttcagacgttcgtgatcacgggtaccaacgtcatcactgggcgacttttcgactcttatggtcctcgcttgatgttgccgattggcacgttgctactaacgctgggattgatgttcatctcgctgtcgaaggaatactaccagttcatcctctcgcagggcattttggccgggataggcgccgcttgcgtctataactgcgccgcgaattcgacgctgacgtggttctatcgcaagcgcgcaacagctttgggcatagtcgttgctggctcatcattgggcggtacagtcctcccgatcttcctcagcaaactgatagtccgcattggattcccctggaccgtccgcgcactcggatttatcgttttgactctctgcggcaccgcgtgtttcctcgtcaaatcacgcattaatcccacgccgaagccgttcgacctttgggcctatattacgccgttcaaagaggcgcgcttcacgatcgttgtcgcggctagtttttttgtgttttggggcatgtatcttcccttcaactacatcaatatccaggcccagcagctgggtgtcgatgcaaacttgatcccgtatctgttgtcgattattagcgctgtcagcatcgtcggccgcattgtgcccggcatagtcggcgactacctcggcaaattcaacacgatcatcatcatcgcactattatcaggcaccatctcactcgctatctggatccccgccacatccacaggtcccctcatcgcttacctcgccatctacggtttcacgtccggtggctacatctcgctcatccctgcggtcatggcacaaatcagcgacctgcgcgaaatcggcacacgaagtggtgtcagtttgcttgtcggttctcttggtgctctcacgggtgcgccgataggaggcgcgatcttgagtgcgcagggtggaaagtacacggggttgcagctgttcacaggtatttcgatattggttggtggcgcacttttgattctcgcgagggttgtgcaggttgggttgaagcctgttaagatctgaaagctcggggaagtatacatacaagattctgcataatagtttcgcatagggatggcgtttagcttttatgataccatcatatgtaccgcgtgatcgcgtcatagtattgatgagatagcatttggaactgcaattcgtgctcgatatttggggcagacaatgtctttactcatgtaagagtctcaagatgttcctgatccgtgtattaagcggtcgaatagcatatgtaagcttgcaggtctcgactgctcttcttcaagctgatcaatctccatggatatccaatactatgatatgattggcccttgttgtcacgccttgccaatatctcatcgcgaactgtg

SEQ ID NO: 4484 - DNA, 2160 bp, Muscodor strobelii
  misc_feature: SGI cDNA ID NO. 561185
  misc_feature: Encodes the peptide sequence at SEQ ID NO 4485
atggacaattatgatattgctgatatggtcaaagaccttcaccgcgacctcgctcgaaaatggcgtatccacggtgatcgagtccaggagctttggcgctcgttcggtccgggcttacgaggcaaagcgatgaaagaaggagcagcggaaggatcccttctcaaacattcggcagacgcctcgcttggtgaagtctacaagttcttaccagaatacaacctcaaagatgtcaccgcacccggcaatttcttgcttgatatgctcaagcaccgagcgaccacgtctctcgaagagcaatatatgggcggcttcaacggtcgtccaggagactacgaacacattatggagatgagacgcacacgaggccttcgtcacgtcaactcttttgtcgactgttggaccttctttaccgacggagagaattacgggaaatcaattgagcttgtgagagacaaagagaaggctttggccgccttcgcaccagcgatcaaagcaggagtgtgtataccgcaatccgtaggcgagttggtcctgaacagacagatgtatctgttgcagagcctcaacattctatgtgaagatatcttggaaattggatctcagaccaggtcgcagaagcctctcccgaagaagcccgtcgacactgcggcggcagctctctccaagctttccgtttcctccctcaaatcaacactcgaccttcctcagcttactgagagagccagagatcagaaggttgcactcgatgacaatctaactctgatatgtacagagtccgtcatgctggcacacgaagtcaataactggttcttcagtcgacctgagctcatacccgacgagaaaggccgtatcctccctgctcacactgatagatacatcagcggcgccgttctagacactgtccttcatgccgtcagcggagctgccatttggaactatatgactcgactactagagaccctcagcggcttaacggaaaagtctctcagatctatcattctccaagagatctccaacttatgccatctcgattacacacgaaaccaagcaacactcaagcgtcatctagctacaggtttcggagctggtccgaaatggtacagacgagtatcgaatgtctatgacaacggtcgtccacgtgttaccttgaaggggaagccagaagagctacttcaaaaagatccacagcttcactacatgatgcgtctagctcagcctgaaacgacagttgcgaaagcagtagactggatgaagaagcttgacgcttatcaaattgctcacccagcaagcgccgagcagttgacagatcgagaagccgacacaatcggtgacatggctatcactcttgcttttatccagtcccttaccccagccatttcgatgccctcgttcaatcgcaagaaagcgcagttattcacgactagatctgctgctttagacgcggaactcaatgcattgaagccacagctcgacttaggtgactttgtgatccccattgacaatctcacagagcctggaatgacagaggctgctctgggcgcgctggacgaattcctcgtcgacaagacaggcaccaagattggcttcctctaccaggacctcattgaccagtgtattgcccaaatccagtctcagcttgacaccgaggcccaacggctggaaaatgtcaaagccaaggagcaggcaaaagcggccgagtatgtcccatttccctccgaactagatcaagcaccagagacgcgcatcaaagaacgaaggatgaaagagaagacccgtcccacgcagtcctccatgtacgagatcacgaaatcgacacaatctactaccacgccccagaccgaacctccagcatcatcacagacattcgctgtcaacgactctactctcgaggtctttacaaccatgtttacgaggtcgcaagcgaggggatctattgcctgggccagcttcgagtcggctatggctgaccttggattttctgtcttgccgcgatttggatctgtgtacacgttcatccccccattgagtatggacatacagcgacctctcacattacatcggccgcaccagtccgagatcgagggctataaattgctatcttatgccagtcggctcaagagagtgtatggctggagagaagatagctttcacaccgcttag

SEQ ID NO: 4485 - protein, 719 aa, Muscodor strobelii
  misc_feature: SGI Peptide ID NO. 561185
  misc_feature (5)..(719): NCBI GI: 156031186 Blast Desc: SS1G_14201 [Sclerotinia sclerotiorum 1980] gi|154700592|gb|EDO00331.1| SS1G_14201 [Sclerotinia sclerotiorum 1980]
  misc_feature (9)..(719): NCBI GI: 39942878 Blast Desc: [Magnaporthe grisea 70-15] gi|145009920|gb|EDJ94576.1| [Magnaporthe grisea 70-15]
  misc_feature (10)..(695): NCBI GI: 166163610 Blast Desc: ipa protein [Leptosphaeria maculans]
  misc_feature (8)..(631): NCBI GI: 169615022 Blast Desc: SNOG_10665 [Phaeosphaeria nodorum SN15] gi|160702866|gb|EAT82059.2| SNOG_10665 [Phaeosphaeria nodorum SN15]
  misc_feature (65)..(719): NCBI GI: 119501795 Blast Desc: NFIA_045770 [Neosartorya fischeri NRRL 181] gi|119415820|gb|EAW25757.1| conserved [Neosartorya fischeri NRRL 181]
  misc_feature (163)..(718): NCBI GI: 238508370 Blast Desc: conserved [Aspergillus flavus NRRL3357] gi|220688899|gb|EED45251.1| conserved [Aspergillus flavus NRRL3357]
  misc_feature (9)..(473): NCBI GI: 159123455 Blast Desc: conserved [Aspergillus fumigatus A1163]
  misc_feature (4)..(562): NCBI GI: 212546799 Blast Desc: conserved [Penicillium marneffei ATCC 18224] gi|210065073|gb|EEA19168.1| conserved [Penicillium marneffei ATCC 18224]
  misc_feature (4)..(629): NCBI GI: 242822361 Blast Desc: TSTA_002810 [Talaromyces stipitatus ATCC 10500] gi|218712792|gb|EED12217.1| TSTA_002810 [Talaromyces stipitatus ATCC 10500]
  misc_feature (274)..(719): NCBI GI: 115400411 Blast Desc: [Aspergillus terreus NIH2624] gi|114191460|gb|EAU33160.1| [Aspergillus terreus NIH2624]
MDNYDIADMVKDLHRDLARKWRIHGDRVQELWRSFGPGLRGKAMKEGAAEGSLLKHSADASLGEVYKFLPEYNLKDVTAPGNFLLDMLKHRATTSLEEQYMGGFNGRPGDYEHIMEMRRTRGLRHVNSFVDCWTFFTDGENYGKSIELVRDKEKALAAFAPAIKAGVCIPQSVGELVLNRQMYLLQSLNILCEDILEIGSQTRSQKPLPKKPVDTAAAALSKLSVSSLKSTLDLPQLTERARDQKVALDDNLTLICTESVMLAHEVNNWFFSRPELIPDEKGRILPAHTDRYISGAVLDTVLHAVSGAAIWNYMTRLLETLSGLTEKSLRSIILQEISNLCHLDYTRNQATLKRHLATGFGAGPKWYRRVSNVYDNGRPRVTLKGKPEELLQKDPQLHYMMRLAQPETTVAKAVDWMKKLDAYQIAHPASAEQLTDREADTIGDMAITLAFIQSLTPAISMPSFNRKKAQLFTTRSAALDAELNALKPQLDLGDFVIPIDNLTEPGMTEAALGALDEFLVDKTGTKIGFLYQDLIDQCIAQIQSQLDTEAQRLENVKAKEQAKAAEYVPFPSELDQAPETRIKERRMKEKTRPTQSSMYEITKSTQSTTTPQTEPPASSQTFAVNDSTLEVFTTMFTRSQARGSIAWASFESAMADLGFSVLPRFGSVYTFIPPLSMDIQRPLTLHRPHQSEIEGYKLLSYASRLKRVYGWREDSFHTA

SEQ ID NO: 4486 - DNA, 2789 bp, Muscodor strobelii
  misc_feature: SGI EST ID NO. CUFF.11403.0
  misc_feature: Variant of the nucleotide sequence at SEQ ID NO 4484
gcaaggtgtaatggcacgccttttcatgatatgtgtaatctcgtctgcacgaccgatcaattgcgcacttgactgctgtcgttttgagtgtcccatatctcatcgggcctgtgcatcaggcgcctagctggctgtcgtgtctacactgctcacatcagacaaacttcagtacaaacaacccatcacatcccaccagcctgccgcccctggtacttgacatcacatctcctcagacttcgtctcacacagacactggcagtccattcgacatggacaattatgatattgctgatatggtcaaagaccttcaccgcgacctcgctcgaaaatggcgtatccacggtgatcgagtccaggagctttggcgctcgttcggtccgggcttacgaggcaaagcgatgaaagaaggagcagcggaaggatcccttctcaaacattcggcagacgcctcgcttggtgaagtctacaagttcttaccagaatacaacctcaaagatgtcaccgcacccggcaatttcttgcttgatatgctcaagcaccgagcgaccacgtctctcgaagagcaatatatgggcggcttcaacggtcgtccaggagactacgaacacattatggagatgagacgcacacgaggccttcgtcacgtcaactcttttgtcgactgttggaccttctttaccgacggagagaattacgggaaatcaattgagcttgtgagagacaaagagaaggctttggccgccttcgcaccagcgatcaaagcaggagtgtgtataccgcaatccgtaggcgagttggtcctgaacagacagatgtatctgttgcagagcctcaacattctatgtgaagatatcttggaaattggatctcagaccaggtcgcagaagcctctcccgaagaagcccgtcgacactgcggcggcagctctctccaagctttccgtttcctccctcaaatcaacactcgaccttcctcagcttactgagagagccagagatcagaaggttgcactcgatgacaatctaactctgatatgtacagagtccgtcatgctggcacacgaagtcaataactggttcttcagtcgacctgagctcatacccgacgagaaaggccgtatcctccctgctcacactgatagatacatcagcggcgccgttctagacactgtccttcatgccgtcagcggagctgccatttggaactatatgactcgactactagagaccctcagcggcttaacggaaaagtctctcagatctatcattctccaagagatctccaacttatgccatctcgattacacacgaaaccaagcaacactcaagcgtcatctagctacaggtttcggagctggtccgaaatggtacagacgagtatcgaatgtctatgacaacggtcgtccacgtgttaccttgaaggggaagccagaagagctacttcaaaaagatccacagcttcactacatgatgcgtctagctcagcctgaaacgacagttgcgaaagcagtagactggatgaagaagcttgacgcttatcaaattgctcacccagcaagcgccgagcagttgacagatcgagaagccgacacaatcggtgacatggctatcactcttgcttttatccagtcccttaccccagccatttcgatgccctcgttcaatcgcaagaaagcgcagttattcacgactagatctgctgctttagacgcggaactcaatgcattgaagccacagctcgacttaggtgactttgtgatccccattgacaatctcacagagcctggaatgacagaggctgctctgggcgcgctggacgaattcctcgtcgacaagacaggcaccaagattggcttcctctaccaggacctcattgaccagtgtattgcccaaatccagtctcagcttgacaccgaggcccaacggctggaaaatgtcaaagccaaggagcaggcaaaagcggccgagtatgtcccatttccctccgaactagatcaagcaccagagacgcgcatcaaagaacgaaggatgaaagagaagacccgtcccacgcagtcctccatgtacgagatcacgaaatcgacacaatctactaccacgccccagaccgaacctccagcatcatcacagacattcgctgtcaacgactctactctcgaggtctttacaaccatgtttacgaggtcgcaagcgaggggatctattgcctgggccagcttcgagtcggctatggctgaccttggattttctgtcttgccgcgatttggatctgtgtacacgttcatccccccattgagtatggacatacagcgacctctcacattacatcggccgcaccagtccgagatcgagggctataaattgctatcttatgccagtcggctcaagagagtgtatggctggagagaagatagctttcacaccgcttagacatctcgagcagcatctcattgtagccctttggatgctcatcttacgtcagtatgctacagcaagagatagttcggaatgtacaagggatctagatctcttgataaatgtataatggtattgtagagatttgattcttgttggcctatatcagccagactctggtcttactttagactcatcagagcagataccgtaacgtgccgtccctagttcaaaaaggttacctggtaatcgaaatgtcactatcatagcgacgtcgtcttcgcagagtaggtaggtcgtggactaggaaaaccagacatatggagagtaatagcgcagtatcgtgtactgagcggtcgtgactttgcatgtgcg

SEQ ID NO: 4487 - DNA, 480 bp, Muscodor strobelii
  misc_feature: SGI cDNA ID NO. 561186
  misc_feature: Reduced expression when VOC is produced
  misc_feature: Encodes the peptide sequence at SEQ ID NO 4488
atgcgcagtgtcgcctcgtcgctggtcaggagaggccgcctcgggtcaattggcctgggcagaggtggctacgtgtgtcgccagtgcagacagatccagatcagctcgacgccctcgaccgagtcaccgccgccgacaacgtcacgagatgtctttagtagtggcagcattggcagtactagtgacagctacagctccagagacgtcgccgatgtacggttcgaggtggtcggggcgccctactcgctgctgtcggtgtcgctgtcggcctcgcagcggctctacacacgacgcggcaccctcgtcgccgtctcgggcaagccccagaacgcgcagtcgacgctctccgtcctgtcccccgccacccgcgccctgaccggcgtgcccttcctctaccagcgcatcacctccaccacgcccctcaccgccctcgtcgccaccaagtccccgaccaccaccttccacgtcctccgcctcgac

SEQ ID NO: 4488 - protein, 160 aa, Muscodor strobelii
  misc_feature: SGI Peptide ID NO. 561186
  misc_feature (24)..(160): NCBI GI: 46123915 Blast Desc: FG06335.1 [Gibberella zeae PH-1]
  misc_feature (22)..(160): NCBI GI: 85079374 Blast Desc: NCU05027 [Neurospora crassa OR74A] gi|28917395|gb|EAA27099.1| NCU05027 [Neurospora crassa OR74A]
  misc_feature (26)..(160): NCBI GI: 261354694 Blast Desc: conserved [Verticillium albo-atrum VaMs.102]
  misc_feature (24)..(160): NCBI GI: 39973335 Blast Desc: MGG_07962 [Magnaporthe grisea 70-15] gi|145012781|gb|EDJ97435.1| MGG_07962 [Magnaporthe grisea 70-15]
  misc_feature (21)..(160): NCBI GI: 171680630 Blast Desc: protein product [Podospora anserina] gi|170939942|emb|CAP65168.1| protein product [Podospora anserina]
  misc_feature (28)..(160): NCBI GI: 259481732 Blast Desc: TPA: mitochondrial protein Fmp26, (AFU_orthologue; AFUA_6G12860) [Aspergillus nidulans FGSC A4]
  misc_feature (71)..(160): NCBI GI: 226278426 Blast Desc: conserved [Paracoccidioides brasiliensis Pb01]
  misc_feature (71)..(160): NCBI GI: 239608112 Blast Desc: mitochondrial protein Fmp26 [Ajellomyces dermatitidis ER-3]
  misc_feature (71)..(160): NCBI GI: 261203713 Blast Desc: mitochondrial protein Fmp26 [Ajellomyces dermatitidis SLH14081] gi|239586855|gb|EEQ69498.1| mitochondrial protein Fmp26 [Ajellomyces dermatitidis SLH14081]
  misc_feature (71)..(160): NCBI GI: 225560871 Blast Desc: conserved [Ajellomyces capsulatus G186AR]
  misc_feature: Useful for introducing or modulating the production of volatile compounds
MRSVASSLVRRGRLGSIGLGRGGYVCRQCRQIQISSTPSTESPPPTTSRDVFSSGSIGSTSDSYSSRDVADVRFEVVGAPYSLLSVSLSASQRLYTRRGTLVAVSGKPQNAQSTLSVLSPATRALTGVPFLYQRITSTTPLTALVATKSPTTTFHVLRLD

SEQ ID NO: 4489 - DNA, 1089 bp, Muscodor strobelii
  misc_feature: SGI EST ID NO. CUFF.11451.1
  misc_feature: Variant of the nucleotide sequence at SEQ ID NO 4487
tgttgtcacctgtgatgtgatgagatgcgtggttgatgcggtgagtaaggtaaatggcttccagttgtatgcgcaggtcatcggctctataggtacctaccttacttagctcatgctgaaactgatcgcaggcgcagatgtttactccctggccgggagggctactaattgatagattacatcaagtcgagcaatgacgccagcgccgtgaagcaggacgacgtggccgaagcaagtttcatatgcgatgacttacacgttatgaagcttgaagattgattatgatatggcgctaagtggcccaccaaaggcaggagtatcgggagtatggctatttagggagttgtcgtagggcaagtggaaggaaagcacgattgatgatatgcaggcgaagactggtgggcaggcagggactgcttacctggtaaggggaaagctgggaaagctgggaaagtggcatgtgcggaagggtgcagccgaaagctacctacctaagctacagctgccgcaacctagctacactcaacatctagccgcaactatcttcgccaacgtcgccgatgaccacaacacaccggccctagccctagccccggagagtgtcttgcgatgcgcagtgtcgcctcgtcgctggtcaggagaggccgcctcgggtcaattggcctgggcagaggtggctacgtgtgtcgccagtgcagacagatccagatcagctcgacgccctcgaccgagtcaccgccgccgacaacgtcacgagatgtctttagtagtggcagcattggcagtactagtgacagctacagctccagagacgtcgccgatgtacggttcgaggtggtcggggcgccctactcgctgctgtcggtgtcgctgtcggcctcgcagcggctctacacacgacgcggcaccctcgtcgccgtctcgggcaagccccagaacgcgcagtcgacgctctccgtcctgtcccccgccacccgcgccctgaccggcgtgcccttcctctaccagcgcatcacctccaccacgcccctcaccgccctcgtcgccaccaagtccccgaccaccaccttccacgtcctccgcctcgac

SEQ ID NO: 4490 - DNA, 1140 bp, Muscodor strobelii
  misc_feature: SGI cDNA ID NO. 561187
  misc_feature: Encodes the peptide sequence at SEQ ID NO 4491
atgacgtcggcaaatcggatcgcacagctgtctgctattattgctcagagcactgcgctgatcgatgattacttcgtccagaacaagctgccaacgccttccctcgagacgaatgccttgcccgaatacaattggactgcctacgtcagcgtgaaagcaattctacgcttcaaagttgatcagtctttcacagtcggcgaaactacttcattcgctgcgatgtccaagtcttccggtcttgacgaatggattgtcaagcggctcgtgagacatgcgatcatcaatcatcgcttctttcaagaggaagctccgggtgtgatatcgcattctgcgttgacggcggtgttggtgaaagatccggaagctaggaacaaactcgtagttgaattagatgagttttggccggctggcgttatgatggccgacgcgatggaaaagtggcctaactcagaggaaaacaatgaaacgggattcgcgttggctaacaacagtgagatggggatgtttgattatctcgccgctcatccagaccgtagagctagattcggacgatttttccaaggtcccgatccatcgacaacggaggtgcttgatgagcaccactgggcggacaagaagacagtagtggacgtcggaggatctcacggcagtgttgccattgccatcgctgagcgatttcccaatatgagctgcaccgtccaggatctccctaatactatcgccaatggggaatcccagcttccagagcgtcttaaggatagagtcaagtacatggcgcacgacttcttcacgccccagacaattacagcggatgtgtactatttccgaagcatatttcataactgggcagacaaatactgcgtgaaaattcttcgaaatttgatacctgccctccgacccggcgcgaaggtcatcatccacgagcgcgttcttccagggcatgagaagctgaagactctggaggcactgagagccataaatcttgatgtcggcatgcaacagctattgaacgctaaggagcgggaactcccggaatggcaggagttattcgagcaggccgatccgaggtttcgctacgtcagtgctcatcacggtcccagatctgatagatggatcgtcgagatagaatggacatcttaa

SEQ ID NO: 4491 - protein, 379 aa, Muscodor strobelii
  misc_feature: SGI Peptide ID NO. 561187
  misc_feature (102)..(351): Pfam Id: PF00891 Pfam Desc: O-methyltransferase
  misc_feature (166)..(351): Pfam Id: PF00891 Pfam Desc: O-methyltransferase
  misc_feature (5)..(377): NCBI GI: 212536596 Blast Desc: O-methyltransferase, [Penicillium marneffei ATCC 18224] gi|210070853|gb|EEA24943.1| O-methyltransferase, [Penicillium marneffei ATCC 18224]
  misc_feature (1)..(377): NCBI GI: 169613869 Blast Desc: SNOG_10068 [Phaeosphaeria nodorum SN15] gi|111061283|gb|EAT82403.1| SNOG_10068 [Phaeosphaeria nodorum SN15]
  misc_feature (6)..(377): NCBI GI: 116192635 Blast Desc: CHGG_06035 [Chaetomium globosum CBS 148.51] gi|88181948|gb|EAQ89416.1| CHGG_06035 [Chaetomium globosum CBS 148.51]
  misc_feature (2)..(377): NCBI GI: 212534482 Blast Desc: O-methyltransferase, [Penicillium marneffei ATCC 18224] gi|210069796|gb|EEA23886.1| O-methyltransferase, [Penicillium marneffei ATCC 18224]
  misc_feature (49)..(377): NCBI GI: 242813653 Blast Desc: hydroxyindole O-methyltransferase, [Talaromyces stipitatus ATCC 10500] gi|218714548|gb|EED13971.1| hydroxyindole O-methyltransferase, [Talaromyces stipitatus ATCC 10500]
  misc_feature (1)..(377): NCBI GI: 242800307 Blast Desc: O-methyltransferase, [Talaromyces stipitatus ATCC 10500] gi|218716905|gb|EED16326.1| O-methyltransferase, [Talaromyces stipitatus ATCC 10500]
  misc_feature (51)..(377): NCBI GI: 238507580 Blast Desc: O-methyltransferase, [Aspergillus flavus NRRL3357] gi|220688510|gb|EED44862.1| O-methyltransferase, [Aspergillus flavus NRRL3357]
  misc_feature (54)..(377): NCBI GI: 242813658 Blast Desc: hydroxyindole O-methyltransferase, [Talaromyces stipitatus ATCC 10500] gi|218714549|gb|EED13972.1| hydroxyindole O-methyltransferase, [Talaromyces stipitatus ATCC 10500]
  misc_feature (3)..(377): NCBI GI: 242815122 Blast Desc: O-methyltransferase, [Talaromyces stipitatus ATCC 10500] gi|218714847|gb|EED14270.1| O-methyltransferase, [Talaromyces stipitatus ATCC 10500]
  misc_feature (3)..(377): NCBI GI: 212545252 Blast Desc: O-methyltransferase, [Penicillium marneffei ATCC 18224] gi|210065749|gb|EEA19843.1| O-methyltransferase, [Penicillium marneffei ATCC 18224]
  misc_feature (31)..(357): SWISSPROT Homolog: EC 2.1.1.110 Sterigmatocystin 8-O-methyltransferase
MTSANRIAQLSAIIAQSTALIDDYFVQNKLPTPSLETNALPEYNWTAYVSVKAILRFKVDQSFTVGETTSFAAMSKSSGLDEWIVKRLVRHAIINHRFFQEEAPGVISHSALTAVLVKDPEARNKLVVELDEFWPAGVMMADAMEKWPNSEENNETGFALANNSEMGMFDYLAAHPDRRARFGRFFQGPDPSTTEVLDEHHWADKKTVVDVGGSHGSVAIAIAERFPNMSCTVQDLPNTIANGESQLPERLKDRVKYMAHDFFTPQTITADVYYFRSIFHNWADKYCVKILRNLIPALRPGAKVIIHERVLPGHEKLKTLEALRAINLDVGMQQLLNAKERELPEWQELFEQADPRFRYVSAHHGPRSDRWIVEIEWTS

SEQ ID NO: 4492 - DNA, 907 bp, Muscodor strobelii
  misc_feature: SGI EST ID NO. CUFF.11410.0
  misc_feature: Variant of the nucleotide sequence at SEQ ID NO 4490
caattggatgccttcggggtataaactattcaccatgacgtcggcaaatcggatcgcacagctgtctgctattattgctcagagcactgcgctgatcgatgattacttcgtccagaacaagctgccaacgccttccctcgagacgaatgccttgcccgagttgcctacccagacaacgctattgatatcaaggctgccaaatttgcggcgattgaagcttgcgaggagctaaaagccttgttgactggtccgaaagaattgctcagatacaattggactgcctacgtcagcgtgaaagcaattctacgcttcaaagttgatcagtctttcacagtcggcgaaactacttcattcgctgcgatgtccaagtcttccggtcttgacgaatggattgtcaagcggctcgtgagacatgcgatcatcaatcatcgcttctttcaagaggaagctccgggtgtgatatcgcattctgcgttgacggcggtgttggtgaaagatccggaagctaggaacaaactcgtagttgaattagatgagttttggccggctggcgttatgatggccgacgcgatggaaaagtggcctaactcagaggaaaacaatgaaacgggattcgcgttggctaacaacagtgagatggggatgtttgattatctcgccgctcatccagaccgtagagctagattcggacgatttttccaaggtcccgatccatcgacaacggaggtgcttgatgagcaccactgggcggacaagaagacagtagtggacgtcggaggatctcacggcagtgttgccattgccatcgctgagcgatttcccaatatgagctgcaccgtccaggatctccctaatactatcgccaatggggaatcccagcttccagagcgtcttaaggatagagtca

SEQ ID NO: 4493 - DNA, 912 bp, Muscodor strobelii
  misc_feature: SGI cDNA ID NO. 561188
  misc_feature: Elevated expression when VOC is produced
  misc_feature: Encodes the peptide sequence at SEQ ID NO 4494
atgcgtggacgcggaggccctcgccctcatcgcggcagagcaacgtcggcaccgtggagtcgattgaagcctgttgaccttgatcccctcgacgcctacggcctgccctcgaagggcgacaacagactcctagactcgaagacacaggaacgatactacaccaagattgtcgagcgctatatgaccttctgctccgatgctggggagcgtgatgagctgctccgccgattcgcatcgctgaatctgtccttgaccaaggaggagacgcgcgcagacacacgcaaagatggtgctgtgcgagcagcgccgtcgtccgataactccaaggcgctctccgatgtcctcactgcacttaggaaactccgcgagggcattgttgcctcgaagcgcagtgacgactttgccattcaagcatatctgttctgcatacgactatccatacttgtgaagcatcatgagtcatatcacccggcagtattgcacttgctgcgccgaattcatcctatccatagcatgactactatcgaattcaacgaagtcgtagcttatttagtgcttgacgctgcctgtagacgaaacaacttaagtgaagcttttgctctccggcatcaataccgcctaaaagactccaaggttgacgctatactggatgccctcgctcacgacaactatgtccagttcaagcggctcaggcatagtgtagacggacacagggcgaaacttctcgaatactcagaggagacgatgcggcggcacctgctcaaatgcttcggtaggacctacctgagcgtagatctgaaatttctcgagacatctgctagtctaccttggactcgcctagttgctgaagacggtgttggatggcagctcgatggaggcaatgtcaccattagaaaggtcaaggccaagtaa

SEQ ID NO: 4494 - protein, 303 aa, Muscodor strobelii
  misc_feature: SGI Peptide ID NO. 561188
  misc_feature (8)..(303): NCBI GI: 261357760 Blast Desc: conserved [Verticillium albo-atrum VaMs.102]
  misc_feature (12)..(291): NCBI GI: 39940328 Blast Desc: MGG_05076 [Magnaporthe grisea 70-15] gi|145010670|gb|EDJ95326.1| MGG_05076 [Magnaporthe grisea 70-15]
  misc_feature (12)..(303): NCBI GI: 85106094 Blast Desc: NCU07963 [Neurospora crassa OR74A] gi|28923691|gb|EAA32860.1| [Neurospora crassa OR74A]
  misc_feature (12)..(303): NCBI GI: 154314658 Blast Desc: BC1G_04038 [Botryotinia fuckeliana B05.10] gi|150848660|gb|EDN23853.1| BC1G_04038 [Botryotinia fuckeliana B05.10]
  misc_feature (19)..(300): NCBI GI: 171676962 Blast Desc: protein product [Podospora anserina] gi|170936548|emb|CAP61208.1| protein product [Podospora anserina]
  misc_feature (43)..(303): NCBI GI: 256721974 Blast Desc: NECHADRAFT_104662 [Nectria haematococca mpVI 77-13-4]
  misc_feature (106)..(303): NCBI GI: 46111787 Blast Desc: FG02775.1 [Gibberella zeae PH-1]
  misc_feature (1)..(302): NCBI GI: 189205108 Blast Desc: conserved [Pyrenophora tritici-repentis Pt-1C-BFP] gi|187985988|gb|EDU51476.1| conserved [Pyrenophora tritici-repentis Pt-1C-BFP]
  misc_feature (21)..(298): NCBI GI: 238838208 Blast Desc: conserved [Microsporum canis CBS 113480]
  misc_feature (20)..(303): NCBI GI: 212527052 Blast Desc: conserved [Penicillium marneffei ATCC 18224] gi|210073081|gb|EEA27168.1| conserved [Penicillium marneffei ATCC 18224]
  misc_feature: Useful for introducing or modulating the production of volatile compounds
MRGRGGPRPHRGRATSAPWSRLKPVDLDPLDAYGLPSKGDNRLLDSKTQERYYTKIVERYMTFCSDAGERDELLRRFASLNLSLTKEETRADTRKDGAVRAAPSSDNSKALSDVLTALRKLREGIVASKRSDDFAIQAYLFCIRLSILVKHHESYHPAVLHLLRRIHPIHSMTTIEFNEVVAYLVLDAACRRNNLSEAFALRHQYRLKDSKVDAILDALAHDNYVQFKRLRHSVDGHRAKLLEYSEETMRRHLLKCFGRTYLSVDLKFLETSASLPWTRLVAEDGVGWQLDGGNVTIRKVKAK

SEQ ID NO: 4495 - DNA, 2498 bp, Muscodor strobelii
  misc_feature: SGI EST ID NO. CUFF.11419.0
  misc_feature: Variant of the nucleotide sequence at SEQ ID NO 4493
ttgagagatatgaataggcgacaaaagcgttggcggcccatatggcgaatgaacgattgggttgcacgcaacacagcattgcagcgctacatggcccattgcgaccgcctgaatattgtccgccttcggttggttgcatcgcatctcacagcgctcctgctagcttcgtctcatttgaatacctcaagcaggtacaatgataattattcggcctttcgtccatgaagcgaaatgcgaaaagtggttgtcgaacgatcaaccaactgtcaagattgatctgtttggtgtaggcaggtggacgactccgaggcagggttcgagccagcaatgatcgcaagtcgagatgaacgtcataacctaggccactctgtgtttggcggaggctttcaatgagaatgctgatgccgagatgcatatttctgggcgcgcatccaaagcaggaagttgttgacgacaaacagtttccaacaagcgcgacttggtcaatcgccgaattgctggtggagtattgagttaggcgtgtgtttcatggggtgaggttggtgttttatggttcctttcagccattggaaaccccgcagcgcgactggcagggctccccgcgaccgtaacaaaacaatactgatcaccacatcacactgcactccagagactcaccagtgagtgcgtgtgcctctgttgccaacgacgacaattgctatgacttgaagatgcgtggacgcggaggccctcgccctcatcgcggcagagcaacgtcggcaccgtggagtcgattgaagcctgttgaccttgatcccctcgacgcctacggcctgccctcgaagggcgacaacagactcctagactcgaagacacaggaacgatactacaccaagattgtcgagcgctatatgaccttctgctccgatgctggggagcgtgatgagctgctccgccgattcgcatcgctgaatctgtccttgaccaaggaggagacgcgcgcagacacacgcaaagatggtgctgtgcgagcagcgccgtcgtccgataactccaaggcgctctccgatgtcctcactgcacttaggaaactccgcgagggcattgttgcctcgaagcgcagtgacgactttgccattcaagcatatctgttctgcatacgactatccatacttgtgaagcatcatgagtcatatcacccggcagtattgcacttgctgcgccgaattcatcctatccatagcatgactactatcgaattcaacgaagtcgtagcttatttagtgcttgacgctgcctgtagacgaaacaacttaagtgaagcttttgctctccggcatcaataccgcctaaaagactccaaggttgacgctatactggatgccctcgctcacgacaactatgtccagttcaagcggctcaggcatagtgtagacggacacagggcgaaacttctcgaatactcagaggagacgatgcggcggcacctgctcaaatgcttcggtaggacctacctgagcgtagatctgaaatttctcgagacatctgctagtctaccttggactcgcctagttgctgaagacggtgttggatggcagctcgatggaggcaatgtcaccattagaaaggtcaaggccaagtaatttcccactatcgatacccctaacagactagtcaatctgagattgactgcttttctctcttgccacaaatggtactagaaggctagaaatacacatgatctcttgcactctagctattgacccatggatcgcacaacagtccgatcgtttcggcccaccagttaatcagcctagttgcgaggcctaatctcgtctatatttcataggtgtatcacaataggagacaggacagcttgggcgacagtatcagggctttgatgtcggtaaactagttccgctatcatgacatattatggcttatccgacacgccttattaccagaggataggcacctcggtcatcatgcccttcatgatctcctagcattcttcgccaattcgtggaggttgacagaagcgaacgtagcattccccggacgctcactttctaccgttaagtctgccagcaactccctttagaatcaactgagtacgcgtcatgccaatcgtaaacacgcagacgtggtccccgacccgaatatgtgccactctattcccatttcctgcgactacgcctctatttgattatactcgcggttgggggtcgtcttttgaagtcatcggctcatcagaatccatacgactcgatacgactaagacttctgcactgttgtcactcagacgtgtatacataggtttacaaaagagatcaacggcactttcctcttcgaaagatatcgacatccgacatccggcctcttgggaaacctgaaagcataagttgatgtcgctgaagcattagtatatcttatctgcgactacggtcttgagatcatcaactctccatccctttcgtaactgatcgcctaacccgaagcttgaagctcgttgcttgcac

SEQ ID NO: 4496 - DNA, 1992 bp, Muscodor strobelii
  misc_feature: SGI cDNA ID NO. 561189
  misc_feature: Encodes the peptide sequence at SEQ ID NO 4497
atgcttggactggttgtaacctgggcgattttcgccattggaatagtcgtctgtgctcatcagccatggtttaactatatcaacagtccaagtaccagaactgtgaagccaaatggtattcacgcattgtccggggatgtcgtagtgaccttcgcccaagatggaacatacgtgcttcgaatggcccctgggtctcagatatccctagacttcggctacgttggaggactgttgagtatgaagacagagacatccacagagaaacaacagttctcgtttgctttctcagaatcgccgctctttactcgggcgatatcagatgatacgggagctgtatatacccaagactacgaccaggccctgaatgtcacagtacctgcaggtatctttaactacaacatgcccccgcaaagattcagaggtggtttcaagtttgtgacgatacatgcgtatgaacaggtcgttatttcgaatctcgtttgcaacctcggatactctccctctcaacaagatcctagtgaatatgcaggctacttctatacgggtgaagacgacttgctagtcaggatttggtatggaggcgtctttactgcacaaactaatatcgcccctccaaacactagtcgctggctgccccaagtacagaatggatgggcttataatgcctcacttggagctcatggaccaatgattctggatggtgcgaagcgcgaccgtgcggtttggcctggagatcttggaatcgcaggaacaactgcattcttgggactgggagatgttggcctcgaatcgatctactacgcactagagaccatgtttctgtaccaaaataagacagatggtctcctcccattttctggaccaactaccaattcttggctgatgggatcgagaagcgacacgtaccatgcttgggtgcttgtcgcttgttacaattatgctatttacactagcaatgcgacctggcttgatctacactgggatcaaatagaattaggcgcaggctatatcacgagggccataaataattcgattggcttagcagagcaagtgaatgataatgactgggcgcgcattggagggggagggctcaacagtgctctgaacgcgctaaactatcatgcattgtcgagtcttggttctctcgcgctcgacacttcgactgctcgtaaccgtagagcggtcttaggtaagaaatggatgcaaacagctgcactactcaaggactccttcaatacggttctatgggatgacgatatgggtctattccgagacaatgagaccgaagcaggggcgcaactatttccacaggacggcaactctttggcgctcttctacaacttaacgaagagccccgagcaggccgccacggtctccaaagggttgacaagaaattggaatgagataggctcggtaacaccggagttgccggacacaatctcgccattcatttcaggtatcgaggtactagggcactacactgctggttatccatcgacagcactgagtctgattcgccgaacttggggctacatgcttaactctcctctcatgacgggtacaaccttggtcgaaggcatgagcgcaaatgggtctttggcatatcgttccatgcgaggctacaactacgacagcgcatatactagcctttcgcatagttggtctactgggccaacgcaagctctcaccttcaaggcggtgggattggaaattgctagctggagaagatgggtattccgaccgcttcccggagatctgaaaagtctgagagcgggctatcagtcgcctctcggtgaattcgaagccgtggttagcgtcggacatgatttcattgatgctgatgttgttactccgctaagtatggagggctcaattaccctgccaggttcgtgcaggcgggtgattgtgaatgggcaaccgtatcaagatggtcacgaagtacaaggaggcaaactgaggatacaagggtcatcttgtgattttgcttcttag

SEQ ID NO: 4497 - protein, 663 aa, Muscodor strobelii
  misc_feature: SGI Peptide ID NO. 561189
  misc_feature (58)..(627): Pfam Id: PF05592 Pfam Desc: Bacterial alpha-L-rhamnosidase
  misc_feature (5)..(663): NCBI GI: 261360866 Blast Desc: bacterial alpha-L-rhamnosidase domain-containing protein [Verticillium albo-atrum VaMs.102]
  misc_feature (22)..(628): NCBI GI: 242214149 Blast Desc: [Postia placenta Mad-698-R] gi|220728020|gb|EED81923.1| [Postia placenta Mad-698-R]
  misc_feature (22)..(650): NCBI GI: 119496565 Blast Desc: bacterial alpha-L-rhamnosidase domain protein [Neosartorya fischeri NRRL 181] gi|119413218|gb|EAW23159.1| bacterial alpha-L-rhamnosidase domain protein [Neosartorya NRRL
  misc_feature (23)..(628): NCBI GI: 238503818 Blast Desc: alpha-L-rhamnosidase B, [Aspergillus flavus NRRL3357] gi|220690612|gb|EED46961.1| alpha-L-rhamnosidase B, [Aspergillus flavus NRRL3357]
  misc_feature (22)..(648): NCBI GI: 156034396 Blast Desc: SS1G_13501 [Sclerotinia sclerotiorum 1980] gi|154698904|gb|EDN98642.1| SS1G_13501 [Sclerotinia sclerotiorum 1980]
  misc_feature (22)..(650): NCBI GI: 70991026 Blast Desc: alpha-L-rhamnosidase B [Aspergillus fumigatus Af293] gi|66847994|gb|EAL88324.1| alpha-L-rhamnosidase B, [Aspergillus fumigatus Af293] gi|159130836|gb|EDP55949.1| alpha-L-rhamnosidase
  misc_feature (22)..(602): NCBI GI: 115389382 Blast Desc: conserved [Aspergillus terreus NIH2624] gi|114194592|gb|EAU36292.1| conserved [Aspergillus terreus NIH2624]
  misc_feature (23)..(654): NCBI GI: 212527780 Blast Desc: alpha-L-rhamnosidase B, [Penicillium marneffei ATCC 18224] gi|210073445|gb|EEA27532.1| alpha-L-rhamnosidase B, [Penicillium marneffei ATCC 18224]
  misc_feature (23)..(654): NCBI GI: 242784641 Blast Desc: alpha-L-rhamnosidase B, [Talaromyces stipitatus ATCC 10500] gi|218720575|gb|EED19994.1| alpha-L-rhamnosidase B, [Talaromyces stipitatus ATCC 10500]
  misc_feature (22)..(628): NCBI GI: 145255353 Blast Desc: An18g04800 [Aspergillus niger] gi|134084529|emb|CAK43282.1| protein product [Aspergillus niger]
MLGLVVTWAIFAIGIVVCAHQPWFNYINSPSTRTVKPNGIHALSGDVVVTFAQDGTYVLRMAPGSQISLDFGYVGGLLSMKTETSTEKQQFSFAFSESPLFTRAISDDTGAVYTQDYDQALNVTVPAGIFNYNMPPQRFRGGFKFVTIHAYEQVVISNLVCNLGYSPSQQDPSEYAGYFYTGEDDLLVRIWYGGVFTAQTNIAPPNTSRWLPQVQNGWAYNASLGAHGPMILDGAKRDRAVWPGDLGIAGTTAFLGLGDVGLESIYYALETMFLYQNKTDGLLPFSGPTTNSWLMGSRSDTYHAWVLVACYNYAIYTSNATWLDLHWDQIELGAGYITRAINNSIGLAEQVNDNDWARIGGGGLNSALNALNYHALSSLGSLALDTSTARNRRAVLGKKWMQTAALLKDSFNTVLWDDDMGLFRDNETEAGAQLFPQDGNSLALFYNLTKSPEQAATVSKGLTRNWNEIGSVTPELPDTISPFISGIEVLGHYTAGYPSTALSLIRRTWGYMLNSPLMTGTTLVEGMSANGSLAYRSMRGYNYDSAYTSLSHSWSTGPTQALTFKAVGLEIASWRRWVFRPLPGDLKSLRAGYQSPLGEFEAVVSVGHDFIDADVVTPLSMEGSITLPGSCRRVIVNGQPYQDGHEVQGGKLRIQGSSCDFAS

SEQ ID NO: 4498 - DNA, 447 bp, Muscodor strobelii
  misc_feature: SGI cDNA ID NO. 561190
  misc_feature: Encodes the peptide sequence at SEQ ID NO 4499
atgaagccatcatttttcctgcttgccatcttcacggccctttccagtggctttgcactacctcaagcgggcggtgctgatgtcctacatgttagagacgtagcaccagtttccgacaagcaagttctatacacccgagctgatgacgattgggagctggtctattacatcgatgctaatgatggcgatggccaatgcggcggcgcaacgacgtcacaatccggttcagctggtacttgcaactctgttccgagcggaaaagtctgcgtggacatcaaggtcaatgtcggctttgcgtcctgtacattcaattgggtccgagacgggtctgactgcaatagtggtactatcgactcagaagtaacggtcaacgggggcgctacaaatacaggctacaacatcggcgataaagttgtattcgtgtcagctggctgtaatgacgcgtag

SEQ ID NO: 4499 - protein, 148 aa, Muscodor strobelii
  misc_feature: SGI Peptide ID NO. 561190
MKPSFFLLAIFTALSSGFALPQAGGADVLHVRDVAPVSDKQVLYTRADDDWELVYYIDANDGDGQCGGATTSQSGSAGTCNSVPSGKVCVDIKVNVGFASCTFNWVRDGSDCNSGTIDSEVTVNGGATNTGYNIGDKVVFVSAGCNDA

SEQ ID NO: 4500 - DNA, 209 bp, Muscodor strobelii
  misc_feature: SGI cDNA ID NO. 561191
  misc_feature: Encodes the peptide sequence at SEQ ID NO 4501
atgagcaggtcgccgaccgatgccgacgcggcccagcacacccccgagccctcgcgccgccagtccatccctctccaagacctcggctggccaccgactcatgccctccagcagcaacatggcagcggcggcggcggcggcggaatccctggcggaccgcaacctgccggccatctcgacctactgggaggggcagccggttcacgcac

SEQ ID NO: 4501 - protein, 69 aa, Muscodor strobelii
  misc_feature: SGI Peptide ID NO. 561191
MSRSPTDADAAQHTPEPSRRQSIPLQDLGWPPTHALQQQHGSGGGGGGIPGGPQPAGHLDLLGGAAGSR

SEQ ID NO: 4502 - DNA, 528 bp, Muscodor strobelii
  misc_feature: SGI EST ID NO. CUFF.11448.0
  misc_feature: Variant of the nucleotide sequence at SEQ ID NO 4500
tcgccgtcagcctcaatccttctcaccttggacacacacaggtacagcacgcagtctctctcttgcatcacaaaccacgccgtcgctcgttgcccctcagcacgtctgtacaatctccgttcgatttctctctgtatcttcatgctagacggatcgtttcaattcgcgtcgttcgcactctcatgaccgcccgcccgcactagtgcccggattcccacattcccacattcccataacgagtcgcccaagacatttcggcacgcagcgacaccccgatgagcatgaccgtcaaccggccctagtccttcttcttcttcttctttttgtttctcttctcctccaccattttgttcgcgccggcccacctgtgcctgtgcttatgatccaggcaacatcatgagcaggtcgccgaccgatgccgacgcggcccagcacacccccgagccctcgcgccgccagtccatccctctccaagacctcggctggccaccgactcatgccctccagcagcaacatggcagcggcggc

SEQ ID NO: 4503 - DNA, 2451 bp, Muscodor strobelii
  misc_feature: SGI cDNA ID NO. 561192
  misc_feature: Reduced expression when VOC is produced
  misc_feature: Encodes the peptide sequence at SEQ ID NO 4504
atggtctcctcacgcaagcgccccgcgcccgacacgcaaacgcacaaccgcaacgacgacacgcccgagccctctctgctgagccgcatccgcaactcgtggcatctggccaacctgttccagtggatatacctctttggccgcgtcgtcaagatcgacgacagtctcggcatagacgatctcgaggccgagtgcctcaagcccaagtcccccgtcctcgtcaacatcggcctcagtctgctcaagtttgtgtcttctcatcgcggcctgacccccgatttgttcgacgagtacacccgccgtcaatacgtcgccaaggccccagagcgcaacccctttggcaccgatgaggcccccgccagattcgatgacttcgatgcgttgctcaagctccgcgtcctccagcaactcacgcaatgggtgatgctccaccccgagcgcattcgtgagaagatggacgagcagaagcctagcgatcagactgactggcgcatcgagcccgtaggctgggatagcgacgatcgcacatactacattctggacgacaaccgcctgtatcgttcgacccctgctccgcctgtcgtgcctgtctggaagccaaagaagaacaccaagaaggcaaaagccgcggcacgtgcagccaagcggcgtcgcacttcacgccatgccgcgcaagacagcaacaccaacgacgacgagcacgactcggacgccgaagaggtccccacgccagacgacgatggcctcggcggtgccaaatgggaatgcctcggagctgggctggagcaggtccaggctttcctcgccacgttgcgcaagacacgcgatgaaaacgagaaggttctccggcacaccattgccgagcacctactgcccctcttagagaagcaggaggagtcgcgcaagcgcaaagccctacagagggaaaaggagcttctcagtctggagaagatggcccatgccaagcgatcaagccgtcttgccaacaaggccgagcagcaaaaactcgaagagcaggcaagacaggaagaagagagacagcggaaagaggccagcgcagccaagcaagaggaacagaggcgcttgaggttggaggccgactacgacagccgagctagaacacgagacgagaggctgagagaacgggaggcccgccgattgcaacacgaagaagaacttgcacagctctccgaaggcagcagagggccgagccaagacgcacgcatgtcccaacgacagcgcaaggcagagatccagaagactcaacaagctcttcgcgagctggaaggcgaagcggatgactggatcttcgactgcatatgcggtgtctacggccaagtcgacgacggcacccacagcgttgcttgcgagaggtgcaatgtctggcaacatagcaaatgcttgggcatcagtgaggacgaggctgaacggccagatttccatttcatttgcaagagctgccaccgcccgccaccgacacagacacattcgcaaggcggcaacccatccgcccttcgggtcaagatcaccaccaagcccaagcttcccgctgcacgctcagacggtgccaaacccccagcccaacatccgcctcaatcccttgagccgtcacacaaggccggcatcgtcatcgagctgcctcgaagcactgcgcaacacgcccagcaaccagtagctgacgatcaaatgcaattgcagccagccacgcagtcctccacgctcccgacgattcctaccaagtcagcaggaggtcagattcagaatcctccgcctctatcgccatatggcaatggagatggcctacacgccttctcatcgccgcatccggccttgtctccaccacaacagtcgcccaacaagtccagagcttattccactctccatcctgatcctttgttgccgacggcaaataatcaatcgtcttcagcggagaaaagagccgctttccagagtcctacagagacatcacccacggacatgccgccacatgctgatgcgccggcacccaccctaacagcgagatccgattctccgctcaggcagccatacaacgctgcgagtgactatttaaccattgcttcaccccctgctgtagcgcccccattgtcggccatgacctctcagactccaggccctagcgctcagggccaaattagtgctctctcgacgccacagctagacaagtctggccttgggcacctggataccccaagcctacccccaacgcggaatgggatttcaccttccaaacgctcgccgccgccccctcaacagatgagcaatggtttccactcatcgctccattcttcatcgcccgctcgggcgattctccctcccgtcgcagccttgtccccttcgccttctgagcagatcatgacacccccgattaagcatgcagatccctcgcgctcggggtcttatcagccggggagctttaatagtgatctttga

SEQ ID NO: 4504 - protein, 816 aa, Muscodor strobelii
  misc_feature: SGI Peptide ID NO. 561192
  misc_feature (438)..(490): Pfam Id: PF00628 Pfam Desc: PHD-finger
  misc_feature (1)..(804): NCBI GI: 164422770 Blast Desc: NCU09388 [Neurospora crassa OR74A] gi|157069814|gb|EAA34598.2| conserved [Neurospora crassa OR74A]
  misc_feature (1)..(809): NCBI GI: 156062134 Blast Desc: SS1G_01182 [Sclerotinia sclerotiorum 1980] gi|154696519|gb|EDN96257.1| SS1G_01182 [Sclerotinia sclerotiorum 1980]
  misc_feature (1)..(594): NCBI GI: 154318135 Blast Desc: BC1G_03235 [Botryotinia fuckeliana B05.10] gi|150842758|gb|EDN17951.1| BC1G_03235 [Botryotinia fuckeliana B05.10]
  misc_feature (1)..(489): NCBI GI: 261356569 Blast Desc: conserved [Verticillium albo-atrum VaMs.102]
  misc_feature (18)..(803): NCBI GI: 256735002 Blast Desc: NECHADRAFT_74403 [Nectria haematococca mpVI 77-13-4]
  misc_feature (23)..(809): NCBI GI: 116206906 Blast Desc: CHGG_02746 [Chaetomium globosum CBS 148.51] gi|88183343|gb|EAQ90811.1| CHGG_02746 [Chaetomium globosum CBS 148.51]
  misc_feature (72)..(803): NCBI GI: 171680303 Blast Desc: protein product [Podospora anserina] gi|170939778|emb|CAP65004.1| protein product [Podospora anserina]
  misc_feature (23)..(787): NCBI GI: 145229797 Blast Desc: An01g07820 [Aspergillus niger] gi|134055318|emb|CAK43880.1| protein product [Aspergillus niger]
  misc_feature (23)..(787): NCBI GI: 67526421 Blast Desc: AN3668.2 [Aspergillus nidulans FGSC A4] gi|40740686|gb|EAA59876.1| AN3668.2 [Aspergillus nidulans FGSC A4] gi|259481795|tpe|CBF75649.1| TPA: PHD finger domain protein,
  misc_feature (4)..(489): NCBI GI: 46108966 Blast Desc: FG01365.1 [Gibberella zeae PH-1]
  misc_feature: Useful for introducing or modulating the production of volatile compounds
MVSSRKRPAPDTQTHNRNDDTPEPSLLSRIRNSWHLANLFQWIYLFGRVVKIDDSLGIDDLEAECLKPKSPVLVNIGLSLLKFVSSHRGLTPDLFDEYTRRQYVAKAPERNPFGTDEAPARFDDFDALLKLRVLQQLTQWVMLHPERIREKMDEQKPSDQTDWRIEPVGWDSDDRTYYILDDNRLYRSTPAPPVVPVWKPKKNTKKAKAAARAAKRRRTSRHAAQDSNTNDDEHDSDAEEVPTPDDDGLGGAKWECLGAGLEQVQAFLATLRKTRDENEKVLRHTIAEHLLPLLEKQEESRKRKALQREKELLSLEKMAHAKRSSRLANKAEQQKLEEQARQEEERQRKEASAAKQEEQRRLRLEADYDSRARTRDERLREREARRLQHEEELAQLSEGSRGPSQDARMSQRQRKAEIQKTQQALRELEGEADDWIFDCICGVYGQVDDGTHSVACERCNVWQHSKCLGISEDEAERPDFHFICKSCHRPPPTQTHSQGGNPSALRVKITTKPKLPAARSDGAKPPAQHPPQSLEPSHKAGIVIELPRSTAQHAQQPVADDQMQLQPATQSSTLPTIPTKSAGGQIQNPPPLSPYGNGDGLHAFSSPHPALSPPQQSPNKSRAYSTLHPDPLLPTANNQSSSAEKRAAFQSPTETSPTDMPPHADAPAPTLTARSDSPLRQPYNAASDYLTIASPPAVAPPLSAMTSQTPGPSAQGQISALSTPQLDKSGLGHLDTPSLPPTRNGISPSKRSPPPPQQMSNGFHSSLHSSSPARAILPPVAALSPSPSEQIMTPPIKHADPSRSGSYQPGSFNSDL

SEQ ID NO: 4505 - DNA, 3171 bp, Muscodor strobelii
  misc_feature: SGI EST ID NO. CUFF.11560.1
  misc_feature: Variant of the nucleotide sequence at SEQ ID NO 4503
cgtcgcgtcatgacgccctcggatcatgtcgcgctagcaaaataccacatgtgctcgtcgctgtacctatcgtaggtagtccaccgatagcccgccattaaactctgactgctctatcggtctggcgtcggtctggttgccctcgcctgttcctcttcaacatcgctgttgtgcccgtcgacatcgtcctccgctgcctcgcgcgcccccttccgtttcgcctcccgcaaccgccgcgtccatcgccgtgtcgcaggtcggagccttgattgtcatgcaacgcccggcggccacagcacatcctctcctctcttgcccgccttgcacttcgtataaacctcggcactcgcgtcggtataccacctctggcactttggtgcaacggccgcgctcttccggctctgccactcgcacgtcgccgtcatggtctcctcacgcaagcgccccgcgcccgacacgcaaacgcacaaccgcaacgacgacacgcccgagccctctctgctgagccgcatccgcaactcgtggcatctggccaacctgttccagtggatatacctctttggccgcgtcgtcaagatcgacgacagtctcggcatagacgatctcgaggccgagtgcctcaagcccaagtcccccgtcctcgtcaacatcggcctcagtctgctcaagtttgtgtcttctcatcgcggcctgacccccgatttgttcgacgagtacacccgccgtcaatacgtcgccaaggccccagagcgcaacccctttggcaccgatgaggcccccgccagattcgatgacttcgatgcgttgctcaagctccgcgtcctccagcaactcacgcaatgggtgatgctccaccccgagcgcattcgtgagaagatggacgagcagaagcctagcgatcagactgactggcgcatcgagcccgtaggctgggatagcgacgatcgcacatactacattctggacgacaaccgcctgtatcgttcgacccctgctccgcctgtcgtgcctgtctggaagccaaagaagaacaccaagaaggcaaaagccgcggcacgtgcagccaagcggcgtcgcacttcacgccatgccgcgcaagacagcaacaccaacgacgacgagcacgactcggacgccgaagaggtccccacgccagacgacgatggcctcggcggtgccaaatgggaatgcctcggagctgggctggagcaggtccaggctttcctcgccacgttgcgcaagacacgcgatgaaaacgagaaggttctccggcacaccattgccgagcacctactgcccctcttagagaagcaggaggagtcgcgcaagcgcaaagccctacagagggaaaaggagcttctcagtctggagaagatggcccatgccaagcgatcaagccgtcttgccaacaaggccgagcagcaaaaactcgaagagcaggcaagacaggaagaagagagacagcggaaagaggccagcgcagccaagcaagaggaacagaggcgcttgaggttggaggccgactacgacagccgagctagaacacgagacgagaggctgagagaacgggaggcccgccgattgcaacacgaagaagaacttgcacagctctccgaaggcagcagagggccgagccaagacgcacgcatgtcccaacgacagcgcaaggcagagatccagaagactcaacaagctcttcgcgagctggaaggcgaagcggatgactggatcttcgactgcatatgcggtgtctacggccaagtcgacgacggcacccacagcgttgcttgcgagaggtgcaatgtctggcaacatagcaaatgcttgggcatcagtgaggacgaggctgaacggccagatttccatttcatttgcaagagctgccaccgcccgccaccgacacagacacattcgcaaggcggcaacccatccgcccttcgggtcaagatcaccaccaagcccaagcttcccgctgcacgctcagacggtgccaaacccccagcccaacatccgcctcaatcccttgagccgtcacacaaggccggcatcgtcatcgagctgcctcgaagcactgcgcaacacgcccagcaaccagtagctgacgatcaaatgcaattgcagccagccacgcagtcctccacgctcccgacgattcctaccaagtcagcaggaggtcagattcagaatcctccgcctctatcgccatatggcaatggagatggcctacacgccttctcatcgccgcatccggccttgtctccaccacaacagtcgcccaacaagtccagagcttattccactctccatcctgatcctttgttgccgacggcaaataatcaatcgtcttcagcggagaaaagagccgctttccagagtcctacagagacatcacccacggacatgccgccacatgctgatgcgccggcacccaccctaacagcgagatccgattctccgctcaggcagccatacaacgctgcgagtgactatttaaccattgcttcaccccctgctgtagcgcccccattgtcggccatgacctctcagactccaggccctagcgctcagggccaaattagtgctctctcgacgccacagctagacaagtctggccttgggcacctggataccccaagcctacccccaacgcggaatgggatttcaccttccaaacgctcgccgccgccccctcaacagatgagcaatggtttccactcatcgctccattcttcatcgcccgctcgggcgattctccctcccgtcgcagccttgtccccttcgccttctgagcagatcatgacacccccgattaagcatgcagatccctcgcgctcggggtcttatcagccggggagctttaatagtgatctttgatgccaattgtgccgggccgtctggctctcatcgagaaaatggaagtcgatgtagaatactaataaggcatacacgagtacaatcgtatgagatatgatagacagttgggccaggcgttaagcaagctaggccgaatgtgtagattaccaaacaacaaacatatcgactaaggccagtagctaaaaacatggatcggagcgtatccaggtagataagaatgacagaaagcattgagctaagaggcttagttcatgttcatgttcctgatactgaaaagctgaacgttcgactcgccgt

SEQ ID NO: 4506 - DNA, 1674 bp, Muscodor strobelii
  misc_feature: SGI cDNA ID NO. 561193
  misc_feature: Encodes the peptide sequence at SEQ ID NO 4507
atggtatctctctcgcagacatctcattacagcacaccggcaacatcacctcccacgccagtgcagcaagatggcatgacgactcgtagtgggcgggccataatgagagcaaccactgcgcagacgctcacgcgaccagcacgaatagaaaaatcgtcccctaagccgaaatcatcaagacgaaagacaaagaaaggagtcgacccggaccaatatgacaatacttcatttctccttgctgctcccttgagcgtactagtcaaagatctcactcatatcatcgacacggacatcgaagcatacgtaaatcgatctccagagacgcgacagcaagaagtggctgagtcaaagactggaaaagtgaaacgccctatgaatgcctttatgctgtaccgcaaggcataccagaatcggacgaaggagtggaaaaagcatgacgacatacggaagcgtgctgagcgtgccagtgaagggaaacccgaaaagggacacgacaatcatcaagtcatctcacaggtatgcgggatgagctggaatatggaaccacaagcattgcgggatcagtatgacgagtgggccaaggtcgagcgcaacaaccacaagaaggcgtttcccgattacaaattcgcgccggccaaggccaaaataaaaagactgggcgaatttgcaagcaaccccaaaggaggtccgccgtcccgcaatgcatcacggtcgcaacgttatatggatcatccggatggagactacatcctgccggggtactcgccaccatcgggatactctcgttccgtatacaactctccgtcacctgccttacagccggccgggctaccggcgggaacggcgtacgccgcacatgtacaacaacaactccaacatcacccatcatccttccaatactctaaccccggcaagccgcgaccggcagactacggcgcctcgctaggccatgaacaatactatcagcagagaagcgaatacgccccgcaggcttaccctcagcctcattcccatttgcatggatatggcggtcatccgtatatgcaacattctatccccgcttttgttgagaatgtgtttgtcaacaaggcgaattctccagcggcgtcctcttccttccacggatcgcccatcctcgatcaccaccaagcgtatagcgacctgatgggaacaccagcgtatactcatgcgcagctttcacgggcgcgaccgcaagtccatcagtccatcgaaccacaaatcgatccttccttgatgtcaacgccaccggatgccggagtcgttcctcacgaggatgcgtacgacgctctgggtcttttgggcgaatttggagccgatgggttgcagtcatatccgatggagccaggaacagcgagtggcgttgaggggggaagccattctgcatctccacatccgcaacaattcgagcaggcgtaccatacaccaaatgagaacgatgcatctacgccggcagagggagacgacaactcagccgtcaaagaggactcgccttttgaagtcccaaatgtagctggtgcggattctgatctcccttctaagctcgacaatccatcctcagactgggagacgacgcttggtggttctgccgattttggcctcgaggacatcgaccagttcttggggacgacgcacgatagtcctgtcggtgcttag

SEQ ID NO: 4507 - protein, 557 aa, Muscodor strobelii
  misc_feature: SGI Peptide ID NO. 561193
  misc_feature (121)..(208): Pfam Id: PF00505 Pfam Desc: HMG (high mobility group) box
  misc_feature (121)..(134): Pfam Id: PF00505 Pfam Desc: HMG (high mobility group) box
  misc_feature (10)..(370): NCBI GI: 261356568 Blast Desc: HMG box protein [Verticillium albo-atrum VaMs.102]
  misc_feature (10)..(323): NCBI GI: 156062092 Blast Desc: SS1G_01161 [Sclerotinia sclerotiorum 1980] gi|154696498|gb|EDN96236.1| SS1G_01161 [Sclerotinia sclerotiorum 1980]
  misc_feature (10)..(371): NCBI GI: 154297386 Blast Desc: BC1G_12097 [Botryotinia fuckeliana B05.10] gi|150858602|gb|EDN33794.1| BC1G_12097 [Botryotinia fuckeliana B05.10]
  misc_feature (10)..(213): NCBI GI: 116206904 Blast Desc: CHGG_02745 [Chaetomium globosum CBS 148.51] gi|88183342|gb|EAQ90810.1| CHGG_02745 [Chaetomium globosum CBS 148.51]
  misc_feature (1)..(420): NCBI GI: 171680305 Blast Desc: protein product [Podospora anserina] gi|170939779|emb|CAP65005.1| protein product [Podospora anserina]
  misc_feature (62)..(419): NCBI GI: 119184503 Blast Desc: CIMG_07042 [Coccidioides immitis RS]
  misc_feature (62)..(419): NCBI GI: 240109888 Blast Desc: HMG box domain containing protein [Coccidioides posadasii C735 delta SOWgp]
  misc_feature (12)..(241): NCBI GI: 46108968 Blast Desc: FG01366.1 [Gibberella zeae PH-1]
  misc_feature (11)..(311): NCBI GI: 164422772 Blast Desc: NCU09387 [Neurospora crassa OR74A] gi|157069815|gb|EAA34597.2| [Neurospora crassa OR74A]
  misc_feature (47)..(277): NCBI GI: 67526419 Blast Desc: AN3667.2 [Aspergillus nidulans FGSC A4] gi|40740685|gb|EAA59875.1| AN3667.2 [Aspergillus nidulans FGSC A4] gi|259481797|tpe|CBF75653.1| TPA: HMG box protein, (JCVI) A4]
MVSLSQTSHYSTPATSPPTPVQQDGMTTRSGRAIMRATTAQTLTRPARIEKSSPKPKSSRRKTKKGVDPDQYDNTSFLLAAPLSVLVKDLTHIIDTDIEAYVNRSPETRQQEVAESKTGKVKRPMNAFMLYRKAYQNRTKEWKKHDDIRKRAERASEGKPEKGHDNHQVISQVCGMSWNMEPQALRDQYDEWAKVERNNHKKAFPDYKFAPAKAKIKRLGEFASNPKGGPPSRNASRSQRYMDHPDGDYILPGYSPPSGYSRSVYNSPSPALQPAGLPAGTAYAAHVQQQLQHHPSSFQYSNPGKPRPADYGASLGHEQYYQQRSEYAPQAYPQPHSHLHGYGGHPYMQHSIPAFVENVFVNKANSPAASSSFHGSPILDHHQAYSDLMGTPAYTHAQLSRARPQVHQSIEPQIDPSLMSTPPDAGVVPHEDAYDALGLLGEFGADGLQSYPMEPGTASGVEGGSHSASPHPQQFEQAYHTPNENDASTPAEGDDNSAVKEDSPFEVPNVAGADSDLPSKLDNPSSDWETTLGGSADFGLEDIDQFLGTTHDSPVGA

SEQ ID NO: 4508 - DNA, 1263 bp, Muscodor strobelii
  misc_feature: SGI cDNA ID NO. 561194
  misc_feature: Reduced expression when VOC is produced
  misc_feature: Encodes the peptide sequence at SEQ ID NO 4509
atgtctgctgccgcgcttgaaaagcggttcgcagacctgctgcagcgtgtgaacctgctgcaggacgctgtcaaccagctcgatgacctcatccagcgactggccaccttcgacttccagccggcatccgcgcctcttgccggccccgaggatgccgacgtcgcctcggagctggccgacgaggtcagccaggtgctgcgcgagcacgaggaagacgtcgagctgctccgcgaggatgtgctcgacctgcacgcccgcgccgcctcgacccgccacgacagggcccgcctcgacgacggcctcgaccgactggcccgcgacttgcagcgccatcgccaggccttcaggaaggcacaggtcgctgcgagggccaatctgcggcaagcccagcggcgggagcgacacctgatgtatgcctcgttcgccgcgccaaggtccggccccgagtctcccgcccccggtgctaccccggatgtgaccgcgcccaatgtcgccactgctaccgcggctgctggtgccgcgatgcgttactcgtcccgtcgcggcccgccacgcgcctccgacatgtcccaagaagagcgcggcatccacgccaacgacgacgtcacccgggccatgagaaacgcccatgctctgatgcgccaggagctcaccaggagcaactttgcccaccagaccttgaccgagtcaactgctgctctcaacgacctctccgacaactactctgaccttcagtcgatgctcggccgctccggtgccttgctgagcaccttgctcaagagccagaagaccgacacctggtatctgcaatccgctctctacctcctcctcgtcaccactgcctggctatttttccgtcgccttctctggggccctacgtggtggttactttacctgcccttgaagctcaccatcaggacagttggcttgaccgttgctctggccatgggctcgcgtcgcaaccctcaccccgacgcacatctgactgattctggtgtgccacaagccagtatgaacaaccaggacgtccccactctgcagacgggcgaccccccggaagagtcagaagctgtcaagcaggatgaattattgttgaataagatcggcaaggaaattgatggctcggccaagatcaagttcccagaggagtacgagggagaaccgattctaagggaccgtcagccgggggaggtgccaaatccaaagaagcggatgatggaagacccgcctccgggagagaacagagtcaaggaagagctctag

SEQ ID NO: 4509 - protein, 420 aa, Muscodor strobelii
  misc_feature: SGI Peptide ID NO. 561194
  misc_feature (197)..(288): Pfam Id: PF03908 Pfam Desc: Sec20
  misc_feature (10)..(409): NCBI GI: 256734540 Blast Desc: NECHADRAFT_74904 [Nectria haematococca mpVI 77-13-4]
  misc_feature (13)..(409): NCBI GI: 39951915 Blast Desc: MGG_01600 [Magnaporthe grisea 70-15] gi|145020553|gb|EDK04682.1| MGG_01600 [Magnaporthe grisea 70-15]
  misc_feature (10)..(323): NCBI GI: 85116956 Blast Desc: NCU00953 [Neurospora crassa OR74A] gi|28926950|gb|EAA35910.1| [Neurospora crassa OR74A] gi|38567025|emb|CAE76323.1| [Neurospora crassa]
  misc_feature (13)..(308): NCBI GI: 189203953 Blast Desc: Sec20 domain containing protein [Pyrenophora tritici-repentis Pt-1C-BFP] gi|187985411|gb|EDU50899.1| Sec20 domain containing protein [Pyrenophora tritici-repentis
  misc_feature (13)..(308): NCBI GI: 169602847 Blast Desc: SNOG_04426 [Phaeosphaeria nodorum SN15] gi|160706272|gb|EAT88186.2| SNOG_04426 [Phaeosphaeria nodorum SN15]
  misc_feature (10)..(409): NCBI GI: 156058107 Blast Desc: SS1G_04785 [Sclerotinia sclerotiorum 1980] gi|154702570|gb|EDO02309.1| SS1G_04785 [Sclerotinia sclerotiorum 1980]
  misc_feature (10)..(405): NCBI GI: 261356040 Blast Desc: Sec20 domain-containing protein [Verticillium albo-atrum VaMs.102]
  misc_feature (13)..(420): NCBI GI: 171696158 Blast Desc: protein product [Podospora anserina] gi|170948321|emb|CAP60485.1| protein product [Podospora anserina]
  misc_feature (13)..(420): NCBI GI: 121705186 Blast Desc: Sec20 domain protein [Aspergillus clavatus NRRL 1] gi|119399002|gb|EAW09430.1| Sec20 domain protein [Aspergillus clavatus NRRL 1]
  misc_feature (87)..(420): NCBI GI: 46107222 Blast Desc: FG00494.1 [Gibberella zeae PH-1]
  misc_feature: Useful for introducing or modulating the production of volatile compounds
MSAAALEKRFADLLQRVNLLQDAVNQLDDLIQRLATFDFQPASAPLAGPEDADVASELADEVSQVLREHEEDVELLREDVLDLHARAASTRHDRARLDDGLDRLARDLQRHRQAFRKAQVAARANLRQAQRRERHLMYASFAAPRSGPESPAPGATPDVTAPNVATATAAAGAAMRYSSRRGPPRASDMSQEERGIHANDDVTRAMRNAHALMRQELTRSNFAHQTLTESTAALNDLSDNYSDLQSMLGRSGALLSTLLKSQKTDTWYLQSALYLLLVTTAWLFFRRLLWGPTWWLLYLPLKLTIRTVGLTVALAMGSRRNPHPDAHLTDSGVPQASMNNQDVPTLQTGDPPEESEAVKQDELLLNKIGKEIDGSAKIKFPEEYEGEPILRDRQPGEVPNPKKRMMEDPPPGENRVKEEL

SEQ ID NO: 4510 - DNA, 1701 bp, Muscodor strobelii
  misc_feature: SGI EST ID NO. CUFF.11557.0
  misc_feature: Variant of the nucleotide sequence at SEQ ID NO 4508
cttctcccaccaagaccctactacggcagcatcatcgtccgtcgcccacgggatgagcttggctgcatctgtacaacaccactgtcgccaaaatgtctgctgccgcgcttgaaaagcggttcgcagacctgctgcagcgtgtgaacctgctgcaggacgctgtcaaccagctcgatgacctcatccagcgactggccaccttcgacttccagccggcatccgcgcctcttgccggccccgaggatgccgacgtcgcctcggagctggccgacgaggtcagccaggtgctgcgcgagcacgaggaagacgtcgagctgctccgcgaggatgtgctcgacctgcacgcccgcgccgcctcgacccgccacgacagggcccgcctcgacgacggcctcgaccgactggcccgcgacttgcagcgccatcgccaggccttcaggaaggcacaggtcgctgcgagggccaatctgcggcaagcccagcggcgggagcgacacctgatgtatgcctcgttcgccgcgccaaggtccggccccgagtctcccgcccccggtgctaccccggatgtgaccgcgcccaatgtcgccactgctaccgcggctgctggtgccgcgatgcgttactcgtcccgtcgcggcccgccacgcgcctccgacatgtcccaagaagagcgcggcatccacgccaacgacgacgtcacccgggccatgagaaacgcccatgctctgatgcgccaggagctcaccaggagcaactttgcccaccagaccttgaccgagtcaactgctgctctcaacgacctctccgacaactactctgaccttcagtcgatgctcggccgctccggtgccttgctgagcaccttgctcaagagccagaagaccgacacctggtatctgcaatccgctctctacctcctcctcgtcaccactgcctggctatttttccgtcgccttctctggggccctacgtggtggttactttacctgcccttgaagctcaccatcaggacagttggcttgaccgttgctctggccatgggctcgcgtcgcaaccctcaccccgacgcacatctgactgattctggtgtgccacaagccagtatgaacaaccaggacgtccccactctgcagacgggcgaccccccggaagagtcagaagctgtcaagcaggatgaattattgttgaataagatcggcaaggaaattgatggctcggccaagatcaagttcccagaggagtacgagggagaaccgattctaagggaccgtcagccgggggaggtgccaaatccaaagaagcggatgatggaagacccgcctccgggagagaacagagtcaaggaagagctctagcatctagacttcaaatccagacctgccctttggtttgcagttcgacttgatcacctgttcatactctagcctcgtatgaaagcctttcggttccattcactggcttataccaaagtagaccatgtaggactgtccgcccatggatagcatcttccttgaccctcgttgttgatttcaggacacgagtcgccacctcattgtaggttcttgatctgtcttccacatatctatagatcagtgatgcaagccacttgaacaaactcctcggtacagcgctcattcgtctcctctgtcaaatccctcgctagtttctcttggtatatgcaaagcgaacaacacttgtcca

SEQ ID NO: 4511 - DNA, 294 bp, Muscodor strobelii
  misc_feature: SGI cDNA ID NO. 561195
  misc_feature: Encodes the peptide sequence at SEQ ID NO 4512
atgattacgcggttcatcgtcgaagtgaacacaaagttcaaccccttctccgtgcgctcccgcgccacccgcctatttctctccaacctgcctcccaacgctcgcgccaacggcatggccatcaacaccaccctgctcccccgcacctccaccgagcccaactcgctgcaggtcaaattcaaggacggcaaggagatgaacatcgacagcgagtccatgggcatcaagggcatcatcgaggaggtagatagacactcgcgccagctgcagaagcaggccgatctcgccgactag

SEQ ID NO: 4512 - protein, 97 aa, Muscodor strobelii
  misc_feature: SGI Peptide ID NO. 561195
  misc_feature (1)..(97): NCBI GI: 85116952 Blast Desc: NCU00952 [Neurospora crassa OR74A] gi|28926949|gb|EAA35909.1| conserved [Neurospora crassa OR74A] gi|38567024|emb|CAE76322.1| ribosomal protein YmL44, [Neurospora
  misc_feature (1)..(96): NCBI GI: 171696160 Blast Desc: protein product [Podospora anserina] gi|170948322|emb|CAP60486.1| protein product [Podospora anserina]
  misc_feature (1)..(97): NCBI GI: 261356039 Blast Desc: conserved [Verticillium albo-atrum VaMs.102]
  misc_feature (2)..(96): NCBI GI: 39951913 Blast Desc: MGG_01599 [Magnaporthe grisea 70-15] gi|145020554|gb|EDK04683.1| MGG_01599 [Magnaporthe grisea 70-15]
  misc_feature (1)..(95): NCBI GI: 189203951 Blast Desc: conserved [Pyrenophora tritici-repentis Pt-1C-BFP] gi|187985410|gb|EDU50898.1| conserved [Pyrenophora tritici-repentis Pt-1C-BFP]
  misc_feature (1)..(95): NCBI GI: 169602849 Blast Desc: SNOG_04427 [Phaeosphaeria nodorum SN15] gi|111067067|gb|EAT88187.1| SNOG_04427 [Phaeosphaeria nodorum SN15]
  misc_feature (1)..(95): NCBI GI: 154299023 Blast Desc: mitochondrial ribosomal protein L44 [Botryotinia fuckeliana B05.10] gi|150857527|gb|EDN32719.1| mitochondrial ribosomal protein L44 [Botryotinia fuckeliana B05.10]
  misc_feature (39)..(95): NCBI GI: 156058105 Blast Desc: SS1G_04784 [Sclerotinia sclerotiorum 1980] gi|154702569|gb|EDO02308.1| SS1G_04784 [Sclerotinia sclerotiorum 1980]
  misc_feature (1)..(89): NCBI GI: 255713982 Blast Desc: KLTH0D12914p [Lachancea thermotolerans] gi|238934653|emb|CAR22835.1| KLTH0D12914p [Lachancea thermotolerans]
  misc_feature (1)..(90): NCBI GI: 196049215 Blast Desc: protein product [Candida glabrata]
MITRFIVEVNTKFNPFSVRSRATRLFLSNLPPNARANGMAINTTLLPRTSTEPNSLQVKFKDGKEMNIDSESMGIKGIIEEVDRHSRQLQKQADLAD

SEQ ID NO: 4513 - DNA, 3058 bp, Muscodor strobelii
  misc_feature: SGI EST ID NO. CUFF.11890.0
  misc_feature: Variant of the nucleotide sequence at SEQ ID NO 4511
tctcaggtccccaacctagtacataatgtacctgaatacatgtgcctacaggtgactacgtacctgccttagcaaccctgatttcaaagtgcagaaaataggaaaaccttccgacatcgacatcatccccaagtaacgcgcaacgccgggatattgacgaccacggctccagcaaattcatatcccactccgcatagccctgccgtagccgaatacctcaagcccacgcggcaccgcatgcccatccgcccatccgcccatcatgattacgcggttcatcgtcgaagtgaacacaaagttcaaccccttctccgtgcgctcccgcgccacccgcctatttctctccaacctgcctcccaacgctcgcgccaacggcatggccatcaacaccaccctgctcccccgcacctccaccgagcccaactcgctgcaggtcaaattcaaggacggcaaggagatgaacatcgacagcgagtccatgggcatcaagggcatcatcgaggaggtagatagacactcgcgccagctgcagaagcaggccgatctcgccgactagacacgacacacccgcgcccagtcctccatggtccatgctgccatttcccctcgctccgaccatatagacatatatgtacctaggtatcatgtcgccagctacctaccatgtatatacttggcagatgggtacctacatcctctctgcacaacgcggcatccactcatgaattgtacgctacccatagacttgacttgtaaaccgagcgggccaaaggcaacttctattccagcctgggttagcgagaggccaggggcgtcaggcaggcaggcaccacgtagttcatgtaaagtacattctgtttatagctttccacatttagcatttacggctatcggcttggctttggctccatgcgcccagtatctattcgcccccttttcctctctttaatctttgttcgcctccttttgggataccgtccatgtagtacgaaccgaaaacaaaaagcagagtacgctgcggccgaggaccaacgaagtggcgtgcagggtcagtattggaaacccgccgccacccgtcgccgacccctcccgtcttcgccttgccttaggcggcagcgccgctgatgaagaaccacttatcgatggagctgtcgatcttctcgggcgccaggttctcgttggccggcagtggaggcagctggtcgggcgtgacgcggctgggcgagtgcgacacggccaggttggtgctgcgaggtaggcgttagtctccttgaacggaatccctctcgctgtgcggtcagggtaagtcttgggtacgtacgtcgaaatgccaccaggttgggtcttgcccgtgatgagcttctcccaggcctcggcgcactcatgaatgacatccatagcgtagctgtgcaccgcgtcagtatcctgcgggagtcattggcccgggggggaggcacctcttgttcttgcactcgccggtgaaggcgaactggttctcgggctttccgtcggggatcttgtagatgcggaaccactcgttggtggcacgcagaagacccgggaggtggcgctcgacatcctcgacgtcgttgagcttgggagcgagggggtcgttgacgtctacgacaatgaccttccagtccgtctcctcctcgtcgagcagggccatgacaccgaggaccttgacctgcttgacctggccgacgtagcccacgagctcgccaatctcgcagacatcgagcgggtcgttgtcgcccttggccttggtctcggggtggatggcgttggggtcctcccaggtctggacggggcaaggggtcagaacgagttgtccgctggagaaggctcgggctggaggctggagactggagatcgggcacggggcacggggcacggggaacgggggccggggccaatgctcacctgagggaaggcgccgtagttccagaggtagcccttgtgggggaagcagttgcggacgtatcggagcttgcccttcttgatgtcctgcttgatggggttgagaagctcatccttggagatctggcggcagacgggagggcggtgtcagcacaggcggtgtcccagacggggtgtcagacgggggagaggggctggaatacctcgagcttggcattggtccaccggggaatctccacaatcatgttgaggatggtctgctcctggttggcgtagagcgggatgtcgtggaagggggagacggggacgccatccttctcgatgtagacgcggtgctcgagcgtgttgggagcggcgaccttgcggacgccgtactgggaggccatttcgtggggcgcgagggtcctgtgcaggttggagtctagcttcgacgaggccgaacccgagaagtggcgggcgagctgagctgagcgttgggacgctatgttgccggccagagatagagacacagaggtgcgatgggagggcagtggtagaggcggaggaggagaggagaaaggaaaaggaaaaggaggatggagacggcagagaggcagagccgtgcgtgataagagccggcgtgcgttgaagatctcagcgcgcgaggcggggtgggaagcagcagcggtgggacgagggggaggggtcctcaatcgccaaaacgggcggccacaagagcctgctgcgtgggcagccgggctcgcctgcgaagatgtgttcctggcccagaaacggcccgccaggctgtcgtgattggctccgcgcgcttgtcttactagtgttgccgaccaggagagcccttttcgcgcccaccgatgacgatacactcctcccgtctgctgtgccagactctgcatgtcgctcactctacctttgtctggctgactctgcgcgaacacgacacgaccccgttccaagaccgctgccgtcgccctgcggatcccaaatcagcgccttactcgagtcaaagggcgtgccagaaataggtcccttgatgttgcggttgctattaataatagtgtggcaataatacaattaggaatacaattaggaatacaatcgggtcgtgtactagtaatctcaagcttcgtcgtctgtc

SEQ ID NO: 4514 - DNA, 873 bp, Muscodor strobelii
  misc_feature: SGI cDNA ID NO. 561196
  misc_feature: Encodes the peptide sequence at SEQ ID NO 4515
atggcctcccagtacggcgtccgcaaggtcgccgctcccaacacgctcgagcaccgcgtctacatcgagaaggatggcgtccccgtctcccccttccacgacatcccgctctacgccaaccaggagcagaccatcctcaacatgattgtggagattccccggtggaccaatgccaagctcgagatctccaaggatgagcttctcaaccccatcaagcaggacatcaagaagggcaagctccgatacgtccgcaactgcttcccccacaagggctacctctggaactacggcgccttccctcagacctgggaggaccccaacgccatccaccccgagaccaaggccaagggcgacaacgacccgctcgatgtctgcgagattggcgagctcgtgggctacgtcggccaggtcaagcaggtcaaggtcctcggtgtcatggccctgctcgacgaggaggagacggactggaaggtcattgtcgtagacgtcaacgaccccctcgctcccaagctcaacgacgtcgaggatgtcgagcgccacctcccgggtcttctgcgtgccaccaacgagtggttccgcatctacaagatccccgacggaaagcccgagaaccagttcgccttcaccggcgagtgcaagaacaagagctacgctatggatgtcattcatgagtgcgccgaggcctgggagaagctcatcacgggcaagacccaacctggtggcatttcgaccaccaacctggccgtgtcgcactcgcccagccgcgtcacgcccgaccagctgcctccactgccggccaacgagaacctggcgcccgagaagatcgacagctccatcgataagtggttcttcatcagcggcgctgccgcctaa

SEQ ID NO: 4515 - protein, 290 aa, Muscodor strobelii
  misc_feature: SGI Peptide ID NO. 561196
  misc_feature (47)..(231): Pfam Id: PF00719 Pfam Desc: Inorganic pyrophosphatase
  misc_feature (1)..(290): NCBI GI: 39951911 Blast Desc: inorganic pyrophosphatase [Magnaporthe grisea 70-15] gi|145020555|gb|EDK04684.1| inorganic pyrophosphatase [Magnaporthe grisea 70-15]
  misc_feature (1)..(290): NCBI GI: 256734539 Blast Desc: [Nectria haematococca mpVI 77-13-4]
  misc_feature (1)..(290): NCBI GI: 261356038 Blast Desc: inorganic pyrophosphatase [Verticillium albo-atrum VaMs.102]
  misc_feature (1)..(290): NCBI GI: 46107226 Blast Desc: FG00496.1 [Gibberella zeae PH-1]
  misc_feature (1)..(290): NCBI GI: 156058103 Blast Desc: inorganic pyrophosphatase [Sclerotinia sclerotiorum 1980] gi|154702568|gb|EDO02307.1| inorganic pyrophosphatase [Sclerotinia sclerotiorum 1980]
  misc_feature (1)..(290): NCBI GI: 164428710 Blast Desc: inorganic pyrophosphatase [Neurospora crassa OR74A] gi|52783045|sp|Q6MVH7.1|IPYR_NEUCR RecName: Full=Inorganic pyrophosphatase; AltName: Full=Pyrophosphate phospho-hydrolase;
  misc_feature (1)..(290): NCBI GI: 116181682 Blast Desc: inorganic pyrophosphatase [Chaetomium globosum CBS 148.51] gi|88185766|gb|EAQ93234.1| inorganic pyrophosphatase [Chaetomium globosum CBS 148.51]
  misc_feature (5)..(289): NCBI GI: 238484693 Blast Desc: inorganic diphosphatase, [Aspergillus flavus NRRL3357] gi|220701635|gb|EED57973.1| inorganic diphosphatase, [Aspergillus flavus NRRL3357]
  misc_feature (3)..(289): NCBI GI: 261205034 Blast Desc: inorganic pyrophosphatase [Ajellomyces dermatitidis SLH14081] gi|239592313|gb|EEQ74894.1| inorganic pyrophosphatase [Ajellomyces dermatitidis SLH14081]
  misc_feature (5)..(289): NCBI GI: 119492471 Blast Desc: inorganic diphosphatase, [Neosartorya fischeri NRRL 181] gi|119411761|gb|EAW21704.1| inorganic diphosphatase, [Neosartorya fischeri NRRL 181]
  misc_feature (1)..(290): SWISSPROT Homolog: EC 3.6.1.1 Inorganic diphosphatase
MASQYGVRKVAAPNTLEHRVYIEKDGVPVSPFHDIPLYANQEQTILNMIVEIPRWTNAKLEISKDELLNPIKQDIKKGKLRYVRNCFPHKGYLWNYGAFPQTWEDPNAIHPETKAKGDNDPLDVCEIGELVGYVGQVKQVKVLGVMALLDEEETDWKVIVVDVNDPLAPKLNDVEDVERHLPGLLRATNEWFRIYKIPDGKPENQFAFTGECKNKSYAMDVIHECAEAWEKLITGKTQPGGISTTNLAVSHSPSRVTPDQLPPLPANENLAPEKIDSSIDKWFFISGAAA

SEQ ID NO: 4516 - DNA, 2932 bp, Muscodor strobelii
  misc_feature: SGI EST ID NO. CUFF.11891.1
  misc_feature: Variant of the nucleotide sequence at SEQ ID NO 4514
gacagacgacgaagcttgagattactagtacacgacccgattgtattcctaattgtattcctaattgtattattgccacactattattaatagcaaccgcaacatcaagggacctatttctggcacgccctttgactcgagtaaggcgctgatttgggatccgcagggcgacggcagcggtcttggaacggggtcgtgtcgtgttcgcgcagagtcagccagacaaaggtagagtgagcgacatgcagagtctggcacagcagacgggaggagtgtatcgtcatcggtgggcgcgaaaagggctctcctggtcggcaacactagtaagacaagcgcgcggagccaatcacgacagcctggcgggccgtttctgggccaggaacacatcttcgcaggcgagcccggctgcccacgcagcaggctcttgtggccgcccgttttggcgattgaggacccctccccctcgtcccaccgctgctgcttcccaccccgcctcgcgcgctgagatcttcaacgcacgccggctcttatcacgcacggctctgcctctctgccgtctccatcctccttttccttttcctttctcctctcctcctccgcctctaccactgccctcccatcgcacctctgtgtctctatctctggccggcaacatagcgtcccaacgctcagctcagctcgcccgccacttctcgggttcggcctcgtcgaagctagactccaacctgcacaggaccctcgcgccccacgaaatggcctcccagtacggcgtccgcaaggtcgccgctcccaacacgctcgagcaccgcgtctacatcgagaaggatggcgtccccgtctcccccttccacgacatcccgctctacgccaaccaggagcagaccatcctcaacatgattgtggagattccccggtggaccaatgccaagctcgagatctccaaggatgagcttctcaaccccatcaagcaggacatcaagaagggcaagctccgatacgtccgcaactgcttcccccacaagggctacctctggaactacggcgccttccctcagacctgggaggaccccaacgccatccaccccgagaccaaggccaagggcgacaacgacccgctcgatgtctgcgagattggcgagctcgtgggctacgtcggccaggtcaagcaggtcaaggtcctcggtgtcatggccctgctcgacgaggaggagacggactggaaggtcattgtcgtagacgtcaacgaccccctcgctcccaagctcaacgacgtcgaggatgtcgagcgccacctcccgggtcttctgcgtgccaccaacgagtggttccgcatctacaagatccccgacggaaagcccgagaaccagttcgccttcaccggcgagtgcaagaacaagagctacgctatggatgtcattcatgagtgcgccgaggcctgggagaagctcatcacgggcaagacccaacctggtggcatttcgaccaccaacctggccgtgtcgcactcgcccagccgcgtcacgcccgaccagctgcctccactgccggccaacgagaacctggcgcccgagaagatcgacagctccatcgataagtggttcttcatcagcggcgctgccgcctaaggcaaggcgaagacgggaggggtcggcgacgggtggcggcgggtttccaatactgaccctgcacgccacttcgttggtcctcggccgcagcgtactctgctttttgttttcggttcgtactacatggacggtatcccaaaaggaggcgaacaaagattaaagagaggaaaagggggcgaatagatactgggcgcatggagccaaagccaagccgatagccgtaaatgctaaatgtggaaagctataaacagaatgtactttacatgaactacgtggtgcctgcctgcctgacgcccctggcctctcgctaacccaggctggaatagaagttgcctttggcccgctcggtttacaagtcaagtctatgggtagcgtacaattcatgagtggatgccgcgttgtgcagagaggatgtaggtacccatctgccaagtatatacatggtaggtagctggcgacatgatacctaggtacatatatgtctatatggtcggagcgaggggaaatggcagcatggaccatggaggactgggcgcgggtgtgtcgtgtctagtcggcgagatcggcctgcttctgcagctggcgcgagtgtctatctacctcctcgatgatgcccttgatgcccatggactcgctgtcgatgttcatctccttgccgtcctctttccgggccacgctgtcagtacacgatgccgttctctgcggggaatggttggagagtggttggggacgcactgaatttgacctgcagcgagttgggctcggtggaggtgcgggggagcagggtggtgttgatggccatgccgttggcgcgagcgttgggaggcaggttggagagaaataggcgggtggcgcgggagcgcacggagaaggggttgaactttgtgttcacttcgacgatgaaccgcgtaatcatgatgggcggatgggcggatgggcatgcggtgccctggagcaagggacaagcagcgggttagcaagtgtcgagccgtcgtccgagtcgactgcgggcgagacgagtcctgggcgagcagcctcgagaaagtcggcggaagagcgggaacggcgggtgacgtacgcgtgggcttgaggtattcggctacggcagggctatgcggagtgggatatgaatttgctggagccgtggtcgtcaatatcccggcgttgcgcgttacttggggatgatgtcgatgtcggaaggttttcctattttctgcactttgaaatcagggttgctaaggcaggtacgtagtcacctgtaggcacatgtattcaggtacattatgtactaggttggggacctgaga

SEQ ID NO: 4517 - DNA, 1542 bp, Muscodor strobelii
  misc_feature: SGI cDNA ID NO. 561197
  misc_feature: Encodes the peptide sequence at SEQ ID NO 4518
atgaccaaccatctgtcccagatcgcctcccagctgcctggctacctgactgagcattccaacttggccaagaggagacatgactccactgctccccttgacacttcggacctttcccagttctttgactttaagggcttctacggcgaacgggacgcttccagtcccgccgctcgctccaggtccgatgcttcctccgatccgggcctcacctctggcccctccgaggacgacggagcttcccctggtcctagcattgattctcttcacatcgaggacggtctccgtgatgacatcaagaaggtgaggcaacaagatgatcgcttcaccattccccagcgcgagatccgccccaagggaggatacccacacaagattcatcttgacatcccaagccctactcgctcaggccctggcatgatttctccgccggcgtcacctccgtggtgtgatcgctctagggactccactttcccataccgtggtcgccgcagtggcccactgcctgatccggtcaaggttgccgagatgcgcaaaatcggtgcttgctatcgatgcaaaacgcgcaaagttgtgtgcgatggccagtctccatgtgaaggatgtgcgaaggcgtcgaaaggagacgccaatgttgcgtgccaactatgcaatcgtagtccactgaacaagcctgtgtttccgttgctattgaaagacctcgaaaccagaaggtaccgccatcatcagacgtcacgaagcctgaaccaacccatcaagacacctctcaccgtcgtctttgagacgcatcaccaacaagatcatggtctttgcatttttgtcaatgaagactatcacaagcagattgagacttcaaatcgccactatagcctttgcaatgatcctaattttgagaataaaatcgttgcctgggcatcatctcatatgcgccagaagggtgtctcggactttccatcggccctagatgagattgtcaggcattaccacgaaaatgtacagaaagatctaaacatgacagagctcacccgaaagacttattcgctacgatgcttgttctatatatggaagcagaacaatttctggtgtcggatgcaagatggcacctacaaagagattcctcgtgaaatacaccaagacataaagattattgtcgctagaagtatgcaaagtcttgaagggtttattatcgactctgtgaaaaccagagctgcaaaatccggtgattcgctgcgcatacctcactgggcatgtttgatggaaatgattgttgtgtatcttgacattctctgtcttccagagacaatgacctcttgggtcgaccgaaaccatgttgtagacatgctaaatggtgcggctatcatgtgcgagctgcttgcgaaaaagaaagcggaatcgacgtctcgcgaacgtaatgcggatcgctatttggcatgttattttgatagggctgagagcctgcaagtcgatttctgtgagttcggccaaatttccagacagaaaccccagagtagtgcttatgacgcgttgcagatgagagcataa

SEQ ID NO: 4518 - protein, 513 aa, Muscodor strobelii
  misc_feature: SGI Peptide ID NO. 561197
  misc_feature (38)..(428): NCBI GI: 261357376 Blast Desc: conserved [Verticillium albo-atrum VaMs.102]
  misc_feature (96)..(429): NCBI GI: 46108198 Blast Desc: FG00981.1 [Gibberella zeae PH-1]
  misc_feature (64)..(429): NCBI GI: 256735187 Blast Desc: NECHADRAFT_74774 [Nectria haematococca mpVI 77-13-4]
  misc_feature (130)..(425): NCBI GI: 256735188 Blast Desc: NECHADRAFT_74775 [Nectria haematococca mpVI 77-13-4]
  misc_feature (84)..(237): NCBI GI: 156065987 Blast Desc: [Sclerotinia sclerotiorum 1980] gi|154691863|gb|EDN91601.1| [Sclerotinia sclerotiorum 1980]
  misc_feature (161)..(214): NCBI GI: 39945384 Blast Desc: MGG_04674 [Magnaporthe grisea 70-15] gi|145021404|gb|EDK05533.1| MGG_04674 [Magnaporthe grisea 70-15]
  misc_feature (131)..(214): NCBI GI: 156064325 Blast Desc: SS1G_00170 [Sclerotinia sclerotiorum 1980] gi|154691032|gb|EDN90770.1| SS1G_00170 [Sclerotinia sclerotiorum 1980]
  misc_feature (162)..(310): NCBI GI: 169771607 Blast Desc: [Aspergillus oryzae RIB40] gi|83768132|dbj|BAE58271.1| protein product [Aspergillus oryzae]
  misc_feature (162)..(310): NCBI GI: 238485812 Blast Desc: C6 finger domain protein, [Aspergillus flavus NRRL3357] gi|220699023|gb|EED55362.1| C6 finger domain protein, [Aspergillus flavus NRRL3357]
MTNHLSQIASQLPGYLTEHSNLAKRRHDSTAPLDTSDLSQFFDFKGFYGERDASSPAARSRSDASSDPGLTSGPSEDDGASPGPSIDSLHIEDGLRDDIKKVRQQDDRFTIPQREIRPKGGYPHKIHLDIPSPTRSGPGMISPPASPPWCDRSRDSTFPYRGRRSGPLPDPVKVAEMRKIGACYRCKTRKVVCDGQSPCEGCAKASKGDANVACQLCNRSPLNKPVFPLLLKDLETRRYRHHQTSRSLNQPIKTPLTVVFETHHQQDHGLCIFVNEDYHKQIETSNRHYSLCNDPNFENKIVAWASSHMRQKGVSDFPSALDEIVRHYHENVQKDLNMTELTRKTYSLRCLFYIWKQNNFWCRMQDGTYKEIPREIHQDIKIIVARSMQSLEGFIIDSVKTRAAKSGDSLRIPHWACLMEMIVVYLDILCLPETMTSWVDRNHVVDMLNGAAIMCELLAKKKAESTSRERNADRYLACYFDRAESLQVDFCEFGQISRQKPQSSAYDALQMRA

SEQ ID NO: 4519 - DNA, 2877 bp, Muscodor strobelii
  misc_feature: SGI EST ID NO. CUFF.11529.0
  misc_feature: Variant of the nucleotide sequence at SEQ ID NO 4517
cggaaaagccttgaagttataaccttgtctagtatcgcctatcagctaagctaagggtatataagagagatatataaagggtttatgatgcccttcgactctcaagatgggagaacgaaaggcaaacagcccccaaattcctccattctactcctttgtgtgtctcaggagacagcatctagaaacatcagcctcggggtgggcatgccggcgttcgacggtgacggtgtgcatctacctccaacgtgacggttcttatgcggagaccccctgcacaccccgaagttgtcaatttcggtcaacaagcgccatctgattcgtcaatgcaaagtcttggctgagttgagcagccaatcagcgtcaacctcgtctctatgcccgtctgggagctcgcaggagccgacaagtggtcatccctcgagctgctttcatgtctcaagactcatttgcgacttcacgatttgtgactttgcactcgaccttacttatcgcaatttcccaccccacaggtacccaaggaacccgagtacccgctgctcttcgctgattcgtgttgcctatgcgcctggcaaggaacccgtgcctccgacagccgacttacacacttacacggaccacacacgcaaccatgaccaaccatctgtcccagatcgcctcccagctgcctggctacctgactgagcattccaacttggccaagaggagacatgactccactgctccccttgacacttcggacctttcccagttctttgactttaagggcttctacggcgaacgggacgcttccagtcccgccgctcgctccaggtccgatgcttcctccgatccgggcctcacctctggcccctccgaggacgacggagcttcccctggtcctagcattgattctcttcacatcgaggacggtctccgtgatgacatcaagaaggtgaggcaacaagatgatcgcttcaccattccccagcgcgagatccgccccaagggaggatacccacacaagattcatcttgacatcccaagccctactcgctcaggccctggcatgatttctccgccggcgtcacctccgtggtgtgatcgctctagggactccactttcccataccgtggtcgccgcagtggcccactgcctgatccggtcaaggttgccgagatgcgcaaaatcggtgcttgctatcgatgcaaaacgcgcaaagttgtgtgcgatggccagtctccatgtgaaggatgtgcgaaggcgtcgaaaggagacgccaatgttgcgtgccaactatgcaatcgtagtccactgaacaagcctgtgtttccgttgctattgaaagacctcgaaaccagaaggtaccgccatcatcagacgtcacgaagcctgaaccaacccatcaagacacctctcaccgtcgtctttgagacgcatcaccaacaagatcatggtctttgcatttttgtcaatgaagactatcacaagcagattgagacttcaaatcgccactatagcctttgcaatgatcctaattttgagaataaaatcgttgcctgggcatcatctcatatgcgccagaagggtgtctcggactttccatcggccctagatgagattgtcaggcattaccacgaaaatgtacagaaagatctaaacatgacagagctcacccgaaagacttattcgctacgatgcttgttctatatatggaagcagaacaatttctggtgtcggatgcaagatggcacctacaaagagattcctcgtgaaatacaccaagacataaagattattgtcgctagaagtatgcaaagtcttgaagggtttattatcgactctgtgaaaaccagagctgcaaaatccggtgattcgctgcgcatacctcactgggcatgtttgatggaaatgattgttgtgtatcttgacattctctgtcttccagagacaatgacctcttgggtcgaccgaaaccatgttgtagacatgctaaatggtgcggctatcatgtgcgagctgcttgcgaaaaagaaagcggaatcgacgtctcgcgaacgtaatgcggatcgctatttggcatgttattttgatagggctgagagcctgcaagtcgatttctgtgagttcggccaaatttccagacagaaaccccagagtagtgcttatgacgcgttgcagatgagagcataagtcgttgccgtgttgatttggatgacctcctgattcaacgcctggccccacagccgaaaatccgccaacagaaacgacgtagaatacatacataacatgctctcgtggcaagctatgtattcacgatgattttctttttgaaggggtgaccttttacctgtattgggcatgaacatgatcttccggtcagattgaaaattcgtagtggagttcaggagttagggatggtcgagatacccatgcagtttttctgggctactaagggacgtttcgcatacgacgcgcatgtataacgaagattgaaacgacggcgtgcttaatgtgttattggaaagcgagttgtcgcttctttgcagtgttcctttccctagagtgaggctggagaattttgtcgtaaaaactatcgcataacgtcatcaccgaaaccccagccacgagagtagaaaatggctgcccagtaacgaatgcgaccgaaaatctggcaatactcaatttcaattttcaacgagctctgattctttcacttgcacgacaaccttaatctttctgcgggtctttctgctttcatcttgcaactttccgacattcttgaacgttgctgccaaggcgtcgcagtcgacggcgtcaactatatttgaacttaacttaacagtaatttcgagctctggtacttcttgtgcctttaagaaccgtgcgttgaatctata

SEQ ID NO: 4520 - DNA, 1863 bp, Muscodor strobelii
  misc_feature: SGI cDNA ID NO. 561199
  misc_feature: Encodes the peptide sequence at SEQ ID NO 4521
atgctgggtgtagcaagattttcgtttctagctcttgcggtgtcatcaacatgcctagggaagacaccgaacgtcgtcttcatctttacggatgatcaagatcttcgccatgggtccttggactatatgccaatactgcaaaaggaactggtcgcgaagggcacatcgttcacgaaccactttgcaactctcgcgcaatgctgtcctagcaggtcatcattgttccgtggtcaggctggacacaatacgaacataaccaatgttcaagcacccgggggcaattatgataaatgggtagcatcagaacaggacaaagattatctgccccattggctggtcgacgctggatataatgcagagtatctcggaaaattcctcaatggctataacattgcgaactatgcgactaagccaaagggatggacgcacgtagatgtaacgaccgatccttatacatattcttacaataatgttgtcatgagcgccgatgggaagacaccagtggcatatcacggataccaccaaacagatgtcttgagagcaaaggcacttgatagaataaagtatttaagcggccaagctaaaccgttttacttgactattgcgcctactacgcctcacttacctgccgtacctttgaagaggcacagccaactgttccttgacaagaaagcaccgaggccagtaaatttcaatcctgacaatgcaatccattcgaataccattggctgggtcgcggacgtgccacgcatgaccgcaagtcaaatcaatgcaaccgacgagctcttccggaataggatccaaggcctgcaaggtgttgatgagataatagaggatgttgttgcacttctagccaacctggacatcttggacaatacatatatcgtctattcaacagacaatggttatcatctaggcaatcatcgccttccccatgggaaaactttaccgtttgtggaagactcaaacctgcccctgattgttcgcggccccggcgtccctgcaggcaagacatcgaaacttccaagtgcccacctcgatctggcacccacgtttctcgagattgccggcgtcgccaagaataattggcccacgttccttgatggccgcagccttcttacaaactggaagaatcccaatgcagctcaaccggcccagtgcggcgcagcagcgaatgatgatgcacctgaaatcctcaacgtggagttctggggcaattctggtagcgaagcaccagttcaggatgcgcgcaacacgtacaaatcattgcgaattgtgagtgccaccagtacaaatggcgacattgtgagctatctatattctcgatggtgcaccaacgaaacggagttatatgacacagtggcggacccatacgagatcaacaacctggcacttaaccccgatgcaggaacgaagcgcttgctctcaagactaaatgctttgcttttagcgacgaagtcatgtgccgaaataacctgtcgcaatccctggcgcctgttacagcctgagcctgagcgacgtgccatcgttgcaaaggctggaacactcacgatttcgtgtcttggggacgcactcaagccggaatacgacgactttttcgcaagcatcccaaacgtcgcctttcaagaatgtcgtgaagtccaattgattgacaatgagcgaccttattggccatctaatttaggaggcggactaggtctcgactaccggacttcacctgaccgatatgtcacacatactcctaatcctgctaaaaaggtacaaggaaatgcggaacagcaaggaacaaaggctcagagaaatgtaacactggaggagattcaacaaaaggctaaggtactgaccgcagagcagctgggctaa

SEQ ID NO: 4521 - protein, 620 aa, Muscodor strobelii
  misc_feature: SGI Peptide ID NO. 561199
  misc_feature (21)..(462): Pfam Id: PF00884 Pfam Desc: Sulfatase
  misc_feature (23)..(620): NCBI GI: 145604811 Blast Desc: MGG_07920 [Magnaporthe grisea 70-15] gi|145012735|gb|EDJ97389.1| MGG_07920 [Magnaporthe grisea 70-15]
  misc_feature (7)..(619): NCBI GI: 145615374 Blast Desc: MGG_05540 [Magnaporthe grisea 70-15] gi|145022215|gb|EDK06235.1| MGG_05540 [Magnaporthe grisea 70-15]
  misc_feature (10)..(555): NCBI GI: 119181412 Blast Desc: CIMG_05816 [Coccidioides immitis RS]
  misc_feature (10)..(555): NCBI GI: 240108949 Blast Desc: arylsulfatase precursor, [Coccidioides posadasii C735 delta SOWgp]
  misc_feature (4)..(555): NCBI GI: 169598524 Blast Desc: SNOG_02066 [Phaeosphaeria nodorum SN15] gi|160704411|gb|EAT90278.2| SNOG_02066 [Phaeosphaeria nodorum SN15]
  misc_feature (10)..(555): NCBI GI: 258572460 Blast Desc: conserved [Uncinocarpus reesii 1704] gi|237905262|gb|EEP79663.1| conserved [Uncinocarpus reesii 1704]
  misc_feature (20)..(571): NCBI GI: 242805691 Blast Desc: arylsulfatase, [Talaromyces stipitatus ATCC 10500] gi|218715209|gb|EED14631.1| arylsulfatase, [Talaromyces stipitatus ATCC 10500]
  misc_feature (23)..(563): NCBI GI: 169779723 Blast Desc: [Aspergillus oryzae RIB40] gi|83773065|dbj|BAE63193.1| protein product [Aspergillus oryzae]
  misc_feature (24)..(555): NCBI GI: 121714837 Blast Desc: arylsulfatase, [Aspergillus clavatus NRRL 1] gi|119403184|gb|EAW13602.1| arylsulfatase, [Aspergillus clavatus NRRL 1]
  misc_feature (23)..(563): NCBI GI: 238500393 Blast Desc: arylsulfatase, [Aspergillus flavus NRRL3357] gi|220693184|gb|EED49530.1| arylsulfatase, [Aspergillus flavus NRRL3357]
  misc_feature (21)..(553): SWISSPROT Homolog: EC 3.1.6.1 Arylsulfatase
MLGVARFSFLALAVSSTCLGKTPNVVFIFTDDQDLRHGSLDYMPILQKELVAKGTSFTNHFATLAQCCPSRSSLFRGQAGHNTNITNVQAPGGNYDKWVASEQDKDYLPHWLVDAGYNAEYLGKFLNGYNIANYATKPKGWTHVDVTTDPYTYSYNNVVMSADGKTPVAYHGYHQTDVLRAKALDRIKYLSGQAKPFYLTIAPTTPHLPAVPLKRHSQLFLDKKAPRPVNFNPDNAIHSNTIGWVADVPRMTASQINATDELFRNRIQGLQGVDEIIEDVVALLANLDILDNTYIVYSTDNGYHLGNHRLPHGKTLPFVEDSNLPLIVRGPGVPAGKTSKLPSAHLDLAPTFLEIAGVAKNNWPTFLDGRSLLTNWKNPNAAQPAQCGAAANDDAPEILNVEFWGNSGSEAPVQDARNTYKSLRIVSATSTNGDIVSYLYSRWCTNETELYDTVADPYEINNLALNPDAGTKRLLSRLNALLLATKSCAEITCRNPWRLLQPEPERRAIVAKAGTLTISCLGDALKPEYDDFFASIPNVAFQECREVQLIDNERPYWPSNLGGGLGLDYRTSPDRYVTHTPNPAKKVQGNAEQQGTKAQRNVTLEEIQQKAKVLTAEQLG

SEQ ID NO: 4522 - DNA, 855 bp, Muscodor strobelii
  misc_feature: SGI cDNA ID NO. 561200
  misc_feature: Encodes the peptide sequence at SEQ ID NO 4523
atgctcgtcaaatctcttcttgccacggcagttgctgtcgcttcggttgctgccgagacggctccacagatcgacggctttaccaaaattcaagaatatgccttcaatggtaatgcaggtacactcatcgacgaaagtcgttggaatgtcatcaccggtcccaacagtgcaaacaatgaagcacaattataccaaagatctacagacaacctgatatataccaatgcgcaaactctcaaaatcattccgcggaagacagcgaatggaggctggacgtccgcgcgtattgagtctaaacagactttcacgcctccagatgggcgcaagactcgtcttcaggcaaagattcgttttgggggaaatgctgttggcaacaagcaaggtatatggcccgcattctggatgctaggcgactcgattcgtcacggcacgccgtggccacaatgtggagagatcgacattctcgagacggtcaacggccaaatgactggttatggtacagtccattgtgacgtgtacccaggtggtatctgcaatgaaggtacgggcctcggcggaaacatcggctttggggataatgcatggcacgagtggcgcgtgactattgatcgtacaccggcggcctggacggccgagactatcacttggttccgtgatggacaacaatactggcaagtaaccggggctagaatcaacaaccaagccgtctggaactcgctcgtgaacagccctctttacttcattctaaatgtggcggttggcggcaactggcccggtcagccaaacgcatcaactttaggtggagacggcagcgcaatggaagttgcctatgttgcgcagtaccagtccaactga

SEQ ID NO: 4523 - protein, 284 aa, Muscodor strobelii
  misc_feature: SGI Peptide ID NO. 561200
  misc_feature (59)..(279): Pfam Id: PF00722 Pfam Desc: Glycosyl hydrolases family 16
  misc_feature (124)..(158): Pfam Id: PF00722 Pfam Desc: Glycosyl hydrolases family 16
  misc_feature (5)..(283): NCBI GI: 242769808 Blast Desc: endo-1,3(4)-beta-glucanase, [Talaromyces stipitatus ATCC 10500] gi|218725045|gb|EED24462.1| endo-1,3(4)-beta-glucanase, [Talaromyces stipitatus ATCC 10500]
  misc_feature (1)..(281): NCBI GI: 46119371 Blast Desc: FG04768.1 [Gibberella zeae PH-1]
  misc_feature (21)..(283): NCBI GI: 145608022 Blast Desc: MGG_09733 [Magnaporthe grisea 70-15] gi|145015487|gb|EDK00024.1| MGG_09733 [Magnaporthe grisea 70-15]
  misc_feature (11)..(283): NCBI GI: 70986272 Blast Desc: endo-1,3(4)-beta-glucanase [Aspergillus fumigatus Af293] gi|66846259|gb|EAL86592.1| endo-1,3(4)-beta-glucanase, [Aspergillus fumigatus Af293] gi|159128225|gb|EDP53340.1| A1163]
  misc_feature (22)..(283): NCBI GI: 212542069 Blast Desc: endo-1,3(4)-beta-glucanase, [Penicillium marneffei ATCC 18224] gi|210066096|gb|EEA20189.1| endo-1,3(4)-beta-glucanase, [Penicillium marneffei ATCC 18224]
  misc_feature (5)..(283): NCBI GI: 119473375 Blast Desc: secreted glucosidase [Neosartorya fischeri NRRL 181] gi|119406739|gb|EAW16690.1| secreted glucosidase [Neosartorya fischeri NRRL 181]
  misc_feature (12)..(283): NCBI GI: 119474307 Blast Desc: secreted glucosidase [Neosartorya fischeri NRRL 181] gi|119407182|gb|EAW17132.1| secreted glucosidase [Neosartorya fischeri NRRL 181]
  misc_feature (18)..(282): NCBI GI: 145602777 Blast Desc: MGG_09861 [Magnaporthe grisea 70-15] gi|145011166|gb|EDJ95822.1| MGG_09861 [Magnaporthe grisea 70-15]
  misc_feature (22)..(283): NCBI GI: 70992959 Blast Desc: endo-1,3(4)-beta-glucanase [Aspergillus fumigatus Af293] gi|66848961|gb|EAL89290.1| endo-1,3(4)-beta-glucanase, [Aspergillus fumigatus Af293] gi|159130220|gb|EDP55333.1| A1163]
  misc_feature (5)..(283): NCBI GI: 116194890 Blast Desc: CHGG_04043 [Chaetomium globosum CBS 148.51] gi|88179956|gb|EAQ87424.1| CHGG_04043 [Chaetomium globosum CBS 148.51]
  misc_feature (22)..(282): SWISSPROT Homolog: EC 3.2.1.39 Glucan endo-1,3-beta-D-glucosidase
MLVKSLLATAVAVASVAAETAPQIDGFTKIQEYAFNGNAGTLIDESRWNVITGPNSANNEAQLYQRSTDNLIYTNAQTLKIIPRKTANGGWTSARIESKQTFTPPDGRKTRLQAKIRFGGNAVGNKQGIWPAFWMLGDSIRHGTPWPQCGEIDILETVNGQMTGYGTVHCDVYPGGICNEGTGLGGNIGFGDNAWHEWRVTIDRTPAAWTAETITWFRDGQQYWQVTGARINNQAVWNSLVNSPLYFILNVAVGGNWPGQPNASTLGGDGSAMEVAYVAQYQSN
